United States Patent Application Publication US 2005/0153317 A1 - sequence listing, part 19

SEQ ID NO: 83729 - DNA, 512 bp, Chicken  19866894380382_1
atcactgttggttttcttcccctttaactatcctaaggtttttgttctagtacttcatcagttattagtatctaaactgttctccactgaattcaggttccctaaaatttcaagtgcagcaatttcatttgagaatgagtatcattaaatgaaactgttgaattaaactatctcagaatgtgcagctataattttatataatgtttataatggcaatttcagccattgcagtaactcttgagtattttcagagtattttcaattcagctttttaaaaatataataattattataaatatmatctcaatgttctaaaattgtaaaatgtgaaagtgatgtcttgttttcttttgtaaacattaggaatacaagtaatctgttcaaatttaaacaaaaaaatatttcattggagtatgcaaaaatacttggatgacaaatctttaaaaattatcttgcctattgcaagaaaaaaatagaatactgtgttccagaagttgcagctgctatatcca

SEQ ID NO: 83730 - DNA, 600 bp, Chicken  19866894380397_1
ggaatggtatatagagagaaagattcacaatgatctaacacatgttataaattaatgaatctgttctaaaggtttgggggtcgccgctaggctggaagagctaccatattgtttctctggggcacattgcactggcactcactgaaaatgaaattgaagagctagatttacattcaattgacaccgtttctgtcctcagtcaacaagcagaatggactctcgctcaggtaagcacgttactgaatttgccactgaatgtatgtcctgtgggattaaagtgctggcattgcctgggaaacygatacagcattccctacccctgcctgctggttgtcttcagctgaggccaccacaaacgagagctggtaggtcagcactgatgtctgcttggctgttggcttccccagtgagatggccgagaggatgtcagtcagtattaatcataataattgcgatcaaacagtattaattgtggcggtgaccagtattccttagctcttacccaccgagtaataaaagaggtcagcagytcctctcacactggtccctgaagagatgctgctggtggaagatgcaggccttttctcactaagagtaatc

SEQ ID NO: 83731 - DNA, 600 bp, Chicken  19866894380397_2
agcacgttactgaatttgccactgaatgtatgtcctgtgggattaaagtgctggcattgcctgggaaacygatacagcattccctacccctgcctgctggttgtcttcagctgaggccaccacaaacgagagctggtaggtcagcactgatgtctgcttggctgttggcttccccagtgagatggccgagaggatgtcagtcagtattaatcataataattgcgatcaaacagtattaattgtggcggtgaccagtattccttagctcttacccaccgagtaataaaagaggtcagcagytcctctcacactggtccctgaagagatgctgctggtggaagatgcaggccttttctcactaagagtaatcattgaagagatggcatacaccccaaccctagcattcactgccctggaagcctaagttgatagccagtatgccacttggatgctatgttcctttcatcttccttttgatttctgattacatcaatagattttcatattcaattgagagaaagtgacagttaagtaaggcaagacaacctgatattagaaaacctaaataattcatattaatcctgttaattaatttgcatt

SEQ ID NO: 83732 - DNA, 599 bp, Chicken  19866894380405_1
  misc_feature (1)..(19): n is any nucleotide
nnnnnnnnnnnnnnnnnnntcacatccaaagcaatggatctgttcatgaccctgtgggcttgacctgcctatagcagcaaacgcatgccactgccaacattttaagagctggtgatcacaatgggaagtgtttcaggggtttcactgaataatgagaatgactatttcactactttaaaaaataccagaggtattcaaaaagtttccatttgtgattaattactgtgactttcaaagtgggagatctttaaacctttcttcacaagtgaattatgaaatatgtttgctgcacacatcttytcaataacttcagtagtaaacaactacactgtaaataaaagaactgccaatctcatcacagggagattatttaacaggaaaaaaagaacagcaaatcactgacattcttgctctaatttgtgaaatcatgagagtttatgccagccactggtattattttactttacataatgtacccagatggcatggtaatgggagcaataaaaataagtttcctatttcacctctaatcatttgaatcgttaaaaacttactcaaggtttttaagatgatttctgggacctactggactcttgctt

SEQ ID NO: 83733 - DNA, 600 bp, Chicken  19866894380411_1
agatgttgaactccaaactgcttgtgggtatatgaatattgtgccaagctctgaaacttttctaacgtttaatcagagttgtaagcatgtggtttttccttttgttctttttctttttaatggaaaaatgactcttggaagaactgactcttactgaaggagtttttctgtgtgcctgggtgaattactgcagtgtaccagtgaaggaaaacagtgcctaaacttgtttggctttttttttcctagagttatcagatccttaatgtcataaaattgtttctgctttcattagatcataamatttacgtatctgtattatttgcacgcactttatagatccaggagcctaaactgtgttttctgctgcggaggtggatataaatgcttgtttgtgctgttctaagcaaatgtgaaactgttttagtaagaaacgtcataagtaaaattaacatgccaaattttcttgcctttttctagaggagtctggcttagcccgatgcgtttgtgagctggtgcctgggaaggagctgcagctggttgtgcaggatgtgatggaggatggctcagcactcttcagtggcagctgtgtcagaggcttga

SEQ ID NO: 83734 - DNA, 600 bp, Chicken  19866894380416_1
acaagcagcagagataccccgtatgttactccttatatttggaatgatatcaccataaaactacactccttttctgtatttttcaatatctgattcagctgtgaatcatataaaaaacaataattaaacatgcattttatgtgatacactgacacattgcgctttccttataagctataagggacaaattaaatttctatattgaaaacttcttcacaatttaaaaaaaagcagaactggatatttgaacaagtaatttcacagggtctacatgattttggaactccaggagagtgtatrtatacatgcagtcactgattttacagatgctgggtaggatattttagcagggtattaccttcactattgtctgaaattgaattctcatattcagcctttcaaattagtgtgaaataggttttttcttcacctgcagagggagaaatggcatgctctgtctgtgctgtaattctgtttattgattatctcctcctataacctcagattttgcatttttcaactttgcattctttccccaattaaactcttgagaaaagccttctcaaccttgctagtatgttatttgatttattaattatc

SEQ ID NO: 83735 - DNA, 600 bp, Chicken  19866894380419_1
ccatctgttggtgtaccatgcacagaagggctgcaagcagcgtggaaggcaggatcagaatccaactgatcacaatgaagaggcggaatatcctgaaaaagatgagttaacaggcagtagggcaaagcgggctccaagcagagagactgggaataacgaacactgggagggaaatgaaggaggagagagtagagctaaaagataactagttaaatgagacactgcagtaaaatgatgattcaaaaagacctgcttctttctggaccacattatctgtgacaaaaggggataactgctccytgtcttagagttggaaaagacatcgcagtagcaccatgctcatatctgccactgcacctcaaatgacttaggtatggtatggagatgaagcacagaagaggaatagagcttgctaaggggtggtgggattgtctttcttgatgggcagtcatgtcacagactgacctagccacagaatggggagaggagtttgtggcttcccagagcttctccagttcgtgcacttctcccatgtctattcctgcatgaattagcctgtgaaaccctcttagaactcatcttttcctcaggtccaatgca

SEQ ID NO: 83736 - DNA, 600 bp, Chicken  19866894380431_1
tccaaactgtaatctaccaggatttagaaagctaaatgctttattatatactgctggtaacttctgtagtgcaatgtctgtacatttcttacatctgaatttttaagaaatgtggatagatacacatgatttgtaccagatgactatcaaaggttgcttccaactctaaggattctatgattctatgatttctccctctctctctctctctcagtaaaacaaaacaaaacaaacaaacaaacaaacaaataaaaacaacaggaaataacacgtcataatgattttgtcaaaaataacttraggacattttattttatttttgcatcttcttcaagttggaggtttgattgtaaaatctgcggagtccttgccaacgtagttcgctctgtgactccacaattacagcattttcttaaagtaatagggggaaattgtataacatagatatttgaaaaagaaaaaaaaataaaataaaaacaaatacctttttcatatgaagagaaatagaaaccagaaaaaagaaaaaatgattgaaaacactggaaagagaaatactgggattcagcccctcttgatgccttcatttcaaagttacgcatc

SEQ ID NO: 83737 - DNA, 600 bp, Chicken  19866894380436_1
gcttttggactaaaactatcagtgcatgacaggacaccaaaggggcatgcagcacctgggatccatgagaattagcaaagcaccttctgtacgatgaggtgatttgggatattgattgatgacgatggcgcagtgctgagataataccaccagcaccagggatcctgggtgcttcagacagctgtgggggctccaaagcccctcccaggggaaagctgtatttcttcggatctcatggcagaagcaggaagacagaactaagagctgtgctgttaaggacaccgtgtccactgttattcytgttggtcacatccatcacattggcacagaactgtgagatggagctcagccccttcctgggcacacctggtgctgaggtccttctgatgggcttgtggggtgggccacagtgggttgcataaagtggctgaacacagaggggggatgggaaggcagcatggagctgttgtaaagtaagacagagcatcaccacaggatgttcaagggagaratttttcttttttacatcttcattccccactggtgcttcagaacaaagcccctgtacttkgcagtggcrcagaacgggtccacctggca

SEQ ID NO: 83738 - DNA, 536 bp, Chicken  19866894380436_2
aaagctgtatttcttcggatctcatggcagaagcaggaagacagaactaagagctgtgctgttaaggacaccgtgtccactgttattcytgttggtcacatccatcacattggcacagaactgtgagatggagctcagccccttcctgggcacacctggtgctgaggtccttctgatgggcttgtggggtgggccacagtgggttgcataaagtggctgaacacagaggggggatgggaaggcagcatggagctgttgtaaagtaagacagagcatcaccacaggatgttcaagggagaratttttcttttttacatcttcattccccactggtgcttcagaacaaagcccctgtacttkgcagtggcrcagaacgggtccacctggcagtgcaggatggagcaggagcaggcagcacaggggccccgcagctgtccagggagagctgtgcacaggacagcccatgccccactgcccaccacatgggtctgtctgaggaaggggggaagcagaaactgaggtgaagacatctccgt

SEQ ID NO: 83739 - DNA, 476 bp, Chicken  19866894380436_3
gttaaggacaccgtgtccactgttattcytgttggtcacatccatcacattggcacagaactgtgagatggagctcagccccttcctgggcacacctggtgctgaggtccttctgatgggcttgtggggtgggccacagtgggttgcataaagtggctgaacacagaggggggatgggaaggcagcatggagctgttgtaaagtaagacagagcatcaccacaggatgttcaagggagaratttttcttttttacatcttcattccccactggtgcttcagaacaaagcccctgtacttkgcagtggcrcagaacgggtccacctggcagtgcaggatggagcaggagcaggcagcacaggggccccgcagctgtccagggagagctgtgcacaggacagcccatgccccactgcccaccacatgggtctgtctgaggaaggggggaagcagaaactgaggtgaagacatctccgt

SEQ ID NO: 83740 - DNA, 467 bp, Chicken  19866894380436_4
accgtgtccactgttattcytgttggtcacatccatcacattggcacagaactgtgagatggagctcagccccttcctgggcacacctggtgctgaggtccttctgatgggcttgtggggtgggccacagtgggttgcataaagtggctgaacacagaggggggatgggaaggcagcatggagctgttgtaaagtaagacagagcatcaccacaggatgttcaagggagaratttttcttttttacatcttcattccccactggtgcttcagaacaaagcccctgtacttkgcagtggcrcagaacgggtccacctggcagtgcaggatggagcaggagcaggcagcacaggggccccgcagctgtccagggagagctgtgcacaggacagcccatgccccactgcccaccacatgggtctgtctgaggaaggggggaagcagaaactgaggtgaagacatctccgt

SEQ ID NO: 83741 - DNA, 600 bp, Chicken  19866894380446_1
agctttccttccaacagtcattcggcttccttctgttctctatcagccccagattttcattttcgacaaggaaactaagatgtaatctggtggattttcaataaatgctttaaaaaagcattcagggaagagcaaagaggctctcagaatcaaccacctcctctgaggtcaagacgaagcacctttcagctaacataagaagggtctttggcagctggctcccatctcctgcaggatcactcctgtttattatcagccttgcggcacccagctgggagatcactgttgaccaaaacccartttgggatgatcctgattaaactcatcattgtttttttcttttatttacatgtgtataaatgtgtataaaaagcgacaggagaggagtccgattaaataatgtgagagttatgatttacaaattctacttcacctcctctttagcgaataacaagacattggcttaacaacacacatacatggtttcagaggagcaggattgctcctctgcatctatctgactgcaattcgctcctttcagcaggtgcaactagaggtttccaagagcacctgggtctgaatcaggacatgactctctcc

SEQ ID NO: 83742 - DNA, 599 bp, Chicken  19866894380448_1
  misc_feature (1)..(30): n is any nucleotide
nnnnnnnnnnnnnnnnnnnnnnnnnnnnnncaaactagaaagggataacttaactggaaagggataacataccccaactaagataacttaccaagtcatcacagtggggaaaaaaaatctaaaccaaccaacaaacaacagcagtaagatcatctgtggcaagtagttctgctttaaattggtctgtatcttcaggaaaccttaatttaaccattctatatagccctggcaaaagcctgcaatggcaaatatgaatttgttttgatacaaaaacaattttattgctgagtggatgcttawtaaccttcctttatgtaagcttttacactggactgacctctattattgctaggagagagcatgacaccaaatcctactttgtctgagagaactgttaaatgagaatgccagtcgtaaggactcaactataaagagawcatctttagaaacactctgagagaaagatgacattttacagtgctgatggaaactaactgaattgtaacaaacttttagattccaattttggagttaagttactagttactgatcctccaaatgcagacagcccaaaaatccaactccccacctaaaaaggg

SEQ ID NO: 83743 - DNA, 600 bp, Chicken  19866894380448_2
acagcagtaagatcatctgtggcaagtagttctgctttaaattggtctgtatcttcaggaaaccttaatttaaccattctatatagccctggcaaaagcctgcaatggcaaatatgaatttgttttgatacaaaaacaattttattgctgagtggatgcttawtaaccttcctttatgtaagcttttacactggactgacctctattattgctaggagagagcatgacaccaaatcctactttgtctgagagaactgttaaatgagaatgccagtcgtaaggactcaactataaagagawcatctttagaaacactctgagagaaagatgacattttacagtgctgatggaaactaactgaattgtaacaaacttttagattccaattttggagttaagttactagttactgatcctccaaatgcagacagcccaaaaatccaactccccacctaaaaagggaagcttactcactgctactgcagaagatttgcatgcatgtcactgtctttagtgaaagagtatcactactatttactcatgtgaaatagaacgagagctgattttcttgtataatagccatacaagatgattttccca

SEQ ID NO: 83744 - DNA, 600 bp, Chicken  19866894380455_1
acttgttccttccctgcagaaacagaaatccatctctggtcctctgcagaggaacttaaggctctatggcagatcttcattactggtcaggctgaatggatggacaggaattattttgttctgtagcagtactgcaactgactcattgtttttatgtcaactaaaaatgccaaatttagttttcatcttccatttttctagtctggcctccaatgaagaatgaagaaaactataggactggtcattgcatcaacaaacgtcttgcataaatgtaggtgtgatgcagatatttcatctctrtgtgtcatcatgctccattcatgcgctccagagaaatctgtaagccagaagtgagcatcttttaaaccacaagcagaatgcattatggttttctaagttcttaaattctttttttaagccattctcaggtatgaggcagtgacaccatcaattttgcatgactgcttttcctaaawgttctacagcagcattttgcacatgcctgtttccaatgcttttatgtgcattcctgcagaggacacacagatcagaggagccaggaaccagaggcagtgggcacccagggatgaagccagccct

SEQ ID NO: 83745 - DNA, 537 bp, Chicken  19866894380455_2
tagttttcatcttccatttttctagtctggcctccaatgaagaatgaagaaaactataggactggtcattgcatcaacaaacgtcttgcataaatgtaggtgtgatgcagatatttcatctctrtgtgtcatcatgctccattcatgcgctccagagaaatctgtaagccagaagtgagcatcttttaaaccacaagcagaatgcattatggttttctaagttcttaaattctttttttaagccattctcaggtatgaggcagtgacaccatcaattttgcatgactgcttttcctaaawgttctacagcagcattttgcacatgcctgtttccaatgcttttatgtgcattcctgcagaggacacacagatcagaggagccaggaaccagaggcagtgggcacccagggatgaagccagccctgtgaagagcaacaggcagacagaggaagaagcaaaaggagcctaaaaggaaggaaaggtaatgctctggacagagtccacaggattgacttatcccaggtttatgttatacta

SEQ ID NO: 83746 - DNA, 600 bp, Chicken  19866894380475_1
gctgaatgctttgtaaagttaatttttatattttgatgttgagatcaacatatgcgaatatctgaagaggaatattaccattacatacatcagaataactaaaatcttgcaaaaattaatctaaaagccttcttgattaaggaaatgagccactcagttatttaaataaccattgttaaggctgttaaatgtttaatacgttttcaagggattttctttgctttggtggttttttttttttttttttttgagcgggggacaaagtctgtattggcaagacattggtaatgttcccattgrtctgtgcagcatcatctatctcagaacatttggggggggtctgttacaaatggcttacaaagccagaaaaaaaagaaatcattccaagcagtacacatcatattatgaatttgacattactcttatctattacaacaaggaataaaatgacaaggtactagattagtgattaattttaaaaacacctactaacgataaacacccacagacccactggagccagccacaccatttaagcaacatgtggaaatgttcaggcatcctgtgtggtcaaacaattatctaacaattgatttgagg

SEQ ID NO: 83747 - DNA, 600 bp, Chicken  19866894380479_1
gtgtttacttagtaagaaatctgttctttgtcagcttaaaacagtgatttctttattaccactctgcgcagggaatgacagcacagagttggcactggagcaagtctggttgagtctacagcgttgtaatggaaacagggtgaaccgagggtcaagtataatgggatttgtatacagaaatgtgtctgcataaggaatagctgcatgagataagagaatgaaagatgaggccctcaggtctccctttgcgtggcggtgagccgctggcggcaggagggatgtgttgcagtaggtaacttygagctgctgacttggggagatgtggttacctggtgctggcagagatgactccatcatgcctgttctggtactaactggtgttgggggggtgttggatggatggggtggcatttggtgattactctctgaatgtcttccatgtaatttttattgatatcaggaagcatggggtcaatgaggggttttcaagctattacagtctgtggcctccctgaaaattttcagtggggctgtcaagcatggtatagtgaacttagcctgaacgataggaggcttgcaggggttttttgctgtctttca

SEQ ID NO: 83748 - DNA, 460 bp, Chicken  19866894380482_1
ttttcttttctctttttaagagttagtcccaagagttttcttcatccttggcgcagaagcaaccaacttaagcagaaccaggcaggtcacagctattgtggtaggaattatacctttgttgcctgcacctttttcaggttactatgaatagacatgaaacagaatatgctaagtgttagccctagttcgtagaaactacacttgtaagcctatgatattctttgaggaaagtaccatgctgagcatcagtggtggctttctattgcaaataaaggcagtatgtgaaataagagcccattsccttgtcaagyagatctacatccacaagcagaaatacatataggagcctaaatcccccagaaatcagtagaacatggggccctgcatacttttctaaatagagatatctcattcaaatttttcatgaccttcccagatgaccacagaaattaccaccagt

SEQ ID NO: 83749 - DNA, 449 bp, Chicken  19866894380482_2
ctttttaagagttagtcccaagagttttcttcatccttggcgcagaagcaaccaacttaagcagaaccaggcaggtcacagctattgtggtaggaattatacctttgttgcctgcacctttttcaggttactatgaatagacatgaaacagaatatgctaagtgttagccctagttcgtagaaactacacttgtaagcctatgatattctttgaggaaagtaccatgctgagcatcagtggtggctttctattgcaaataaaggcagtatgtgaaataagagcccattsccttgtcaagyagatctacatccacaagcagaaatacatataggagcctaaatcccccagaaatcagtagaacatggggccctgcatacttttctaaatagagatatctcattcaaatttttcatgaccttcccagatgaccacagaaattaccaccagt

SEQ ID NO: 83750 - DNA, 600 bp, Chicken  19866894380485_1
ttcatcaggttgtctactggagagttctgttttgttatatttggtattgcagttgaggccttctacagaacacaaaaatgagaacatcctacttctgaggatcatttgaaagttttgtattacttgctagtatggaggcttaaaagattattggtgcccttgtcttctgctgttctggtgtcactgttctttgtgctctattgcaagtttttctttgaatctttctcactagaagtttgttagaaggcactgggaagcgttctgccatttgcggtgtggaagtgaatgtgtggggtgagytgactcaagccagtgcctaaggatctgtatagctgctcccttgctctaccccaccccttgcaggatgggagaaaataggtagatcaaaagtgagaaaacctgtgggttgaggtgatgrcagtttaacaaataaaaaaggaaagatacaaagaaagggaagamaatcactcacgacttcccagaagcagtattgctaatcctacttctagccccaaattcaaaatgcagcaccatatgggcagttaagaaagctgactgtattccagccaggatcagtaaccatttataggtacatttaaa

SEQ ID NO: 83751 - DNA, 600 bp, Chicken  19866894380485_2
attacttgctagtatggaggcttaaaagattattggtgcccttgtcttctgctgttctggtgtcactgttctttgtgctctattgcaagtttttctttgaatctttctcactagaagtttgttagaaggcactgggaagcgttctgccatttgcggtgtggaagtgaatgtgtggggtgagytgactcaagccagtgcctaaggatctgtatagctgctcccttgctctaccccaccccttgcaggatgggagaaaataggtagatcaaaagtgagaaaacctgtgggttgaggtgatgrcagtttaacaaataaaaaaggaaagatacaaagaaagggaagamaatcactcacgacttcccagaagcagtattgctaatcctacttctagccccaaattcaaaatgcagcaccatatgggcagttaagaaagctgactgtattccagccaggatcagtaaccatttataggtacatttaaaccaaatctactctttatatttgtttgtggtcaaaaggactaactcaaatgtcttgatgggacttttctactgagctctgaagagagcaaagagattttagctcttatgggattcatgg

SEQ ID NO: 83752 - DNA, 600 bp, Chicken  19866894380485_3
tcttctgctgttctggtgtcactgttctttgtgctctattgcaagtttttctttgaatctttctcactagaagtttgttagaaggcactgggaagcgttctgccatttgcggtgtggaagtgaatgtgtggggtgagytgactcaagccagtgcctaaggatctgtatagctgctcccttgctctaccccaccccttgcaggatgggagaaaataggtagatcaaaagtgagaaaacctgtgggttgaggtgatgrcagtttaacaaataaaaaaggaaagatacaaagaaagggaagamaatcactcacgacttcccagaagcagtattgctaatcctacttctagccccaaattcaaaatgcagcaccatatgggcagttaagaaagctgactgtattccagccaggatcagtaaccatttataggtacatttaaaccaaatctactctttatatttgtttgtggtcaaaaggactaactcaaatgtcttgatgggacttttctactgagctctgaagagagcaaagagattttagctcttatgggattcatggatactatcagtttccatctgtatgggctcgaggacagagcactc

SEQ ID NO: 83753 - DNA, 600 bp, Chicken  19866894380492_1
aaacagtgtggagggttgggttgtcaattcagcatttgaatgtccagttcatcagctgctgaatttcttgcctatatttctgcagatctgtcatctagttgttacaagtcagaacactgaggcacattatagaaggactcatattcccaaatttaaatgtcaagaagttactagtggttttgacttctgttatctggggctcagattcaggtatattaaagagatctaattttcagaaagtgctagtagcacacttagaaagcatttcaaatagaacattcaaacatcagagcaaatacwgtctttgggtttagaaaagcttggcttcagtgtttgaagatggatgttttcatttctcagatctattgaaacacctgaaaacagcatgactatccatggatccagaggccttctgtgggctcagatgtttccacagcttatttttaaaacatgttggaattttccttgtcctaacttttaaaagcttctttacaaagcttagagaaaacagttctgaaatgtttagttgtagtttcctcttaaatgagaataactattcaatggtatattcttcacggttgccaatagaaatacgggcaa

SEQ ID NO: 83754 - DNA, 600 bp, Chicken  19866894380492_2
ttagaaaagcttggcttcagtgtttgaagatggatgttttcatttctcagatctattgaaacacctgaaaacagcatgactatccatggatccagaggccttctgtgggctcagatgtttccacagcttatttttaaaacatgttggaattttccttgtcctaacttttaaaagcttctttacaaagcttagagaaaacagttctgaaatgtttagttgtagtttcctcttaaatgagaataactattcaatggtatattcttcacggttgccaatagaaatacgggcaagggaagcaamgtgtcattctccataactgaaggatgaattgaaaaacaaactttcagtgatccagaccataaaaatacaagacaagagactgccactgaaaagagtggtctattaaattaagatgctactaggtgtcattgtgactctgtgggtagcatgtctgccttacagccaactacttgcgggttcaagtctcatactgggaccttggctcccatccagagtattgcagaactaagcagcgtgtggcactttcagaggtgtcatccttcagaggaaatgttaaatctactgtccttctgccagctc

SEQ ID NO: 83755 - DNA, 600 bp, Chicken  19866894380492_3
gaggtgtcatccttcagaggaaatgttaaatctactgtccttctgccagctctccagttggaaattaaagatcccccaagtaccctttcaatagagtgagtaataatctcagggctctggccaagattccatttcccaataaaaagaatttgtaatggttgggacatatctcacaaaacagcagaggtcacataaaccaatggaaaaaaactcattaaaaatgttgtgcctcctttatgtatttttaacatagaaagtcacttatttgattaagtttcaataacatttttaagcagctgycataaattgcccatacagggatattcaaaaatacaaaagatatcttccattacatattgttaggaaacagctaattcccacagacatctttgaaaaattcagcctaggtttaggaaaggtccgtgaaaaatgtctaacagcactgtatttcagaacagcccttcagtacagagcaccacagcagcatttgtggattattaagtgtgaagatgctgatgagtgtgctgctgcactctcagcgtaccaagagacgatacatttccaaatgtacttctgcactggggactgttaacctgtcca

SEQ ID NO: 83756 - DNA, 576 bp, Chicken  19866894380494_1
agcatccattggagctgataaagtgatgcagggcagtgagacacgtcagcaatacaaatatgaatgtaagcaagcacggtgcaggcttagtgttttttcttttttaatttcagaatacaatcctgttctatgagatgatccctaattggtagcagtgattagcttccttttattgttattattttcctgagaggagaagcataccaaacaggagaaatcagttgcttgggaatcataggaaagagtgctattgaaatatgaaaacgttggagctaggcagactcattctgccataattaycccattgacccacaaatgaactttacttttcaaagaaacaattttggaatatttcctggggaatgttttgctgtttgatgtgcgagcatacagtgcaagatgctaaagagacatatcaaaacttgtggctgaggattagcataatgacgaatgcagctgcgtagtactgctctgcagccagttcatggtgcaccctatctttataggagtgctttgtgtccttgtgagcagcagctgtccatggaactgggtgatgctcaaagatgtcatctgaat

SEQ ID NO: 83757 - DNA, 600 bp, Chicken  19866894380499_1
ggcaatgcaaccccacagagctccccacctcaggtgcagggctggtagttaacagcacaatgcctgtggctcacatttataaaacctgttccttccttgcatcctcagcacctcatcataaaacacctctctctcttcactgccccctattctttgcttctttcctaggctggcagcacggctgtaggcacatctatgcatctcagagcagggcagctgcatgctgtggagcagaactgcagtttcctatctacttgcagtaggaaagggatacgagcttagagctaacttacaatctgyttagaacttcagctctaaaaagttcacaagtatttcagcacagtcctttgtctggtcattctagggcaaaataacatgggtgttcccagtttctgtggatagctttgctatcttgctgctcttgttggatgttttctcctgtaaaaatgggtgtcatcccagcaatcacaggcactcagcccctgtgtggaccttctgctggggctctgatagcctggaagctgctttcaagcttttgtctctgtttatggctcttgcactgcgctgtcagacagtgggtatggcagctgtgtggtgctt

SEQ ID NO: 83758 - DNA, 600 bp, Chicken  19866894380509_1
gtacacatcatgcgtagcctcaatacactctccagcaccaaagaagctgttgatcattgccttacacaattgtggcagcctcattagttccactatgtagcttgtaatagtttcatgccaaattaaaaatacaggtcattctaaggactaatattgtgagatcagcatgcagaaatttgaagctcgcctgaattcagtagttaaacaatgctacttgatactccattcaaaagccaaaaatcaatataattaggagtgtaattctgtcttagcaattaggctatggctgatgtgtacacrtctgtgaaaatgagaaatatgttttatgctatttgcaatctatttaaatgtttagtgcttattagtgattttcctggtcatgggaagtgttaaaccatggaaacaacttgycctttttaaatattacttagaatcatagaatcatagaatcacaaggttggaaaggacctaaaagatcatctagtccaaccgtcctctcattacccttgctaccacaagccactaaaccatatctcrtagctcttcatcctcttgarcactgccaggaatggggactccaccacctccctgggcaggcca

SEQ ID NO: 83759 - DNA, 600 bp, Chicken  19866894380509_2
ttcatgccaaattaaaaatacaggtcattctaaggactaatattgtgagatcagcatgcagaaatttgaagctcgcctgaattcagtagttaaacaatgctacttgatactccattcaaaagccaaaaatcaatataattaggagtgtaattctgtcttagcaattaggctatggctgatgtgtacacrtctgtgaaaatgagaaatatgttttatgctatttgcaatctatttaaatgtttagtgcttattagtgattttcctggtcatgggaagtgttaaaccatggaaacaacttgycctttttaaatattacttagaatcatagaatcatagaatcacaaggttggaaaggacctaaaagatcatctagtccaaccgtcctctcattacccttgctaccacaagccactaaaccatatctcrtagctcttcatcctcttgarcactgccaggaatggggactccaccacctccctgggcaggccattccagtgcctgaccactctctgagagaaaaagtttttccttatgtctaatctaaacctcctctggtacaacttgtggccatttcctcgtgtcctctttgttgcctgggag

SEQ ID NO: 83760 - DNA, 600 bp, Chicken  19866894380509_3
aaatcaatataattaggagtgtaattctgtcttagcaattaggctatggctgatgtgtacacrtctgtgaaaatgagaaatatgttttatgctatttgcaatctatttaaatgtttagtgcttattagtgattttcctggtcatgggaagtgttaaaccatggaaacaacttgycctttttaaatattacttagaatcatagaatcatagaatcacaaggttggaaaggacctaaaagatcatctagtccaaccgtcctctcattacccttgctaccacaagccactaaaccatatctcrtagctcttcatcctcttgarcactgccaggaatggggactccaccacctccctgggcaggccattccagtgcctgaccactctctgagagaaaaagtttttccttatgtctaatctaaacctcctctggtacaacttgtggccatttcctcgtgtcctctttgttgcctgggagaaggggccaaacccctcctcaccacaacctcccttcaggaagtcgtatagtgcaatgaggtctcccctgagtctcctcttctccagactgaacaatcccagctccctcagccgctcctcataagac

SEQ ID NO: 83761 - DNA, 600 bp, Chicken  19866894380509_4
gtaattctgtcttagcaattaggctatggctgatgtgtacacrtctgtgaaaatgagaaatatgttttatgctatttgcaatctatttaaatgtttagtgcttattagtgattttcctggtcatgggaagtgttaaaccatggaaacaacttgycctttttaaatattacttagaatcatagaatcatagaatcacaaggttggaaaggacctaaaagatcatctagtccaaccgtcctctcattacccttgctaccacaagccactaaaccatatctcrtagctcttcatcctcttgarcactgccaggaatggggactccaccacctccctgggcaggccattccagtgcctgaccactctctgagagaaaaagtttttccttatgtctaatctaaacctcctctggtacaacttgtggccatttcctcgtgtcctctttgttgcctgggagaaggggccaaacccctcctcaccacaacctcccttcaggaagtcgtatagtgcaatgaggtctcccctgagtctcctcttctccagactgaacaatcccagctccctcagccgctcctcataagacttgtgctccagactcctcat

SEQ ID NO: 83762 - DNA, 600 bp, Chicken  19866894380515_1
tgaattcatatgaatggaatttattctgtgatacctacactgctgagcagcaggaatttacttacgcagttttgttcttcatcctttctgcttcagtgtaattttgctttgattatcgctacagtggtaatctaaccaatcaatttattctatttccaatttttagtgtttgattaacagaaggaaaagattaatgctgattctggtatcacagttacgtttttaagtggatatatcttttaggtttggagagggtttttcttgttctcttgctcccctcacaacaacaacaacaacaamctcgagctttaagtaaaactgttttagattctgtttgtttttttctcctacatgagctggaacgatagcggaggtctcaaaatcaagctggtgaaagaatgtagagagaaaggcaatatacataggggaggttcaactaatgtgtgaaaacacttgcttggccctatctcatctaaagctgcaggtaagaattcagtgaagcgtgcacaacaagcacacagttctctttaatgggtttttaatgccgaagtatttgatccttgtaatcttgttttgtaggcaacagtaatgatcataact

SEQ ID NO: 83763 - DNA, 600 bp, Chicken  19866894380517_1
agatgtcaacttctgtctggtgtgatgctctgttcttctggtgatgtcacatgcagcactgagtaatattggtaaatggaagaggtctcttagaataaggtatgtttctttcttttccatgagattggaattacttttctatctaatgtaaattaaggcaaataagtatttaaatcttctgaattttggagaaatacttgacctcccagctattgctgccattggttatacttctaaaattatcagcagaaggtacattcaaggtatcttgatagcactgcagcagaactcaccattcaktatcagcagcagaaacgggaaagggaagggtatatttaaatttctatcattggctttgaaaaaaatgagtgtctaaaatatcaattgtttatatagtgggaagaattctcatamttctttaacaggattgtagttttaaagactattggattagtaacagtagaagcaagtacccatggtcattcttaccttggtgctgcaaaaaaaatgttagagcaaaatggagatgagaaacaaaagacaatacatatgaaggatttagaattgagaacacaatgaaagagacttgcctggagagga

SEQ ID NO: 83764 - DNA, 600 bp, Chicken  19866894380517_2
ttccatgagattggaattacttttctatctaatgtaaattaaggcaaataagtatttaaatcttctgaattttggagaaatacttgacctcccagctattgctgccattggttatacttctaaaattatcagcagaaggtacattcaaggtatcttgatagcactgcagcagaactcaccattcaktatcagcagcagaaacgggaaagggaagggtatatttaaatttctatcattggctttgaaaaaaatgagtgtctaaaatatcaattgtttatatagtgggaagaattctcatamttctttaacaggattgtagttttaaagactattggattagtaacagtagaagcaagtacccatggtcattcttaccttggtgctgcaaaaaaaatgttagagcaaaatggagatgagaaacaaaagacaatacatatgaaggatttagaattgagaacacaatgaaagagacttgcctggagaggacattttggtgaaaaactcagaaggactatagrgtaattgcagaagtatgacaatggaaggggaagttacgaaattattttgttagatccataatttgcttcacactgatttgtt

SEQ ID NO: 83765 - DNA, 600 bp, Chicken  19866894380517_3
tatttaaatttctatcattggctttgaaaaaaatgagtgtctaaaatatcaattgtttatatagtgggaagaattctcatamttctttaacaggattgtagttttaaagactattggattagtaacagtagaagcaagtacccatggtcattcttaccttggtgctgcaaaaaaaatgttagagcaaaatggagatgagaaacaaaagacaatacatatgaaggatttagaattgagaacacaatgaaagagacttgcctggagaggacattttggtgaaaaactcagaaggactatagrgtaattgcagaagtatgacaatggaaggggaagttacgaaattattttgttagatccataatttgcttcacactgatttgttatttgtagtggcttcctatgtgttggtatctaccaagcagagctgctaatgcttcagagtgttatactgggctctaatgttctatgagcttttgttagtctcacagtaattttctaaagcattcttgggatgttgtggttgttacctgtgactgaaattatatactgtagttcctaagaatatgttattagaaataatatatcttaattaatactctg

SEQ ID NO: 83766 - DNA, 600 bp, Chicken  19866894380520_1
taagctacatctacctaagcaggtaggtagattctctcaaagagagagaatctggaaggtagaagagttggtgacaaggatgcgatgtacatatccaatttaaaggttttgatgaaaactagatctggtttgatccttcttattcactacccaccagcagttggagtatactaagtaccttcctgcagcatttattcctgattattttcataaaaaatgaatccagtttgcatgtgtcaagaccattccagattctgaggacagtggggaaattcacaaaaatgctcctggtccaaactwaaacaataggatacatatgtgtctatattgtccaccaagctgtayctttagggcaattgcatttaggagactgcattcccaactccaccaatttcaaagtaagacaccattattaagctattacaacccactagttattgtatttctttggctgcagtttcactgaagcccataaaacagagtcccatctccctttttgctaacggctttcttcagcacctgcttaactctgtgaaaatttttctggtgacttcaagtaattgtagaagagcctcgaggtaaactattcactcatttact

SEQ ID NO: 83767 - DNA, 600 bp, Chicken  19866894380520_2
gagaatctggaaggtagaagagttggtgacaaggatgcgatgtacatatccaatttaaaggttttgatgaaaactagatctggtttgatccttcttattcactacccaccagcagttggagtatactaagtaccttcctgcagcatttattcctgattattttcataaaaaatgaatccagtttgcatgtgtcaagaccattccagattctgaggacagtggggaaattcacaaaaatgctcctggtccaaactwaaacaataggatacatatgtgtctatattgtccaccaagctgtayctttagggcaattgcatttaggagactgcattcccaactccaccaatttcaaagtaagacaccattattaagctattacaacccactagttattgtatttctttggctgcagtttcactgaagcccataaaacagagtcccatctccctttttgctaacggctttcttcagcacctgcttaactctgtgaaaatttttctggtgacttcaagtaattgtagaagagcctcgaggtaaactattcactcatttactttgaattggattttttaagtgactttcattgttattcaagaatgc

SEQ ID NO: 83768 - DNA, 600 bp, Chicken  19866894380527_1
gaccacgaggaagctcaaacatcctattaactacattattaaactttttcagcagactaaagcaagacattcaatttctaagacccattttctttctgacttagtaacaggtgattacttatttgataggtagaatgagaaaattgaggacctaacatcacttttaggttaaaatcctgcaatgtattgcagcacaattcataagactcaaatcatataaaataaagtttcagtaatcggagcattattataactatctcaaaagcattccactcagagcaatgacacaatgacatactwcacacaggaatgaaatccaacccttgaactataattcaaagttctgagttagtcacatttattgtggtatcttttcttcccctgctattaacttgctatgcaaacacagagaaaagttacagaacagcttgcctgtctctcaacaaaactacatctggacggggaaatgccagcaaacatgaatcccaggtactgagtattaactggtgaaaacctgatggccccagggactctgggtatgcccaacatttatcatgtttccttgtgttcaaactctgccaagaattcatcagaaatagc

SEQ ID NO: 83769 - DNA, 600 bp, Chicken  19866894380528_1
cacatcagaaccacagaaatataaggcactgttggataccagtgcacagtgcactctaatgccctcgaatcatgaagggacagaatcaatccatatttctggagtgactgggggttctcaagaattgactgtgttggaggccaaaataagcctcactggtaaagactggcaaaaacaccctattgtgactggccaggggctccatgcatactgggtattgattacttcagaagggggaatttcaaggatcctaaggggtattgaggggcctttggaataactgctgtagatacagacaayattaagcagctgtctgttttgcctggtctgtcagaagatccgtctgttgtggggttgctgcaagtaaaagagcagcaggtaacaatcgccacaaaagcagtgcacagacagcagtactgcaccaacaggggattccttgctccccattcataagttgattcatcaactagagagtcaaggagtgataagcagaacccattcaccttttaacagccccatatggccagtgcgtaaagccagtggagaatggagggtgacggtagactacagtggcctaaatgaagtcacactcccactgag

SEQ ID NO: 83770 - DNA, 600 bp, Chicken  19866894380530_1
attagagatgctgattgcttatctgatttcttgttacctctttcaaaagtagattagcttgaggaacggatatacctgggatcaaaagcctccctgaccctgggtttgagatttaaaactttttatcttaaattaggttgagtggagagttttgtaacacagtgtaaaacaagaactctgtgatggtacggaaatgatttatacttacagagtgcttttccaggtctgctatcagagtgcttttccacatcacaccgtgaagcattcatacaggcttttgcagggggcttcgctggtaaygagagcacactgatcttaaaagatctgcataaggagcttatgctttagtgtttggcctgtatgcttgtccctgtggaagagagagtgcaggcagaacgtggtggttatgttcctgagtgaggcaggaacagagagatcagggatagtgtgttggctgacacgagcagcttattccttattcctggtgcttttrggctgtcargaatggtacaagagytmtgtgctgttgctgggctcccytctgtctttgctgggggtgggtttctgacccggcgtgggtatggtggacctctggatggc

SEQ ID NO: 83771 - DNA, 600 bp, Chicken  19866894380530_2
atgatttatacttacagagtgcttttccaggtctgctatcagagtgcttttccacatcacaccgtgaagcattcatacaggcttttgcagggggcttcgctggtaaygagagcacactgatcttaaaagatctgcataaggagcttatgctttagtgtttggcctgtatgcttgtccctgtggaagagagagtgcaggcagaacgtggtggttatgttcctgagtgaggcaggaacagagagatcagggatagtgtgttggctgacacgagcagcttattccttattcctggtgcttttrggctgtcargaatggtacaagagytmtgtgctgttgctgggctcccytctgtctttgctgggggtgggtttctgacccggcgtgggtatggtggacctctggatggccacagcayggatcagagcagcctcctggtggcaggttgcttgtttcctgtgttttaaaaacatgcagttgtctccttgctctgagctttgggagtgcttgtaaagtctgttaaacgtccacctgctctaaagttgcccgaggggatgggaattgtgactgatgcttcccaggtgcttcctttccagcaccagt

SEQ ID NO: 83772 - DNA, 600 bp, Chicken  19866894380530_3
acttacagagtgcttttccaggtctgctatcagagtgcttttccacatcacaccgtgaagcattcatacaggcttttgcagggggcttcgctggtaaygagagcacactgatcttaaaagatctgcataaggagcttatgctttagtgtttggcctgtatgcttgtccctgtggaagagagagtgcaggcagaacgtggtggttatgttcctgagtgaggcaggaacagagagatcagggatagtgtgttggctgacacgagcagcttattccttattcctggtgcttttrggctgtcargaatggtacaagagytmtgtgctgttgctgggctcccytctgtctttgctgggggtgggtttctgacccggcgtgggtatggtggacctctggatggccacagcayggatcagagcagcctcctggtggcaggttgcttgtttcctgtgttttaaaaacatgcagttgtctccttgctctgagctttgggagtgcttgtaaagtctgttaaacgtccacctgctctaaagttgcccgaggggatgggaattgtgactgatgcttcccaggtgcttcctttccagcaccagtgtttgccca

SEQ ID NO: 83773 - DNA, 600 bp, Chicken  19866894380530_4
ttccaggtctgctatcagagtgcttttccacatcacaccgtgaagcattcatacaggcttttgcagggggcttcgctggtaaygagagcacactgatcttaaaagatctgcataaggagcttatgctttagtgtttggcctgtatgcttgtccctgtggaagagagagtgcaggcagaacgtggtggttatgttcctgagtgaggcaggaacagagagatcagggatagtgtgttggctgacacgagcagcttattccttattcctggtgcttttrggctgtcargaatggtacaagagytmtgtgctgttgctgggctcccytctgtctttgctgggggtgggtttctgacccggcgtgggtatggtggacctctggatggccacagcayggatcagagcagcctcctggtggcaggttgcttgtttcctgtgttttaaaaacatgcagttgtctccttgctctgagctttgggagtgcttgtaaagtctgttaaacgtccacctgctctaaagttgcccgaggggatgggaattgtgactgatgcttcccaggtgcttcctttccagcaccagtgtttgcccagctctgagagtttga

SEQ ID NO: 83774 - DNA, 600 bp, Chicken  19866894380530_5
ccaggtctgctatcagagtgcttttccacatcacaccgtgaagcattcatacaggcttttgcagggggcttcgctggtaaygagagcacactgatcttaaaagatctgcataaggagcttatgctttagtgtttggcctgtatgcttgtccctgtggaagagagagtgcaggcagaacgtggtggttatgttcctgagtgaggcaggaacagagagatcagggatagtgtgttggctgacacgagcagcttattccttattcctggtgcttttrggctgtcargaatggtacaagagytmtgtgctgttgctgggctcccytctgtctttgctgggggtgggtttctgacccggcgtgggtatggtggacctctggatggccacagcayggatcagagcagcctcctggtggcaggttgcttgtttcctgtgttttaaaaacatgcagttgtctccttgctctgagctttgggagtgcttgtaaagtctgttaaacgtccacctgctctaaagttgcccgaggggatgggaattgtgactgatgcttcccaggtgcttcctttccagcaccagtgtttgcccagctctgagagtttgaca

SEQ ID NO: 83775 - DNA, 600 bp, Chicken  19866894380530_6
aggtctgctatcagagtgcttttccacatcacaccgtgaagcattcatacaggcttttgcagggggcttcgctggtaaygagagcacactgatcttaaaagatctgcataaggagcttatgctttagtgtttggcctgtatgcttgtccctgtggaagagagagtgcaggcagaacgtggtggttatgttcctgagtgaggcaggaacagagagatcagggatagtgtgttggctgacacgagcagcttattccttattcctggtgcttttrggctgtcargaatggtacaagagytmtmtgctgttgctgggctcccytctgtctttgctgggggtgggtttctgacccggcgtgggtatggtggacctctggatggccacagcayggatcagagcagcctcctggtggcaggttgcttgtttcctgtgttttaaaaacatgcagttgtctccttgctctgagctttgggagtgcttgtaaagtctgttaaacgtccacctgctctaaagttgcccgaggggatgggaattgtgactgatgcttcccaggtgcttcctttccagcaccagtgtttgcccagctctgagagtttgacaaa

SEQ ID NO: 83776 - DNA, 600 bp, Chicken  19866894380530_7
ttttccacatcacaccgtgaagcattcatacaggcttttgcagggggcttcgctggtaaygagagcacactgatcttaaaagatctgcataaggagcttatgctttagtgtttggcctgtatgcttgtccctgtggaagagagagtgcaggcagaacgtggtggttatgttcctgagtgaggcaggaacagagagatcagggatagtgtgttggctgacacgagcagcttattccttattcctggtgcttttrggctgtcargaatggtacaagagytmtgtgctgttgctgggctcccytctgtctttgctgggggtgggtttctgacccggcgtgggtatggtggacctctggatggccacagcayggatcagagcagcctcctggtggcaggttgcttgtttcctgtgttttaaaaacatgcagttgtctccttgctctgagctttgggagtgcttgtaaagtctgttaaacgtccacctgctctaaagttgcccgaggggatgggaattgtgactgatgcttcccaggtgcttcctttccagcaccagtgtttgcccagctctgagagtttgacaaaacatgctatgtgtggtgtg

SEQ ID NO: 83777 - DNA, 600 bp, Chicken  19866894380530_8
actgatcttaaaagatctgcataaggagcttatgctttagtgtttggcctgtatgcttgtccctgtggaagagagagtgcaggcagaacgtggtggttatgttcctgagtgaggcaggaacagagagatcagggatagtgtgttggctgacacgagcagcttattccttattcctggtgcttttrggctgtcargaatggtacaagagytmtgtgctgttgctgggctcccytctgtctttgctgggggtgggtttctgacccggcgtgggtatggtggacctctggatggccacagcayggatcagagcagcctcctggtggcaggttgcttgtttcctgtgttttaaaaacatgcagttgtctccttgctctgagctttgggagtgcttgtaaagtctgttaaacgtccacctgctctaaagttgcccgaggggatgggaattgtgactgatgcttcccaggtgcttcctttccagcaccagtgtttgcccagctctgagagtttgacaaaacatgctatgtgtggtgtgttgcgtttttctagcatgttcgactgtaagaaatgcaggtgttgtggaagagagctaagtaattagaa

SEQ ID NO: 83778 - DNA, 599 bp, Chicken  19866894380540_1
  misc_feature (1)..(86): n is any nucleotide
nnnnnnnnnnnnnnnnnnnnnnnnnnnnnnnnnnnnnnnnnnnnnnnnnnnnnnnnnnnnnnnnnnnnnnnnnnnnnnnnnnnnnntttttaatgccaggcctatcttcatgatatctgaaccaaattcagtcaggttcaaattcaaattttccttccagtcatgttttattcctgttttcttttttcacttgatctctacgaaaaagatcataaataaacactcatctgagcagtataaaagaattacactaggtttacagaagcagaaagctattcattacaactgcctgctaccttygctgtaaataaatgctactagagtgatttgggaattcaaaaacactatgctgtagcwagaaataacatatctgttgtacaacacaaaaartcataaagaaagttctgatctgcatgtctttgacstaaaartagtgtggaatactacagatggtatcatagaaccacagaatgacttgggttgaagggatcttaaagatcatctagttycagctctcagccatgaacaggggtgtctcccactacatcccattgcccaaacaccctcccaacatgatcttgaagtacttcggcattgtg

SEQ ID NO: 83779 - DNA, 599 bp, Chicken  19866894380540_2
  misc_feature (1)..(29): n is any nucleotide
nnnnnnnnnnnnnnnnnnnnnnnnnnnnntttttaatgccaggcctatcttcatgatatctgaaccaaattcagtcaggttcaaattcaaattttccttccagtcatgttttattcctgttttcttttttcacttgatctctacgaaaaagatcataaataaacactcatctgagcagtataaaagaattacactaggtttacagaagcagaaagctattcattacaactgcctgctaccttygctgtaaataaatgctactagagtgatttgggaattcaaaaacactatgctgtagcwagaaataacatatctgttgtacaacacaaaaartcataaagaaagttctgatctgcatgtctttgacstaaaartagtgtggaatactacagatggtatcatagaaccacagaatgacttgggttgaagggatcttaaagatcatctagttycagctctcagccatgaacaggggtgtctcccactacatcccattgcccaaacaccctcccaacatgatcttgaagtacttcggcattgtgctgtccaaatcttccaataccatatttcacacttagtctgcttctttatttccttga

SEQ ID NO: 83780 - DNA, 600 bp, Chicken  19866894380540_3
taatgccaggcctatcttcatgatatctgaaccaaattcagtcaggttcaaattcaaattttccttccagtcatgttttattcctgttttcttttttcacttgatctctacgaaaaagatcataaataaacactcatctgagcagtataaaagaattacactaggtttacagaagcagaaagctattcattacaactgcctgctaccttygctgtaaataaatgctactagagtgatttgggaattcaaaaacactatgctgtagcwagaaataacatatctgttgtacaacacaaaaartcataaagaaagttctgatctgcatgtctttgacstaaaartagtgtggaatactacagatggtatcatagaaccacagaatgacttgggttgaagggatcttaaagatcatctagttycagctctcagccatgaacaggggtgtctcccactacatcccattgcccaaacaccctcccaacatgatcttgaagtacttcggcattgtgctgtccaaatcttccaataccatatttcacacttagtctgcttctttatttccttgagtgcaataagcatatccttaaaaagccttacctt

SEQ ID NO: 83781 - DNA, 600 bp, Chicken  19866894380540_4
attcagtcaggttcaaattcaaattttccttccagtcatgttttattcctgttttcttttttcacttgatctctacgaaaaagatcataaataaacactcatctgagcagtataaaagaattacactaggtttacagaagcagaaagctattcattacaactgcctgctaccttygctgtaaataaatgctactagagtgatttgggaattcaaaaacactatgctgtagcwagaaataacatatctgttgtacaacacaaaaartcataaagaaagttctgatctgcatgtctttgacstaaaartagtgtggaatactacagatggtatcatagaaccacagaatgacttgggttgaagggatcttaaagatcatctagttycagctctcagccatgaacaggggtgtctcccactacatcccattgcccaaacaccctcccaacatgatcttgaagtacttcggcattgtgctgtccaaatcttccaataccatatttcacacttagtctgcttctttatttccttgagtgcaataagcatatccttaaaaagccttaccttgcacagcttgacaaaaagatgtctggacatgagta

SEQ ID NO: 83782 - DNA, 600 bp, Chicken  19866894380540_5
tcaggttcaaattcaaattttccttccagtcatgttttattcctgttttcttttttcacttgatctctacgaaaaagatcataaataaacactcatctgagcagtataaaagaattacactaggtttacagaagcagaaagctattcattacaactgcctgctaccttygctgtaaataaatgctactagagtgatttgggaattcaaaaacactatgctgtagcwagaaataacatatctgttgtacaacacaaaaartcataaagaaagttctgatctgcatgtctttgacstaaaartagtgtggaatactacagatggtatcatagaaccacagaatgacttgggttgaagggatcttaaagatcatctagttycagctctcagccatgaacaggggtgtctcccactacatcccattgcccaaacaccctcccaacatgatcttgaagtacttcggcattgtgctgtccaaatcttccaataccatatttcacacttagtctgcttctttatttccttgagtgcaataagcatatccttaaaaagccttaccttgcacagcttgacaaaaagatgtctggacatgagtaacatgg

SEQ ID NO: 83783 - DNA, 577 bp, Chicken  19866894380540_6
tcataaataaacactcatctgagcagtataaaagaattacactaggtttacagaagcagaaagctattcattacaactgcctgctaccttygctgtaaataaatgctactagagtgatttgggaattcaaaaacactatgctgtagcwagaaataacatatctgttgtacaacacaaaaartcataaagaaagttctgatctgcatgtctttgacstaaaartagtgtggaatactacagatggtatcatagaaccacagaatgacttgggttgaagggatcttaaagatcatctagttycagctctcagccatgaacaggggtgtctcccactacatcccattgcccaaacaccctcccaacatgatcttgaagtacttcggcattgtgctgtccaaatcttccaataccatatttcacacttagtctgcttctttatttccttgagtgcaataagcatatccttaaaaagccttaccttgcacagcttgacaaaaagatgtctggacatgagtaacatggctttaaacaccttgagaaataaacgccggggagacagaagaggtaacagacaaca

SEQ ID NO: 83784 - DNA, 600 bp, Chicken  19866894380550_1
attcatccacttgaaagggttcctattaccaactttctgccgtggcaatattaaaaggacttcagattgtccaatgctctgctatttaccttgcacagttctctcacagggatttacagtttgaagtctcaggcccatgggggaccacttccaaaaaagcacctagatcagactttgggcaagaatgcacgaaggctgcagcacacagaacagattgcaagcactctaaaagatttggagctaagtgtagagattgaatttagtaaaaatgaactgaaaggaatttagggaccaaactcrcaactggagtgcttcctgctgccagggacttgctgtatcccaggatctgcttatattttacaaatggatgcagaggctacctgttttcttaagggacagcactgagtgttgcagcttgtttctcartacaagccccagggaacaaaaaggcatcacaaccatcagtgtttgtgctgaagtgttcctcgtcctgccctctgaactacctatccctttacagcaaaggcatcaacattttccacagttgttatttgctgattaatattcacaataaaataaaaacaaaattaactttaagtt

SEQ ID NO: 83785 - DNA, 600 bp, Chicken  19866894380550_2
tctcaggcccatgggggaccacttccaaaaaagcacctagatcagactttgggcaagaatgcacgaaggctgcagcacacagaacagattgcaagcactctaaaagatttggagctaagtgtagagattgaatttagtaaaaatgaactgaaaggaatttagggaccaaactcrcaactggagtgcttcctgctgccagggacttgctgtatcccaggatctgcttatattttacaaatggatgcagaggctacctgttttcttaagggacagcactgagtgttgcagcttgtttctcartacaagccccagggaacaaaaaggcatcacaaccatcagtgtttgtgctgaagtgttcctcgtcctgccctctgaactacctatccctttacagcaaaggcatcaacattttccacagttgttatttgctgattaatattcacaataaaataaaaacaaaattaactttaagttaatggaagttagagaaacatgatagcatacaagaagtgagaacatatcacaacactccaacaaaacaaatcctcttctcacagttagatggcatgaagttatgatggcaaaagcaaattcccagca

SEQ ID NO: 83786 - DNA, 600 bp, Chicken  19866894380551_1
agaatgaaatattctaagagtaaattgagtaaatttgtatgtaataacgtggatgtaaagttttcaatataggacttttctgcagaattcttggtgttttgcaaagtgaatgtttattcagtaaaagcgtcatgtctgggactgaagatccaggccttgcctccatgttgagcttcatgaggagtgcagtagcatttattcttcatcaggcattgaaagcttacctgaaaagcattgtgaggtaacagttgatctaggctggcaagcagcactgaattaattaaaaagaaaaacctaaamagatcagaagtatgcctgaaaactgaagtaaatgggrgagaacagtgttgctgaatgtcatgaagctgttttcctatctgaatttccaaactgcatggactaaccacccgtgtgctacaacaactttaaagctgtttttctgttgtggtttttttttctataggggggcactgggaaccctggattgaaaaatatctgatacacatttctaaagatgcccatctagtgggttcagtgagggcagtgctctctctaatttggaacatgaaagctcccggtgcctggtgctgtgtgtctgtg

SEQ ID NO: 83787 - DNA, 599 bp, Chicken  19866894380551_2
tatgtaataacgtggatgtaaagttttcaatataggacttttctgcagaattcttggtgttttgcaaagtgaatgtttattcagtaaaagcgtcatgtctgggactgaagatccaggccttgcctccatgttgagcttcatgaggagtgcagtagcatttattcttcatcaggcattgaaagcttacctgaaaagcattgtgaggtaacagttgatctaggctggcaagcagcactgaattaattaaaaagaaaaacctaaamagatcagaagtatgcctgaaaactgaagtaaatgggrgagaacagtgttgctgaatgtcatgaagctgttttcctatctgaatttccaaactgcatggactaaccacccgtgtgctacaacaactttaaagctgtttttctgttgtggtttttttttctataggggggcactgggaaccctggattgaaaaatatctgatacacatttctaaagatgcccatctagtgggttcagtgagggcagtgctctctctaatttggaacatgaaagctcccggtgcctggtgctgtgtgtctgtgagctcccaaagcagtttaagaataaaatacttggaa

SEQ ID NO: 83788 - DNA, 600 bp, Chicken  19866894380558_1
gggcagggcaaggaggatccaactgctacagttgctttgcttagagaataaaagtaaagcatctttaaatcagagttgctttgaatatttacatttctgttacctatctctttaacttgggaatcccttacaggccactaggtttgctttgctttcatttttaaagaatctaaaaggttaggaatgaagaggagtagctgttgtttctctacataagagtgctccctgctttcgaggtttgaaagtggccgtcacctgccccagggaggctgtattctctaaaagtgcagattgctgcayggtaatacagtttgtgtttaaatagcttgaggtgttccttatttgctaacacagttggtaattcagtgctctcttaagcaaattcttctagaagtttcctaaaaattgttttgggcttccctctcaagtttttgtaagtttgtgtgtatatcctcagtctaaaacgtgacttttcaccttttactttttaatataaacatgtgttttgtatttttttttctttgctccctgatagttgagctaggttggctctccctcagtagcagtaaggtctaaatatcatggggctgcttgtagata

SEQ ID NO: 83789 - DNA, 600 bp, Chicken  19866894380563_1
atattaagcacaagcattgagattaaaactcccatgcatattctttctatatattctgagactgataaacaagagtgagttaaagaaaatatgtcaattacagaaatcataagatgttgcaaaaacttttttttctcctcataatacctgtaagatgttagaatttgtaattcttatttctaaaagaagtcctgtccttccttaagcaatgcttcctccatctttggtagattcatgagtctaattttccacagcatcaacaatgatgtgaagcacaaccaaccagtttatttttctttytgctttctagaaaccaggtgttagttgtttttgttctttttcagaagtggtcctgtcatcttgtgcggagaaacagaagaggtcatcttgcatggagaaacaataaacttgccccaaaagtaggtgtktcctggagagcagcagctgtctagcctacatctgaaacaaaaagtggcccaaacatattcttttctatttctgtttgtttattctggacacaacttgtgagggaaccacttcttctgactgctgtttcttatagtactgcattgctgctgtaagaaacacaaatatttttag

SEQ ID NO: 83790 - DNA, 600 bp, Chicken  19866894380563_2
ttttttctcctcataatacctgtaagatgttagaatttgtaattcttatttctaaaagaagtcctgtccttccttaagcaatgcttcctccatctttggtagattcatgagtctaattttccacagcatcaacaatgatgtgaagcacaaccaaccagtttatttttctttytgctttctagaaaccaggtgttagttgtttttgttctttttcagaagtggtcctgtcatcttgtgcggagaaacagaagaggtcatcttgcatggagaaacaataaacttgccccaaaagtaggtgtktcctggagagcagcagctgtctagcctacatctgaaacaaaaagtggcccaaacatattcttttctatttctgtttgtttattctggacacaacttgtgagggaaccacttcttctgactgctgtttcttatagtactgcattgctgctgtaagaaacacaaatatttttagcgtcaatgtattcaaaacaaacaaaaatcacatacagatttgcattactatgaaatttagcttctagttttctcgcagtatttggaaaggattgcaacacagtgttacacagcaatgaatagtgaatc

SEQ ID NO: 83791 - DNA, 599 bp, Chicken  19866894380568_1
  misc_feature (1)..(65): n is any nucleotide
nnnnnnnnnnnnnnnnnnnnnnnnnnnnnnnnnnnnnnnnnnnnnnnnnnnnnnnnnnnnnnnnnataaagggacctttcattctgtgggcacagtgcgggagggcagaggctggttgtggctgtgctgtgctgaggctctgacccttgtgctcaggagctgcccctgcgggatggggatgatggtttccacacacaccagctgcatctggtggacctgcgagcatcctggaccaccacgaaccgggacattgcctttggtctgtatgatggctacaagaaagcagctgtgctcaagcgyaatctgtccactgaagctctgaaggggctgaagattgacacacagctgcaagccaagaagctgaagcgaggcccgctctctgctcactctgcccctgccaaagtgactgctcccatcaccagtggscgttctgagagagcttcctctgggggtgagtgtggcagggagtgaaaacctgcaccagcctggmagcacgtgctagcccagagcttctgtagccttcataccctcaaccttgtactgatttcttttttttttctccttccccaggagcctacatgttgcagaagctcattgag

SEQ ID NO: 83792 - DNA, 600 bp, Chicken  19866894380568_2
ctgtgctgaggctctgacccttgtgctcaggagctgcccctgcgggatggggatgatggtttccacacacaccagctgcatctggtggacctgcgagcatcctggaccaccacgaaccgggacattgcctttggtctgtatgatggctacaagaaagcagctgtgctcaagcgyaatctgtccactgaagctctgaaggggctgaagattgacacacagctgcaagccaagaagctgaagcgaggcccgctctctgctcactctgcccctgccaaagtgactgctcccatcaccagtggscgttctgagagagcttcctctgggggtgagtgtggcagggagtgaaaacctgcaccagcctggmagcacgtgctagcccagagcttctgtagccttcataccctcaaccttgtactgatttcttttttttttctccttccccaggagcctacatgttgcagaagctcattgaggagacagataagtttgtggtcttcacagaggaggaatcaggagctagcgaacagctgtgtggcatcgctgcctgccagactgatgacatctacaaccgcaactgcctcattgagctggtcaactgcc

SEQ ID NO: 83793 - DNA, 600 bp, Chicken  19866894380568_3
acacacaccagctgcatctggtggacctgcgagcatcctggaccaccacgaaccgggacattgcctttggtctgtatgatggctacaagaaagcagctgtgctcaagcgyaatctgtccactgaagctctgaaggggctgaagattgacacacagctgcaagccaagaagctgaagcgaggcccgctctctgctcactctgcccctgccaaagtgactgctcccatcaccagtggscgttctgagagagcttcctctgggggtgagtgtggcagggagtgaaaacctgcaccagcctggmagcacgtgctagcccagagcttctgtagccttcataccctcaaccttgtactgatttcttttttttttctccttccccaggagcctacatgttgcagaagctcattgaggagacagataagtttgtggtcttcacagaggaggaatcaggagctagcgaacagctgtgtggcatcgctgcctgccagactgatgacatctacaaccgcaactgcctcattgagctggtcaactgccaggtaccagcctctggccagcctctgctcccctctgtggccttgtggtcagaggggccatggct

SEQ ID NO: 83794 - DNA, 600 bp, Chicken  19866894380568_4
ttgtactgatttcttttttttttctccttccccaggagcctacatgttgcagaagctcattgaggagacagataagtttgtggtcttcacagaggaggaatcaggagctagcgaacagctgtgtggcatcgctgcctgccagactgatgacatctacaaccgcaactgcctcattgagctggtcaactgccaggtaccagcctctggccagcctctgctcccctctgtggccttgtggtcagaggggccatggctggtcctgaccccctaggggtttttatcccacagatggtgctgcgyggtgcggagacagagggctgcgtgattgtgtctgctgcaaaggctcaactgctgcagtgccagcaccaccctgcctggtatggggacacactgaagcagaagacatcttggacgtgcttgctggacggcatgcagtactttgccacaacagaaagcagccccacagagagggagcatgggcagctctggctggaggtgagtggccggagttggacatggtggatgagctgcaaggaggacggccaccaatgcatctctgtgttcctaggtgaagaatattgaggagcatcgacagcggag

SEQ ID NO: 83795 - DNA, 599 bp, Chicken  19866894380581_1
  misc_feature (1)..(159): n is any nucleotide
nnnnnnnnnnnnnnnnnnnnnnnnnnnnnnnnnnnnnnnnnnnnnnnnnnnnnnnnnnnnnnnnnnnnnnnnnnnnnnnnnnnnnnnnnnnnnnnnnnnnnnnnnnnnnnnnnnnnnnnnnnnnnnnnnnnnnnnnnnnnnnnnnnnnnnnnnnnnnnncaccaaatgtcagatcatttgattcttccaattattaaacacatgagctgtgatggcaatgctgcatgcaatttagtgagagaaaggttagaggataaatgctcagaatacagcctgtgtgcatccaaatctccctactcytggggaaataaaagacatctgagtgaaaatgccatcrcctccctgtcataatttcattttaaaaatgaaaatgaaaacaaaatagttgatggggttatgatatcagaatatatgcaacacaatgttttttaaagtatttttaaagactttatactaagtattgttgaagtgtgcttaaataaacayagcgaagmrtgcacactatgaatgtgctcgacatctcaaacatgttcatcctttcaaagcttgagcactcctgactaccaaaaatacagatcagcaagggtacttgtgttcac

SEQ ID NO: 83796 - DNA, 599 bp, Chicken  19866894380581_2
  misc_feature (1)..(122): n is any nucleotide
nnnnnnnnnnnnnnnnnnnnnnnnnnnnnnnnnnnnnnnnnnnnnnnnnnnnnnnnnnnnnnnnnnnnnnnnnnnnnnnnnnnnnnnnnnnnnnnnnnnnnnnnnnnnnnnnnnnnnnnnnncaccaaatgtcagatcatttgattcttccaattattaaacacatgagctgtgatggcaatgctgcatgcaatttagtgagagaaaggttagaggataaatgctcagaatacagcctgtgtgcatccaaatctccctactcytggggaaataaaagacatctgagtgaaaatgccatcrcctccctgtcataatttcattttaaaaatgaaaatgaaaacaaaatagttgatggggttatgatatcagaatatatgcaacacaatgttttttaaagtatttttaaagactttatactaagtattgttgaagtgtgcttaaataaacayagcgaagmrtgcacactatgaatgtgctcgacatctcaaacatgttcatcctttcaaagcttgagcactcctgactaccaaaaatacagatcagcaagggtacttgtgttcacaaaagtgtcttataagcttttatttgaagcatcccct

SEQ ID NO: 83797 - DNA, 600 bp, Chicken  19866894380581_3
ccaattattaaacacatgagctgtgatggcaatgctgcatgcaatttagtgagagaaaggttagaggataaatgctcagaatacagcctgtgtgcatccaaatctccctactcytggggaaataaaagacatctgagtgaaaatgccatcrcctccctgtcataatttcattttaaaaatgaaaatgaaaacaaaatagttgatggggttatgatatcagaatatatgcaacacaatgttttttaaagtatttttaaagactttatactaagtattgttgaagtgtgcttaaataaacayagcgaagmrtgcacactatgaatgtgctcgacatctcaaacatgttcatcctttcaaagcttgagcactcctgactaccaaaaatacagatcagcaagggtacttgtgttcacaaaagtgtcttataagcttttatttgaagcatcccctcttttgtcagtctggttgaagtcgttttacttggagttgagattagagataaatgccagggagttgccagctcatcctccctctcctgcactcaagataaagagaagtgtagggcatgtgtaaatctaagagctgctcacagccgctgaa

SEQ ID NO: 83798 - DNA, 600 bp, Chicken  19866894380581_4
taaacacatgagctgtgatggcaatgctgcatgcaatttagtgagagaaaggttagaggataaatgctcagaatacagcctgtgtgcatccaaatctccctactcytggggaaataaaagacatctgagtgaaaatgccatcrcctccctgtcataatttcattttaaaaatgaaaatgaaaacaaaatagttgatggggttatgatatcagaatatatgcaacacaatgttttttaaagtatttttaaagactttatactaagtattgttgaagtgtgcttaaataaacayagcgaagmrtgcacactatgaatgtgctcgacatctcaaacatgttcatcctttcaaagcttgagcactcctgactaccaaaaatacagatcagcaagggtacttgtgttcacaaaagtgtcttataagcttttatttgaagcatcccctcttttgtcagtctggttgaagtcgttttacttggagttgagattagagataaatgccagggagttgccagctcatcctccctctcctgcactcaagataaagagaagtgtagggcatgtgtaaatctaagagctgctcacagccgctgaacatcagag

SEQ ID NO: 83799 - DNA, 600 bp, Chicken  19866894380581_5
aaacacatgagctgtgatggcaatgctgcatgcaatttagtgagagaaaggttagaggataaatgctcagaatacagcctgtgtgcatccaaatctccctactcytggggaaataaaagacatctgagtgaaaatgccatcrcctccctgtcataatttcattttaaaaatgaaaatgaaaacaaaatagttgatggggttatgatatcagaatatatgcaacacaatgttttttaaagtatttttaaagactttatactaagtattgttgaagtgtgcttaaataaacayagcgaagmrtgcacactatgaatgtgctcgacatctcaaacatgttcatcctttcaaagcttgagcactcctgactaccaaaaatacagatcagcaagggtacttgtgttcacaaaagtgtcttataagcttttatttgaagcatcccctcttttgtcagtctggttgaagtcgttttacttggagttgagattagagataaatgccagggagttgccagctcatcctccctctcctgcactcaagataaagagaagtgtagggcatgtgtaaatctaagagctgctcacagccgctgaacatcagagg

SEQ ID NO: 83800 - DNA, 600 bp, Chicken  19866894380582_1
gcccttcagatattgacaagcatttatcagatcccctctcggccttctctcctccagatagatgcacagccccagggctctcagcctgttcccatcaggagatgttccaacacccttccatctctgcaccttccgctgggctctccagcagttcccagtctgccctgaactgggagcccagcgctgggtgcagtgctccagcagcaccccccagggcagagcagagggggcagaacctccctgccctgctggccacgctctgtgcaatgccttgcacagggtcccatcagtcttcttggyaatcagggcacacggtcagcctgttggccaccaggacccccaggcccttctctacagagcatgcacacgtgtgtacatgcgcacctactgggatgtggcacccggcctcaccgctgtccccagtgggacaacaacgtctcatcgtgaccagccgagcgggaaggatcccagtgtccttcagcctgccagactgctgcccgctgctcccaggaggcttctccagtgccatgtgggtcccagtggctccatcccacggctcggccgcccgcactcaccctcatgttggggtcatccagagag

SEQ ID NO: 83801 - DNA, 600 bp, Chicken  19866894380584_1
gttcccaccaagaagacagcaaggccagctgtcttgcagaaatgactctatgcattttctcaagcacacagcttgtgaaacaaacagaagttggaagccaccatgctactggaaaaccatgtcatcgttgctatcactgaaatctactgggacaactcccactactacaagctacttagaagggacaggtgaacaaggagaaaaggaggcattaccttccagaaagggaaagaaatagcatgtaaagagctgtctctgaagaatggcaatgagaaaatagaaagcctatgggtgataggmtgagactgaagactctttattacattaaacaaatgaagttgcaagtttttaaatcctatagttcctcccagataaaccacatcaaaccaaaattagtctgaatcacttacaattaatttatcaacatgtgatgttagctatgaagtgcacttcctgtgtttaccaagatgaatcttagtctacagctgacctttccagtaatggcaagacctctgatgaaactgaagaactttttattgcaaaagccaacaaattgatttcaatatatgatttatttttctaagagttactgttcagaaa

SEQ ID NO: 83802 - DNA, 600 bp, Chicken  19866894380588_1
gtcaactagaaaaaatttggcataggatgtaaaaatgcaaactgactgcatctcctaagttccatgtatgctccaaactgatttaaaaatatgatatactgagaaaaaaatagaactattacatgctgagaacacagtagacatcctgactgctgtacctttccagaacctggctgcacttatctgttcaagccagaaggtcagttttccttttaaagccagaccagctatttgaaaataaataaataaataaataatgaaaactctccttttctaattttcaaagctcaggtagctgargaaaagcttttcttttctgcatacatttacaagttgtctagtaactggtacatttctctaagaagtaggacaacattagctccaaactccaaacagtgccagtttgagggtggaggcattcttcacttcctcctgaagaaacaaacaaacccaagaacagcaaactgcactaggacagtagtcagtatcatcacaaaggagatgggtcctaggttttttccactttgaaagaggtgaatgctatggatttgggtagccccaaggctgagaaggaagatgtcaactcttaaaactattttc

SEQ ID NO: 83803 - DNA, 600 bp, Chicken  19866894380595_1
atcaaacacaaaaatactgcttaagaaaattactttctttaattcaaaatgaaacctgagattcttccctgctcacgggaaatggcacttaaagaaaataatcgtcactgagtgccatgcaagaaaaccattcacaacaccacttttccaaactgttaaggagactacaagagagctcatgttcctatagagcaggtacagaaatctttcctccccatcctctcctttggccaaaaaatatcgtaattgctcatctctgagggcagacctagaatcatagaataacctgagttggaagaracccataaggatgattgagttcaactcctaatctggwtttccttagctatgggtatgaggagaacatagaggcccaatgactgcagtaatgtcactgccagccatgcacttggcagagcagaaggtactgctcctcgagtagaatcactgttgctataattgggaatgggctgtgaagtgcctaaggcagaataacaggattcctctactttaagaattgtgtgtacactgagtacataaaccagatcagacatccaaatcagcagatgaaatcagaagaagatgaaaataatgcctttt

SEQ ID NO: 83804 - DNA, 600 bp, Chicken  19866894380595_2
tttaattcaaaatgaaacctgagattcttccctgctcacgggaaatggcacttaaagaaaataatcgtcactgagtgccatgcaagaaaaccattcacaacaccacttttccaaactgttaaggagactacaagagagctcatgttcctatagagcaggtacagaaatctttcctccccatcctctcctttggccaaaaaatatcgtaattgctcatctctgagggcagacctagaatcatagaataacctgagttggaagaracccataaggatgattgagttcaactcctaatctggwtttccttagctatgggtatgaggagaacatagaggcccaatgactgcagtaatgtcactgccagccatgcacttggcagagcagaaggtactgctcctcgagtagaatcactgttgctataattgggaatgggctgtgaagtgcctaaggcagaataacaggattcctctactttaagaattgtgtgtacactgagtacataaaccagatcagacatccaaatcagcagatgaaatcagaagaagatgaaaataatgccttttatgaaaaattcacttcaagatraggaacaaaccaaag

SEQ ID NO: 83805 - DNA, 600 bp, Chicken  19866894380595_3
aactcctaatctggwtttccttagctatgggtatgaggagaacatagaggcccaatgactgcagtaatgtcactgccagccatgcacttggcagagcagaaggtactgctcctcgagtagaatcactgttgctataattgggaatgggctgtgaagtgcctaaggcagaataacaggattcctctactttaagaattgtgtgtacactgagtacataaaccagatcagacatccaaatcagcagatgaaatcagaagaagatgaaaataatgccttttatgaaaaattcacttcaagatraggaacaaaccaaagagaggcagagaactctataatcccgctgccttgtctcttccagtgytttgcaaaagcaacaaaaatggccgcaacgtcagtgtttaaaatgcagcgcatgccccaaatgtttttacagcgactgtttgcaggcaggttcagctctgctgcagagcagccagattcatcactccagcccgttacccaccaaatgagatgtgtttactcaggagatcaagcactgcagcctatcagtcacttctgaaaaactggcctgagcaaacaggttgaaagccagctgcaaaa

SEQ ID NO: 83806 - DNA, 600 bp, Chicken  19866894380595_4
cagtaatgtcactgccagccatgcacttggcagagcagaaggtactgctcctcgagtagaatcactgttgctataattgggaatgggctgtgaagtgcctaaggcagaataacaggattcctctactttaagaattgtgtgtacactgagtacataaaccagatcagacatccaaatcagcagatgaaatcagaagaagatgaaaataatgccttttatgaaaaattcacttcaagatraggaacaaaccaaagagaggcagagaactctataatcccgctgccttgtctcttccagtgytttgcaaaagcaacaaaaatggccgcaacgtcagtgtttaaaatgcagcgcatgccccaaatgtttttacagcgactgtttgcaggcaggttcagctctgctgcagagcagccagattcatcactccagcccgttacccaccaaatgagatgtgtttactcaggagatcaagcactgcagcctatcagtcacttctgaaaaactggcctgagcaaacaggttgaaagccagctgcaaaatgtcacctgctcactaattagcctcttcacgcacagtaattgatttaccttgtcattacca

SEQ ID NO: 83807 - DNA, 600 bp, Chicken  19866894380617_1
ggggaagagttttactttgagattccaagaacgttccagtggttgtccttctacatttatgataaaagtgttctacaaaaagacctgcgtataggtaagttctgggatactctctgtgccttgcttaacattcagttgttttcagtatctgtggtttcatggatataattattaaactgatgaattctcagaaacatagtaggtagtgctcctaaatatttctttaaagtttgaaaaatttgtttctttgctttattatactttaaattatattatttaaattgtgtctttattttctasgcttatgggatattttatattcctactccatacattttggaatacttttytctccawttctgttccagtagttgtggaataattcttaaacctataaataaacttatagtgtgagaagaaaaaaaacttataaacttatmgtgagagaagtgcaacaygtaaacctagtgcttagaagttgcacaaaacacgcatatctgaaaaattacaggaggtggattaattttactgtctaatggctttattgcagctgttagtttcatatgaagttgatataaagctctaagagtctgctgtgga

SEQ ID NO: 83808 - DNA, 588 bp, Chicken  19866894380617_10
tactttgtcygtgcttcacatccttcagacgggattattgtaagaacatttaacagcacggtgtatctagagctgtagctgttgctgtctgttcttcagttattcygaagtaaatacagccgtgttcttgggaatccattagcactgttactgggaaatcaaatttagtatattttaagttttcttcagatattcccaggtcttggcttcctttctggaattaacargaattaaacttgctgattcctacgaagtaacgataraatggtggtggaggaaatgtggaggtttagagattgstcacttccaaaaaccaccatactttgcagtaaattgaagactcctaggatcacagtccactcctaatgcctacagaaggtctacmacttctgtctttttccattctggttccacaactctgtactaacactggtaatcagaagtggaggtgattagaagtagagcagagtaaaaatactgtatccttgagttcatacaagattttggttttgctgtgtataaataattccaagatcgtttatcttacgtgcttgcacaagctttttcaattcctttgctctttctttt

SEQ ID NO: 83809 - DNA, 503 bp, Chicken  19866894380617_11
tgtctgttcttcagttattcygaagtaaatacagccgtgttcttgggaatccattagcactgttactgggaaatcaaatttagtatattttaagttttcttcagatattcccaggtcttggcttcctttctggaattaacargaattaaacttgctgattcctacgaagtaacgataraatggtggtggaggaaatgtggaggtttagagattgstcacttccaaaaaccaccatactttgcagtaaattgaagactcctaggatcacagtccactcctaatgcctacagaaggtctacmacttctgtctttttccattctggttccacaactctgtactaacactggtaatcagaagtggaggtgattagaagtagagcagagtaaaaatactgtatccttgagttcatacaagattttggttttgctgtgtataaataattccaagatcgtttatcttacgtgcttgcacaagctttttcaattcctttgctctttctttt

SEQ ID NO: 83810 - DNA, 600 bp, Chicken  19866894380617_2
ctacatttatgataaaagtgttctacaaaaagacctgcgtataggtaagttctgggatactctctgtgccttgcttaacattcagttgttttcagtatctgtggtttcatggatataattattaaactgatgaattctcagaaacatagtaggtagtgctcctaaatatttctttaaagtttgaaaaatttgtttctttgctttattatactttaaattatattatttaaattgtgtctttattttctasgcttatgggatattttatattcctactccatacattttggaatacttttytctccawttctgttccagtagttgtggaataattcttaaacctataaataaacttatagtgtgagaagaaaaaaaacttataaacttatmgtgagagaagtgcaacaygtaaacctagtgcttagaagttgcacaaaacacgcatatctgaaaaattacaggaggtggattaattttactgtctaatggctttattgcagctgttagtttcatatgaagttgatataaagctctaagagtctgctgtggatgtggacttcatgttacttgagctgaggaaggaaataatttgtaccagga

SEQ ID NO: 83811 - DNA, 600 bp, Chicken  19866894380617_3
tatgataaaagtgttctacaaaaagacctgcgtataggtaagttctgggatactctctgtgccttgcttaacattcagttgttttcagtatctgtggtttcatggatataattattaaactgatgaattctcagaaacatagtaggtagtgctcctaaatatttctttaaagtttgaaaaatttgtttctttgctttattatactttaaattatattatttaaattgtgtctttattttctasgcttatgggatattttatattcctactccatacattttggaatacttttytctccawttctgttccagtagttgtggaataattcttaaacctataaataaacttatagtgtgagaagaaaaaaaacttataaacttatmgtgagagaagtgcaacaygtaaacctagtgcttagaagttgcacaaaacacgcatatctgaaaaattacaggaggtggattaattttactgtctaatggctttattgcagctgttagtttcatatgaagttgatataaagctctaagagtctgctgtggatgtggacttcatgttacttgagctgaggaaggaaataatttgtaccaggatgccaga

SEQ ID NO: 83812 - DNA, 600 bp, Chicken  19866894380617_4
ttcagtatctgtggtttcatggatataattattaaactgatgaattctcagaaacatagtaggtagtgctcctaaatatttctttaaagtttgaaaaatttgtttctttgctttattatactttaaattatattatttaaattgtgtctttattttctasgcttatgggatattttatattcctactccatacattttggaatacttttytctccawttctgttccagtagttgtggaataattcttaaacctataaataaacttatagtgtgagaagaaaaaaaacttataaacttatmgtgagagaagtgcaacaygtaaacctagtgcttagaagttgcacaaaacacgcatatctgaaaaattacaggaggtggattaattttactgtctaatggctttattgcagctgttagtttcatatgaagttgatataaagctctaagagtctgctgtggatgtggacttcatgttacttgagctgaggaaggaaataatttgtaccaggatgccagataatttggtataataacaggcttccaaatagcagtcagaagagcagaaggcatctatcttcaaattgctatttaaatgttctc

SEQ ID NO: 83813 - DNA, 600 bp, Chicken  19866894380617_5
atggatataattattaaactgatgaattctcagaaacatagtaggtagtgctcctaaatatttctttaaagtttgaaaaatttgtttctttgctttattatactttaaattatattatttaaattgtgtctttattttctasgcttatgggatattttatattcctactccatacattttggaatacttttytctccawttctgttccagtagttgtggaataattcttaaacctataaataaacttatagtgtgagaagaaaaaaaacttataaacttatmgtgagagaagtgcaacaygtaaacctagtgcttagaagttgcacaaaacacgcatatctgaaaaattacaggaggtggattaattttactgtctaatggctttattgcagctgttagtttcatatgaagttgatataaagctctaagagtctgctgtggatgtggacttcatgttacttgagctgaggaaggaaataatttgtaccaggatgccagataatttggtataataacaggcttccaaatagcagtcagaagagcagaaggcatctatcttcaaattgctatttaaatgttctccagcaccgttactgttct

SEQ ID NO: 83814 - DNA, 600 bp, Chicken  19866894380617_6
atattattccttgtgatgcttctcaaaactcgtaggagatctgaagtggctgtttgggaaatgtctaacagtattttgatgccaaaaaaaactttgatacgaggggaactatgtaatttagtaacctaaatcattcagctgtctactgagtggttttttcatctgaaatgttgatggtgtgatgtgaaatggccatgtctccaaattgggagttacttgtgctgtgctcatacattttattctcaaatgctttccacgtgcagcattaaataagctgtgcctcagagttctactttgtcygtgcttcacatccttcagacgggattattgtaagaacatttaacagcacggtgtatctagagctgtagctgttgctgtctgttcttcagttattcygaagtaaatacagccgtgttcttgggaatccattagcactgttactgggaaatcaaatttagtatattttaagttttcttcagatattcccaggtcttggcttcctttctggaattaacargaattaaacttgctgattcctacgaagtaacgataraatggtggtggaggaaatgtggaggtttagagattgstcacttccaa

SEQ ID NO: 83815 - DNA, 600 bp, Chicken  19866894380617_7
atacgaggggaactatgtaatttagtaacctaaatcattcagctgtctactgagtggttttttcatctgaaatgttgatggtgtgatgtgaaatggccatgtctccaaattgggagttacttgtgctgtgctcatacattttattctcaaatgctttccacgtgcagcattaaataagctgtgcctcagagttctactttgtcygtgcttcacatccttcagacgggattattgtaagaacatttaacagcacggtgtatctagagctgtagctgttgctgtctgttcttcagttattcygaagtaaatacagccgtgttcttgggaatccattagcactgttactgggaaatcaaatttagtatattttaagttttcttcagatattcccaggtcttggcttcctttctggaattaacargaattaaacttgctgattcctacgaagtaacgataraatggtggtggaggaaatgtggaggtttagagattgstcacttccaaaaaccaccatactttgcagtaaattgaagactcctaggatcacagtccactcctaatgcctacagaaggtctacmacttctgtctttttccattct

SEQ ID NO: 83816 - DNA, 600 bp, Chicken  19866894380617_8
tgtgctgtgctcatacattttattctcaaatgctttccacgtgcagcattaaataagctgtgcctcagagttctactttgtcygtgcttcacatccttcagacgggattattgtaagaacatttaacagcacggtgtatctagagctgtagctgttgctgtctgttcttcagttattcygaagtaaatacagccgtgttcttgggaatccattagcactgttactgggaaatcaaatttagtatattttaagttttcttcagatattcccaggtcttggcttcctttctggaattaacargaattaaacttgctgattcctacgaagtaacgataraatggtggtggaggaaatgtggaggtttagagattgstcacttccaaaaaccaccatactttgcagtaaattgaagactcctaggatcacagtccactcctaatgcctacagaaggtctacmacttctgtctttttccattctggttccacaactctgtactaacactggtaatcagaagtggaggtgattagaagtagagcagagtaaaaatactgtatccttgagttcatacaagattttggttttgctgtgtataaataat

SEQ ID NO: 83817 - DNA, 600 bp, Chicken  19866894380617_9
ccacgtgcagcattaaataagctgtgcctcagagttctactttgtcygtgcttcacatccttcagacgggattattgtaagaacatttaacagcacggtgtatctagagctgtagctgttgctgtctgttcttcagttattcygaagtaaatacagccgtgttcttgggaatccattagcactgttactgggaaatcaaatttagtatattttaagttttcttcagatattcccaggtcttggcttcctttctggaattaacargaattaaacttgctgattcctacgaagtaacgataraatggtggtggaggaaatgtggaggtttagagattgstcacttccaaaaaccaccatactttgcagtaaattgaagactcctaggatcacagtccactcctaatgcctacagaaggtctacmacttctgtctttttccattctggttccacaactctgtactaacactggtaatcagaagtggaggtgattagaagtagagcagagtaaaaatactgtatccttgagttcatacaagattttggttttgctgtgtataaataattccaagatcgtttatcttacgtgcttgcacaagctt

SEQ ID NO: 83818 - DNA, 600 bp, Chicken  19866894380626_1
caagtttttccctttatttttaattattttagtaattatgaaatcattataataattttaaacagttttaattatttccgttagttttctttgtcagataagatgcagtgactgttagtgacttgctatgtatagaagaatcccactgatatcgtccatattaccactacttgaacagcttattcagtgaatactttgtggggttcttatatatgtgcatcacgttactttaaggaaatacctgtgtgacaagtttgttatggctgtcaaatatcacattgctaattcagttctcacaayggcactgtattgggaaaattgccaaagaaatgactgatcatagtgttgataaagctacaggaagaacatttcctgctcagagcagagagatgatgagtgtttttgaggtataataaaaaatgcaatttttaaatcatataacattgtgtttatatggtatacagggctaggaggaaggcttctgtacattgagtttgtttcttaaatgtttaattaaatattatcagactaacgattagctcattcccatggaagtttccctggatggctgttttacagaaagcaaacagtatttaagag

SEQ ID NO: 83819 - DNA, 599 bp, Chicken  19866894380630_1
  misc_feature (1)..(177): n is any nucleotide
nnnnnnnnnnnnnnnnnnnnnnnnnnnnnnnnnnnnnnnnnnnnnnnnnnnnnnnnnnnnnnnnnnnnnnnnnnnnnnnnnnnnnnnnnnnnnnnnnnnnnnnnnnnnnnnnnnnnnnnnnnnnnnnnnnnnnnnnnnnnnnnnnnnnnnnnnnnnnnnnnnnnnnnnnnnnnnnnnatctcccctcattcatcactgtcacatctgtagaggtttttttatttaacaagcaatttatttccaatttgactaatctcaggctggagcatctcgcaccaactcaccaaagacaccgggtcygtaagtagacttaaagccacaccggttcatatcaactcccatcaaagtgcatcaggcaaaaatatgctggagggagactgcaggccactaaaatatgcaagcggccgcagtaaacaatcccttctcctcctccccatggctgcgggggcctttaagcgatttagatttatatatttgccttcyggattgccccgtctcaccttgggaaggcaacaaaggctttcataaacaatttacggggagataatgcagggggggctgcgggagggtgggcagtgcaggcaatcagcgctgggagc

SEQ ID NO: 83820 - DNA, 600 bp, Chicken  19866894380630_2
cctcattcatcactgtcacatctgtagaggtttttttatttaacaagcaatttatttccaatttgactaatctcaggctggagcatctcgcaccaactcaccaaagacaccgggtcygtaagtagacttaaagccacaccggttcatatcaactcccatcaaagtgcatcaggcaaaaatatgctggagggagactgcaggccactaaaatatgcaagcggccgcagtaaacaatcccttctcctcctccccatggctgcgggggcctttaagcgatttagatttatatatttgccttcyggattgccccgtctcaccttgggaaggcaacaaaggctttcataaacaatttacggggagataatgcagggggggctgcgggagggtgggcagtgcaggcaatcagcgctgggagccgtatttctgcagccccgccgcactgtatcactccggcactgcgttatcgtacccttgcctgtaaggtcatgttgcagccgtagatgtactttggaacaacaattactctagataagaaaaatctaactggataaagggacagctaatcaggaggctacaagcccccgaattgctcaaggaatc

SEQ ID NO: 83821 - DNA, 599 bp, Chicken  19866894380634_1
  misc_feature (1)..(32): n is any nucleotide
nnnnnnnnnnnnnnnnnnnnnnnnnnnnnnnnatttcaccattttacacgtttaaaggctgcactcacagtgtgcaacagtggaagaactgttatttccctccatttgtagggagcatattcaaggtgcctgaggtaatccatgtgtttataaactatgcatagtgctaccctaatccagccatacaccagtagactctcgtgatccacacgcatctccatgtacaaaaaggattagaatatatagatttaaacaacattcaaagcattattttgagctctctttaatgaattcagtgayttctgttctcgttaaggtgttgtcatacccagatctaactgaacctaatcacagcacatcctctcctgccggtaaaggggaggccacagcctatcatggttgggaatgggtgcagaagtgatgaaggacactggcagaggtggatycccccttycaaaatgtgcgactctctttcagatcagttcctactgtgcttgactaaaggagctaaaatgaacccctctcctgcactctcacttgccccacagygtctcagacaccaggggtacttcatgtacccctgcccaactgccctggga

SEQ ID NO: 83822 - DNA, 600 bp, Chicken  19866894380634_2
tttataaactatgcatagtgctaccctaatccagccatacaccagtagactctcgtgatccacacgcatctccatgtacaaaaaggattagaatatatagatttaaacaacattcaaagcattattttgagctctctttaatgaattcagtgayttctgttctcgttaaggtgttgtcatacccagatctaactgaacctaatcacagcacatcctctcctgccggtaaaggggaggccacagcctatcatggttgggaatgggtgcagaagtgatgaaggacactggcagaggtggatycccccttycaaaatgtgcgactctctttcagatcagttcctactgtgcttgactaaaggagctaaaatgaacccctctcctgcactctcacttgccccacagygtctcagacaccaggggtacttcatgtacccctgcccaactgccctgggagaggtccctctacaaaccacagcaccctttgggtctcctctaggaacccctggattctttgatcacatcccaaaggtccctatcagatcactttctgctctctttgtccctgrtaaagctgaacctatcatatgattgaactgcttt

SEQ ID NO: 83823 - DNA, 600 bp, Chicken  19866894380634_3
ctatgcatagtgctaccctaatccagccatacaccagtagactctcgtgatccacacgcatctccatgtacaaaaaggattagaatatatagatttaaacaacattcaaagcattattttgagctctctttaatgaattcagtgayttctgttctcgttaaggtgttgtcatacccagatctaactgaacctaatcacagcacatcctctcctgccggtaaaggggaggccacagcctatcatggttgggaatgggtgcagaagtgatgaaggacactggcagaggtggatycccccttycaaaatgtgcgactctctttcagatcagttcctactgtgcttgactaaaggagctaaaatgaacccctctcctgcactctcacttgccccacagygtctcagacaccaggggtacttcatgtacccctgcccaactgccctgggagaggtccctctacaaaccacagcaccctttgggtctcctctaggaacccctggattctttgatcacatcccaaaggtccctatcagatcactttctgctctctttgtccctgrtaaagctgaacctatcatatgattgaactgctttatgttaag

SEQ ID NO: 83824 - DNA, 600 bp, Chicken  19866894380634_4
taaacaacattcaaagcattattttgagctctctttaatgaattcagtgayttctgttctcgttaaggtgttgtcatacccagatctaactgaacctaatcacagcacatcctctcctgccggtaaaggggaggccacagcctatcatggttgggaatgggtgcagaagtgatgaaggacactggcagaggtggatycccccttycaaaatgtgcgactctctttcagatcagttcctactgtgcttgactaaaggagctaaaatgaacccctctcctgcactctcacttgccccacagygtctcagacaccaggggtacttcatgtacccctgcccaactgccctgggagaggtccctctacaaaccacagcaccctttgggtctcctctaggaacccctggattctttgatcacatcccaaaggtccctatcagatcactttctgctctctttgtccctgrtaaagctgaacctatcatatgattgaactgctttatgttaagaatttcccacagatgagttggctacttcatctgcctgtgtaacaaaatgaattaggagataatctacttgtgtatgaaattatttagaccaaata

SEQ ID NO: 83825 - DNA, 600 bp, Chicken  19866894380634_5
cagaagtgatgaaggacactggcagaggtggatycccccttycaaaatgtgcgactctctttcagatcagttcctactgtgcttgactaaaggagctaaaatgaacccctctcctgcactctcacttgccccacagygtctcagacaccaggggtacttcatgtacccctgcccaactgccctgggagaggtccctctacaaaccacagcaccctttgggtctcctctaggaacccctggattctttgatcacatcccaaaggtccctatcagatcactttctgctctctttgtccctgrtaaagctgaacctatcatatgattgaactgctttatgttaagaatttcccacagatgagttggctacttcatctgcctgtgtaacaaaatgaattaggagataatctacttgtgtatgaaattatttagaccaaataggctgtgctgtggttcagctgacaggaaatcaggctttaagatgtggtaatttcatcactcgcagtcaactcctcaggctaattacagtggtctctgatttgggaggctgcagtgttttttgcgatgttggcagagtttgaccaacgtagttttttggttact

SEQ ID NO: 83826 - DNA, 572 bp, Chicken  19866894380637_1
gcattcttgattttacaacggagtcaaaacggtgacgtaatgttattatttaaaaatagtgcagatatatacctggagagaaggacttcccacagtaaaggagccatgcgggggttgtgggtacaagcagcaaaagggtgtttgcacttagcagatgttctcgactcttacgcttcttgtattcagcatgaaaaaggacaaggtgtgattgaggagaacgaagtttacagcaatactttggctggggtctgggtgacaacggggagcactccggtcttgaggagaaacagaatacatagygggaaacaggtgagtttgactcagcgtgctgcgaggaggatggaggaasaggaacagtttgtatttcattascttcaaactaataatgacatttctcacatgctaggttggagtttatttctacgacaacggacacggcgtgttagaagacaacgacatctataatcacatgtactcaggggttcagataaggtaacgtgtattctcattcctctgcctaaacagacattgccttgtgttatttcatccttttttttcaactgctgttgtca

SEQ ID NO: 83827 - DNA, 523 bp, Chicken  19866894380637_2
ttaaaaatagtgcagatatatacctggagagaaggacttcccacagtaaaggagccatgcgggggttgtgggtacaagcagcaaaagggtgtttgcacttagcagatgttctcgactcttacgcttcttgtattcagcatgaaaaaggacaaggtgtgattgaggagaacgaagtttacagcaatactttggctggggtctgggtgacaacggggagcactccggtcttgaggagaaacagaatacatagygggaaacaggtgagtttgactcagcgtgctgcgaggaggatggaggaasaggaacagtttgtatttcattascttcaaactaataatgacatttctcacatgctaggttggagtttatttctacgacaacggacacggcgtgttagaagacaacgacatctataatcacatgtactcaggggttcagataaggtaacgtgtattctcattcctctgcctaaacagacattgccttgtgttatttcatccttttttttcaactgctgttgtca

SEQ ID NO: 83828 - DNA, 500 bp, Chicken  19866894380637_3
ctggagagaaggacttcccacagtaaaggagccatgcgggggttgtgggtacaagcagcaaaagggtgtttgcacttagcagatgttctcgactcttacgcttcttgtattcagcatgaaaaaggacaaggtgtgattgaggagaacgaagtttacagcaatactttggctggggtctgggtgacaacggggagcactccggtcttgaggagaaacagaatacatagygggaaacaggtgagtttgactcagcgtgctgcgaggaggatggaggaasaggaacagtttgtatttcattascttcaaactaataatgacatttctcacatgctaggttggagtttatttctacgacaacggacacggcgtgttagaagacaacgacatctataatcacatgtactcaggggttcagataaggtaacgtgtattctcattcctctgcctaaacagacattgccttgtgttatttcatccttttttttcaactgctgttgtca

SEQ ID NO: 83829 - DNA, 600 bp, Chicken  19866894380645_1
atgtgaatcctcgtcctgttcacattcatgctgtatgaattactgtctagggatctgttttctctttccttgcaggtcatattttccttcctaccacaagaaaagggatgtaaaaatcagaatattggcaatttatgtaccatcgtagatgttttcacaaaaggaattggatagttttgcagttgtgatacccctagtggaaataattatctccagtttaaacactgtaaatcacagataaaagaagtgcatgttaaagcagacttgcctgtctaacagcaggtctgctttctctcggastcagtactgctttcttccgtagatcctgtattacttctcccagcttccctcctgctgaaataactgtggtgctaataacaatatgtgagaaatgactagatgtgctagttttttttagataattataccagtttttccagttttccaacattttttcacttattaactcatcagtgccagaaattggacttttccagtacataaatcctaattaacaagccaaagggttgaacactccattttactcctgatgtgccatttcccctccattcttgcttaattggcattttgaaaagcaaa

SEQ ID NO: 83830 - DNA, 600 bp, Chicken  19866894380645_2
tagatcctgtattacttctcccagcttccctcctgctgaaataactgtggtgctaataacaatatgtgagaaatgactagatgtgctagttttttttagataattataccagtttttccagttttccaacattttttcacttattaactcatcagtgccagaaattggacttttccagtacataaatcctaattaacaagccaaagggttgaacactccattttactcctgatgtgccatttcccctccattcttgcttaattggcattttgaaaagcaaacccatgcctttcaagagtsaaaaaaaraaatacagatgtattttgggaaataggtggaaaattggtaaagggaggaaaaaagtaaagaagatgtagttgggctctggaccttctggtcattctgaggttgcagggcatggaggtgtgcagagtggctgagatgagtgactgaactccatacatgggcacagggggagtttattaaatgatgctgatcctgtggagcatcttttaattccactaaggcagctaaggctgcatgtggtacactactgatatgcattgatcttatgggtttccatgcagcctaaatttctac

SEQ ID NO: 83831 - DNA, 600 bp, Chicken  19866894380645_3
gtattacttctcccagcttccctcctgctgaaataactgtggtgctaataacaatatgtgagaaatgactagatgtgctagttttttttagataattataccagtttttccagttttccaacattttttcacttattaactcatcagtgccagaaattggacttttccagtacataaatcctaattaacaagccaaagggttgaacactccattttactcctgatgtgccatttcccctccattcttgcttaattggcattttgaaaagcaaacccatgcctttcaagagtaaaaaaaaraaatacagatgtattttgggaaataggtggaaaattggtaaagggaggaaaaaagtaaagaagatgtagttgggctctggaccttctggtcattctgaggttgcagggcatggaggtgtgcagagtggctgagatgagtgactgaactccatacatgggcacagggggagtttattaaatgatgctgatcctgtggagcatcttttaattccactaaggcagctaaggctgcatgtggtacactactgatatgcattgatcttatgggtttccatgcagcctaaatttctacttaccaaa

SEQ ID NO: 83832 - DNA, 600 bp, Chicken  19866894380649_1
aaggtgtatctatgctggcacacatgctctgggccatcctcccagggaaaacttagttaatattccaaaggcagaaaccaagaccatgtcttcataagtatagaaattttcaaaggaaaaagattacttcctcctgggattttgatcttcattgtatttctgacataattgctattgagaataaagcaagattgggcctacggggaattcactcttggtttggaagtctctgatctttccttaagtgaaggcctttcatgtcaccaaattgatttcatgtcaatatgatgtctacagttyaagtcaggaaaaagtgatgtcatatttctaaagcattttaaacctagtatactttccaaataacagactttctctaccactttctctccatcttcattcagattctctgtccctgtaaaaccttgtcagaaaattgattcataagagtttcatgcttttgccaaccaatagacatacytaaggtccaaagtgctayttttggacaagctgagagatctgaggctgttcagcgtggagtagagaaggttccagggagacctgatagcagcctttctgtatctaaagagggactgaaaggaa

SEQ ID NO: 83833 - DNA, 600 bp, Chicken  19866894380649_2
gaataaagcaagattgggcctacggggaattcactcttggtttggaagtctctgatctttccttaagtgaaggcctttcatgtcaccaaattgatttcatgtcaatatgatgtctacagttyaagtcaggaaaaagtgatgtcatatttctaaagcattttaaacctagtatactttccaaataacagactttctctaccactttctctccatcttcattcagattctctgtccctgtaaaaccttgtcagaaaattgattcataagagtttcatgcttttgccaaccaatagacatacytaaggtccaaagtgctayttttggacaagctgagagatctgaggctgttcagcgtggagtagagaaggttccagggagacctgatagcagcctttctgtatctaaagagggactgaaaggaagtaggggtcagactctttagtgggatctgttgtggtaaatcaaggggaaatggtatcaaattaaatcaggggatatttggactggatataaggaaagtttttaatgatgtgggcagtgaagcactgacacaagttgcctagataggtgcacagtggagacgctcaaggtcaggctgga

SEQ ID NO: 83834 - DNA, 600 bp, Chicken  19866894380649_3
cctacggggaattcactcttggtttggaagtctctgatctttccttaagtgaaggcctttcatgtcaccaaattgatttcatgtcaatatgatgtctacagttyaagtcaggaaaaagtgatgtcatatttctaaagcattttaaacctagtatactttccaaataacagactttctctaccactttctctccatcttcattcagattctctgtccctgtaaaaccttgtcagaaaattgattcataagagtttcatgcttttgccaaccaatagacatacytaaggtccaaagtgctayttttggacaagctgagagatctgaggctgttcagcgtggagtagagaaggttccagggagacctgatagcagcctttctgtatctaaagagggactgaaaggaagtaggggtcagactctttagtgggatctgttgtggtaaatcaaggggaaatggtatcaaattaaatcaggggatatttggactggatataaggaaagtttttaatgatgtgggcagtgaagcactgacacaagttgcctagataggtgcacagtggagacgctcaaggtcaggctggactggactctgagcactct

SEQ ID NO: 83835 - DNA, 600 bp, Chicken  19866894380649_4
tcagcgtggagtagagaaggttccagggagacctgatagcagcctttctgtatctaaagagggactgaaaggaagtaggggtcagactctttagtgggatctgttgtggtaaatcaaggggaaatggtatcaaattaaatcaggggatatttggactggatataaggaaagtttttaatgatgtgggcagtgaagcactgacacaagttgcctagataggtgcacagtggagacgctcaaggtcaggctggactggactctgagcactctgatgtagttgtaggtgtccctgttcattgmaggggggttggactagatgacctttaaaggtcccatccaagtcaaatgattctatgattatataacttgtatagaccatttcataattattaatctgaatatgtaacagcatgacattttgagttaaaagaaagataggttcatgtgttttcattactcctctgtgggagatattaacatttccagaaaataatcataccaggtgaatcttgaaaatacttatcaaacagcatctaaagatgttctcttttttttttttttttttaagaacattcttaacagatgccatgattaaaatta

SEQ ID NO: 83836 - DNA, 600 bp, Chicken  19866894380652_1
tgcgattctagacatgaaataattatccctttatgaaatcacatctgtaaaaagataattgatttgaacgagtgcaatttttcacagagacatgagtgaatacagcacctattttacctctacaatattttcttatagtctttaaaaacctgacatttaatagtggcagttttaccatttgcttatttttattttatgtgtacatttccttcgtatgtatatatttagacataaaaatgtgtgtgcttcagaaaaacaagaaattagcttggagcactgcgggggaagcacagtttgccyaaatgacacagtgttttttcaaccttctattaaattttcctgcttccacaggctgtcccaaggagtacatacaacatgaagtgactctgatgtttcccagtattaagcctcccgtttcttttgcctattggacactctgcctggaaagcaggattctgcacagtggcacatgccctgtcaactcctgaaagcatttttgagttgcagaaacaagaccaacactggtacccagaagtgtgagatgaagagatataatgccagacaaaggccacaggcgccatagtagaatttcaaggtgtg

SEQ ID NO: 83837 - DNA, 599 bp, Chicken  19866894380660_1
  misc_feature (1)..(176): n is any nucleotide
nnnnnnnnnnnnnnnnnnnnnnnnnnnnnnnnnnnnnnnnnnnnnnnnnnnnnnnnnnnnnnnnnnnnnnnnnnnnnnnnnnnnnnnnnnnnnnnnnnnnnnnnnnnnnnnnnnnnnnnnnnnnnnnnnnnnnnnnnnnnnnnnnnnnnnnnnnnnnnnnnnnnnnnnnnnnnnnnggcgtctgtttacacggtgttaaagcctgcagagggcacgtggttttcctaatgggacctgggctccatttgcaagaacagagtcccatcttcccctctaatgctgtcttctctcacagcatcygagcagctgaatgcactcatctcygaggccttygtgcagttctttgtccgtctggtcgggcattacacctcacacatcaagtggagtaaaaacggcccgggcaccttccaggaaagagccttctgcaaggccatcacctccaagaccaaccgcaggttcgtgaagaagtttgtgaagaccaacatgttctccttatttattgaggacgcagagaagagcaggatcccacaggaaggtaaagggggctgcagggtgctggggtggagggagaagggcagaaaatgccccatacccrgaga

SEQ ID NO: 83838 - DNA, 599 bp, Chicken  19866894380660_2
  misc_feature (1)..(152): n is any nucleotide
nnnnnnnnnnnnnnnnnnnnnnnnnnnnnnnnnnnnnnnnnnnnnnnnnnnnnnnnnnnnnnnnnnnnnnnnnnnnnnnnnnnnnnnnnnnnnnnnnnnnnnnnnnnnnnnnnnnnnnnnnnnnnnnnnnnnnnnnnnnnnnnnnnnnnnnnggcgtctgtttacacggtgttaaagcctgcagagggcacgtggttttcctaatgggacctgggctccatttgcaagaacagagtcccatcttcccctctaatgctgtcttctctcacagcatcygagcagctgaatgcactcatctcygaggccttygtgcagttctttgtccgtctggtcgggcattacacctcacacatcaagtggagtaaaaacggcccgggcaccttccaggaaagagccttctgcaaggccatcacctccaagaccaaccgcaggttcgtgaagaagtttgtgaagaccaacatgttctccttatttattgaggacgcagagaagagcaggatcccacaggaaggtaaagggggctgcagggtgctggggtggagggagaagggcagaaaatgccccatacccrgagagggatgcagggatgctctgcagcc

SEQ ID NO: 83839 - DNA, 599 bp, Chicken  19866894380660_3
  misc_feature (1)..(143): n is any nucleotide
nnnnnnnnnnnnnnnnnnnnnnnnnnnnnnnnnnnnnnnnnnnnnnnnnnnnnnnnnnnnnnnnnnnnnnnnnnnnnnnnnnnnnnnnnnnnnnnnnnnnnnnnnnnnnnnnnnnnnnnnnnnnnnnnnnnnnnnnnnnnnnnggcgtctgtttacacggtgttaaagcctgcagagggcacgtggttttcctaatgggacctgggctccatttgcaagaacagagtcccatcttcccctctaatgctgtcttctctcacagcatcygagcagctgaatgcactcatctcygaggccttygtgcagttctttgtccgtctggtcgggcattacacctcacacatcaagtggagtaaaaacggcccgggcaccttccaggaaagagccttctgcaaggccatcacctccaagaccaaccgcaggttcgtgaagaagtttgtgaagaccaacatgttctccttatttattgaggacgcagagaagagcaggatcccacaggaaggtaaagggggctgcagggtgctggggtggagggagaagggcagaaaatgccccatacccrgagagggatgcagggatgctctgcagcctgctgtgcc

SEQ ID NO: 83840 - DNA, 535 bp, Chicken  19866894380660_4
catcygagcagctgaatgcactcatctcygaggccttygtgcagttctttgtccgtctggtcgggcattacacctcacacatcaagtggagtaaaaacggcccgggcaccttccaggaaagagccttctgcaaggccatcacctccaagaccaaccgcaggttcgtgaagaagtttgtgaagaccaacatgttctccttatttattgaggacgcagagaagagcaggatcccacaggaaggtaaagggggctgcagggtgctggggtggagggagaagggcagaaaatgccccatacccrgagagggatgcagggatgctctgcagcctgctgtgccctgccyggggtgcacagggacagacctgcagcagatggagggcagaagccaggctgttgtgttcctgctgcgtcacctttcgggctgtttgcattctcagcatctcccrctttctttcttccctgttggttgggaacaggaatgaaggtgtgggtgaaaacccagctgagagtaattgaggccactgtaggggggaag

SEQ ID NO: 83841 - DNA, 492 bp, Chicken  19866894380660_5
gttctttgtccgtctggtcgggcattacacctcacacatcaagtggagtaaaaacggcccgggcaccttccaggaaagagccttctgcaaggccatcacctccaagaccaaccgcaggttcgtgaagaagtttgtgaagaccaacatgttctccttatttattgaggacgcagagaagagcaggatcccacaggaaggtaaagggggctgcagggtgctggggtggagggagaagggcagaaaatgccccatacccrgagagggatgcagggatgctctgcagcctgctgtgccctgccyggggtgcacagggacagacctgcagcagatggagggcagaagccaggctgttgtgttcctgctgcgtcacctttcgggctgtttgcattctcagcatctcccrctttctttcttccctgttggttgggaacaggaatgaaggtgtgggtgaaaacccagctgagagtaattgaggccactgtaggggggaag

SEQ ID NO: 83842 - DNA, 389 bp, Chicken  19866894380660_6
aagaccaaccgcaggttcgtgaagaagtttgtgaagaccaacatgttctccttatttattgaggacgcagagaagagcaggatcccacaggaaggtaaagggggctgcagggtgctggggtggagggagaagggcagaaaatgccccatacccrgagagggatgcagggatgctctgcagcctgctgtgccctgccyggggtgcacagggacagacctgcagcagatggagggcagaagccaggctgttgtgttcctgctgcgtcacctttcgggctgtttgcattctcagcatctcccrctttctttcttccctgttggttgggaacaggaatgaaggtgtgggtgaaaacccagctgagagtaattgaggccactgtaggggggaag

SEQ ID NO: 83843 - DNA, 600 bp, Chicken  19866894380661_1
atgacatctaccatacaattaaaaagttgtgctgcgtgacattgtagatataaaaaataaaaagctgagcaagcaagttccatctgacattaagtttcagcaggttcagtagttcctgtgcttccaatgcctcactgatgaccaggatgtctgtgcctcctgcgtgccccaaccaaccccaggctgatcccaaacagcgggcacccaactgaatgctggcatttccagtacccatgtggaaagcccaacaaaagcaacattcactctggggcagcactccggtgtccatccatgcttccytgtttcacagctccaaaygtatccttccccttttcccagccatagcagatacctcagagccataaggacactgacaggtagtctgacatcgggagccagacttcctcccagccacatcggcatcatcaaagaaaccaaagggatttgtgatttaacacttccagtctgaaactcctcccctcaaacacaagagtgggacgcctacatatttttatatggaggctctgatttcyacatccagcttacatctgcaccttaagaaaacaagcactgacacctgtgcctgggctcacaggaccc

SEQ ID NO: 83844 - DNA, 600 bp, Chicken  19866894380661_2
ttaaaaagttgtgctgcgtgacattgtagatataaaaaataaaaagctgagcaagcaagttccatctgacattaagtttcagcaggttcagtagttcctgtgcttccaatgcctcactgatgaccaggatgtctgtgcctcctgcgtgccccaaccaaccccaggctgatcccaaacagcgggcacccaactgaatgctggcatttccagtacccatgtggaaagcccaacaaaagcaacattcactctggggcagcactccggtgtccatccatgcttccytgtttcacagctccaaaygtatccttccccttttcccagccatagcagatacctcagagccataaggacactgacaggtagtctgacatcgggagccagacttcctcccagccacatcggcatcatcaaagaaaccaaagggatttgtgatttaacacttccagtctgaaactcctcccctcaaacacaagagtgggacgcctacatatttttatatggaggctctgatttcyacatccagcttacatctgcaccttaagaaaacaagcactgacacctgtgcctgggctcacaggacccagcagagctgtgctgtga

SEQ ID NO: 83845 - DNA, 600 bp, Chicken  19866894380661_3
atgtggaaagcccaacaaaagcaacattcactctggggcagcactccggtgtccatccatgcttccytgtttcacagctccaaaygtatccttccccttttcccagccatagcagatacctcagagccataaggacactgacaggtagtctgacatcgggagccagacttcctcccagccacatcggcatcatcaaagaaaccaaagggatttgtgatttaacacttccagtctgaaactcctcccctcaaacacaagagtgggacgcctacatatttttatatggaggctctgatttcyacatccagcttacatctgcaccttaagaaaacaagcactgacacctgtgcctgggctcacaggacccagcagagctgtgctgtgacccccagatgagggctccccccaggaggggctctgccaggggtgggctgcagggctccatccagcaccgatagacactgtgtgttcccagcatggcaaacggattctctttcatttgtttccaagagtgcattttcatttaaaaggatgtcaggatcagaagctttcctacagcaaacagtgcgtcagctggcttaaaaaccagtccctcttcag

SEQ ID NO: 83846 - DNA, 599 bp, Chicken  19866894380665_1
  misc_feature (1)..(88): n is any nucleotide
nnnnnnnnnnnnnnnnnnnnnnnnnnnnnnnnnnnnnnnnnnnnnnnnnnnnnnnnnnnnnnnnnnnnnnnnnnnnnnnnnnnnnnnnttaaagaaagcagagcttgagactagaaaaagtagagagaagaattcctagagagatggggcagagaagatagatgatctgctttagaagtgagcctttcagaaatcatatgactgtaagtttccaaagatgctgaggaaataaagcaccaaaaccatctaaaagtcctattagtggagctgtatgttaattcttcttgggagtctgggctygactcaaaaaaaacccaaaaacataggaataatgtcatacttggacttgtcagcaacataaggtgtattttagatttaaaatttttgaaagaagtgattttgttacaagaagcagccttcttaactagatatgtaactaaaatcctatcccaacctctgagaaatttaaattggattcaattttgtggtytggagctgtctcaagttgaataccatgggctgggaaaggggccagaagagtatccattgccagaagaaacaaagaagaacaggaggtacgtggtataaccattgcacat

SEQ ID NO: 83847 - DNA, 600 bp, Chicken  19866894380665_2
aaatcatatgactgtaagtttccaaagatgctgaggaaataaagcaccaaaaccatctaaaagtcctattagtggagctgtatgttaattcttcttgggagtctgggctygactcaaaaaaaacccaaaaacataggaataatgtcatacttggacttgtcagcaacataaggtgtattttagatttaaaatttttgaaagaagtgattttgttacaagaagcagccttcttaactagatatgtaactaaaatcctatcccaacctctgagaaatttaaattggattcaattttgtggtytggagctgtctcaagttgaataccatgggctgggaaaggggccagaagagtatccattgccagaagaaacaaagaagaacaggaggtacgtggtataaccattgcacattacctactggcccatgctagtctatgttaatgcaaggaagagtgagttcctatctcgtaaacatccttcttcctccaaagagctttctgtctgctccctggcattttcagaacttactatgggctccctagcatcagtggatgattacattgccctgttctagtcaggtactacagggagaaaaaaaatga

SEQ ID NO: 83848 - DNA, 600 bp, Chicken  19866894380665_3
aagaagaacaggaggtacgtggtataaccattgcacattacctactggcccatgctagtctatgttaatgcaaggaagagtgagttcctatctcgtaaacatccttcttcctccaaagagctttctgtctgctccctggcattttcagaacttactatgggctccctagcatcagtggatgattacattgccctgttctagtcaggtactacagggagaaaaaaaatgatccttagtcaaaactcaaaagtaagttacgcttttagaaaggtcaaaatcaactggaaggaatttagagtwaatatgcagcaatgctactgcatttttattttattttattttaagaaagcagttaaattgtgcataaaaaagaaatcagaatacaattaaacatttgtgctgaattgaggccattcagcacagggaatatgaagttgctactagtctgattaggccttcattcaaatacaatctccttcccttcactggagttgatcgtgtcatcaaagtaagtcccagctaatgtgagtaaggaactgaaccttcccaagtggagctcagcaatagcatgatgtgatcagcatctgcttacataataca

SEQ ID NO: 83849 - DNA, 600 bp, Chicken  19866894380666_1
gagaaactactggactttcttgctaggcccgagagggagatacttcaaacttggttttatattttggaatagcttgatgtgacaagcacctgcatgttgtcttctgtacagcatctatatctgttagtgtagtcaggaaggattctggaaatcaagggtaagcacggtggtttgggtgctataggagtgcctggggaccagttttggttggtggctgtgcttgagcttctctgaagttagtgaaagttagttttatttacaaagcttgcttagatgagtgtgaaacagaaggggtgtgcrtgctaagtctctgtttacctgcaaccaatccagagtgcctkctggatgaatctcaggcgttggtgaaactaattatgccttgagattatttggagttcgttgagtccaattaaactgtcttatgaaataatgtcagaagtgaatctgaagaatttgctaactactgatatttttgtatttaaaatgatggtgccattttaaaattgaaggtaaacattcattttcaaagagcaggtaatgatcaaaagttttgaagatctggactttatttggtgttattgttaactgattgcttttatt

SEQ ID NO: 83850 - DNA, 600 bp, Chicken  19866894380666_2
acttcaaacttggttttatattttggaatagcttgatgtgacaagcacctgcatgttgtcttctgtacagcatctatatctgttagtgtagtcaggaaggattctggaaatcaagggtaagcacggtggtttgggtgctataggagtgcctggggaccagttttggttggtggctgtgcttgagcttctctgaagttagtgaaagttagttttatttacaaagcttgcttagatgagtgtgaaacagaaggggtgtgcrtgctaagtctctgtttacctgcaaccaatccagagtgcctkctggatgaatctcaggcgttggtgaaactaattatgccttgagattatttggagttcgttgagtccaattaaactgtcttatgaaataatgtcagaagtgaatctgaagaatttgctaactactgatatttttgtatttaaaatgatggtgccattttaaaattgaaggtaaacattcattttcaaagagcaggtaatgatcaaaagttttgaagatctggactttatttggtgttattgttaactgattgcttttatttttctttctgcggtagtgatcacatggaaaatatttgtggc

SEQ ID NO: 83851 - DNA, 599 bp, Chicken  19866894380672_1
  misc_feature (1)..(164): n is any nucleotide
nnnnnnnnnnnnnnnnnnnnnnnnnnnnnnnnnnnnnnnnnnnnnnnnnnnnnnnnnnnnnnnnnnnnnnnnnnnnnnnnnnnnnnnnnnnnnnnnnnnnnnnnnnnnnnnnnnnnnnnnnnnnnnnnnnnnnnnnnnnnnnnnnnnnnnnnnnnnnnnnnnnntgcctggcaaaccacattttcccacaattcccctggcaaaccaccttttcccttatggctgaggcaggaagctcagtgtgacaggtgacatcccctgccatggggctctggggtgggtatgggctggtggtcccartctgtgtctctttccccatctataaacaagaggaaatcggtctttccaaatggtctttccccacccaataaggcagcagtggtcctggggtgtcttgagtacatccaatgggttcatttgactgggagtatacgaagcacatggaaggaggcaggtggcagctcactcctgtgggatttgggttgccttatgctcacgctctgctgccttctgtgcaagaaaaccaagaatgagctttcagaaaccagggggtgcttcccatgatgcagactggcacggggtccattgccatgcccctc

SEQ ID NO: 83852 - DNA, 479 bp, Chicken  19866894380672_2
gggttcatttgactgggagtatacgaagcacatggaaggaggcaggtggcagctcactcctgtgggatttgggttgccttatgctcacgctctgctgccttctgtgcaagaaaaccaagaatgagctttcagaaaccagggggtgcttcccatgatgcagactggcacggggtccattgccatgcccctcctgagccccactccatctcactgcaggcagcaggcatgggaagggcagcgatgggatgtgccatggatcctggcttcacatttccccttgctatacaccatggagcctcrgttgacgtttcccttcatgctccaactttcctgtcattaccaaattgctcagtgatgagaccgtgggtgtgataagagatctgcatacttaacgcagcagggctgttgctcaatcttcagtgatcctttttgctttatctgttgctatctccctttggtagactcctctctaggttgag

SEQ ID NO: 83853 - DNA, 600 bp, Chicken  19866894380676_1
tgctatctctatgcaaagagagaacttcggtagcaaagtaaatctgtgtgcacgtatgcggcatcagataatcacaggacctcaaaaaaaagacatacagaatggagacagaacagtgccaaattaggaaagacccttttcaggcaagtttttatgtatggaagagactatccatcatcgaatgcagggcaggttccccccaataccacagaacacagtcggtattgctgtgattaaaagcatcattgtgaacctccacaatacaaaaaaggtcacctcatttccagatattccttaacygagcatcttcatcttctgaaagarttctctggacttaagcaaagccytttgttgcttttctgtccattgaacaagtaattacatgcacaaagcacaccctgcttatcgcaggaattaagccatcccaagaattaagccatcccctccaagatgggggtgcccaggactcaggttttttgtcactatctgttctttcctcctcaagcactgctcaaccttctgcagctgtagaataaggataaaaaacctgatctccctgctaataggacagcggatggaaagccctgtctaaatagacaa

SEQ ID NO: 83854 - DNA, 600 bp, Chicken  19866894380676_2
cttcggtagcaaagtaaatctgtgtgcacgtatgcggcatcagataatcacaggacctcaaaaaaaagacatacagaatggagacagaacagtgccaaattaggaaagacccttttcaggcaagtttttatgtatggaagagactatccatcatcgaatgcagggcaggttccccccaataccacagaacacagtcggtattgctgtgattaaaagcatcattgtgaacctccacaatacaaaaaaggtcacctcatttccagatattccttaacygagcatcttcatcttctgaaagarttctctggacttaagcaaagccytttgttgcttttctgtccattgaacaagtaattacatgcacaaagcacaccctgcttatcgcaggaattaagccatcccaagaattaagccatcccctccaagatgggggtgcccaggactcaggttttttgtcactatctgttctttcctcctcaagcactgctcaaccttctgcagctgtagaataaggataaaaaacctgatctccctgctaataggacagcggatggaaagccctgtctaaatagacaaacattattaatattcattccaatc

SEQ ID NO: 83855 - DNA, 600 bp, Chicken  19866894380676_3
gtgcacgtatgcggcatcagataatcacaggacctcaaaaaaaagacatacagaatggagacagaacagtgccaaattaggaaagacccttttcaggcaagtttttatgtatggaagagactatccatcatcgaatgcagggcaggttccccccaataccacagaacacagtcggtattgctgtgattaaaagcatcattgtgaacctccacaatacaaaaaaggtcacctcatttccagatattccttaacygagcatcttcatcttctgaaagarttctctggacttaagcaaagccytttgttgcttttctgtccattgaacaagtaattacatgcacaaagcacaccctgcttatcgcaggaattaagccatcccaagaattaagccatcccctccaagatgggggtgcccaggactcaggttttttgtcactatctgttctttcctcctcaagcactgctcaaccttctgcagctgtagaataaggataaaaaacctgatctccctgctaataggacagcggatggaaagccctgtctaaatagacaaacattattaatattcattccaatctctgactccagaaacattagatt

SEQ ID NO: 83856 - DNA, 599 bp, Chicken  19866894380680_1
  misc_feature (1)..(165): n is any nucleotide
nnnnnnnnnnnnnnnnnnnnnnnnnnnnnnnnnnnnnnnnnnnnnnnnnnnnnnnnnnnnnnnnnnnnnnnnnnnnnnnnnnnnnnnnnnnnnnnnnnnnnnnnnnnnnnnnnnnnnnnnnnnnnnnnnnnnnnnnnnnnnnnnnnnnnnnnnnnnnnnnnnnnnaatatctgtacaccttcaaataattatgaaaatgatccctatatctctgaagattgcctgactttcatcgtggaaaacagcatgcattcagtactacagtttggtgttgacagttcttctgttttaaagaagttraaagcttttattaagkaagaagaaatgatatgaggagccaaatgcctaatgaaaagctttggagcaatttgttatctgaagaaattagtattagttggcggaaaaaaatccacatttgtattcctatayataggaatatttttcataaacattttgctcatgttttttttagttcaaacagatccgctcttaaagtttatttgcttgattttcattttgttttgcacagatgctctttggagaagttatttttttcaatattcttatcagaagctataaatcattctaaaccagctcaa

SEQ ID NO: 83857 - DNA, 599 bp, Chicken  19866894380680_2
  misc_feature (1)..(149): n is any nucleotide
nnnnnnnnnnnnnnnnnnnnnnnnnnnnnnnnnnnnnnnnnnnnnnnnnnnnnnnnnnnnnnnnnnnnnnnnnnnnnnnnnnnnnnnnnnnnnnnnnnnnnnnnnnnnnnnnnnnnnnnnnnnnnnnnnnnnnnnnnnnnnnnnnnnnnaatatctgtacaccttcaaataattatgaaaatgatccctatatctctgaagattgcctgactttcatcgtggaaaacagcatgcattcagtactacagtttggtgttgacagttcttctgttttaaagaagttraaagcttttattaagkaagaagaaatgatatgaggagccaaatgcctaatgaaaagctttggagcaatttgttatctgaagaaattagtattagttggcggaaaaaaatccacatttgtattcctatayataggaatatttttcataaacattttgctcatgttttttttagttcaaacagatccgctcttaaagtttatttgcttgattttcattttgttttgcacagatgctctttggagaagttatttttttcaatattcttatcagaagctataaatcattctaaaccagctcaaaactcaacaaggcagc

SEQ ID NO: 83858 - DNA, 599 bp, Chicken  19866894380680_3
  misc_feature (1)..(36): n is any nucleotide
nnnnnnnnnnnnnnnnnnnnnnnnnnnnnnnnnnnnaatatctgtacaccttcaaataattatgaaaatgatccctatatctctgaagattgcctgactttcatcgtggaaaacagcatgcattcagtactacagtttggtgttgacagttcttctgttttaaagaagttraaagcttttattaagkaagaagaaatgatatgaggagccaaatgcctaatgaaaagctttggagcaatttgttatctgaagaaattagtattagttggcggaaaaaaatccacatttgtattcctatayataggaatatttttcataaacattttgctcatgttttttttagttcaaacagatccgctcttaaagtttatttgcttgattttcattttgttttgcacagatgctctttggagaagttatttttttcaatattcttatcagaagctataaatcattctaaaccagctcaaaactcaacaaggcagctctcagtgtttgtaaataaaattgttcaatggtaatctgactttatactaaatccaagagattttattttctagacatttcatgcatcactatttggatcgtattgtacatca

SEQ ID NO: 83859 - DNA, 600 bp, Chicken  19866894380680_4
ttttgttttgcacagatgctctttggagaagttatttttttcaatattcttatcagaagctataaatcattctaaaccagctcaaaactcaacaaggcagctctcagtgtttgtaaataaaattgttcaatggtaatctgactttatactaaatccaagagattttattttctagacatttcatgcatcactatttggatcgtattgtacatcaaaaatcattttttcccctataatttctgtttagtttttaaggtgtaaatcaggcagaatttaacctttgaggtatgctgatgcagktagaacatttccaatgcctcctgttagccactcttctgcttgtcactgtttttagtaataaattgtataaaataacctcaagtctcttacagttcctcttagtaaatcattttccattaaaaaaaaataccacttaacttttagatggatggtaggtaatggaaaagggctgttcaacctatatcgttttacagcatcactaggtaaaataccataaaaaggtagcttctaggtgaggagaagacagttttttaacattaagaggaagagtggaaaaggtacaattaattctgaagtrgt

SEQ ID NO: 83860 - DNA, 600 bp, Chicken  19866894380680_5
gktagaacatttccaatgcctcctgttagccactcttctgcttgtcactgtttttagtaataaattgtataaaataacctcaagtctcttacagttcctcttagtaaatcattttccattaaaaaaaaataccacttaacttttagatggatggtaggtaatggaaaagggctgttcaacctatatcgttttacagcatcactaggtaaaataccataaaaaggtagcttctaggtgaggagaagacagttttttaacattaagaggaagagtggaaaaggtacaattaattctgaagtrgtggtgtttcctctggagaaaagggaaggttcccagttagwtctcattaacaccactaaaccttcagtagacaaaaacacctccatcctgcagagcttgggagatgtgcccacgtaaatatttgagcatcgtggggcagactcagacccacaggtttacacccatctgaacatgcacacattcaggagtcacagtaagaacagacccactgcccacagcaagatggccttcacagaagagggggaaagtgtgagaggaacagaaaaagacaaatgtgagtagacttgaagtgttcagcag

SEQ ID NO: 83861 - DNA, 600 bp, Chicken  19866894380680_6
ttgtcactgtttttagtaataaattgtataaaataacctcaagtctcttacagttcctcttagtaaatcattttccattaaaaaaaaataccacttaacttttagatggatggtaggtaatggaaaagggctgttcaacctatatcgttttacagcatcactaggtaaaataccataaaaaggtagcttctaggtgaggagaagacagttttttaacattaagaggaagagtggaaaaggtacaattaattctgaagtrgtggtgtttcctctggagaaaagggaaggttcccagttagwtctcattaacaccactaaaccttcagtagacaaaaacacctccatcctgcagagcttgggagatgtgcccacgtaaatatttgagcatcgtggggcagactcagacccacaggtttacacccatctgaacatgcacacattcaggagtcacagtaagaacagacccactgcccacagcaagatggccttcacagaagagggggaaagtgtgagaggaacagaaaaagacaaatgtgagtagacttgaagtgttcagcagattcatgcaccaggcaagagagagctgaggtggcttcagct

SEQ ID NO: 83862 - DNA, 600 bp, Chicken  19866894380685_1
gtatttcccagcaatgtttacccttctgctgactacactggaagcccaaagctcactgtatctctgatctaagtatcttattttttactagtggtagtttctaatgcatttgtttattcttgctttctagttccactctgtcgagtggtatgcacattttacaaatgttttatgaatgtttttaaagaacattttatgaacaccattttgctcttaaaaatataatatgtggcattagttttgtaactgcccatttaaaaatgtgtattctctatttatgctaacaaattgcatgaaaargggtgaaatagaagaaaacaaggtcaaaacatggtctattggcactgttgcctccagcaagaaccagtttgacgtcaacagatcaaatagcagcacacattcaattttaagatatctgaaagcagtaattatgcgtacaaaaaatgagatattctattctgcattattttttcccattataagcattactattaagcatttgttcaattttttttttaagtaaaatcactctgctttgtgttcttaaaatttgtcaggtataaactcttgaaaaagctgaaaaagaaaaagctactgttg

SEQ ID NO: 83863 - DNA, 600 bp, Chicken  19866894380685_2
caaaaaatgagatattctattctgcattattttttcccattataagcattactattaagcatttgttcaattttttttttaagtaaaatcactctgctttgtgttcttaaaatttgtcaggtataaactcttgaaaaagctgaaaaagaaaaagctactgttggtaactagaatggggaggttcactttaagtcctaaaacatccataaatatcacacagtagtaaacaaaataaccttaaaaagagatattactgactcaaaatacaatcagatatacttaataactatcagtaaatcyaatttgctgtactgcwtatttactttaaaaaaccttccttgttaktaagtttatactaattactattattatgaattattattacaattattaagtttatattaagttcatactaattatacaaagtggaaagtatctttaattaaaggtagaaacagtacaacacttttatggtcattgaaaacaaaacaaacccaattaactgtcaggattaaacatgtcactgagctctgctgcatttttgttttccacaaggttttaattttactcaccttgcaacttcataaaattctttttaaa

SEQ ID NO: 83864 - DNA, 600 bp, Chicken  19866894380685_3
ctattctgcattattttttcccattataagcattactattaagcatttgttcaattttttttttaagtaaaatcactctgctttgtgttcttaaaatttgtcaggtataaactcttgaaaaagctgaaaaagaaaaagctactgttggtaactagaatggggaggttcactttaagtcctaaaacatccataaatatcacacagtagtaaacaaaataaccttaaaaagagatattactgactcaaaatacaatcagatatacttaataactatcagtaaatcyaatttgctgtactgcwtatttactttaaaaaaccttccttgttaktaagtttatactaattactattattatgaattattattacaattattaagtttatattaagttcatactaattatacaaagtggaaagtatctttaattaaaggtagaaacagtacaacacttttatggtcattgaaaacaaaacaaacccaattaactgtcaggattaaacatgtcactgagctctgctgcatttttgttttccacaaggttttaattttactcaccttgcaacttcataaaattctttttaaaaagtatttgcaattag

SEQ ID NO: 83865 - DNA, 600 bp, Chicken  19866894380685_4
gcattactattaagcatttgttcaattttttttttaagtaaaatcactctgctttgtgttcttaaaatttgtcaggtataaactcttgaaaaagctgaaaaagaaaaagctactgttggtaactagaatggggaggttcactttaagtcctaaaacatccataaatatcacacagtagtaaacaaaataaccttaaaaagagatattactgactcaaaatacaatcagatatacttaataactatcagtaaatcyaatttgctgtactgcwtatttactttaaaaaaccttccttgttaktaagtttatactaattactattattatgaattattattacaattattaagtttatattaagttcatactaattatacaaagtggaaagtatctttaattaaaggtagaaacagtacaacacttttatggtcattgaaaacaaaacaaacccaattaactgtcaggattaaacatgtcactgagctctgctgcatttttgttttccacaaggttttaattttactcaccttgcaacttcataaaattctttttaaaaagtatttgcaattagatcgcataaaactattttaagagagagtt

SEQ ID NO: 83866 - DNA, 600 bp, Chicken  19866894380688_1
aaacattagtctgtgtcggcattatcctggagagcattagcaaagcagctgaaaaccccagagtcatgaaaatttcagcatctatgtgtagattttggttcaacatattctactttgaatgagagttttccagtgtcttatgggtattattattactactactttgctcttaggatttttgctgaggtttcaaagcaatggctcctggcagatctgctacctaataattgacctggttggacacgctaaggagaatcatatacatgacttagtttgcagctatgcagttgttttgcaaaycaagatctttttttcttttatattcaactcctcatgtttgactgctacattttttgagcaattctaacaatagtactgaaaaatcctctatatatttattctccagagtttccaaagatgaggaaaaaaagctaacatactttytcttttccttaygcctttttctcccccctgcatrcaaagcactaatgatcagttcttaaataaaagatgtgaaaaacatctggcaggtttattgccaggataagcattgattcactttcagcagagaaagaagaaccagaataaagaaggaatagg

SEQ ID NO: 83867 - DNA, 600 bp, Chicken  19866894380688_2
tattattattactactactttgctcttaggatttttgctgaggtttcaaagcaatggctcctggcagatctgctacctaataattgacctggttggacacgctaaggagaatcatatacatgacttagtttgcagctatgcagttgttttgcaaaycaagatctttttttcttttatattcaactcctcatgtttgactgctacattttttgagcaattctaacaatagtactgaaaaatcctctatatatttattctccagagtttccaaagatgaggaaaaaaagctaacatactttytcttttccttaygcctttttctcccccctgcatrcaaagcactaatgatcagttcttaaataaaagatgtgaaaaacatctggcaggtttattgccaggataagcattgattcactttcagcagagaaagaagaaccagaataaagaaggaataggaaaaaaaaaacgatgcactattgcaaaaataaataaataaataaataaataatagcaatattaataataaaataataataataaaatagagaagctgcccctactgtccaggcaaagagtgaagtaatacctctcacacagaaa

SEQ ID NO: 83868 - DNA, 600 bp, Chicken  19866894380688_3
tactactttgctcttaggatttttgctgaggtttcaaagcaatggctcctggcagatctgctacctaataattgacctggttggacacgctaaggagaatcatatacatgacttagtttgcagctatgcagttgttttgcaaaycaagatctttttttcttttatattcaactcctcatgtttgactgctacattttttgagcaattctaacaatagtactgaaaaatcctctatatatttattctccagagtttccaaagatgaggaaaaaaagctaacatactttytcttttccttaygcctttttctcccccctgcatrcaaagcactaatgatcagttcttaaataaaagatgtgaaaaacatctggcaggtttattgccaggataagcattgattcactttcagcagagaaagaagaaccagaataaagaaggaataggaaaaaaaaaacgatgcactattgcaaaaataaataaataaataaataaataatagcaatattaataataaaataataataataaaatagagaagctgcccctactgtccaggcaaagagtgaagtaatacctctcacacagaaagggactgctgca

SEQ ID NO: 83869 - DNA, 600 bp, Chicken  19866894380688_4
ttgctgaggtttcaaagcaatggctcctggcagatctgctacctaataattgacctggttggacacgctaaggagaatcatatacatgacttagtttgcagctatgcagttgttttgcaaaycaagatctttttttcttttatattcaactcctcatgtttgactgctacattttttgagcaattctaacaatagtactgaaaaatcctctatatatttattctccagagtttccaaagatgaggaaaaaaagctaacatactttytcttttccttaygcctttttctcccccctgcatrcaaagcactaatgatcagttcttaaataaaagatgtgaaaaacatctggcaggtttattgccaggataagcattgattcactttcagcagagaaagaagaaccagaataaagaaggaataggaaaaaaaaaacgatgcactattgcaaaaataaataaataaataaataaataatagcaatattaataataaaataataataataaaatagagaagctgcccctactgtccaggcaaagagtgaagtaatacctctcacacagaaagggactgctgcagaatgaactgcagcatgtactg

SEQ ID NO: 83870 - DNA, 599 bp, Chicken  19866894380705_1
  misc_feature (1)..(51): n is any nucleotide
nnnnnnnnnnnnnnnnnnnnnnnnnnnnnnnnnnnnnnnnnnnnnnnnnnnaaaataggaaaataatgttctttaagcagttattaatgctggaagagtcttgctgcagaaatttcttgcctgttgtcacttaccacagagatgggtccaagaagctgatattagaaatacttcaactgccgtatttgcatcagtggtgcctaaaagagatctgcatttgtgtttctaccatttcctttaggatgtgacaatcatgtctatgagaatatttctcccagctctctaatcatcaaggcagtscatgttaggaggctgaaccactttataatgaaaaacaaatgcttaccttttctattgctctctgaagggaagttgtcctacatgccagtagacattacatccactttcacttgagaaactggggatgtgtgtgctatttgcttaagagagagatagggccacagatcaagtaacgtagctggacagaagctctaatccatctcatcctaccaagcatttgattgctgtattagagaggagggggagattgttcatttttctagaaatcatgaagagatttgtacttagaagtcaagcaa

SEQ ID NO: 83871 - DNA, 600 bp, Chicken  19866894380705_2
gccacagatcaagtaacgtagctggacagaagctctaatccatctcatcctaccaagcatttgattgctgtattagagaggagggggagattgttcatttttctagaaatcatgaagagatttgtacttagaagtcaagcaaaagatgtttttgaaagattgtaatacttttggttatatggttattgcaggtaagtaattttcaaacagagatacacggtgtgtgctgtaaacatttttttaggtgacatttgctagagccatagattattttcaagttaatgttgataccagttagcrcatttctagacatcttttgcacagttagatcatagtcatggcctttaaaaagaaaaaaaatgtaaataacctttcttcttttcctctccctttttttcttgatttctgtaggacctggggataacgaaagtgggtcatatgaagcgaattctccagggaattaaggagcttggcaagaacacccatttgtctgaagtgtaattgtgctggtgctctcagaagagagagggaatattgctggagaagcgaagctgttgcaggcacttggctgtctttctagtttactgtatggaagaataa

SEQ ID NO: 83872 - DNA, 600 bp, Chicken  19866894380712_1
gtgtcacttctatgactaattacaggcgaatgtcaatactacttgtgccatagatcacatacgttggttaacctatgtaaaacaggtggaataaatgcagtttaattcaaatcttcaattgcagttctcttgagtgtatctttatgagttgcactaaaaaaatagcatatcaatatcttacctctgaaatcagctccatgtgcttgacttatgattagcacatgggtcacagcaatctgtatggttagttatggatgaaaatcaaattactgatttctctagaggaatgtatttttgttkatattttttctacgaaataattgcagaaatctgtctaaacaaaagtaaaaatggaacagattgatttttgttgatgatgaaatatggtatgtcatattttccaccgatcactgagaagaagataaaaatgtagtattcagaaggctagtattaagtagttatgggtgtcagacttttcctattaactcataatgaggaatattttttttttaagtgaatgatgttctttgtagtgccagatgaacaatatgaacactgtgtaattctctctttaaaagatcttccaaatgatcatttgtt

SEQ ID NO: 83873 - DNA, 599 bp, Chicken  19866894380733_1
  misc_feature (1)..(114): n is any nucleotide
nnnnnnnnnnnnnnnnnnnnnnnnnnnnnnnnnnnnnnnnnnnnnnnnnnnnnnnnnnnnnnnnnnnnnnnnnnnnnnnnnnnnnnnnnnnnnnnnnnnnnnnnnnnnnnnnnnaggatagatttagactagatattaggaagcaattctttactgtgagaatggtgagacactggaacaggttgcccagtgaggttgtagatatcccatacttggaagcattcaaggccaatctggatggggctttaagcaacctggtctagagggaggtgtccctgcctatagcaggggattggaacyaaattatctcagaggtcccatccaacccaaaccattctgtgattctatgaagtaatcagttaggcacatgataaacctactggataagatgggcttaaaggaatagtgattagttattcattctcctccttcagacagttacaagtgaaatctgtcaagaattgtcatgggcatttttccttcttaatgtmtttatcaacaacctcctggaaacatttaccattctaaagggaaagccacaatgggagggtgtagccagtgaacttgaggactgatcaaccattcagagaataccaaca

SEQ ID NO: 83874 - DNA, 600 bp, Chicken  19866894380733_2
gaggttgtagatatcccatacttggaagcattcaaggccaatctggatggggctttaagcaacctggtctagagggaggtgtccctgcctatagcaggggattggaacyaaattatctcagaggtcccatccaacccaaaccattctgtgattctatgaagtaatcagttaggcacatgataaacctactggataagatgggcttaaaggaatagtgattagttattcattctcctccttcagacagttacaagtgaaatctgtcaagaattgtcatgggcatttttccttcttaatgtmtttatcaacaacctcctggaaacatttaccattctaaagggaaagccacaatgggagggtgtagccagtgaacttgaggactgatcaaccattcagagaataccaacaaactagaattaaattcaacagggacaaaggtaatcctgtacccaagaaaggcaacttaagccccattcacgctgaggactgatggtctgggaagcagcactatgtaaatgcacatgcaggttttgagaagataaaaataggccaactctatgcacagatacttctgctttataaacaggattataagcrgta

SEQ ID NO: 83875 - DNA, 579 bp, Chicken  19866894380733_3
gtmtttatcaacaacctcctggaaacatttaccattctaaagggaaagccacaatgggagggtgtagccagtgaacttgaggactgatcaaccattcagagaataccaacaaactagaattaaattcaacagggacaaaggtaatcctgtacccaagaaaggcaacttaagccccattcacgctgaggactgatggtctgggaagcagcactatgtaaatgcacatgcaggttttgagaagataaaaataggccaactctatgcacagatacttctgctttataaacaggattataagcrgtacactgtgaaaagtgataaatcctctttatttctgaaataaactgtccacttttggttttcctgagatagacaagggatgctgatcaaaaggaagaaattcagaggaatgatgtcaggataatcacagcaaaaccaaactgaaacagagcgaatttgtactatacataagaaaaaaatgctctaaccacaattaaacattggagatattcaccagggaaggttgtgaaatcatcatccacagaggtttgcaggaccagactagactaaacaacaaag

SEQ ID NO: 83876 - DNA, 600 bp, Chicken  19866894380741_1
aaaacagcttaggcctcttctggctgcggtcagcattgaggctggtcactcagcacctctgaagaagtgttgcaggatgaggtctttagcctgtatttacattgcctggtaatgccatcaaatgttctacttgtagccattagcaatccatccctcctgctttccctctccctgaggaagcgctctacaaaacccatctgaagagtttctgttttttcattactgtcatagtctccccattttatcttgctctttcattaaaatggcaaaccacagatactgtttcagtccaacagcccrttcacaagaaactaaccattcaggaacaggaacacatccccttcacgttctctaaaaattaatttaacatgagtcattgcattattcttcgcttaaagcatgtttcacctacattaataatttaactttcacctataaattcagacacaaaagcagtacagctctccaaatgctaatattcataaaatattacattatcgctttccaaaggtcagattttcttctcccccttaattaggattcaagacttccaacaataacttgttgcagcagatgtatagctcttttatgtttactaat

SEQ ID NO: 83877 - DNA, 600 bp, Chicken  19866894380746_1
acaaacattcttaagtttagcatacattgtagttgtttatcaaatctggatccaaaacatggatttatgcaagactttttaaatttaagataggtctattctgctctctgcagagaaaactgaatttatgcttcagtgatgtgactaagcagtggttttacttcagtgttagcacagaataacagaatcatagggcttggaaggagaccacctagttcaaatcttctatacgggaaaacatccaggagggttttgaatatctccagagacggagactccatagcatctctgggcaacctrttccagtgctctgtcacacttacaataaasaagttcttcctcacatttgcatggaactttctgtgttccagtttgtgcctgttgccccttgtcctgtcactgggccacaacaaaaagagcctggacccatccatttgacccctgccctttagatatctgtaagcatcaagagatatcctctcagtcttctcttctccagactgaacagactgaacagggctctcagcttttcctcatatgggagatgctcctgtcccctaatcatctttgtgatcctccactggactcctatgagattcc

SEQ ID NO: 83878 - DNA, 600 bp, Chicken  19866894380746_2
agttgtttatcaaatctggatccaaaacatggatttatgcaagactttttaaatttaagataggtctattctgctctctgcagagaaaactgaatttatgcttcagtgatgtgactaagcagtggttttacttcagtgttagcacagaataacagaatcatagggcttggaaggagaccacctagttcaaatcttctatacgggaaaacatccaggagggttttgaatatctccagagacggagactccatagcatctctgggcaacctrttccagtgctctgtcacacttacaataaasaagttcttcctcacatttgcatggaactttctgtgttccagtttgtgcctgttgccccttgtcctgtcactgggccacaacaaaaagagcctggacccatccatttgacccctgccctttagatatctgtaagcatcaagagatatcctctcagtcttctcttctccagactgaacagactgaacagggctctcagcttttcctcatatgggagatgctcctgtcccctaatcatctttgtgatcctccactggactcctatgagattcctgtcatttttgaactgaagagcccagaact

SEQ ID NO: 83879 - DNA, 600 bp, Chicken  19866894380748_1
acttatgctctggaaatgtatgtaaagtttgttcttgcaaatgtaattattttagaattaattttgtttaatttgcttattataattaacaaaatcattagatgctcattatttaaaaaatcagatactaaaaggaaactcattatgcaatcaattaggagcttattaagtacaaatttcactgtattatttgtaatttagagaaagtccaatatggtggtgatatcttgaccttttgtagttgctggcaaagcttaatttggcctttctcgaatcacattcagaatattgcctatattyyacattaggaataatattcaaagatttaatattttccatatgttctcaagtgcttctgtaggaaatttgtcagatgacgtttaattgtctttctggtaatattgattcagaatttagaaatcttttagttatcaggagaatctggaaagtaaaccagagaaagaagcatgatttatcaaatattcactttgtaatttgtcattttttataatgctcaccaaaaaaaaaaaaaagtgaatatttaaggtaaagacacaaggtaaccaagtgataagtttaaattcagtatactttgaagct

SEQ ID NO: 83880 - DNA, 600 bp, Chicken  19866894380748_2
cttatgctctggaaatgtatgtaaagtttgttcttgcaaatgtaattattttagaattaattttgtttaatttgcttattataattaacaaaatcattagatgctcattatttaaaaaatcagatactaaaaggaaactcattatgcaatcaattaggagcttattaagtacaaatttcactgtattatttgtaatttagagaaagtccaatatggtggtgatatcttgaccttttgtagttgctggcaaagcttaatttggcctttctcgaatcacattcagaatattgcctatattyyacattaggaataatattcaaagatttaatattttccatatgttctcaagtgcttctgtaggaaatttgtcagatgacgtttaattgtctttctggtaatattgattcagaatttagaaatcttttagttatcaggagaatctggaaagtaaaccagagaaagaagcatgatttatcaaatattcactttgtaatttgtcattttttataatgctcaccaaaaaaaaaaaaaagtgaatatttaaggtaaagacacaaggtaaccaagtgataagtttaaattcagtatactttgaagctc

SEQ ID NO: 83881 - DNA, 600 bp, Chicken  19866894380752_1
ttttaaatagtacaatgactttctttgataatcaaacaacaattaatgttattctactgtcaatttaattgtttattttattttaaatatcctattctaaaatatatcacttttcctattttcaagaagataaaaatgtatattagttactcttaaatgtatattaatgaatttcacaggaatgttggatacaacatgttcaaacaagccagaaaatttgaagccagagccaaggcaaacctgtgccaaaatgttagtagatccgttggaactgattatatgtatacaaaagggagatcrtgtgaagtgatatataaggtcactgtaatagccaaaaggtaatgccaaaatattcctactgacttggcttattcacatgtatgggcacagaactgactcagtgtcaaatactctgcatgagccaaacttaacttccttggcctgcccaactccagagcacagatgtcatggcaaaaagagcccatcagacatggatttcttttgctagttttcatctgccatgactttgtgagatgaagccaccaagggcagagtgttgctgctgctgctgttcagagaatagtctgcactattgaaaaa

SEQ ID NO: 83882 - DNA, 600 bp, Chicken  19866894380753_1
aagggatatttctttgtatgacagggattataaaagccgagcagagagatgcaatcacttctttttttttttaacttgaatatctgattgcaatgctgtacaattgatttgacaatttgcaggttgttgttgtatttattgtatttatgttgactgaaaatggaatcgcaaatatagcaaaaaaaaaaaaagtgttaattttttggcaatcctgagacctgttttcaaattcctttatcacaacagggagcaaggctgccttttttttctgctgcccacaggaccgtgtttagccgatgyatcaaaatgcattacattgtttgcaataacttgttaccactgtgtgatgttcagttggcactgagttatggggacgcccagggcagggctgggccactcagtggggcagagccgttgccatgatggcgcagggcagggggcattgcaagctgtgctgcactgcatgtggccagcaggttggatgtgcctgttttaggcaatccacagcagggatagaatgtactattttgtgaacaaacatgattgtactaaaacctctggcaaagcctaggagttctttcttagcactcctagaaagat

SEQ ID NO: 83883 - DNA, 600 bp, Chicken  19866894380772_1
tcatactgcacaagttgttatttcagacacattttaaaattgcaatcaaaatatttggttgcaagattaatatgctaaagattaataaagtagaagtgaatcacatgtggtgagtggtttttctctcaccctgatacttctgccagctgaccgatggcttgtggtacttgcactgagctcagtggtgaccccaactaccaggtgcagaaagcagtggtttggtacagacggaaatgaagaacaagtcaaggaggttcacaaaagagctagggttctgcaagccaagagggaaagtttggrgcaagcaacttcacttccaatacagctggcttgagctgtcacaatgagttttctgcttttggtgggcgctgtggtaacttccagattctgtggagcaataaccgttctggtggttacacaaataaatacacagggacatttaaaacctagtgatgggctgtgttctcccagcatgatgcaatgccaactaaacatgccagctgtgggcagactgtcctatgagccacggtgctaagctttgttcttctgtgcaataggatgtagctgtcctgtgcagtgctgagcttcctcacttcaggc

SEQ ID NO: 83884 - DNA, 600 bp, Chicken  19866894380781_1
tgctgctttgttttctagtgaaactctatagcagtaattatccctgttttaacacaatacaattatcacctcctcctctctttttcttctcccatcaattacgagacgggaaggcagcatctcttgctcacaactaatagcagtgaggtgcagctggcgtggtgggtaattagcagaaggcttctgcaggtatcatcactccaccagggcacgtgcagcttgtcgtgctgcagaaggacaggaacatcacacactcggtcacccagaagtcacagccatcagtgcagaagctaactcccmagtygccttcttttgattctattaacgagtgctaattagaagcggtcattcagcccgacagctgctgcatgtccatcaccagcagcctgggttaacactgctgctatgttcaccaggctgcacagtcaggattgccctaggttacaaatacactgagcctgaccactggtttttgggtttctttgttttggaatcctcttatctgccttttaatgtgtgcacacacacaaaaccaaggaagacaaaagaagatgaaaggtgctgggttacccaagctttagtggatggcttctgctgaca

SEQ ID NO: 83885 - DNA, 600 bp, Chicken  19866894380781_2
gctttgttttctagtgaaactctatagcagtaattatccctgttttaacacaatacaattatcacctcctcctctctttttcttctcccatcaattacgagacgggaaggcagcatctcttgctcacaactaatagcagtgaggtgcagctggcgtggtgggtaattagcagaaggcttctgcaggtatcatcactccaccagggcacgtgcagcttgtcgtgctgcagaaggacaggaacatcacacactcggtcacccagaagtcacagccatcagtgcagaagctaactcccmagtygccttcttttgattctattaacgagtgctaattagaagcggtcattcagcccgacagctgctgcatgtccatcaccagcagcctgggttaacactgctgctatgttcaccaggctgcacagtcaggattgccctaggttacaaatacactgagcctgaccactggtttttgggtttctttgttttggaatcctcttatctgccttttaatgtgtgcacacacacaaaaccaaggaagacaaaagaagatgaaaggtgctgggttacccaagctttagtggatggcttctgctgacagaac

SEQ ID NO: 83886 - DNA, 599 bp, Chicken  19866894380786_1
  misc_feature (1)..(87): n is any nucleotide
nnnnnnnnnnnnnnnnnnnnnnnnnnnnnnnnnnnnnnnnnnnnnnnnnnnnnnnnnnnnnnnnnnnnnnnnnnnnnnnnnnnnnnnttttgttgtttaactgcttgatctgaactttcccatatttaagcctgtgatttttggatgagaaattgttaaaagaagttcagtctgttccattaataaagctgaaacaaaacgtattgcccatattgaagtaaagaaaaaagggttccagtcatttttgagaaatgctgttacccaaaggcttgtagcagggccttgcattttttggcgagrgtgttgcccatgtaccacttggaatgctttgacctgtgaaactgcttttaagcttggtcagactggagtcctccatgtttcaaatagctgctgaggtggcagctcatcgcctggaggggacagagaagggcatccatgggtgcagctttggaagcaaaaaccctcacctcatgctggccagagaagtggctaacattgacatattaatgttaataggtctattcctcagttttccaatgcagaatgagaatgaaagctctgtagagaaacctgtgagtgacattgttgttaaccctaag

SEQ ID NO: 83887 - DNA, 600 bp, Chicken  19866894380789_1
ttcctatctttcttaatttagtgaggaattatagtaaggcactggaaaaagatcagttcacaaataatgcagcgtgcatttttgttgtataatgggcagcaggtttctcttttgagtgagggtcccagatgagacagctaagagcacagcaaaagtcaagcaagtttttgtggatggatggagaaaagttacaagtggtagtaaggtaaaagcccaaattaaactctcattaaagatgtgggagtgaactgatgcactgggatgtttatacaaagccctgaaccatctttgaaatgagtrtttaacagtcaaaagttcaccaggatattgtcttactctatattatgtaaagtgggacttaatatggtggtccaggctttcctctaaagaacggtgttgatgaaaaaggaacgtctgtttctgtaagcagaattagttctgataamgtctagcgaggctgcttaacatacacaaaatgtcatggccttacctggtttcttatatgttacataaatatatagaaagagttcaatgacataagtgatgagagctgcccaccagttgatgacaaacataacgccacagcacagcagggctcca

SEQ ID NO: 83888 - DNA, 600 bp, Chicken  19866894380789_2
cagcaaaagtcaagcaagtttttgtggatggatggagaaaagttacaagtggtagtaaggtaaaagcccaaattaaactctcattaaagatgtgggagtgaactgatgcactgggatgtttatacaaagccctgaaccatctttgaaatgagtrtttaacagtcaaaagttcaccaggatattgtcttactctatattatgtaaagtgggacttaatatggtggtccaggctttcctctaaagaacggtgttgatgaaaaaggaacgtctgtttctgtaagcagaattagttctgataamgtctagcgaggctgcttaacatacacaaaatgtcatggccttacctggtttcttatatgttacataaatatatagaaagagttcaatgacataagtgatgagagctgcccaccagttgatgacaaacataacgccacagcacagcagggctccaaaaagtgatatccacatgttataatatctgaatgcaggtctccaacctgtttaaagagaattgagggaattggaagaagatatattgagcaaatgccaatccactgactttgcacgtacagacccatatgccgtttatttcaggtt

SEQ ID NO: 83889 - DNA, 600 bp, Chicken  19866894380804_1
caaaggatggagggtgatggggagcacaggaaaaggtgtctggggctccaataccagtgctgtgggaagcgtgagaaaaagtgcccggggctcctgaatcatagaatcattaaggctggaaaagatcactaagatcatctactccaactgtcaacccattgccaccatgcccactaaattggtgtgatggggtggtgggcggtgtgagaagcatccaggattcctaaatcagcacaaggggaaggaaggtcctcgctgagcataggttatcctggagagcagcgtgggaaagccccacgyatggggttttcagaaccaagaaggatgctttctggggtctgcagcacagctttctttccatctcccttcccaggaagttcctgaaggtgcagtgcctggagagcgggcagtgggaggagggacgctgcgtccctgtggtgtgcgagccgcccccgccggtgtttgagggcatgtacaactgcacccagggctttgagttggacagccagtgtgtcctgagctgtgagccaccaggatcacaggtgagtgatgggatgggcgggggtcagacacgcactgggcttcagagcacttcaaact

SEQ ID NO: 83890 - DNA, 600 bp, Chicken  19866894380808_1
acacaactgtgtttgcacagtgggttgcagtccagctgggagtcatctgtgcacccaggaggaaatctagagagaattcttgtccagcatctctggaaaggatgactctccaaacaattttggcagaaaatgttaatatccgcacagaaaaaattaatgtccaagagtgattcccaggatggggaaatacacactgtcacagctgtgcccctacaattggctcccagagttcagtcactagagtacatcattgaggaggaaacgtccccatttaagagatggaggcagtaaataactgaygtggcatgcccatggatacatgggaaatcaagagcagagacagcagcacattcccagacccacacccagctcagcactgagccgtgggaagctcatgtggccaccacttttctgctttaacctgtagattcacagttaaaactattgtgttgcrtgtccttagatttcaatatggtcctaggaaaaaatgaaaacrtcccattgactttggctttctgaaagggcctatrcttcagaaaaaaaaatgcaaaatggactctttctgctgaggaaaacaacactgtggaaattgctcccaaa

SEQ ID NO: 83891 - DNA, 600 bp, Chicken  19866894380808_2
taatgtccaagagtgattcccaggatggggaaatacacactgtcacagctgtgcccctacaattggctcccagagttcagtcactagagtacatcattgaggaggaaacgtccccatttaagagatggaggcagtaaataactgaygtggcatgcccatggatacatgggaaatcaagagcagagacagcagcacattcccagacccacacccagctcagcactgagccgtgggaagctcatgtggccaccacttttctgctttaacctgtagattcacagttaaaactattgtgttgcrtgtccttagatttcaatatggtcctaggaaaaaatgaaaacrtcccattgactttggctttctgaaagggcctatrcttcagaaaaaaaaatgcaaaatggactctttctgctgaggaaaacaacactgtggaaattgctcccaaacaccagatcacgtgcctgctacagcacgcttcctctccaaaacacttccaatgcatcctcatgcctgcaagactttgccttcagtaggcagtaatcacagttttattcaattcctcagcaagggattgtgttgtaggaatactataggagcaca

SEQ ID NO: 83892 - DNA, 588 bp, Chicken  19866894380808_3
tcacagctgtgcccctacaattggctcccagagttcagtcactagagtacatcattgaggaggaaacgtccccatttaagagatggaggcagtaaataactgaygtggcatgcccatggatacatgggaaatcaagagcagagacagcagcacattcccagacccacacccagctcagcactgagccgtgggaagctcatgtggccaccacttttctgctttaacctgtagattcacagttaaaactattgtgttgcrtgtccttagatttcaatatggtcctaggaaaaaatgaaaacrtcccattgactttggctttctgaaagggcctatrcttcagaaaaaaaaatgcaaaatggactctttctgctgaggaaaacaacactgtggaaattgctcccaaacaccagatcacgtgcctgctacagcacgcttcctctccaaaacacttccaatgcatcctcatgcctgcaagactttgccttcagtaggcagtaatcacagttttattcaattcctcagcaagggattgtgttgtaggaatactataggagcacaagagccaaagataccattccaggctctgaa

SEQ ID NO: 83893 - DNA, 554 bp, Chicken  19866894380808_4
tcagtcactagagtacatcattgaggaggaaacgtccccatttaagagatggaggcagtaaataactgaygtggcatgcccatggatacatgggaaatcaagagcagagacagcagcacattcccagacccacacccagctcagcactgagccgtgggaagctcatgtggccaccacttttctgctttaacctgtagattcacagttaaaactattgtgttgcrtgtccttagatttcaatatggtcctaggaaaaaatgaaaacrtcccattgactttggctttctgaaagggcctatrcttcagaaaaaaaaatgcaaaatggactctttctgctgaggaaaacaacactgtggaaattgctcccaaacaccagatcacgtgcctgctacagcacgcttcctctccaaaacacttccaatgcatcctcatgcctgcaagactttgccttcagtaggcagtaatcacagttttattcaattcctcagcaagggattgtgttgtaggaatactataggagcacaagagccaaagataccattccaggctctgaa

SEQ ID NO: 83894 - DNA, 600 bp, Chicken  19866894380811_1
caaaatgaatagtagtatccagaggtacaggagcttatggctgtttccttaagtagacaggtggggagaagtggactcgagctcttgttgctcatagggcctctagagttggagtgggcaatctcttgaatgacaacagtcagataccattctttgagatgaagtctctgggacagtaacagatgactgttacccaaagatcagcaacagcaagagacttaatttggccataatcataggatcatggcatgacttttaggttggaggggaacttaaagatcatacagatcatgcccctgycatggacaaggttgccacccactccagctgggttggactagatgatctagagagctccctgccaaactcaacagttctctaatacttcattagtgaatccagttccataaagggaagggtagaggctagctcaggtctacttgacagataagatgcaaacaaagggaggatccagagaagcaggagaaaaatataaagatctaggtgtggaaaatcttctctgctgatgatagaccaagttctcacccagagtggaagcctgtactgtctgttgggcagatagagattgtacagcatgtt

SEQ ID NO: 83895 - DNA, 600 bp, Chicken  19866894380811_2
cacccagagtggaagcctgtactgtctgttgggcagatagagattgtacagcatgttctatagatcagtctccacagaacagcaccttcccttgcaacagggagaagtttttttgcaccattaaagtacatgcattccttagaccaagggaaaagatagcaataataataattttattcctttatttgtttttttaaagaaggcaaataactgcaccttatcttaccctgaaggtaagaagacaagccctggataaaaagtcaaagaagaggaaattccaaagtgagggaggaggaagcycttgacagagaaattgctgagttaccagtatgcacaaagtcttgggacaaagggraagatctattttctactcccttatacaactgctgttgaattccatgtgcataaccacgaacaagcattttgcagcatgaaaaagttaaacgtattacttattggtctcctttactcagtccagttcaaagctcttgggctcacatagactctgtctgcataaaatgaatgtcaaagatgagtgtcaatggctggatggaacagtagctgtttttgacagacactttaatctgctttgtgtacaaa

SEQ ID NO: 83896 - DNA, 600 bp, Chicken  19866894380811_3
ttctatagatcagtctccacagaacagcaccttcccttgcaacagggagaagtttttttgcaccattaaagtacatgcattccttagaccaagggaaaagatagcaataataataattttattcctttatttgtttttttaaagaaggcaaataactgcaccttatcttaccctgaaggtaagaagacaagccctggataaaaagtcaaagaagaggaaattccaaagtgagggaggaggaagcycttgacagagaaattgctgagttaccagtatgcacaaagtcttgggacaaagggraagatctattttctactcccttatacaactgctgttgaattccatgtgcataaccacgaacaagcattttgcagcatgaaaaagttaaacgtattacttattggtctcctttactcagtccagttcaaagctcttgggctcacatagactctgtctgcataaaatgaatgtcaaagatgagtgtcaatggctggatggaacagtagctgtttttgacagacactttaatctgctttgtgtacaaattgcaagatgacggagatgcagtgtacgtagtttctggagccaggaagaagaagt

SEQ ID NO: 83897 - DNA, 600 bp, Chicken  19866894380811_4
ctgttgaattccatgtgcataaccacgaacaagcattttgcagcatgaaaaagttaaacgtattacttattggtctcctttactcagtccagttcaaagctcttgggctcacatagactctgtctgcataaaatgaatgtcaaagatgagtgtcaatggctggatggaacagtagctgtttttgacagacactttaatctgctttgtgtacaaattgcaagatgacggagatgcagtgtacgtagtttctggagccaggaagaagaagtgattagagagttggtcagtcttgactctttmaagcccgttttgtcactatcagagtatctcaaaacagcattggttctcattttatttcwgcaacacaaatcacagcacttaatctgaaaaaaaaatatgacatggattgtaaaaatcattagccagctctgaggtttcagctttgacttctgaatggcrayttgcacagcgtgactcaatcttcctgacagtgcaaaattttttgttgttatttttgaggtgtttttgttctttttacaggtgagtcttgatggagtaatgcagaactgttcagctaattggtaacattcacttgtatat

SEQ ID NO: 83898 - DNA, 600 bp, Chicken  19866894380811_5
gtattacttattggtctcctttactcagtccagttcaaagctcttgggctcacatagactctgtctgcataaaatgaatgtcaaagatgagtgtcaatggctggatggaacagtagctgtttttgacagacactttaatctgctttgtgtacaaattgcaagatgacggagatgcagtgtacgtagtttctggagccaggaagaagaagtgattagagagttggtcagtcttgactctttmaagcccgttttgtcactatcagagtatctcaaaacagcattggttctcattttatttcwgcaacacaaatcacagcacttaatctgaaaaaaaaatatgacatggattgtaaaaatcattagccagctctgaggtttcagctttgacttctgaatggcrayttgcacagcgtgactcaatcttcctgacagtgcaaaattttttgttgttatttttgaggtgtttttgttctttttacaggtgagtcttgatggagtaatgcagaactgttcagctaattggtaacattcacttgtatatacagatatgcacagatacacacccatgtgttcctgggtgaaagctccttccagcatttt

SEQ ID NO: 83899 - DNA, 600 bp, Chicken  19866894380811_6
ctggatggaacagtagctgtttttgacagacactttaatctgctttgtgtacaaattgcaagatgacggagatgcagtgtacgtagtttctggagccaggaagaagaagtgattagagagttggtcagtcttgactctttmaagcccgttttgtcactatcagagtatctcaaaacagcattggttctcattttatttcwgcaacacaaatcacagcacttaatctgaaaaaaaaatatgacatggattgtaaaaatcattagccagctctgaggtttcagctttgacttctgaatggcrayttgcacagcgtgactcaatcttcctgacagtgcaaaattttttgttgttatttttgaggtgtttttgttctttttacaggtgagtcttgatggagtaatgcagaactgttcagctaattggtaacattcacttgtatatacagatatgcacagatacacacccatgtgttcctgggtgaaagctccttccagcatttttgctcttatgtaagacgtggttagtttcctcatctattttcagtgtggttttctgtatttatgtcagtattaaatgcaatttattaagtttacaaccttg

SEQ ID NO: 83900 - DNA, 600 bp, Chicken  19866894380811_7
ggatggaacagtagctgtttttgacagacactttaatctgctttgtgtacaaattgcaagatgacggagatgcagtgtacgtagtttctggagccaggaagaagaagtgattagagagttggtcagtcttgactctttmaagcccgttttgtcactatcagagtatctcaaaacagcattggttctcattttatttcwgcaacacaaatcacagcacttaatctgaaaaaaaaatatgacatggattgtaaaaatcattagccagctctgaggtttcagctttgacttctgaatggcrayttgcacagcgtgactcaatcttcctgacagtgcaaaattttttgttgttatttttgaggtgtttttgttctttttacaggtgagtcttgatggagtaatgcagaactgttcagctaattggtaacattcacttgtatatacagatatgcacagatacacacccatgtgttcctgggtgaaagctccttccagcatttttgctcttatgtaagacgtggttagtttcctcatctattttcagtgtggttttctgtatttatgtcagtattaaatgcaatttattaagtttacaaccttgac

SEQ ID NO: 83901 - DNA, 574 bp, Chicken  19866894380812_1
accttgatatgggtaatgtacttccagagcgaacacaatatggcttccaaagtcattaaataacacattatcattccctctttcaatatgttcattttatctcaaagtgataagggcccaaagcaaccatctcaaatacttccccttccttattatacagtccacagctgcaggggtcaatgttggtgacgacataaaagaagaggctgtagcagcctcaaacactattgaattaccaagaatagaaatgattcaaatatacgggtctcgcagaaaaagaagatgaaggtgttaaaaatyaaaaagaaaattatataagaaacacccaagacacaaagaacacagcagtcactaccatactcagaaaagcaagattgtatactaagtgtaaattcctaactcttcaaagatataaaaatcagttttatttttaaactaaagtggtctatttgtagttaagctttctattcaccacccgctgtttccaacactagaaaaaacacatgcaaagaatatctttcatggaatacatctgattctgaaattatcaattccgattaaaaaaaaaaacaaa

SEQ ID NO: 83902 - DNA, 600 bp, Chicken  19866894380816_1
cagaccaggctgctcagggccacatccagactggaataggatgcttgtaaccccacagattcctacaagtatcaatgcaagcctaaggattgtgccacaaagccttccaagcaaggtcagcatctgcttgtgaggataatgcattaaagacagtcgataaaacatacaagctcaaactcttttgaaagccactgagcgcatttactgagatatacttccaaataataccaaaaaagacagaacattacttcatcccaaacaactgcctcagaactgcatttccatatttgctctctatgmaaactgctctgtgcacgcagcaactctcatacacttctgtttatgttcctggaactaaatgcactcctaagcgacagctgcacctgtatttgtaacaaacccacagcaaacacattttactctgaaccaaaccaaagcaaaccgcagaaggcagcaagatagcactctgctgtcaggttggggcagagaagataggcagctcccactcctaatccctgagccaccactcacttcctgcagggcgctgggtgaagtcgcttcagccgcctcagcacccctcccacaccatccataaacacg

SEQ ID NO: 83903 - DNA, 600 bp, Chicken  19866894380821_1
acagggtgagggtaaaatcttgtttgcttttgacaggagattggtttgaaatttactttctaagttgatgggttatgaaatggaaagctagcagacaggaattaatttttattgctaaaattatgtgtggtgttggaaaaacaaccagcgtacaaagaagtgtcctgttggtgaagtgggacacttggcagtgaactggttacagctttttcatccttaaaaagctaatgaaaagatgactcttctctcctggggaaaagctgtagatttgggaataagtgaaacaaatgagagtccacrgatgctcttttagtagatgtaatattcttaagtaattttgaaagaaaatacttcatttttgtcacattttaatattctttagcccagggtgataagacgcatcaatctcagcactaactttcataaccttgaaaaagtttccttttagtttcagataactgaggagatgtaaaagcacattgaggaggtgcagaaatttctttgagaggctggaaaagatgtcaggcttcttgttacgaaggggccatgttcaccagcaatggctgccagcagcttttcttccctatagtttgttctttt

SEQ ID NO: 83904 - DNA, 600 bp, Chicken  19866894380821_2
ttttagtttcagataactgaggagatgtaaaagcacattgaggaggtgcagaaatttctttgagaggctggaaaagatgtcaggcttcttgttacgaaggggccatgttcaccagcaatggctgccagcagcttttcttccctatagtttgttcttttcattgcacaccactgtctgagtccctaggaaaactggtgtttgaagagagaagttgacgcagcttctcaaaagaatgagaaaactgatccagtataaatatgaacagtaaaaatatcttccattggccttttgtcctattcrtgtggtctcttccaaattgttatgcatctctgcatgccttttctccacatggtgtttaggtgccctggaattcatatgtggctttggacaagcacaacagcacaacacaccctttcactgtgcttagggagaggcctatcccgtacagcacgtatccccatcaagcgcctactgcaacacttgtgacacagcatcttgtatggaatggataacctcgggaaccatcatggaccaattaaaggtcaaccaagggatcaggcccagtcagcatgtgcttacaagcggtagatcctgtctgac

SEQ ID NO: 83905 - DNA, 599 bp, Chicken  19866894380825_1
  misc_feature (1)..(7): n is any nucleotide
nnnnnnnctgtgctaaatgactgagtctggggaaaaaaacatggagtagaaatgagccatgatgaatttagcctggcatttggaagatggcttctgattgactgatcaaacagattttggagcatttttttctgataagagtgttggagtcaagaaacaccaattaattttcaagtggaacttggtctgtgtatgagaaactttcttctttaggtgtttctgatataacctaggtgtttcctgttgtaggaagagatcggactcagaaatccagaagaaaccttgtatttctacattccraacaggttttaaagctagtgatgagagttattcatacaatagtaattacaagtgcctgaagaaaagagagtggtggtgraaatgaagccgagcttatttgyccagagctactctcaagatgatctgaaattactgttactactaatatctactactaatatcwgttacaactactgctaccaccattgccattcaaaggtaatgacttacctgggtatctccccattaggatcccgcgatgtttatcttcagcatctgctaacaagagaactaccctatatgaagtcctctgtgaataa

SEQ ID NO: 83906 - DNA, 600 bp, Chicken  19866894380825_2
ttggaagatggcttctgattgactgatcaaacagattttggagcatttttttctgataagagtgttggagtcaagaaacaccaattaattttcaagtggaacttggtctgtgtatgagaaactttcttctttaggtgtttctgatataacctaggtgtttcctgttgtaggaagagatcggactcagaaatccagaagaaaccttgtatttctacattccraacaggttttaaagctagtgatgagagttattcatacaatagtaattacaagtgcctgaagaaaagagagtggtggtgraaatgaagccgagcttatttgyccagagctactctcaagatgatctgaaattactgttactactaatatctactactaatatcwgttacaactactgctaccaccattgccattcaaaggtaatgacttacctgggtatctccccattaggatcccgcgatgtttatcttcagcatctgctaacaagagaactaccctatatgaagtcctctgtgaataacagcagttctacatttyttacttctattttttgagcaggatgccaacagctattttgtgtggggtgtctgtgatatagtg

SEQ ID NO: 83907 - DNA, 592 bp, Chicken  19866894380825_3
ctgatcaaacagattttggagcatttttttctgataagagtgttggagtcaagaaacaccaattaattttcaagtggaacttggtctgtgtatgagaaactttcttctttaggtgtttctgatataacctaggtgtttcctgttgtaggaagagatcggactcagaaatccagaagaaaccttgtatttctacattccraacaggttttaaagctagtgatgagagttattcatacaatagtaattacaagtgcctgaagaaaagagagtggtggtgraaatgaagccgagcttatttgyccagagctactctcaagatgatctgaaattactgttactactaatatctactactaatatcwgttacaactactgctaccaccattgccattcaaaggtaatgacttacctgggtatctccccattaggatcccgcgatgtttatcttcagcatctgctaacaagagaactaccctatatgaagtcctctgtgaataacagcagttctacatttyttacttctattttttgagcaggatgccaacagctattttgtgtggggtgtctgtgatatagtgagcttctgagattt

SEQ ID NO: 83908 - DNA, 530 bp, Chicken  19866894380825_4
ttaattttcaagtggaacttggtctgtgtatgagaaactttcttctttaggtgtttctgatataacctaggtgtttcctgttgtaggaagagatcggactcagaaatccagaagaaaccttgtatttctacattccraacaggttttaaagctagtgatgagagttattcatacaatagtaattacaagtgcctgaagaaaagagagtggtggtgraaatgaagccgagcttatttgyccagagctactctcaagatgatctgaaattactgttactactaatatctactactaatatcwgttacaactactgctaccaccattgccattcaaaggtaatgacttacctgggtatctccccattaggatcccgcgatgtttatcttcagcatctgctaacaagagaactaccctatatgaagtcctctgtgaataacagcagttctacatttyttacttctattttttgagcaggatgccaacagctattttgtgtggggtgtctgtgatatagtgagcttctgagattt

SEQ ID NO: 83909 - DNA, 377 bp, Chicken  19866894380825_5
agtgatgagagttattcatacaatagtaattacaagtgcctgaagaaaagagagtggtggtgraaatgaagccgagcttatttgyccagagctactctcaagatgatctgaaattactgttactactaatatctactactaatatcwgttacaactactgctaccaccattgccattcaaaggtaatgacttacctgggtatctccccattaggatcccgcgatgtttatcttcagcatctgctaacaagagaactaccctatatgaagtcctctgtgaataacagcagttctacatttyttacttctattttttgagcaggatgccaacagctattttgtgtggggtgtctgtgatatagtgagcttctgagattt

SEQ ID NO: 83910 - DNA, 600 bp, Chicken  19866894380828_1
aagcagtcgtatcagggatgtgtttgtgtcagtctgtccacacaggctttcggtgctgtcttccccacatgcttgaagtactacagcgtggccttcctgcgtgccccttgcaggcaggccctcgcttttgctgagtgtccgctgctttcataatgtggttttccagctgagctgaagctgctgactgcatcgtgacttatcccggagcatgagtgattgtgaattggcacaaaaccaaaccagagacccaccaggctccccgtcctgtaaatctggattgctgaagccctgctttcctcragtagccaacaataacaggcagctcatacggccacaacgtattagtcttacttaggccccktggactgatagtacgattataaaacaattgggaggcttttgtttgtctcctgaagcacactttctagtactgtatccagattagttttaaagatgacccagagagagtttgttttacactgggctcgcaccaatttatctcccccctcccaaccctgccacgatggatttaaaaaatgatactgtcatcaaacctgataaatctaagtcttcaacagagggtaatgtgtgctcagtggt

SEQ ID NO: 83911 - DNA, 600 bp, Chicken  19866894380828_2
tccccacatgcttgaagtactacagcgtggccttcctgcgtgccccttgcaggcaggccctcgcttttgctgagtgtccgctgctttcataatgtggttttccagctgagctgaagctgctgactgcatcgtgacttatcccggagcatgagtgattgtgaattggcacaaaaccaaaccagagacccaccaggctccccgtcctgtaaatctggattgctgaagccctgctttcctcragtagccaacaataacaggcagctcatacggccacaacgtattagtcttacttaggccccktggactgatagtacgattataaaacaattgggaggcttttgtttgtctcctgaagcacactttctagtactgtatccagattagttttaaagatgacccagagagagtttgttttacactgggctcgcaccaatttatctcccccctcccaaccctgccacgatggatttaaaaaatgatactgtcatcaaacctgataaatctaagtcttcaacagagggtaatgtgtgctcagtggtcttttttttttttcttttggcttagttagagaaccgctgctgaggtataactaatgtttct

SEQ ID NO: 83912 - DNA, 600 bp, Chicken  19866894380830_1
atgtgatacattagttttaatttacagggaatggggacttgaacttgattatctcgtggatgaagaggcagtacagggagagaaacacatgatacattcgtgtcagctttcttatgctgagacattgtggtgatgccatctttgttcagtgtggtgaagttctgtagcttagactagtaagctactaagtaagaaagggagcctgaaaagaagaactgggagtcccctaacaaaaaaaagaaaaaaaaaaaaaagaaaaaaaaaaaagaaaacacttgcccttgtggcagtgtgttcagratgtgtggtgacctaagtaaaggtgacacatgggtgctctgttacactatacctttactggagtgagaaaactactggagtcttcaaagtattttcttctttccatccttctgttacagggtcaagcaggatgtggtactagataagtatttagtgcattttgtgatgtcctagagaagtttcatgccctcttggttatatgcagaatctaataccagtaaggagctcaagatacaaagaagtagaatttatgatggtaagaggaagatctgcagatagaagcaagatgtctatactggc

SEQ ID NO: 83913 - DNA, 599 bp, Chicken  19866894380833_1
  misc_feature (1)..(144): n is any nucleotide
nnnnnnnnnnnnnnnnnnnnnnnnnnnnnnnnnnnnnnnnnnnnnnnnnnnnnnnnnnnnnnnnnnnnnnnnnnnnnnnnnnnnnnnnnnnnnnnnnnnnnnnnnnnnnnnnnnnnnnnnnnnnnnnnnnnnnnnnnnnnnnnnctaggctgtaattttgtttctctaattaaagttggtgtaactacctaaagaaaaataaaaaaaaagacttcagatactgttgctagaaatagaatctgtacagtaggatattaaaaactgaaagtagtatgtatcttgtactaaattatgggaacwgaaattacagacctctctacatgtgccattggctgttcagcctgtagaagagaaagctgaggagagggggtcttaccatgcttatagatatctaaatgtcaggggtcaagtggttggggtaaagctctttttagtagtgcccagtgatagtaaaaggggcagtggggacaaactggaacacaagtcctatacaaacatgtagaakaaactattggaacagtttgcccagagaggttgtggaatctccttctatggagatattcaaaatctgtctggatgcctacctgtacaacctgtgt

SEQ ID NO: 83914 - DNA, 600 bp, Chicken  19866894380833_2
aaaagacttcagatactgttgctagaaatagaatctgtacagtaggatattaaaaactgaaagtagtatgtatcttgtactaaattatgggaacwgaaattacagacctctctacatgtgccattggctgttcagcctgtagaagagaaagctgaggagagggggtcttaccatgcttatagatatctaaatgtcaggggtcaagtggttggggtaaagctctttttagtagtgcccagtgatagtaaaaggggcagtggggacaaactggaacacaagtcctatacaaacatgtagaakaaactattggaacagtttgcccagagaggttgtggaatctccttctatggagatattcaaaatctgtctggatgcctacctgtacaacctgtgttaaggaacctgctttagcagggggttggactagatgatctccaaaggtcccttcaaacccttacaattctgtgattgtacaaattccataaaattgaatcaagtgtagcagtattgtaaatgatgaaagttactgtgctggtcatccatgcaatggctgcaaagcacatctgcatgtctgaaatgcttaagaaaatccctttcata

SEQ ID NO: 83915 - DNA, 599 bp, Chicken  19866894380834_1
  misc_feature (1)..(92): n is any nucleotide
nnnnnnnnnnnnnnnnnnnnnnnnnnnnnnnnnnnnnnnnnnnnnnnnnnnnnnnnnnnnnnnnnnnnnnnnnnnnnnnnnnnnnnnnnnnntattttcatgttggcttccaaacaagtgcaagcagaattgaaaagccgtgctaatatggacagggaaaaagatgtaagcagtgtatgctaccattactaacatagaaacgttgaaagtgtagaacagcactttttcccagggctccatgagatagctgcaggtgattaattcaaactggcagtacagccaataaagatagttcttcaygctcttaatatccatcttcaactcagagcagcttctgaaagccttccctattacaataaatgatagttaggagaaaaagaaacctttaaaagaaawaaaataaaataaaaataaaacagcaactccattctatccagtctgtccatagtgaccagtgttagcagatattataaaagcacaagggaactagaatccagagagtacacatacattttaaagcacaacatatgaccagatagaagcagactatcccatgaaaagctccatttgtactacttttgccttttctaccttctctt

SEQ ID NO: 83916 - DNA, 600 bp, Chicken  19866894380834_2
ttcatgttggcttccaaacaagtgcaagcagaattgaaaagccgtgctaatatggacagggaaaaagatgtaagcagtgtatgctaccattactaacatagaaacgttgaaagtgtagaacagcactttttcccagggctccatgagatagctgcaggtgattaattcaaactggcagtacagccaataaagatagttcttcaygctcttaatatccatcttcaactcagagcagcttctgaaagccttccctattacaataaatgatagttaggagaaaaagaaacctttaaaagaaawaaaataaaataaaaataaaacagcaactccattctatccagtctgtccatagtgaccagtgttagcagatattataaaagcacaagggaactagaatccagagagtacacatacattttaaagcacaacatatgaccagatagaagcagactatcccatgaaaagctccatttgtactacttttgccttttctaccttctcttctgaataagacagtcaaattcagcctaccatataatgggacactccacaatttctttttccagaaatctgttacctaataattattgcaagtccatt

SEQ ID NO: 83917 - DNA, 600 bp, Chicken  19866894380834_3
aataaatgatagttaggagaaaaagaaacctttaaaagaaawaaaataaaataaaaataaaacagcaactccattctatccagtctgtccatagtgaccagtgttagcagatattataaaagcacaagggaactagaatccagagagtacacatacattttaaagcacaacatatgaccagatagaagcagactatcccatgaaaagctccatttgtactacttttgccttttctaccttctcttctgaataagacagtcaaattcagcctaccatataatgggacactccacaatttcwttttccagaaatctgttacctaataattattgcaagtccattttccaaaccaaactactttcgtgacttttccttgcaatggattatttcagatgctgttgaagcaacttaattcagaaagcatgcatagcttcactagtcatggattctgaagtagaacttagctagaagtctgatttctgtcactgcagatggaatttgaagtcttatgattcagttgttgttggagtgcaaactggaagtatgcagaataacacacatacagaactacaacaaagtgcatcaatatacagactgtac

SEQ ID NO: 83918 - DNA, 600 bp, Chicken  19866894380842_1
agatcattaaataccatggagtccacggataggaatcctgaatgctcactgagcgggtggggggacaaattagctgggggcacatcgtgctgaattcttgggatagaaaaagagatctactcaggaactgcaggaggtccttaaagcagagcactgaggtgaatccctttggtacggtattaaatcggaacggaacaggaccgatcccggctaagcacctccctaaagtctgttcttatagcatttaatcctgcaggcgaggaaggagagatgaagggattaggagcttttagtcttgcsttgtattaagtgacacaccagcagctgggaaacaaatgctctttataggcagaggggaaagccaaccacccgagcggagtttgcagcctgaagtcacatcagtaatagttttgctgcttttgcaatagagcaccacttctcacagcagctactttatgttcctgttatactgtcagctgtgaccraacactcttgcaacacatgtgcccttgggttgttcataccacatgcacagcctcatctatgtgcagagccctcatctatggccctcggacctgttaatggttaaaggaggggaca

SEQ ID NO: 83919 - DNA, 555 bp, Chicken  19866894380842_2
cggaacggaacaggaccgatcccggctaagcacctccctaaagtctgttcttatagcatttaatcctgcaggcgaggaaggagagatgaagggattaggagcttttagtcttgcsttgtattaagtgacacaccagcagctgggaaacaaatgctctttataggcagaggggaaagccaaccacccgagcggagtttgcagcctgaagtcacatcagtaatagttttgctgcttttgcaatagagcaccacttctcacagcagctactttatgttcctgttatactgtcagctgtgaccraacactcttgcaacacatgtgcccttgggttgttcataccacatgcacagcctcatctatgtgcagagccctcatctatggccctcggacctgttaatggttaaaggaggggacagcttctggcacgagccttgtacaascatctttaaacaagacagggagtgctcccgtttacctgtttgttagccagactgctattgctcagcaatgccacactgcagtagtccttgagaccttctcagttaagatgtggag

SEQ ID NO: 83920 - DNA, 415 bp, Chicken  19866894380842_3
tgggaaacaaatgctctttataggcagaggggaaagccaaccacccgagcggagtttgcagcctgaagtcacatcagtaatagttttgctgcttttgcaatagagcaccacttctcacagcagctactttatgttcctgttatactgtcagctgtgaccraacactcttgcaacacatgtgcccttgggttgttcataccacatgcacagcctcatctatgtgcagagccctcatctatggccctcggacctgttaatggttaaaggaggggacagcttctggcacgagccttgtacaascatctttaaacaagacagggagtgctcccgtttacctgtttgttagccagactgctattgctcagcaatgccacactgcagtagtccttgagaccttctcagttaagatgtggag

SEQ ID NO: 83921 - DNA, 600 bp, Chicken  19866894380844_1
gcttaaaattatcctgacagaaaaacaattgaggcagcttttaaactaatgatacaatcccatggataatttcccctaaatagctcagagatgtgacctgagtgaatcatacatcatcgctggaagcaatttccctcaatgagttctacctgctggatatcacagtgcattacagattgagtaaaagctttcatctgaaatcagattcaaactggctttggagcaaaacttaaaccctgagggttagagagctatttaatacctctctgcaagttgcaggttccgttcattcctccctgygttggacaagttatttgtgaagaagccacacaatctacatagtttcagcctgtcttcactaacwttactgaccttaacatgcaatttgctactccttgatatattgcccagcatctcacaggttgttttttagtccatttgtttgtggggtttttgtttttttaacagcactccccaccttttttaaaattctgttttatttatttaactcctcaggctgccacaacatcaggttttcatgtttcttcagtaataaaaattagaccctgcttacagatcaaatcctcacttttgggaatg

SEQ ID NO: 83922 - DNA, 600 bp, Chicken  19866894380844_2
gataatttcccctaaatagctcagagatgtgacctgagtgaatcatacatcatcgctggaagcaatttccctcaatgagttctacctgctggatatcacagtgcattacagattgagtaaaagctttcatctgaaatcagattcaaactggctttggagcaaaacttaaaccctgagggttagagagctatttaatacctctctgcaagttgcaggttccgttcattcctccctgygttggacaagttatttgtgaagaagccacacaatctacatagtttcagcctgtcttcactaacwttactgaccttaacatgcaatttgctactccttgatatattgcccagcatctcacaggttgttttttagtccatttgtttgtggggtttttgtttttttaacagcactccccaccttttttaaaattctgttttatttatttaactcctcaggctgccacaacatcaggttttcatgtttcttcagtaataaaaattagaccctgcttacagatcaaatcctcacttttgggaatggaaacaagatagaaaggcacgatccattttgaaggtaaatatgaagatgtcttaggcaccraag

SEQ ID NO: 83923 - DNA, 600 bp, Chicken  19866894380844_3
acwttactgaccttaacatgcaatttgctactccttgatatattgcccagcatctcacaggttgttttttagtccatttgtttgtggggtttttgtttttttaacagcactccccaccttttttaaaattctgttttatttatttaactcctcaggctgccacaacatcaggttttcatgtttcttcagtaataaaaattagaccctgcttacagatcaaatcctcacttttgggaatggaaacaagatagaaaggcacgatccattttgaaggtaaatatgaagatgtcttaggcaccraagctaaagtacaatgtaacttaattgtatatgcagtaagkatttgatgcaaagctctttgattctagaagactcctgctgayttctgcaagatccagagaaggttctgaaatggaaattagtgcagcacagctgatggagaatacagattaagaagagttactggaaatcacaaaccagacttctgctgggttacatcttgtggagaactttcagctaactcttcttttggctacctcgaggaccaaactcacaacatagaagtaatcatctttgcatattcctgtgctgagaaaatgg

SEQ ID NO: 83924 - DNA, 600 bp, Chicken  19866894380844_4
attgcccagcatctcacaggttgttttttagtccatttgtttgtggggtttttgtttttttaacagcactccccaccttttttaaaattctgttttatttatttaactcctcaggctgccacaacatcaggttttcatgtttcttcagtaataaaaattagaccctgcttacagatcaaatcctcacttttgggaatggaaacaagatagaaaggcacgatccattttgaaggtaaatatgaagatgtcttaggcaccraagctaaagtacaatgtaacttaattgtatatgcagtaagkatttgatgcaaagctctttgattctagaagactcctgctgayttctgcaagatccagagaaggttctgaaatggaaattagtgcagcacagctgatggagaatacagattaagaagagttactggaaatcacaaaccagacttctgctgggttacatcttgtggagaactttcagctaactcttcttttggctacctcgaggaccaaactcacaacatagaagtaatcatctttgcatattcctgtgctgagaaaatggaaatctaggttcagggccgcagctctgcttaatggaatggc

SEQ ID NO: 83925 - DNA, 567 bp, Chicken  19866894380844_5
gtggggtttttgtttttttaacagcactccccaccttttttaaaattctgttttatttatttaactcctcaggctgccacaacatcaggttttcatgtttcttcagtaataaaaattagaccctgcttacagatcaaatcctcacttttgggaatggaaacaagatagaaaggcacgatccattttgaaggtaaatatgaagatgtcttaggcaccraagctaaagtacaatgtaacttaattgtatatgcagtaagkatttgatgcaaagctctttgattctagaagactcctgctgayttctgcaagatccagagaaggttctgaaatggaaattagtgcagcacagctgatggagaatacagattaagaagagttactggaaatcacaaaccagacttctgctgggttacatcttgtggagaactttcagctaactcttcttttggctacctcgaggaccaaactcacaacatagaagtaatcatctttgcatattcctgtgctgagaaaatggaaatctaggttcagggccgcagctctgcttaatggaatggcatacgcaca

SEQ ID NO: 83926 - DNA, 600 bp, Chicken  19866894380846_1
acttgtagaccttatttttagaagtccaaattaaaatacatatcatttgataaaatcaacagcaatccagaccgcagtatgagcacacctgtgagtatactacctgagtattcctgagcacactgcagaccctccatttgttaggcatatgaattttcaagaagctttagatgctgaccttgatcgctatagatttgccttcatatgaggggtgctcctgccccctgaccagccttgaggccctactctaaactcactccaatatactgcagagggtcagaggtgaacacagactacagygtttataatatacagcatttataggctgatcttcaaagtgaatgtgggagcaccccagcagtacttacttctactccagttaaaacagaagagaaaatctgactacaaacaagctgcattcaaattaaacatcaaaactcctaagccactgtggtttaccttgatagagtagagggggaaaacaaagaaaaaaaggcaaaaaaaaaaaccccatccagctcagcttgagtgccaaagcacagtccagcacagtgctctctgggtcctaataagggaaaaatgtatggaatgaaggttaca

SEQ ID NO: 83927 - DNA, 600 bp, Chicken  19866894380849_1
ctggtttacagctataatatcactgcctactgtccgtctgggatctaaaatcattcccaactcaagaatctttgtcactaatggaggacatgctgccacaaccagaggtggtggttgagctgtctccagcagccttttgtgcattactttgaagttaaattgcagccaccacaggtattaaaggaaatcaatacttgccaacatgcactgtgcaacagttctgaaaaactacatgtctttagtaatccagtggatgaggaaatatgaagtctgtagtgaaatgggtcttttagccctcaragttttccttgggacttggaagygttcatgctgacaaatgcaggtcyctcagacaaaagctactaccacagttaggcagtctttcaaagaayatattgttttccttgcccatacccgtttcratatctctttcttgtcatttttagtttctttgtttgtttggtgttacttaaagaatgtatgtgacaaggaaagggaagtacatgaagtttgagtttgaaaaaggtgaatttgaaagttgcaacttttcaaataatcaaattaagtatgtaggagtatttttagagcattaaaatatct

SEQ ID NO: 83928 - DNA, 600 bp, Chicken  19866894380849_2
tgcctactgtccgtctgggatctaaaatcattcccaactcaagaatctttgtcactaatggaggacatgctgccacaaccagaggtggtggttgagctgtctccagcagccttttgtgcattactttgaagttaaattgcagccaccacaggtattaaaggaaatcaatacttgccaacatgcactgtgcaacagttctgaaaaactacatgtctttagtaatccagtggatgaggaaatatgaagtctgtagtgaaatgggtcttttagccctcaragttttccttgggacttggaagygttcatgctgacaaatgcaggtcyctcagacaaaagctactaccacagttaggcagtctttcaaagaayatattgttttccttgcccatacccgtttcratatctctttcttgtcatttttagtttctttgtttgtttggtgttacttaaagaatgtatgtgacaaggaaagggaagtacatgaagtttgagtttgaaaaaggtgaatttgaaagttgcaacttttcaaataatcaaattaagtatgtaggagtatttttagagcattaaaatatctgttttttttcttataaaactcat

SEQ ID NO: 83929 - DNA, 600 bp, Chicken  19866894380849_3
aaatcattcccaactcaagaatctttgtcactaatggaggacatgctgccacaaccagaggtggtggttgagctgtctccagcagccttttgtgcattactttgaagttaaattgcagccaccacaggtattaaaggaaatcaatacttgccaacatgcactgtgcaacagttctgaaaaactacatgtctttagtaatccagtggatgaggaaatatgaagtctgtagtgaaatgggtcttttagccctcaragttttccttgggacttggaagygttcatgctgacaaatgcaggtcyctcagacaaaagctactaccacagttaggcagtctttcaaagaayatattgttttccttgcccatacccgtttcratatctctttcttgtcatttttagtttctttgtttgtttggtgttacttaaagaatgtatgtgacaaggaaagggaagtacatgaagtttgagtttgaaaaaggtgaatttgaaagttgcaacttttcaaataatcaaattaagtatgtaggagtatttttagagcattaaaatatctgttttttttcttataaaactcatttatgactaaacaaaccacagtgt

SEQ ID NO: 83930 - DNA, 600 bp, Chicken  19866894380849_4
ctgccacaaccagaggtggtggttgagctgtctccagcagccttttgtgcattactttgaagttaaattgcagccaccacaggtattaaaggaaatcaatacttgccaacatgcactgtgcaacagttctgaaaaactacatgtctttagtaatccagtggatgaggaaatatgaagtctgtagtgaaatgggtcttttagccctcaragttttccttgggacttggaagygttcatgctgacaaatgcaggtcyctcagacaaaagctactaccacagttaggcagtctttcaaagaayatattgttttccttgcccatacccgtttcratatctctttcttgtcatttttagtttctttgtttgtttggtgttacttaaagaatgtatgtgacaaggaaagggaagtacatgaagtttgagtttgaaaaaggtgaatttgaaagttgcaacttttcaaataatcaaattaagtatgtaggagtatttttagagcattaaaatatctgttttttttcttataaaactcatttatgactaaacaaaccacagtgttactcctctgcttaggaacaactgcttcattaaatacaattggaa

SEQ ID NO: 83931 - DNA, 600 bp, Chicken  19866894380849_5
tctccagcagccttttgtgcattactttgaagttaaattgcagccaccacaggtattaaaggaaatcaatacttgccaacatgcactgtgcaacagttctgaaaaactacatgtctttagtaatccagtggatgaggaaatatgaagtctgtagtgaaatgggtcttttagccctcaragttttccttgggacttggaagygttcatgctgacaaatgcaggtcyctcagacaaaagctactaccacagttaggcagtctttcaaagaayatattgttttccttgcccatacccgtttcratatctctttcttgtcatttttagtttctttgtttgtttggtgttacttaaagaatgtatgtgacaaggaaagggaagtacatgaagtttgagtttgaaaaaggtgaatttgaaagttgcaacttttcaaataatcaaattaagtatgtaggagtatttttagagcattaaaatatctgttttttttcttataaaactcatttatgactaaacaaaccacagtgttactcctctgcttaggaacaactgcttcattaaatacaattggaagcgctgcgtcatatttcttactatcttttg

SEQ ID NO: 83932 - DNA, 599 bp, Chicken  19866894380855_1
  misc_feature (1)..(206): n is any nucleotide
nnnnnnnnnnnnnnnnnnnnnnnnnnnnnnnnnnnnnnnnnnnnnnnnnnnnnnnnnnnnnnnnnnnnnnnnnnnnnnnnnnnnnnnnnnnnnnnnnnnnnnnnnnnnnnnnnnnnnnnnnnnnnnnnnnnnnnnnnnnnnnnnnnnnnnnnnnnnnnnnnnnnnnnnnnnnnnnnnnnnnnnnnnnnnnnnnnnnnnnnnnnnnnacagaacactgaattttaaagttatattgctactaaacaaaactctaaagacaaaagaagcacctcatgttttcagcatgttttactttggtaytcagaagaaatgtatatgcttgcagcaatgcagyttataaactggacagcacttgagtgatggatatgaattgactgatgcaatattaaatattgccagaagcagttaaatatgagttggaaaagaaaataaaggaatgtggtatgcctacgcttttgacatgacagatactgccctattcatgaacatactcatttataagatattttctgaggttttgaagaaattgcctttataaaatttacaaattctgacttacattttggaactgctgctatacagtccatgaaaaatactag

SEQ ID NO: 83933 - DNA, 599 bp, Chicken  19866894380855_2
  misc_feature (1)..(172): n is any nucleotide
nnnnnnnnnnnnnnnnnnnnnnnnnnnnnnnnnnnnnnnnnnnnnnnnnnnnnnnnnnnnnnnnnnnnnnnnnnnnnnnnnnnnnnnnnnnnnnnnnnnnnnnnnnnnnnnnnnnnnnnnnnnnnnnnnnnnnnnnnnnnnnnnnnnnnnnnnnnnnnnnnnnnnnnnnnnnacagaacactgaattttaaagttatattgctactaaacaaaactctaaagacaaaagaagcacctcatgttttcagcatgttttactttggtaytcagaagaaatgtatatgcttgcagcaatgcagyttataaactggacagcacttgagtgatggatatgaattgactgatgcaatattaaatattgccagaagcagttaaatatgagttggaaaagaaaataaaggaatgtggtatgcctacgcttttgacatgacagatactgccctattcatgaacatactcatttataagatattttctgaggttttgaagaaattgcctttataaaatttacaaattctgacttacattttggaactgctgctatacagtccatgaaaaatactagttactgcctcagaacttaagcacacttccaacct

SEQ ID NO: 83934 - DNA, 600 bp, Chicken  19866894380858_1
tcaggcttgggatggttggtccaagccaaattccaaacctctcagcatcactcctgagttagccaagtggaaagctgttaagtgacatgagttaacccctctagccattttggctagtgctgggcacgtgtctccacatcttctgccccagagagtagagcacaagagtcatcaatcaaggcaaagcttgcagagcagcgcaggcaactgtccaaaggcagagcactgcagtggcaggaaggctacagtaaattgaaagcctggggcaatgcagtttgtttcagcgcttcatctcctttkctatctttagatggcatctaccaaccaggattcctgtcagaacagaaatatataaggacagccttaacaacctatgaatttagttagctatagcagaactggcaagactcaaaaggtaaatactggacgaactggagtatgaagtttcaatgcactgcagagatgaatgcataatggagagaaaacagttaattgtgaaggagagattaagggactgattgacattaactgccctcttcttgttcaaaatggtttcaactgatacctacgtttaaatcatatctaccaactgtcattttt

SEQ ID NO: 83935 - DNA, 600 bp, Chicken  19866894380858_2
tttcaactgatacctacgtttaaatcatatctaccaactgtcattttttcctcattatgcctaattatatttagactatgaaaattgtcaggttatgcagttctaaccagattactttttaactagctaaatcaggagtaattggaggcattgcctaaatatataatttacttggcagctcaaatgcttacttaacttccacaaggagatcttccagccctcagtgagttccactgtgctcatggaacttgagcatttttatgacaatcaaacctacatgggactgggagtcaaaaaacycgtaggacatgactcagccaaactgaagcatcagtctcagcctgcagtcacagcagctctgaagagccttattcccttcatccctattcccttcctagatccctaggatctagcctattattttttattagcatttccagcttttagttgttgctctcctatcacattcagagatcttttaattctgcatggagaatgtttaaaataaaggcacatatgccatagctggaaaagccctcttaccctaacagcttggtactttatctgctgccgtcattcctgattacataattttaacat

SEQ ID NO: 83936 - DNA, 600 bp, Chicken  19866894380860_1
atatatattgattattgatattgattcaggaaacaaattgttttgaatgaagcaactctgtcgtaagttgaacaaatcttgcacaagaagtacatggaacgcacagagaggtactaaatagatttgctcacctagtttggtatgaggaggtaaatatggtgtgtataattttttttttttgtggttccaaatacttgttcctctccctctgtgaattcttagagggaatgtctttagaaactcagtaatgaaatcatttctcattttcagcagagtagtttgttttccctccactctgcrgagcaataatagtatttgtatgagaaactttcttagaagattggtctgctgtgctagctctcttctctttccttagattgccttattccctttattcctgtcttaatatacatctctgcaccttctctggtttgaaatacctctttgaaaaacagatttctcctatgaacatatgcatcaatatctctgcctaggatatcggtgtattaaagctagagacttttttctttcccttaagcatttctctggacttccagttgtaccctcatttaacttaatgtttctgctcactcgcagtcc

SEQ ID NO: 83937 - DNA, 600 bp, Chicken  19866894380861_1
gaagtatgaagttggctttggagagtaggtcaggagtgttctgatgctgtttgagaacagtgtctgaatgagatatgtaaggtgaaaattgcagtacagggttttctttaactaggaaatcactgaattctgagctcatttgaaaattagtttttagcctcaaaatagcaaggaaataagaaaggagttacatctttctctattgctgtcggtgtatttctttgatgtgctgttaagcttaaaaatctgcttccattgagtgaatttgtgaagcatcagtatttccaaaaaaagttaaarttttgtatttttaggctttccaaaatatttattatgcttatgatgatattgaagggatctagtggatactttaggggtttctacatgattttctacttgatacttatgtaatacttcaactaaaaatggtgttactgaagactgtggtagatcacattagagcaaacgcttgctgctaatcaaaaagtgctgatatcatttccaggattcgagaaaaaagtttataggtaaaatatgtagataatataattaattttcttaaacagaattttgtatgcaaataatgtataatggggatga

SEQ ID NO: 83938 - DNA, 599 bp, Chicken  19866894380871_1
  misc_feature (1)..(205): n is any nucleotide
nnnnnnnnnnnnnnnnnnnnnnnnnnnnnnnnnnnnnnnnnnnnnnnnnnnnnnnnnnnnnnnnnnnnnnnnnnnnnnnnnnnnnnnnnnnnnnnnnnnnnnnnnnnnnnnnnnnnnnnnnnnnnnnnnnnnnnnnnnnnnnnnnnnnnnnnnnnnnnnnnnnnnnnnnnnnnnnnnnnnnnnnnnnnnnnnnnnnnnnnnnnnnacctttaatttgagactttgggcgagatactgaagtggttcacctccagcaggggaagcgttggaataattactttgtaaagagctgaggaagcygttgggtacatttgctggagatctgcttcacaatgaattgcacgtggggttgggtctgtcagaagtgcagcgctgatgtacaacagaagccgatagcaatggagatgttgggctgtgggctcctcgttctgctggaagtcctccactcgtgcagggagccgtgccctgagccccgtgagcccccagctgggctgtgctgggggacagggagacttctgctggggtcasggtgaagccccagccttcctgtgagctggggagggatgtggggaaagggacagggctcaagccagcaaagc

SEQ ID NO: 83939 - DNA, 600 bp, Chicken  19866894380871_2
gagatactgaagtggttcacctccagcaggggaagcgttggaataattactttgtaaagagctgaggaagcygttgggtacatttgctggagatctgcttcacaatgaattgcacgtggggttgggtctgtcagaagtgcagcgctgatgtacaacagaagccgatagcaatggagatgttgggctgtgggctcctcgttctgctggaagtcctccactcgtgcagggagccgtgccctgagccccgtgagcccccagctgggctgtgctgggggacagggagacttctgctggggtcasggtgaagccccagccttcctgtgagctggggagggatgtggggaaagggacagggctcaagccagcaaagcttgcaaacccacgctcgctttcaagcacatacctcacttcatcctcattcggcggagcgcagaagcatgtgctcaacaataaacatgtgcaaatgtgctgaattttggctataaatagagtgctttcctctcccacttatcgcagggctttgcccgctgcagcagctctgctgaaccacgttgggggttgaggcatctttagtcgtggcataaaacatcgtgcccttat

SEQ ID NO: 83940 - DNA, 600 bp, Chicken  19866894380874_1
cacttgaataaaaatgtttcataaagtatgagaaattcagctccaaaaggagtaaacaggaggagaagcatgctttctgcctctcatgccagccaagaatactgctaaatctgtggtttaatcgctgacattttatacaaccgtctataattaaaagcagagttttcaccctaaatgcatcttatgcaagcaacatatgttttgtgcaattcagcttaactgttccgagtgactgaaggagtaacttcattcctggagatctaagactaggctgtttccttacaatgctgctatgcttcrggaagccaagctcagcattacccttgccaccattatagagagggagatgcccttgttgcaaatcactgcagcgctgtgaactttcacagtgctgcacagatttcacccccctgtgactgtgagtcccatttaagcaggacaatttgactgccgagactccatgcctcacgagaataaatgcatccagaagtggttttctcccagaatagctaaatgcaaaatgctgtagcagactcrgctcctcaggtgcctttctgggtcattgcatccattttgcacattcataggtgagcagccttc

SEQ ID NO: 83941 - DNA, 600 bp, Chicken  19866894380874_2
ggagtaacttcattcctggagatctaagactaggctgtttccttacaatgctgctatgcttcrggaagccaagctcagcattacccttgccaccattatagagagggagatgcccttgttgcaaatcactgcagcgctgtgaactttcacagtgctgcacagatttcacccccctgtgactgtgagtcccatttaagcaggacaatttgactgccgagactccatgcctcacgagaataaatgcatccagaagtggttttctcccagaatagctaaatgcaaaatgctgtagcagactcrgctcctcaggtgcctttctgggtcattgcatccattttgcacattcataggtgagcagccttctatgaaccatttcagaatgacatactttaacacaatggaggagtgataaatggtagaaaatgctctattttctgttacaataattctgcccaagctaaggaataatttgatagcacaaaaaaatcacacagtttaatccaaacttttaatagttttgaaaatatatgtattcacaaastagaattccagccttcctgaagacaaatgaaagctgtatgggtgtattatttctgaagg

SEQ ID NO: 83942 - DNA, 600 bp, Chicken  19866894380874_3
tgcatccagaagtggttttctcccagaatagctaaatgcaaaatgctgtagcagactcrgctcctcaggtgcctttctgggtcattgcatccattttgcacattcataggtgagcagccttctatgaaccatttcagaatgacatactttaacacaatggaggagtgataaatggtagaaaatgctctattttctgttacaataattctgcccaagctaaggaataatttgatagcacaaaaaaatcacacagtttaatccaaacttttaatagttttgaaaatatatgtattcacaaastagaattccagccttcctgaagacaaatgaaagctgtatgggtgtattatttctgaaggattagcttagccagaaagcgttatggaagcactatggttactggctttaaatggaagccaacaaatttttaaaccaattaaaccaacagctttgattaattatttgcagctgaatgggctaaagtgaaataaaactaacatgcatgcctttaggttacaagataatttttcaaaagagcagtagagtaacatacatacatacagttttctccaagcagtagaaccaaaataaattttaaaa

SEQ ID NO: 83943 - DNA, 600 bp, Chicken  19866894380883_1
cggaatattctatgattctattaaagcaaaaaaaaaagatgcttcttttatgtttgcagtgaatatgtgatacaacaaatactaaagaagagctatagcttaattcatatgatacaaaccaaataatataatataatcaaataacataaaagctcttacagtgcaggttatatcctcaaggagagagccttacatttgtcctatttctgaataataattctttaaacactctataatttcataatagattgcaaacagtcagaggctcagaatataacaagcaaatgacacagcacttaygcaactgacagtgcaggagcttttaggaaggatattaaaaacatcactgtttcacaactgattaatgaaaaaaagaagttggaagggatgtttttgtttaaaacacctagacacctaagcacacgttaaaatctcagcaggactcctttttaaaaggaaatgggataaaattcacaaaattcaatcataatccattcattaaaaagggtcggaagagacagcctcacttaaaacatgatatccatgctaccaagtgttacaatctcagtaagacagccaacttcccattgggccaaactt

SEQ ID NO: 83944 - DNA, 600 bp, Chicken  19866894380883_2
agtggacatatgacagagctgcgtactgtatcagacacacataataatgtaatcagcttgagctcttgtcctgtggaaaggggcagcatttatcgtaccctcagtggctcagcagcaatgaattcaagactgatgagcagcatttcagatgagcagcatctgtgcctccctaccagcacatgcacatgccgcatattgtccggaaatgtgtctaatacatatttaatgtacttgttctgtaaacatgtactaatggaaatagcatttgctaggaaaggcggtcctgtccgtggctattaktggtagcactccttgagaaaagtaatttggagctttcttgtgtgagacagatggatcttgtccctgcacggcatccttctgctcacattcatgttggtaaaaatgtacactcagatttgttttcrtatctaactgtggagtcaaatgccatagctaacgtatatcccagcgcatggaaatcagaaagagccaacaagacctttgagtgtgatccccaaagagcttttccgaactgaaatgtcacagccttcacacagcatctttaatccaaaaataattaaattagatttatatagagac

SEQ ID NO: 83945 - DNA, 600 bp, Chicken  19866894380883_3
aagactgatgagcagcatttcagatgagcagcatctgtgcctccctaccagcacatgcacatgccgcatattgtccggaaatgtgtctaatacatatttaatgtacttgttctgtaaacatgtactaatggaaatagcatttgctaggaaaggcggtcctgtccgtggctattaktggtagcactccttgagaaaagtaatttggagctttcttgtgtgagacagatggatcttgtccctgcacggcatccttctgctcacattcatgttggtaaaaatgtacactcagatttgttttcrtatctaactgtggagtcaaatgccatagctaacgtatatcccagcgcatggaaatcagaaagagccaacaagacctttgagtgtgatccccaaagagcttttccgaactgaaatgtcacagccttcacacagcatctttaatccaaaaataattaaattagatttatatagagacaatccgagacactggccccagataactggtgattcatttaaagtgactaatcctaaccaccgtgaagtcactgcaggccagggccttgcaggcccaactatgggggagagtgcctcctaaagctc

SEQ ID NO: 83946 - DNA, 600 bp, Chicken  19866894380886_1
atttcaagcagggagaccaacgcagcatgagccccacttacaaggatgaacaggttaacaatacagatttcagaataccttctgctcctcaccaaaatagtcgttgtcacacttaaaccctgaaacaaacccagacacttcacctctcgtgtacatccagatagtactttgatcctcccaacagatgctcttaaaaaataaagcaagcggagtggaagtctggttcagcaacagcagcagctttgtcaggagggagtagaagggatctggcagagcgcactgctacacctcactttgctyagctaaaacccatctgttcctgctacagtcctctctctgcctgctaacccagatccattcatgtagaggccttgttctcagagacgagcgttcacactttgatagaaacaagcctttcactccccagcacttcccatgacagcagactttccttcaaggccttcaggtgctacaacagttcagctcctgcttttcacccgaggcaataaagcatcctgcaggttcagagcagagcgttgttatgacagccctaatcccagctgcaacaaactcaaccarcaaaacatggcacatctgcag

SEQ ID NO: 83947 - DNA, 406 bp, Chicken  19866894380886_2
ctgctacacctcactttgctyagctaaaacccatctgttcctgctacagtcctctctctgcctgctaacccagatccattcatgtagaggccttgttctcagagacgagcgttcacactttgatagaaacaagcctttcactccccagcacttcccatgacagcagactttccttcaaggccttcaggtgctacaacagttcagctcctgcttttcacccgaggcaataaagcatcctgcaggttcagagcagagcgttgttatgacagccctaatcccagctgcaacaaactcaaccarcaaaacatggcacatctgcagctctggggctccacagagctgccctgatacaaagcatcaaatcgaggagaatggtacttctatagtgcccaagcaagatgcactg

SEQ ID NO: 83948 - DNA, 600 bp, Chicken  19866894380892_1
agggtttccaccttctcactgaaaggaaaaatataatcaccttctctttatacttgcttgatttctctggctagaccaacagctttacaagcagaatttttcttactgagttatttttgcaggtttccaattttgtgcagcttggaagctctagatcccacacaaatagaactcatgccttagaaataccaatgagcctctgctaatcttcagcactgttgtaaaatttcatctttgtacttttatatttaactcgagaatgaagtgttcatggttccaagcgtatgtacttaaggagayggaaagcaaaaggaattaaacaacacgagaggccttctatttgaaactccctgtgagagctgagagatttgcaattaatgtcggtgtgtttgtttataatcaacttggaaaggagcattaaaactctgtaaacttctcggtgtggtaagacaggaatatcagtgttagaaatgcctgagaattcctttaactgcaggttttgccttctcagatcactgcttgattcttaatatgtgatacaatttcaaatatgcatttgctgatttttgctgattttttttttttggaaggccatataaa

SEQ ID NO: 83949 - DNA, 599 bp, Chicken  19866894380896_1
  misc_feature (1)..(159): n is any nucleotide
nnnnnnnnnnnnnnnnnnnnnnnnnnnnnnnnnnnnnnnnnnnnnnnnnnnnnnnnnnnnnnnnnnnnnnnnnnnnnnnnnnnnnnnnnnnnnnnnnnnnnnnnnnnnnnnnnnnnnnnnnnnnnnnnnnnnnnnnnnnnnnnnnnnnnnnnnnnnnnngatataaagtatctcagtctgtatgtgaactttggagtggttccttgctgtagacgaaaagcatgcatggatttgaaaggctgcagaaacttgcagaggaagaggtgtgttgggcatctgggtgtgctgcttacagtgttstgaccaggggcactgctgcttgaagatgagagggcttgctacacatacgttacctgtttgttctgttgctccctgcttctcagacatccrttygtgctgtcaaactggtctatcaggatactcaatccaggcaggcagttcgtcggtgttcatggacttgaagggatgctgttgctgggactaacttcagsttttgatgtgctgtagaagaatccaggcatattctctagtctagctgtctcttactgctcttaaattaaactgctgctagtgtgtttgtgtgaggcctctgttcttgt

SEQ ID NO: 83950 - DNA, 599 bp, Chicken  19866894380896_2
  misc_feature (1)..(69): n is any nucleotide
nnnnnnnnnnnnnnnnnnnnnnnnnnnnnnnnnnnnnnnnnnnnnnnnnnnnnnnnnnnnnnnnnnnnngatataaagtatctcagtctgtatgtgaactttggagtggttccttgctgtagacgaaaagcatgcatggatttgaaaggctgcagaaacttgcagaggaagaggtgtgttgggcatctgggtgtgctgcttacagtgttstgaccaggggcactgctgcttgaagatgagagggcttgctacacatacgttacctgtttgttctgttgctccctgcttctcagacatccrttygtgctgtcaaactggtctatcaggatactcaatccaggcaggcagttcgtcggtgttcatggacttgaagggatgctgttgctgggactaacttcagsttttgatgtgctgtagaagaatccaggcatattctctagtctagctgtctcttactgctcttaaattaaactgctgctagtgtgtttgtgtgaggcctctgttcttgtcctgtcagccactgacagaaactccgtggcaaaatccagctgctggtgctggtggtgttaataggagcccacctgtgctgctgcagttta

SEQ ID NO: 83951 - DNA, 599 bp, Chicken  19866894380896_3
  misc_feature (1)..(66): n is any nucleotide
nnnnnnnnnnnnnnnnnnnnnnnnnnnnnnnnnnnnnnnnnnnnnnnnnnnnnnnnnnnnnnnnnngatataaagtatctcagtctgtatgtgaactttggagtggttccttgctgtagacgaaaagcatgcatggatttgaaaggctgcagaaacttgcagaggaagaggtgtgttgggcatctgggtgtgctgcttacagtgttstgaccaggggcactgctgcttgaagatgagagggcttgctacacatacgttacctgtttgttctgttgctccctgcttctcagacatccrttygtgctgtcaaactggtctatcaggatactcaatccaggcaggcagttcgtcggtgttcatggacttgaagggatgctgttgctgggactaacttcagsttttgatgtgctgtagaagaatccaggcatattctctagtctagctgtctcttactgctcttaaattaaactgctgctagtgtgtttgtgtgaggcctctgttcttgtcctgtcagccactgacagaaactccgtggcaaaatccagctgctggtgctggtggtgttaataggagcccacctgtgctgctgcagtttagtc

SEQ ID NO: 83952 - DNA, 600 bp, Chicken  19866894380896_4
tggagtggttccttgctgtagacgaaaagcatgcatggatttgaaaggctgcagaaacttgcagaggaagaggtgtgttgggcatctgggtgtgctgcttacagtgttstgaccaggggcactgctgcttgaagatgagagggcttgctacacatacgttacctgtttgttctgttgctccctgcttctcagacatccrttygtgctgtcaaactggtctatcaggatactcaatccaggcaggcagttcgtcggtgttcatggacttgaagggatgctgttgctgggactaacttcagsttttgatgtgctgtagaagaatccaggcatattctctagtctagctgtctcttactgctcttaaattaaactgctgctagtgtgtttgtgtgaggcctctgttcttgtcctgtcagccactgacagaaactccgtggcaaaatccagctgctggtgctggtggtgttaataggagcccacctgtgctgctgcagtttagtcccagtagctgtcacactgtcccttgcttggctgcactgcaacagcacttcagcgtatgttcaaacctagcaggcctggcttaaaacaagtcagtttctg

SEQ ID NO: 83953 - DNA, 550 bp, Chicken  19866894380896_5
gtttttcccagacaaagctcaggaggattaggtttgtaccctgaccatctggaactttggatttgaggtcagccttcttgtttccgaatgcagacctggcttgcagtggcattcagctgattggtggaaaaactcctgtttcagctatctgcttcctagtttgtgtcatgtttattactccagccttttcctttgctgaaggaaactgaatctggacagagctgttgttttcgacttcagacaatgcatttttttctggtgtgttttcgttatagaagtctgtagggaaatgcagttgcrtggcagatagtgatttttacaacagtagcaaaccctgttccttcgttctcttagatgtggaggcacttttgggctggatagaccttcttgcattgctgttatgctgcgcttatattttgggtggtgtgtagtatgtgtggtaatagatgacccctaccctaaggtgcctttgaagcatatgacacttctcttggagacagggaatggatgaatacaggtgagggggagtctgatgtaagataccatcaca

SEQ ID NO: 83954 - DNA, 600 bp, Chicken  19866894380897_1
aaatagtcacacacagctaaagctcaaaagcttccactagtgtgcatcagttccaacccagtgaaatcccagaaacatcctcagaaacactaagatatcttttaatttcaaattatatatttgtatatatttctgaagatgtttgtgacggaatctttggtgatggcgactacacagatttctatggcagtaaactcgggccctgtcttaaaatctttaaaaaaagattaacaaccagcaggagacgctttaaacgaagagtgggattttcaaagctaatagttgcagaagcagaaagcytatcaatagcagaaatcttaccactagttatcacagaaagcgatcagctgaaccctttcatggtagtttttaagttcttaccctcagaatttcactataaaagaaacacgggatcatttgcagccacattcagcaacccgctcrgcaattagaaaattgataggtttttctggacattaagggctttatctgcattatcaatttttccttgtatttcctgaatcccttctgcaggtgaactgcgtatgtaaacagagtttctgaaatattctcattttacaaccttaccagacatttgcc

SEQ ID NO: 83955 - DNA, 465 bp, Chicken  19866894380897_2
gtgacggaatctttggtgatggcgactacacagatttctatggcagtaaactcgggccctgtcttaaaatctttaaaaaaagattaacaaccagcaggagacgctttaaacgaagagtgggattttcaaagctaatagttgcagaagcagaaagcytatcaatagcagaaatcttaccactagttatcacagaaagcgatcagctgaaccctttcatggtagtttttaagttcttaccctcagaatttcactataaaagaaacacgggatcatttgcagccacattcagcaacccgctcrgcaattagaaaattgataggtttttctggacattaagggctttatctgcattatcaatttttccttgtatttcctgaatcccttctgcaggtgaactgcgtatgtaaacagagtttctgaaatattctcattttacaaccttaccagacatttgccaaatttacg

SEQ ID NO: 83956 - DNA, 599 bp, Chicken  19866894380900_1
  misc_feature (1)..(262): n is any nucleotide
nnnnnnnnnnnnnnnnnnnnnnnnnnnnnnnnnnnnnnnnnnnnnnnnnnnnnnnnnnnnnnnnnnnnnnnnnnnnnnnnnnnnnnnnnnnnnnnnnnnnnnnnnnnnnnnnnnnnnnnnnnnnnnnnnnnnnnnnnnnnnnnnnnnnnnnnnnnnnnnnnnnnnnnnnnnnnnnnnnnnnnnnnnnnnnnnnnnnnnnnnnnnnnnnnnnnnnnnnnnnnnnnnnnnnnnnnnnnnnnnnnnnnnnnnnnnnnnnnnnnnnacccaaagatgtgtcaccccttccccacagcacaccakcgttccatgaagtaacacgtttccccacaggtaaacccagcaaagattctgtgttcagtcagtcgacacagcacctggaaattcaaagactacctcagaacgcactcaggctctacaaaccttgtacctcctacagcagggccgtgactctggcagcagtgagccgcccccaggaggtcagcatttcccgccgctgtgctcaccgagcccgccgtggtcaggagcaggaagtcagcgaggcgtcacagagaagttcgttaaccgagcygctgaaacttgcgagcggcctgtctgagcct

SEQ ID NO: 83957 - DNA, 600 bp, Chicken  19866894380900_2
agatgtgtcaccccttccccacagcacaccakcgttccatgaagtaacacgtttccccacaggtaaacccagcaaagattctgtgttcagtcagtcgacacagcacctggaaattcaaagactacctcagaacgcactcaggctctacaaaccttgtacctcctacagcagggccgtgactctggcagcagtgagccgcccccaggaggtcagcatttcccgccgctgtgctcaccgagcccgccgtggtcaggagcaggaagtcagcgaggcgtcacagagaagttcgttaaccgagcygctgaaacttgcgagcggcctgtctgagcctggccaaaggttactctgcctcctgaaaactcatctaatctgccttcatctgctgcggactttctgttgcgtataaaacaggaagctatggccacagtgaaatccagctaaaatgtctttcattttcttttgtgcttgtttcactcggctgatctactgtttaattgtttttattatggtgcatagcactttggtaatccaagatctgccggagcattctggctttgataatacgtttgtgaccaccaggagttgttgagaacatcagtt

SEQ ID NO: 83958 - DNA, 600 bp, Chicken  19866894380904_1
tcattatttatttataaactgaattgagaaggagttcccatccttctacaacatctcatgttacaacatcttgaagagtatttttttcctcagttggaatgaaaagttgcaacaggatacttacagatacatacacagttattggttccaaagtatctgtcaactgtctaagtttaaatcatttccttcaattcaaccatcctctttctggtattattaatttagtatccttatagacctcatgataccaacagcctctctttttactggatagtgcacaatgaaactctgacatatgtmccccaggatacagtgatgtgtgccggtttaaggacagtcttttcagagctggtggggcagcttgaggtatggtgtgttgccacatgggaaatttgagttcatgaatggattcagatttccatactttgtttagcagccaagagatgtctctggaagagagatgctgggccagtacctctgctgagatgtgaaaaacactggcaggatttcaaactgagccgyttatttgtccttctagttatagacgwggtgaacttagacattagctggatataaaaaagaccttcaaaatatcaccca

SEQ ID NO: 83959 - DNA, 600 bp, Chicken  19866894380904_2
tagtatccttatagacctcatgataccaacagcctctctttttactggatagtgcacaatgaaactctgacatatgtmccccaggatacagtgatgtgtgccggtttaaggacagtcttttcagagctggtggggcagcttgaggtatggtgtgttgccacatgggaaatttgagttcatgaatggattcagatttccatactttgtttagcagccaagagatgtctctggaagagagatgctgggccagtacctctgctgagatgtgaaaaacactggcaggatttcaaactgagccgyttatttgtccttctagttatagacgwggtgaacttagacattagctggatataaaaaagaccttcaaaatatcacccaagttttgcttctttggcaagctagccaggtggtgacgcttcaaatgtggcatctcttagagtagaagcctattgaaagcagtcctgctgaaatgtcagcagctaaactgctgcctctcatgttatataccattctacaggctctgttcgttttcaaatataacaacttcttcccaattgccatgaaggatactacaaaccttcctagatctgttatgtccca

SEQ ID NO: 83960 - DNA, 600 bp, Chicken  19866894380904_3
caacagcctctctttttactggatagtgcacaatgaaactctgacatatgtmccccaggatacagtgatgtgtgccggtttaaggacagtcttttcagagctggtggggcagcttgaggtatggtgtgttgccacatgggaaatttgagttcatgaatggattcagatttccatactttgtttagcagccaagagatgtctctggaagagagatgctgggccagtacctctgctgagatgtgaaaaacactggcaggatttcaaactgagccgyttatttgtccttctagttatagacgwggtgaacttagacattagctggatataaaaaagaccttcaaaatatcacccaagttttgcttctttggcaagctagccaggtggtgacgcttcaaatgtggcatctcttagagtagaagcctattgaaagcagtcctgctgaaatgtcagcagctaaactgctgcctctcatgttatataccattctacaggctctgttcgttttcaaatataacaacttcttcccaattgccatgaaggatactacaaaccttcctagatctgttatgtcccagagttttttatacattgccaatattt

SEQ ID NO: 83961 - DNA, 600 bp, Chicken  19866894380905_1
aatcaggaactactttatattatgattacacaggcccttcagaacaccactgatccagactcatgctgaaaagcaggacataactgctgcccactgatgcaacctcctcccttcaccgagccacatgcaaaactatgatgagtaatggattcaggcaaaaaaagaaatggacctgtgaaataaatcagtgggcactttccatctgaagctgttccctactcttatcaccatggagccacacagtgatgactgaagcacaagagaaaaggtgacaactatctaacactggcagttgaagaygagtatgaaggcaagaatgaaactttcggagcagggctagattaacatggtcaaggaaactactgctttatcttccttccaagtactgattatcttgggttcctctagggctctaacaagctatgagcyccttgtgatgtgatttttatttccaaccctggaaagtatgtataaatctgacggtgacgtgtctgtcatgctctgatttcgcaaaggactaacatttatttacggtccatataaacattaaattaataaattcaatccgtgttcacagcaaacaatgttaatgtgaaaatg

SEQ ID NO: 83962 - DNA, 600 bp, Chicken  19866894380905_2
aaactatgatgagtaatggattcaggcaaaaaaagaaatggacctgtgaaataaatcagtgggcactttccatctgaagctgttccctactcttatcaccatggagccacacagtgatgactgaagcacaagagaaaaggtgacaactatctaacactggcagttgaagaygagtatgaaggcaagaatgaaactttcggagcagggctagattaacatggtcaaggaaactactgctttatcttccttccaagtactgattatcttgggttcctctagggctctaacaagctatgagcyccttgtgatgtgatttttatttccaaccctggaaagtatgtataaatctgacggtgacgtgtctgtcatgctctgatttcgcaaaggactaacatttatttacggtccatataaacattaaattaataaattcaatccgtgttcacagcaaacaatgttaatgtgaaaatgartaatatcactgcgaactgaaaagtcaaaacgtgctttttaaaatgttgaaataaactaggttggcatttagaggtgaaaataattaagctgtaaaaaggactaagggaaatatttttgctttacttt

SEQ ID NO: 83963 - DNA, 600 bp, Chicken  19866894380905_3
gtatgaaggcaagaatgaaactttcggagcagggctagattaacatggtcaaggaaactactgctttatcttccttccaagtactgattatcttgggttcctctagggctctaacaagctatgagcyccttgtgatgtgatttttatttccaaccctggaaagtatgtataaatctgacggtgacgtgtctgtcatgctctgatttcgcaaaggactaacatttatttacggtccatataaacattaaattaataaattcaatccgtgttcacagcaaacaatgttaatgtgaaaatgartaatatcactgcgaactgaaaagtcaaaacgtgctttttaaaatgttgaaataaactaggttggcatttagaggtgaaaataattaagctgtaaaaaggactaagggaaatatttttgctttactttaaatagactctaatttttttaatgatgattgaatcttaccagtcagagccaaacacatgttttcagcgtctccaaatgaatcttgccaagttaytatttatccaaaacaagtttgaaaatgtgaagtatttcccttttcatctaccaagctaatgtcattttcctttttctga

SEQ ID NO: 83964 - DNA, 600 bp, Chicken  19866894380905_4
tttatttacggtccatataaacattaaattaataaattcaatccgtgttcacagcaaacaatgttaatgtgaaaatgartaatatcactgcgaactgaaaagtcaaaacgtgctttttaaaatgttgaaataaactaggttggcatttagaggtgaaaataattaagctgtaaaaaggactaagggaaatatttttgctttactttaaatagactctaatttttttaatgatgattgaatcttaccagtcagagccaaacacatgttttcagcgtctccaaatgaatcttgccaagttaytatttatccaaaacaagtttgaaaatgtgaagtatttcccttttcatctaccaagctaatgtcattttcctttttctgatacagcaacaagtaagagagagggtataaagtacctcacattgcttgacaacactctgtcccagaaaattgctattgccttgacatcagcttttgtccagctgtctctgagctgctctggagatctttaatcaaagcacacagtaactctgtgcgtaaataatacagtcattttgatatgaagtgagacaagcaaaaaaaaaaaaatcaaagacctgccta

SEQ ID NO: 83965 - DNA, 600 bp, Chicken  19866894380907_1
acataaatcagaatgacaggattcagtcagaacatacagagttgctatgtggcaaaggaaaataacactaatactgtgacctttcatagtgtaagaattattaaggtagcaaaaccagggactaaacatgaagggtatttggatgctattggaagttcagccaggcttggcaagttctcacaaattctggtgtgcaagaaaagaagcagtatcatagcagtccgcagacttcttatccatttttgattcccttgggcaagaccttgaccaatgtacggttttttatacaggcctgtgagyacataaggaaaagtaaaaatcatagtgaggtttataaaacatacaatttaatgatggattaaataagaaaatcttagatgaaaagaataaaatgtgaaagcaattctcacaaggtagttaaatacgcataaaaatctgagacaatggaaatttagaaacaagtaccacttgraaaaattagtgggacttccatttctatgttattaatgagattaagaaaattcaacatgtcactttttgattctgacaaaatatttaaatcccccaattctggaaatgattgcagtctcctctcatgtc

SEQ ID NO: 83966 - DNA, 600 bp, Chicken  19866894380907_2
agttctcacaaattctggtgtgcaagaaaagaagcagtatcatagcagtccgcagacttcttatccatttttgattcccttgggcaagaccttgaccaatgtacggttttttatacaggcctgtgagyacataaggaaaagtaaaaatcatagtgaggtttataaaacatacaatttaatgatggattaaataagaaaatcttagatgaaaagaataaaatgtgaaagcaattctcacaaggtagttaaatacgcataaaaatctgagacaatggaaatttagaaacaagtaccacttgraaaaattagtgggacttccatttctatgttattaatgagattaagaaaattcaacatgtcactttttgattctgacaaaatatttaaatcccccaattctggaaatgattgcagtctcctctcatgtcttaaagagtcttcaaagaatcatgcagatatttttccttgttttctttttctttgctgtactaaaaagaaaatatgagtgcatataccacattcttctggtcacccaagagcagggagcgtggaacaacattcaataaaatgcaagaattaactggactgtttcagtgttca

SEQ ID NO: 83967 - DNA, 600 bp, Chicken  19866894380912_1
caattcctgcaaataaaaatatatatgtcttttacctggaagaaatccttatgtgctacagctcacgagctgtttctgcacttcttgtcactccattttattgctctgatttgattaattttgcttgataatgtatgcagtgctttgcagatcctcttgtctcatcataacagttaacagcggccccttgtgatatgaggaaaggcttttggcattcagaatttctgtatatgcagaactgattaaattcagctactgctgaatggaagtatgaatgctggaagatggctctgcttgctrcaagtgaggttgccagcagtgctaagataacagtgttagagtgaacagcagaaggaaagaaagaagggaaaatctgagaaatctgttttgctgtggtgccaggcacctggcagctcccctgctgggctgtgttctacagagcaacctagaagtaaagcaaaatgctttaatgaaagacacractgggcttttagagggaagaaatgtgagcagagatgttttctagtccccaaaataactttgtttacctgttattgttctgaagcagttgggaaggcagcaactggccagcagtgagtg

SEQ ID NO: 83968 - DNA, 600 bp, Chicken  19866894380912_2
ggccccttgtgatatgaggaaaggcttttggcattcagaatttctgtatatgcagaactgattaaattcagctactgctgaatggaagtatgaatgctggaagatggctctgcttgctrcaagtgaggttgccagcagtgctaagataacagtgttagagtgaacagcagaaggaaagaaagaagggaaaatctgagaaatctgttttgctgtggtgccaggcacctggcagctcccctgctgggctgtgttctacagagcaacctagaagtaaagcaaaatgctttaatgaaagacacractgggcttttagagggaagaaatgtgagcagagatgttttctagtccccaaaataactttgtttacctgttattgttctgaagcagttgggaaggcagcaactggccagcagtgagtgcttctgcaagttgctggccaaccaagaacatgcatagcaggcattgtgtctggaastgaacaccagacartgttggaaggggtctgctcctcttcttttactgatccagtagtgtactttgaaggtggtacgctttgcggtggtgaggtctaacttacaaaggatgatgttgcagtggtgt

SEQ ID NO: 83969 - DNA, 600 bp, Chicken  19866894380912_3
tgtgatatgaggaaaggcttttggcattcagaatttctgtatatgcagaactgattaaattcagctactgctgaatggaagtatgaatgctggaagatggctctgcttgctrcaagtgaggttgccagcagtgctaagataacagtgttagagtgaacagcagaaggaaagaaagaagggaaaatctgagaaatctgttttgctgtggtgccaggcacctggcagctcccctgctgggctgtgttctacagagcaacctagaagtaaagcaaaatgctttaatgaaagacacractgggrttttagagggaagaaatgtgagcagagatgttttctagtccccaaaataactttgtttacctgttattgttctgaagcagttgggaaggcagcaactggccagcagtgagtgcttctgcaagttgctggccaaccaagaacatgcatagcaggcattgtgtctggaastgaacaccagacartgttggaaggggtctgctcctcttcttttactgatccagtagtgtactttgaaggtggtacgctttgcggtggtgaggtctaacttacaaaggatgatgttgcagtggtgtttggtct

SEQ ID NO: 83970 - DNA, 497 bp, Chicken  19866894380912_4
aagaaagaagggaaaatctgagaaatctgttttgctgtggtgccaggcacctggcagctcccctgctgggctgtgttctacagagcaacctagaagtaaagcaaaatgctttaatgaaagacacractgggcttttagagggaagaaatgtgagcagagatgttttctagtccccaaaataactttgtttacctgttattgttctgaagcagttgggaaggcagcaactggccagcagtgagtgcttctgcaagttgctggccaaccaagaacatgcatagcaggcattgtgtctggaastgaacaccagacartgttggaaggggtctgctcctcttcttttactgatccagtagtgtactttgaaggtggtacgctttgcggtggtgaggtctaacttacaaaggatgatgttgcagtggtgtttggtctaccaagagtaacagatatttctccacacactatgagcatatctgtgttttgggttgattgcaagg

SEQ ID NO: 83971 - DNA, 483 bp, Chicken  19866894380912_5
aatctgagaaatctgttttgctgtggtgccaggcacctggcagctcccctgctgggctgtgttctacagagcaacctagaagtaaagcaaaatgctttaatgaaagacacractgggcttttagagggaagaaatgtgagcagagatgttttctagtccccaaaataactttgtttacctgttattgttctgaagcagttgggaaggcagcaactggccagcagtgagtgcttctgcaagttgctggccaaccaagaacatgcatagcaggcattgtgtctggaastgaacaccagacartgttggaaggggtctgctcctcttcttttactgatccagtagtgtactttgaaggtggtacgctttgcggtggtgaggtctaacttacaaaggatgatgttgcagtggtgtttggtctaccaagagtaacagatatttctccacacactatgagcatatctgtgttttgggttgattgcaagg

SEQ ID NO: 83972 - DNA, 600 bp, Chicken  19866894380920_1
cctggcagccgcgctgggaaggggcagctgtgcgtcggctctgagggcgccgatgaattactgcccctgttcaggcaggagcctttgttccccgcgcattgtgggcagagaaattggagagaaaagtaaaattaatcaggcgcagctcgagatatggggagacaatgagccgagcgcgtaccgggagatagcaccgcgcggagcatccgctccgattcaagcattagtagcaattttgttttgtccttgaactaattatctacaaaagctcctttgagctgacgccgggtatgaattgcygtgctggtgcggcattgtgacggcggtgatcccgtatttaatacgcggggcattcctgggtaatcgctggcccctttgtgccgctgaaggaagccgtatgtttcagagacatccccaaagatctcacagcaacaacaaaacggggatttctgcggctgctgaatgtggctgccaatcacccacgtcccgctgccrgtgctgtgtgggtcactgcaggtctgtgttagcggtggggttgtgcaggctgggcaccgagctyggcacgctgctgaagtgcaccaagggaactgcttttcctcc

SEQ ID NO: 83973 - DNA, 600 bp, Chicken  19866894380920_2
gcgcggagcatccgctccgattcaagcattagtagcaattttgttttgtccttgaactaattatctacaaaagctcctttgagctgacgccgggtatgaattgcygtgctggtgcggcattgtgacggcggtgatcccgtatttaatacgcggggcattcctgggtaatcgctggcccctttgtgccgctgaaggaagccgtatgtttcagagacatccccaaagatctcacagcaacaacaaaacggggatttctgcggctgctgaatgtggctgccaatcacccacgtcccgctgccrgtgctgtgtgggtcactgcaggtctgtgttagcggtggggttgtgcaggctgggcaccgagctyggcacgctgctgaagtgcaccaagggaactgcttttcctcctcacggcagctccctgtccattgcagagagctgaggtgcggtgtgcagggttttctctgtgggtctttgctcgctttttgcttgtaaggatttacgcccagccctcttttgcgccagatcaaaacccatgggcccacgacttcccagcgtgtagcactgcaagtggtagggatggatttcagtccctgtgaccga

SEQ ID NO: 83974 - DNA, 600 bp, Chicken  19866894380920_3
ctacaaaagctcctttgagctgacgccgggtatgaattgcygtgctggtgcggcattgtgacggcggtgatcccgtatttaatacgcggggcattcctgggtaatcgctggcccctttgtgccgctgaaggaagccgtatgtttcagagacatccccaaagatctcacagcaacaacaaaacggggatttctgcggctgctgaatgtggctgccaatcacccacgtcccgctgccrgtgctgtgtgggtcactgcaggtctgtgttagcggtggggttgtgcaggctgggcaccgagctyggcacgctgctgaagtgcaccaagggaactgcttttcctcctcacggcagctccctgtccattgcagagagctgaggtgcggtgtgcagggttttctctgtgggtctttgctcgctttttgcttgtaaggatttacgcccagccctcttttgcgccagatcaaaacccatgggcccacgacttcccagcgtgtagcactgcaagtggtagggatggatttcagtccctgtgaccgaagcccatcctgtccctgtcccatggtgctgagccccagcagcatgcccagccccactcctcccc

SEQ ID NO: 83975 - DNA, 600 bp, Chicken  19866894380921_1
ttgtgcagtctgaaagctacgatatagtcgccatcacgaaaacgtggtggaacgactcacacaggtggagtgctatggtggatggctactgacttttcaaaagagataggcaaggcagaaaaggtgtgggtgtagccctctatgttaagagagaatgtgaatgtatggaaattaatgatggtgatgatagggttaagagcttatgggtcagaataaaagcgaaaggtcaataagactgatattattgtgggagtctgctacaggccacccaaccaggatgaagaggtagacaagacactytatagacagttgggtgaggtctcaaggtctctcccccttgttcttgtgagggacttcaacttcccasacatctgctggatttataatacagcagatagggaacagtcccagaggttcctagagcatgtgggagataacttcctgacacagttggtgaaggagccaatgaggggaagcaaaatcctggacctgctgtttgttgacagagatcttgtgggggatgtaaaggttggaggtcctctggggcatagtgttcatgagatgctagatttctctttctttgttgaaccacggagggga

SEQ ID NO: 83976 - DNA, 600 bp, Chicken  19866894380921_2
gagtgctatggtggatggctactgacttttcaaaagagataggcaaggcagaaaaggtgtgggtgtagccctctatgttaagagagaatgtgaatgtatggaaattaatgatggtgatgatagggttaagagcttatgggtcagaataaaagcgaaaggtcaataagactgatattattgtgggagtctgctacaggccacccaaccaggatgaagaggtagacaagacactytatagacagttgggtgaggtctcaaggtctctcccccttgttcttgtgagggacttcaacttcccasacatctgctggatttataatacagcagatagggaacagtcccagaggttcctagagcatgtgggagataacttcctgacacagttggtgaaggagccaatgaggggaagcaaaatcctggacctgctgtttgttgacagagatcttgtgggggatgtaaaggttggaggtcctctggggcatagtgttcatgagatgctagatttctctttctttgttgaaccacggaggggagtcagcagaactgccgccttggacttctggagggcagactttaacctctttaggaccatggttgaga

SEQ ID NO: 83977 - DNA, 599 bp, Chicken  19866894380922_1
  misc_feature (1)..(83): n is any nucleotide
nnnnnnnnnnnnnnnnnnnnnnnnnnnnnnnnnnnnnnnnnnnnnnnnnnnnnnnnnnnnnnnnnnnnnnnnnnnnnnnnnnncaaaacaaaattttaaagaggaaaaatattttaggagtaataaatgcaacttctggtttaactttttcacctaagaataatacatctttctgattttgcagcctcagtcatatagaaattgaatgatttcatcttgtattgagttccatgggaattctgttgatatgtcctggtgcctgtctttatagggattaacaggtttaaagtgaattagacrggttaaataaatagttttctaaagtggtcatgaccaaaatttgaggagtcactttcttttgaagacataaaagagtcaaaaaaaaaaaaaaaaaaagtttctattgttgattctggtaactttcaactctactatgttttcagtggtcaggtgagttccagtgtggagactggatgtggtcagaccaggcatctaaagctgagaaaccagaaagwcctctgaaattccttcatcatagagataatatacatttttatgatgttccactttcatagaagtggaamcttttctctttgtag

SEQ ID NO: 83978 - DNA, 600 bp, Chicken  19866894380922_2
cttgtattgagttccatgggaattctgttgatatgtcctggtgcctgtctttatagggattaacaggtttaaagtgaattagacrggttaaataaatagttttctaaagtggtcatgaccaaaatttgaggagtcactttcttttgaagacataaaagagtcaaaaaaaaaaaaaaaaaaagtttctattgttgattctggtaactttcaactctactatgttttcagtggtcaggtgagttccagtgtggagactggatgtggtcagaccaggcatctaaagctgagaaaccagaaagwcctctgaaattccttcatcatagagataatatacatttttatgatgttccactttcatagaagtggaamcttttctctttgtagttcagtacttcttaggggtttgacttgatgcataagctgttagcttctgtgaggcagcagtgctgcatttcagaatccaggtagttctggttcagtaggttttggctttcataaaactgaattgctacttgattgattatatataaaactatgtttatcacaaaccagtttagacggaatatttttgagcaattctctcagtacctaaaatattaa

SEQ ID NO: 83979 - DNA, 600 bp, Chicken  19866894380922_3
taaagtgaattagacrggttaaataaatagttttctaaagtggtcatgaccaaaatttgaggagtcactttcttttgaagacataaaagagtcaaaaaaaaaaaaaaaaaaagtttctattgttgattctggtaactttcaactctactatgttttcagtggtcaggtgagttccagtgtggagactggatgtggtcagaccaggcatctaaagctgagaaaccagaaagwcctctgaaattccttcatcatagagataatatacatttttatgatgttccactttcatagaagtggaamcttttctctttgtagttcagtacttcttaggggtttgacttgatgcataagctgttagcttctgtgaggcagcagtgctgcatttcagaatccaggtagttctggttcagtaggttttggctttcataaaactgaattgctacttgattgattatatataaaactatgtttatcacaaaccagtttagacggaatatttttgagcaattctctcagtacctaaaatattaagaaatgctgcaaatttgcacatttgaaatagcatcacaactgctatgaagaactttgcaataactttag

SEQ ID NO: 83980 - DNA, 599 bp, Chicken  19866894380923_1
  misc_feature (1)..(123): n is any nucleotide
nnnnnnnnnnnnnnnnnnnnnnnnnnnnnnnnnnnnnnnnnnnnnnnnnnnnnnnnnnnnnnnnnnnnnnnnnnnnnnnnnnnnnnnnnnnnnnnnnnnnnnnnnnnnnnnnnnnnnnnnnnnctgtggcagtcttcttcctaaacagtctcaggaaattttttcttatggagtagtgcctgaatgcagtgccccttcctctgctgccctgataattcatcatcatcgtcaagcgatgaatggaataagctcacagctctacggcttttcttccgctcatcttttgcagagaccaaagcractcaaacagaaggccagctgacaagctgggtaggattcagtgctgaacagataacatttgagctagcagagaggtgcagggagataacagctatgatgcagaagggtcagattaattatttgyrtygttaataattgccacaagtctgagtgctaaactttctcagcttggtctcagtgagaaaggctggtgctgctaggtgttgagcatcatacacacagatgccaatctgtataagcagttcctcccacrgatcttgtaaaatggaagcacttgtggaaagctgcctgccaacttg

SEQ ID NO: 83981 - DNA, 600 bp, Chicken  19866894380923_2
tgtggcagtcttcttcctaaacagtctcaggaaattttttcttatggagtagtgcctgaatgcagtgccccttcctctgctgccctgataattcatcatcatcgtcaagcgatgaatggaataagctcacagctctacggcttttcttccgctcatcttttgcagagaccaaagcractcaaacagaaggccagctgacaagctgggtaggattcagtgctgaacagataacatttgagctagcagagaggtgcagggagataacagctatgatgcagaagggtcagattaattatttgyrtygttaataattgccacaagtctgagtgctaaactttctcagcttggtctcagtgagaaaggctggtgctgctaggtgttgagcatcatacacacagatgccaatctgtataagcagttcctcccacrgatcttgtaaaatggaagcacttgtggaaagctgcctgccaacttgctgtcatgtctattccaaggaaaatggcagacatctgacaccctgcgtgcygaggactgctgcatcactgtgctgggccactgaaccatgatgtgttttccagccagaaaggaaactacttgcac

SEQ ID NO: 83982 - DNA, 600 bp, Chicken  19866894380923_3
gtggcagtcttcttcctaaacagtctcaggaaattttttcttatggagtagtgcctgaatgcagtgccccttcctctgctgccctgataattcatcatcatcgtcaagcgatgaatggaataagctcacagctctacggcttttcttccgctcatcttttgcagagaccaaagcractcaaacagaaggccagctgacaagctgggtaggattcagtgctgaacagataacatttgagctagcagagaggtgcagggagataacagctatgatgcagaagggtcagattaattatttgyrtygttaataattgccacaagtctgagtgctaaactttctcagcttggtctcagtgagaaaggctggtgctgctaggtgttgagcatcatacacacagatgccaatctgtataagcagttcctcccacrgatcttgtaaaatggaagcacttgtggaaagctgcctgccaacttgctgtcatgtctattccaaggaaaatggcagacatctgacaccctgcgtgcygaggactgctgcatcactgtgctgggccactgaaccatgatgtgttttccagccagaaaggaaactacttgcact

SEQ ID NO: 83983 - DNA, 600 bp, Chicken  19866894380923_4
ggcagtcttcttcctaaacagtctcaggaaattttttcttatggagtagtgcctgaatgcagtgccccttcctctgctgccctgataattcatcatcatcgtcaagcgatgaatggaataagctcacagctctacggcttttcttccgctcatcttttgcagagaccaaagcractcaaacagaaggccagctgacaagctgggtaggattcagtgctgaacagataacatttgagctagcagagaggtgcagggagataacagctatgatgcagaagggtcagattaattatttgyrtygttaataattgccacaagtctgagtgctaaactttctcagcttggtctcagtgagaaaggctggtgctgctaggtgttgagcatcatacacacagatgccaatctgtataagcagttcctcccacrgatcttgtaaaatggaagcacttgtggaaagctgcctgccaacttgctgtcatgtctattccaaggaaaatggcagacatctgacaccctgcgtgcygaggactgctgcatcactgtgctgggccactgaaccatgatgtgttttccagccagaaaggaaactacttgcactga

SEQ ID NO: 83984 - DNA, 600 bp, Chicken  19866894380923_5
cagctctacggcttttcttccgctcatcttttgcagagaccaaagcractcaaacagaaggccagctgacaagctgggtaggattcagtgctgaacagataacatttgagctagcagagaggtgcagggagataacagctatgatgcagaagggtcagattaattatttgyrtygttaataattgccacaagtctgagtgctaaactttctcagcttggtctcagtgagaaaggctggtgctgctaggtgttgagcatcatacacacagatgccaatctgtataagcagttcctcccacrgatcttgtaaaatggaagcacttgtggaaagctgcctgccaacttgctgtcatgtctattccaaggaaaatggcagacatctgacaccctgcgtgcygaggactgctgcatcactgtgctgggccactgaaccatgatgtgttttccagccagaaaggaaactacttgcactgaaggtagagggtccctttgttggagcagtctgcagagaattgctgagttggttcatgctctgcctgcccagcttttgaatattaggggaaatgtctcattcacacttgcattcatgtttttatgttt

SEQ ID NO: 83985 - DNA, 600 bp, Chicken  19866894380923_6
gataacatttgagctagcagagaggtgcagggagataacagctatgatgcagaagggtcagattaattatttgyrtygttaataattgccacaagtctgagtgctaaactttctcagcttggtctcagtgagaaaggctggtgctgctaggtgttgagcatcatacacacagatgccaatctgtataagcagttcctcccacrgatcttgtaaaatggaagcacttgtggaaagctgcctgccaacttgctgtcatgtctattccaaggaaaatggcagacatctgacaccctgcgtgcygaggactgctgcatcactgtgctgggccactgaaccatgatgtgttttccagccagaaaggaaactacttgcactgaaggtagagggtccctttgttggagcagtctgcagagaattgctgagttggttcatgctctgcctgcccagcttttgaatattaggggaaatgtctcattcacacttgcattcatgtttttatgtttacaactacaaagcataaggagtccctctgccatgcttggtcagactgtgagcttctttccagctgtattttcaccttacatttgaaaacccagttat

SEQ ID NO: 83986 - DNA, 600 bp, Chicken  19866894380934_1
ggttgccacccacatgatcaggtttcccagggcacccattctggtggctctcagaagggagctggtaaccaacagtgtgatgatgcattgcatctccctctggggtttgcgtagaccctaccgcaacgtggcaaagctttccctgtagtgtttgggagccctcatgcagcacaggctgggccatgagcattgtgccagcccagggccaattctggggctctggctgctgcccctgagctggatgtgcagacgtcctcaccaccaggtagcagaggggaaggtttccccacgtgctcctgygtgcctggcgaatggactgctgcaaaccttgtgggcggtggtgattttcatctttacgatgaataaattatgaagatgcttccttaactaattgctacctcttgggctgactgcacctctgggtatgcagtggaagcaaatatttctctttaaaatagactttctgcagatatttgagctgggcaaggctaaacgtgctccttgagatggagagtttgcagggcagaatgaacttctcatcccaaatgggacaccaggaggtttttcagaaatcactgtgctggccatggtgtgagtgct

SEQ ID NO: 83987 - DNA, 600 bp, Chicken  19866894380939_1
tcctgtgctctcgatgtggaagatctaagcctactccccagacaaacagcagccatttaagcaatcttctgagctcaccgacatgccggtgctctgacatgttcccccgtgcttcagatgttgacctcagctccccaggtgtgtgtcacaagtatgtggttgacaggaaattaaagtcgggctagcatacaaatcacgatgctttcccaaacttgtttctcttctacaagcagaaacatgatttgcttcggtagtgaacataactgttattccatcagcagcctgggaatatttaatggrcaaaatccccactggttgtggctccttgattggattcttcctaaccacggggctgcagcatactggagccccacgtacagcttcaataagtgaatttattagactgattatagtgggggactttgaaaccaccaattgctttgcctggggatccgtaaccataattgcaacagcagcaattaatattttctgactacccaaggccaaattcatctccgttttaagcccgtcaactcaagaagttttaagctacaagggtgacgctgaccctaagtgtttaaagttcagtaatgcagttaa

SEQ ID NO: 83988 - DNA, 599 bp, Chicken  19866894380940_1
  misc_feature (1)..(109): n is any nucleotide
nnnnnnnnnnnnnnnnnnnnnnnnnnnnnnnnnnnnnnnnnnnnnnnnnnnnnnnnnnnnnnnnnnnnnnnnnnnnnnnnnnnnnnnnnnnnnnnnnnnnnnnnnnnnnttaacagcatgagcactgaaaaaattcttaagtcttcatacaacctttgtatgacatacgtatacacacagcttactaatcccagttagtgatgtgtgttacatagagatcaaaacaaaggaggtgttcatgtgctttcagttaaacctacactgaaatttgttattaaaacaacatgaaaatccaatcgyttcgcattctgatgaacygagtttagattttcagagctgtctggcattgatggctgtcagacaaacccaggttcacttacagttttctagtggagctataaaaccattaaaaacacggtgggatgggtgtactggactgtatgtgtagtcaggtgtatgcagaggccagtccacaggttgtccctttgcaggtaccattctcttttcaaggtaggtggcagcgagtgtgtatctggtctgcagtcacaccttcactttgcaattcatgcttttcctaagtagtttctggaagcacatct

SEQ ID NO: 83989 - DNA, 599 bp, Chicken  19866894380940_2
  misc_feature (1)..(91): n is any nucleotide
nnnnnnnnnnnnnnnnnnnnnnnnnnnnnnnnnnnnnnnnnnnnnnnnnnnnnnnnnnnnnnnnnnnnnnnnnnnnnnnnnnnnnnnnnnnttaacagcatgagcactgaaaaaattcttaagtcttcatacaacctttgtatgacatacgtatacacacagcttactaatcccagttagtgatgtgtgttacatagagatcaaaacaaaggaggtgttcatgtgctttcagttaaacctacactgaaatttgttattaaaacaacatgaaaatccaatcgyttcgcattctgatgaacygagtttagattttcagagctgtctggcattgatggctgtcagacaaacccaggttcacttacagttttctagtggagctataaaaccattaaaaacacggtgggatgggtgtactggactgtatgtgtagtcaggtgtatgcagaggccagtccacaggttgtccctttgcaggtaccattctcttttcaaggtaggtggcagcgagtgtgtatctggtctgcagtcacaccttcactttgcaattcatgcttttcctaagtagtttctggaagcacatctgattacaagtaagtcaaa

SEQ ID NO: 83990 - DNA, 600 bp, Chicken  19866894380941_1
aaacttttcggagggaaacttgaaactgaagattggtctccaagcaaagagaacaaaaaagcctcctaagaaccttgagaattatgtgtgccggcctgcgataaaaaccagcatcaagcaaccacgaaggccaccaaagagtgggaagatgacagatgagaagaatgagcactgtccttcaaaacaagtgagtagtttggttctggaatgctccttgtctggtccataacctaaatgtgtagcgtagagaagctccaatctgtctctgcagtccaaattctccttgcttaaagcagttcygcgtccctcactgatggagatgcacttcagatkctctgctctccatctgatgctgtgctgaaatgttgtataagttgttgaactccgttccctgatggttggagcgatggtttacagcatcctgctgatttccagcacgagataaaatttgtttttctagaaacaaatggtaaacagggtttaaaaccaccrcgttttgaatattacaccagagggatttgggtttttttttccttactgtgatgaaataaagcaagtcgtagcactggaaattacgcttcagaaaatgaaattgatccc

SEQ ID NO: 83991 - DNA, 600 bp, Chicken  19866894380941_2
tggtctccaagcaaagagaacaaaaaagcctcctaagaaccttgagaattatgtgtgccggcctgcgataaaaaccagcatcaagcaaccacgaaggccaccaaagagtgggaagatgacagatgagaagaatgagcactgtccttcaaaacaagtgagtagtttggttctggaatgctccttgtctggtccataacctaaatgtgtagcgtagagaagctccaatctgtctctgcagtccaaattctccttgcttaaagcagttcygcgtccctcactgatggagatgcacttcagatkctctgctctccatctgatgctgtgctgaaatgttgtataagttgttgaactccgttccctgatggttggagcgatggtttacagcatcctgctgatttccagcacgagataaaatttgtttttctagaaacaaatggtaaacagggtttaaaaccaccrcgttttgaatattacaccagagggatttgggtttttttttccttactgtgatgaaataaagcaagtcgtagcactggaaattacgcttcagaaaatgaaattgatcccttaatctttcctttctgtggagaggaggcgagg

SEQ ID NO: 83992 - DNA, 578 bp, Chicken  19866894380941_3
tagtttggttctggaatgctccttgtctggtccataacctaaatgtgtagcgtagagaagctccaatctgtctctgcagtccaaattctccttgcttaaagcagttcygcgtccctcactgatggagatgcacttcagatkctctgctctccatctgatgctgtgctgaaatgttgtataagttgttgaactccgttccctgatggttggagcgatggtttacagcatcctgctgatttccagcacgagataaaatttgtttttctagaaacaaatggtaaacagggtttaaaaccaccrcgttttgaatattacaccagagggatttgggtttttttttccttactgtgatgaaataaagcaagtcgtagcactggaaattacgcttcagaaaatgaaattgatcccttaatctttcctttctgtggagaggaggcgaggagaagcaattccgtgaccaattcggagcaagctgtgacaatctttgtagctgtgagactgaactgtccgtgctttggaaggaggaactgagtgggaattcagcacatgcagcgtgctcagttcactgccaaggcaca

SEQ ID NO: 83993 - DNA, 599 bp, Chicken  19866894380944_1
  misc_feature (1)..(57): n is any nucleotide
nnnnnnnnnnnnnnnnnnnnnnnnnnnnnnnnnnnnnnnnnnnnnnnnnnnnnnnnntctgctggccctctatgatgtagtgatggcctcagtagacaaagagaaggcaactgatgtcatctacctggacttctgcaaggccttttacatggtctcccaccacatccttatctctaaattggagagagatggatttgaagggtggactatttggtggataaggaatcagttggaaggttgtagccagaggattgtggtcaatggctgtatgaccaggtgaaggccggtgatgactggtgwcccccaggagtctttcttcggaccagtactctttaacatctttatcaatgacacagatgatgggattgaactcatgctcagcaaagttgctgacgacaccaagctgagtggtgcagttgataactcagatggaagggatgccatccagtgggaccttgataaactcaaaaggtggtcccttgtaagttaaggaggttcaacaaaacaaactgcaaggtgttgcacttgggttgaagtattcccagatatgtgtacagactgagagaagaaatctctgagagtagccctggtagacgaaa

SEQ ID NO: 83994 - DNA, 600 bp, Chicken  19866894380944_2
tgtaagttaaggaggttcaacaaaacaaactgcaaggtgttgcacttgggttgaagtattcccagatatgtgtacagactgagagaagaaatctctgagagtagccctggtagacgaaaaacttaatatgagccagcagagtgtgcttgcagcccagaaaaccatgggtatcctgggttgcatcagaggaggggtggccagcagggggagggagatgattggtcctctctactctgcccttgtgagactccatctggagtagtgcatccaggtctggggcctttaacacaggaaagataygaagtatttggagagggtccagaggaaggccaggaagacgatccaagagttgaagcacctcccctatggaaataggctgaaggaattgggcttgttcaaccttgaaaagagaaggctgcagggagacctcattgtggccttccagtatttaaaggaagcttataaacatgggggaaatcaattttttacatgggtagatagtgataggacagaggggaatggatttaagctaaagaaggggagatttagattagatttcacggggaagctttttacttagagagtgttgatatgctggaa

SEQ ID NO: 83995 - DNA, 600 bp, Chicken  19866894380944_3
gaagcacctcccctatggaaataggctgaaggaattgggcttgttcaaccttgaaaagagaaggctgcagggagacctcattgtggccttccagtatttaaaggaagcttataaacatgggggaaatcaattttttacatgggtagatagtgataggacagaggggaatggatttaagctaaagaaggggagatttagattagatttcacggggaagctttttacttagagagtgttgatatgctggaacaagttgcccagaaaggtggtggatgccctgtccaaggagttatttaaggycgggttgaaaggggccctgggcaatctgatctagtacttgatctagtggctggcaaccctgcctgtggcaggggacttggaacgtgatgattcttggggatcattccaactcaagccatgctgtgactctgtgatactatgaaaaaaatctaaaacacagcatcatacaaatcaccatgaaaatgttaactctcatagaatcatgacaccttcaaagtctatagttgagattctctgccattcctgactcctgcagattctaatacttatctatctcccgtacattaatcttcctgtatt

SEQ ID NO: 83996 - DNA, 600 bp, Chicken  19866894380946_1
agtgtttccctgcagttataaactggcatgcatataaagacagtatcagagaatcaaaaaacatcctcctgtgattagaaatgtttagaaaggcataacatgtcatatttctcttgcacaatgtgaggcaatgaggaaaacatggttgaaactctcttgtccatattgtgaatataagacttttttctgctgttaatcacacagtcttgtactgtagctcatagcttgtggcaactagtcttgtgtgactaatctgcagcaacagctccacactagctcaaggaaaccgtcttaagctcmtttcatagcatactagtaagacgtttctcacatccatggtgaaaaaagagatggcaagactaggaaatgccagtagtagcaaacaactaacgagactttatctatgggggaaaatacttgactgctggttcctgttccaaatacagtgaatgtatttaaatgcatgatcatgagagcacagtagtctaaatgtccaactgcattctgaggaatatgctggattctgcttacaatttagcaacagcgaacacaaacccttgcctagataacttgaaaatagctttaatataatcacaaatt

SEQ ID NO: 83997 - DNA, 427 bp, Chicken  19866894380946_2
ccatggtgaaaaaagagatggcaagactaggaaatgccagtagtagcaaacaactaacgagactttatctatgggggaaaatacttgactgctggttcctgttccaaatacagtgaatgtatttaaatgcatgatcatgagagcacagtagtctaaatgtccaactgcattctgaggaatatgctggattctgcttacaatttagcaacagcgaacacaaacccttgcctagataacttgaaaatagctttaatataatcacaaatttgtgggttgtcttttggtttttttttccttaayacatgttatataattatgtgtattatttatacatgttatattaaattatgtgtaaagcaaagagaaacaaaaccataatattttcgtaggagaaaaatcagaatgaaaaggttatctacactgtcaa

SEQ ID NO: 83998 - DNA, 600 bp, Chicken  19866894380953_1
taacagtacgtgacaagtaaaataaaaataaagtgtaaacatatacaagcacaccccacagatataacaccttagttctactgaaattgccatgctttgttttggaaagagagaaagatgtctgtggacagattaatgcacaggtttgtgtcatgtttctgcttgcctagcagcaggactgctcactggggcttgagcatgttttgtttccaacagggaccttgcctaactatttcgtgtacctgtctatgatattcagtgtcgtggatacccatatcatttacaggctaaaatgactgytttgaaaaataacagagaaagaaggattcacaccgggtattgttggtactaaattttcaaactcttctttttagcagagctcctttgcataaaggcaaaggggaacacttcatcatatgagccactctcatcaatacccctgaataaaccttttttaatgacaaaagagggaataccrtacttaggkgcataggaactcctattttcactctctctacatcttcaagtgttttctagactgtattggatggcagaaactgggaagaaaataggagaggtcaaagcagtgtgattgtcagc

SEQ ID NO: 83999 - DNA, 600 bp, Chicken  19866894380953_2
ctgctcactggggcttgagcatgttttgtttccaacagggaccttgcctaactatttcgtgtacctgtctatgatattcagtgtcgtggatacccatatcatttacaggctaaaatgactgytttgaaaaataacagagaaagaaggattcacaccgggtattgttggtactaaattttcaaactcttctttttagcagagctcctttgcataaaggcaaaggggaacacttcatcatatgagccactctcatcaatacccctgaataaaccttttttaatgacaaaagagggaataccrtacttaggkgcataggaactcctattttcactctctctacatcttcaagtgttttctagactgtattggatggcagaaactgggaagaaaataggagaggtcaaagcagtgtgattgtcagctcaatgagctgaggttttgttcaaagctttcctttcttttctgtgttattaatttgaataattacagctgagagcagagcgaaggtttggcttattctcatagtttaggaatggggagtgaagcacattgttgtatgggtgatgcatgtgtgtgggagcgtgcatgtgttgtgcgcat

SEQ ID NO: 84000 - DNA, 600 bp, Chicken  19866894380953_3
ggggcttgagcatgttttgtttccaacagggaccttgcctaactatttcgtgtacctgtctatgatattcagtgtcgtggatacccatatcatttacaggctaaaatgactgytttgaaaaataacagagaaagaaggattcacaccgggtattgttggtactaaattttcaaactcttctttttagcagagctcctttgcataaaggcaaaggggaacacttcatcatatgagccactctcatcaatacccctgaataaaccttttttaatgacaaaagagggaataccrtacttaggkgcataggaactcctattttcactctctctacatcttcaagtgttttctagactgtattggatggcagaaactgggaagaaaataggagaggtcaaagcagtgtgattgtcagctcaatgagctgaggttttgttcaaagctttcctttcttttctgtgttattaatttgaataattacagctgagagcagagcgaaggtttggcttattctcatagtttaggaatggggagtgaagcacattgttgtatgggtgatgcatgtgtgtgggagcgtgcatgtgttgtgcgcatgaagatgca

SEQ ID NO: 84001 - DNA, 600 bp, Chicken  19866894380953_4
ctaactatttcgtgtacctgtctatgatattcagtgtcgtggatacccatatcatttacaggctaaaatgactgytttgaaaaataacagagaaagaaggattcacaccgggtattgttggtactaaattttcaaactcttctttttagcagagctcctttgcataaaggcaaaggggaacacttcatcatatgagccactctcatcaatacccctgaataaaccttttttaatgacaaaagagggaataccrtacttaggkgcataggaactcctattttcactctctctacatcttckagtgttttctagactgtattggatggcagaaactgggaagaaaataggagaggtcaaagcagtgtgattgtcagctcaatgagctgaggttttgttcaaagctttcctttcttttctgtgttattaatttgaataattacagctgagagcagagcgaaggtttggcttattctcatagtttaggaatggggagtgaagcacattgttgtatgggtgatgcatgtgtgtgggagcgtgcatgtgttgtgcgcatgaagatgcattcatgtttcattgatgcaaagtctgtctactgactaa

SEQ ID NO: 84002 - DNA, 600 bp, Chicken  19866894380953_5
taactatttcgtgtacctgtctatgatattcagtgtcgtggatacccatatcatttacaggctaaaatgactgytttgaaaaataacagagaaagaaggattcacaccgggtattgttggtactaaattttcaaactcttctttttagcagagctcctttgcataaaggcaaaggggaacacttcatcatatgagccactctcatcaatacccctgaataaaccttttttaatgacaaaagagggaataccrtacttaggkgcataggaactcctattttcactctctctacatcttcakgtgttttctagactgtattggatggcagaaactgggaagaaaataggagaggtcaaagcagtgtgattgtcagctcaatgagctgaggttttgttcaaagctttcctttcttttctgtgttattaatttgaataattacagctgagagcagagcgaaggtttggcttattctcatagtttaggaatggggagtgaagcacattgttgtatgggtgatgcatgtgtgtgggagcgtgcatgtgttgtgcgcatgaagatgcattcatgtttcattgatgcaaagtctgtctactgactaaa

SEQ ID NO: 84003 - DNA, 600 bp, Chicken  19866894380955_1
tgtaagacatccttcaatcattgcttttatgtctatagacaatccaatcaccctacacgtaaatggtataaatagcttgagacatcctgatctgaaaagatgtactgtctctgtgcctcagtatgtggaggagggactctgattgagagacctgagcccaagcctcctttctcacaaggaggaaacagatacagctcaacaaagactttcctggatccacaaacaacaatcttgcttcttgaaatgttcctttctcagtattcctacctcctcacaaagaagtttgagtttgtctagccsaaagcctatttgactgagaaaacttgatctttctttgcctcatccatgcaaatggcagcagtgcaaacwcactgggtaccttgtctgtggaatgccctccacrttttgttgcagaactctcygtgggggccaggtacaggactaacatccaataattggtacaactctctgaaagggcttaatattcagagtatcctctgacctgagtgtaagggaagtcgatgcaatatcaagccccatacactgtgagtcataatattttagaaggtctgagattcatttggctatctccagctccag

SEQ ID NO: 84004 - DNA, 600 bp, Chicken  19866894380955_2
aaatagcttgagacatcctgatctgaaaagatgtactgtctctgtgcctcagtatgtggaggagggactctgattgagagacctgagcccaagcctcctttctcacaaggaggaaacagatacagctcaacaaagactttcctggatccacaaacaacaatcttgcttcttgaaatgttcctttctcagtattcctacctcctcacaaagaagtttgagtttgtctagccsaaagcctatttgactgagaaaacttgatctttctttgcctcatccatgcaaatggcagcagtgcaaacwcactgggtaccttgtctgtggaatgccctccacrttttgttgcagaactctcygtgggggccaggtacaggactaacatccaataattggtacaactctctgaaagggcttaatattcagagtatcctctgacctgagtgtaagggaagtcgatgcaatatcaagccccatacactgtgagtcataatattttagaaggtctgagattcatttggctatctccagctccagactgggcttcccaaatcaccagtcaattgagtgtaagtagatgcacgttcccaggggagtacattttca

SEQ ID NO: 84005 - DNA, 600 bp, Chicken  19866894380955_3
actgtctctgtgcctcagtatgtggaggagggactctgattgagagacctgagcccaagcctcctttctcacaaggaggaaacagatacagctcaacaaagactttcctggatccacaaacaacaatcttgcttcttgaaatgttcctttctcagtattcctacctcctcacaaagaagtttgagtttgtctagccsaaagcctatttgactgagaaaacttgatctttctttgcctcatccatgcaaatggcagcagtgcaaacwcactgggtaccttgtctgtggaatgccctccacrttttgttgcagaactctcygtgggggccaggtacaggactaacatccaataattggtacaactctctgaaagggcttaatattcagagtatcctctgacctgagtgtaagggaagtcgatgcaatatcaagccccatacactgtgagtcataatattttagaaggtctgagattcatttggctatctccagctccagactgggcttcccaaatcaccagtcaattgagtgtaagtagatgcacgttcccaggggagtacattttcagtccttgggtactttgctaagaatatctcctagt

SEQ ID NO: 84006 - DNA, 600 bp, Chicken  19866894380955_4
atgtggaggagggactctgattgagagacctgagcccaagcctcctttctcacaaggaggaaacagatacagctcaacaaagactttcctggatccacaaacaacaatcttgcttcttgaaatgttcctttctcagtattcctacctcctcacaaagaagtttgagtttgtctagccsaaagcctatttgactgagaaaacttgatctttctttgcctcatccatgcaaatggcagcagtgcaaacwcactgggtaccttgtctgtggaatgccctccacrttttgttgcagaactctcygtgggggccaggtacaggactaacatccaataattggtacaactctctgaaagggcttaatattcagagtatcctctgacctgagtgtaagggaagtcgatgcaatatcaagccccatacactgtgagtcataatattttagaaggtctgagattcatttggctatctccagctccagactgggcttcccaaatcaccagtcaattgagtgtaagtagatgcacgttcccaggggagtacattttcagtccttgggtactttgctaagaatatctcctagttaaccttattcccagctgt

SEQ ID NO: 84007 - DNA, 600 bp, Chicken  19866894380957_1
agcacgattagtcacataccactaacagtttaacagttgtgtcgtactgctatcaatttcttattgctttcctccaattaatttgatggccactcatttatcattaattgcctagtgagcctcagagggacttgagagcgtggaggtcagttaacagagtggacccagcagtttgcagaactgtgattaaaagtgaaggacatccatcactctgcaggtaagagccattcataatcatccttgtcctcactacactcttctctatcacctggcagcacttattatcagctaaggtgtttmggcaaatttgttttcttcatggagtcctctttgctcatataacaggaaggagaagatagattatctccttttctagctacactccccatgcagaaacctaaacgtgagagccttgaggtgaactgcccatcatattctactgctgcttttatgggaaaacaccaccaaccaataccatcccacttggatggaagactcaagggaaggaagccagcttttcaggatcaggggggaaacgtccctctgacaacacctgcaacttrgtcctgttgatgtggcctgattagcctggagcaacac

SEQ ID NO: 84008 - DNA, 600 bp, Chicken  19866894380957_2
atcacctggcagcacttattatcagctaaggtgtttmggcaaatttgttttcttcatggagtcctctttgctcatataacaggaaggagaagatagattatctccttttctagctacactccccatgcagaaacctaaacgtgagagccttgaggtgaactgcccatcatattctactgctgcttttatgggaaaacaccaccaaccaataccatcccacttggatggaagactcaagggaaggaagccagcttttcaggatcaggggggaaacgtccctctgacaacacctgcaacttrgtcctgttgatgtggcctgattagcctggagcaacactccaccagcaccacaattcacagcctgaatgatcctcagtctcccagcaaggctcatcatcactcaaatgcaaaaagcccagaagaactttgtctgtcacattgcctcctggtatcacagggctacatttcagcagatggaaagtatggtctactccaaaaatgaagggtggtgtcccttctgataaagactcttgatttttccagagtcacagtggggaatcaaacatttgctctggtctttgtaatgaggtatcagtctca

SEQ ID NO: 84009 - DNA, 600 bp, Chicken  19866894380959_1
gcatttcactcctctgagctctgttatttcctgactactcaagtcactcaattaagggagtagaagcatctcttcacatatcagatggtatgtctctgttactgcagttactatctgaacaccgggtcacatttaaaaatggacctaaaaatcagattcttttccattgagaccccctgagaaaatacattgtgctctcacacccctcagggaaaatactgtattttacaaaagtcttgaatcatttgtctattcctgtggtttgaaaaaaacaccaaatagtatttttgtgacgatccrtgaaaaatcaccacatgtgagtctcattcacttccataactacagcaggatctcttactcctgtcagacawttacagccaacaccaccagtcatctatccttttcagattyctaattgattttttatttgaacaactgatggaaggagcatttgagagacagtcctactaatgtgactgagcaatcatcttctctaacaccataactaagctgtaggtatttaggtcctggaatatggccttagactgtagagcctggaagtcygtacttttaatctgagttgggggcctcaaagctatt

SEQ ID NO: 84010 - DNA, 600 bp, Chicken  19866894380959_2
cttcacatatcagatggtatgtctctgttactgcagttactatctgaacaccgggtcacatttaaaaatggacctaaaaatcagattcttttccattgagaccccctgagaaaatacattgtgctctcacacccctcagggaaaatactgtattttacaaaagtcttgaatcatttgtctattcctgtggtttgaaaaaaacaccaaatagtatttttgtgacgatccrtgaaaaatcaccacatgtgagtctcattcacttccataactacagcaggatctcttactcctgtcagacawttacagccaacaccaccagtcatctatccttttcagattyctaattgattttttatttgaacaactgatggaaggagcatttgagagacagtcctactaatgtgactgagcaatcatcttctctaacaccataactaagctgtaggtatttaggtcctggaatatggccttagactgtagagcctggaagtcygtacttttaatctgagttgggggcctcaaagctattttcttcttctgtcttctctttacagacaaaaggccagtgctctgccctagggctgacttatgtgtgctttt

SEQ ID NO: 84011 - DNA, 600 bp, Chicken  19866894380959_3
tatctgaacaccgggtcacatttaaaaatggacctaaaaatcagattcttttccattgagaccccctgagaaaatacattgtgctctcacacccctcagggaaaatactgtattttacaaaagtcttgaatcatttgtctattcctgtggtttgaaaaaaacaccaaatagtatttttgtgacgatccrtgaaaaatcaccacatgtgagtctcattcacttccataactacagcaggatctcttactcctgtcagacawttacagccaacaccaccagtcatctatccttttcagattyctaattgattttttatttgaacaactgatggaaggagcatttgagagacagtcctactaatgtgactgagcaatcatcttctctaacaccataactaagctgtaggtatttaggtcctggaatatggccttagactgtagagcctggaagtcygtacttttaatctgagttgggggcctcaaagctattttcttcttctgtcttctctttacagacaaaaggccagtgctctgccctagggctgacttatgtgtgcttttaatcaaaggccattctaaagtcattcttttaccaagcagc

SEQ ID NO: 84012 - DNA, 600 bp, Chicken  19866894380959_4
gaaaaaaacaccaaatagtatttttgtgacgatccrtgaaaaatcaccacatgtgagtctcattcacttccataactacagcaggatctcttactcctgtcagacawttacagccaacaccaccagtcatctatccttttcagattyctaattgattttttatttgaacaactgatggaaggagcatttgagagacagtcctactaatgtgactgagcaatcatcttctctaacaccataactaagctgtaggtatttaggtcctggaatatggccttagactgtagagcctggaagtcygtacttttaatctgagttgggggcctcaaagctattttcttcttctgtcttctctttacagacaaaaggccagtgctctgccctagggctgacttatgtgtgcttttaatcaaaggccattctaaagtcattcttttaccaagcagctcctgtcataaaattattccaaacataattagtatggagataaatgagaatacttctgtaaacttcctagaaacacttgtttcttaaaatgtcttactaaactaatttttctccaaaggccatcaatgaatattgagagcctacaaatatcag

SEQ ID NO: 84013 - DNA, 600 bp, Chicken  19866894380961_1
tattcattattcattattgacctacatcaacttcacagtatctttgcctctcttttcctgctcccaatagccaccttgttgactgatctattctctacagctgaatttaatgcttgcagtaacactcactgcagctttttcatcttaaattttgttccaactccccctaaaaggaaatgtatgataatatgcatgtgtatgttattctactgaccccaattcagactgaatttttttctttgttagaacaaggaaaaaagtgacataaattgagatagtaagcgaagagacagtgtaaamagggctaaagagctaggcaacagaaatctgaaagtaagctaaacccagttggggaaagattaaaaaaaaaaaaaaaggcaagataaattaacagatctgatgaaaatccataatctgaaatatatttattaawtaaaacattctgttacacaacaaaatggcaatatacaatatccaaaattttaactcatgacagagatgccccaaacaggatttttaggttcaaataaaaaatgcatgcaatatatgtttatgtaaagcagatactaaaatagcatcacatcctctcactgatagatt

SEQ ID NO: 84014 - DNA, 600 bp, Chicken  19866894380961_2
gctttttcatcttaaattttgttccaactccccctaaaaggaaatgtatgataatatgcatgtgtatgttattctactgaccccaattcagactgaatttttttctttgttagaacaaggaaaaaagtgacataaattgagatagtaagcgaagagacagtgtaaamagggctaaagagctaggcaacagaaatctgaaagtaagctaaacccagttggggaaagattaaaaaaaaaaaaaaaggcaagataaattaacagatctgatgaaaatccataatctgaaatatatttattaawtaaaacattctgttacacaacaaaatggcaatatacaatatccaaaattttaactcatgacagagatgccccaaacaggatttttaggttcaaataaaaaatgcatgcaatatatgtttatgtaaagcagatactaaaatagcatcacatcctctcactgatagatttaaataaaaatcaaaagttggaaatgattaaaaaaaaaaaaagggcataattaccatcagtaacttccaagtaggcttttgttatgatgcttcctgcaacatttaaagtctggcagatgtagtacccaacatc

SEQ ID NO: 84015 - DNA, 600 bp, Chicken  19866894380966_1
gaagaaatgattacaatgcttaagagcatatgaatacatgcagaagcagttgggtacagagaactaaaagaatttggtacatattttcagcaaggtcaacaaccaaaatcaacagccagcgtgcaaggctgataaatctgctgtctgaaagctagactcttaaaaatgttattctaactttaaataatgctctaatgcatctttcattggcaaaaagttgatgtagtttcccagtggtttttttggttttgtttttttttttttctctgaggcattccaagggcatgtaaacatgaaacktacaagtggtacacaagtcgaatacaaacacacaaaattttctttaagaagttaaatttatcttgtccaaatccccagtcactggtttcgaaaggcactaaaatcataccaatgctcacctgctgttacatattaacctctctgcaaagctctgcagaatatatttatcctgagcatttattctaagygtttgtcttcaaatattgcctgctcaggcctgagagtccagagcttgctccttccctgtttgcatatagactgagattttatgtgtggcttcagcaagggttttgaatatgt

SEQ ID NO: 84016 - DNA, 600 bp, Chicken  19866894380966_2
gctctaatgcatctttcattggcaaaaagttgatgtagtttcccagtggtttttttggttttgtttttttttttttctctgaggcattccaagggcatgtaaacatgaaacktacaagtggtacacaagtcgaatacaaacacacaaaattttctttaagaagttaaatttatcttgtccaaatccccagtcactggtttcgaaaggcactaaaatcataccaatgctcacctgctgttacatattaacctctctgcaaagctctgcagaatatatttatcctgagcatttattctaagygtttgtcttcaaatattgcctgctcaggcctgagagtccagagcttgctccttccctgtttgcatatagactgagattttatgtgtggcttcagcaagggttttgaatatgtgcatgtcttttttaggagggtcacacttctatctctcaaacacattcttctgtagtgaaatttgccatacggtaagaacataatacaccataccaactgttatttataacagaggcaaatattttctacattctactctgtacatcattacttatcccagtattaaatgtatttcagtagcagaagga

SEQ ID NO: 84017 - DNA, 600 bp, Chicken  19866894380967_1
tgccagccgtacaaaagatgtttaggcacaggctaagtaagcataagcacatataaaaaagactcaattcagtagagcagatttctctagcaaagaaacttcactcaagcatgacacattatgacctcaaatctgcttctgtgcttctctcaagtccaggattgcaagcttgtgagcctcctcactgcccaaagaatcttgaacttcactatttcatggtcactgaagctgtccttgagcttcacatcccccacaagtcacatttcagtgagaccaaggtctctcagcacagcacctctyctcttttgctcccctatcacttggagaaggaagccttaatcattttgttacacatactgattatgaggatttacaaaacagtgaaccaggtcatttttaagtctttcccgtatgatttttaaaaagtggttaaagctgtctttccacagtaaaaatcacagtggcaggaaacaatcttaattattaatcacatttrgtgcatcaattctgaagtgcacaatgagcgcagatctgccacttgcagacaccaagcatgaagtcctcttgcatgagttactgctgcagaattagaaactagtt

SEQ ID NO: 84018 - DNA, 504 bp, Chicken  19866894380967_2
tcttgaacttcactatttcatggtcactgaagctgtccttgagcttcacatcccccacaagtcacatttcagtgagaccaaggtctctcagcacagcacctctyctcttttgctcccctatcacttggagaaggaagccttaatcattttgttacacatactgattatgaggatttacaaaacagtgaaccaggtcatttttaagtctttcccgtatgatttttaaaaagtggttaaagctgtctttccacagtaaaaatcacagtggcaggaaacaatcttaattattaatcacatttrgtgcatcaattctgaagtgcacaatgagcgcagatctgccacttgcagacaccaagcatgaagtcctcttgcatgagttactgctgcagaattagaaactagttcattatagcacagcatcaagaggaaaagtggtaagcccagactttcaacataaggatacagatttggatgtaggagtgggttttgaagcgcttattttaa

SEQ ID NO: 84019 - DNA, 599 bp, Chicken  19866894380972_1
  misc_feature (1)..(73): n is any nucleotide
nnnnnnnnnnnnnnnnnnnnnnnnnnnnnnnnnnnnnnnnnnnnnnnnnnnnnnnnnnnnnnnnnnnnnnnnncagaaatagcagtgctgcattccctcagtgcagcagacgtgtttttttgtacattcagagcctgctgcagtgattcatgggctgcctgcatcgcttctccccaccaaatttgcaggctggcgaacttacatagtgtaatttaaatcccagaaatcatatatccttcatgcaaagaggcagagcttttgtcatgaaagtgttttgtcttgctggagttgggattcctwtataggtagtgtagcaacgtgttccctatagtgatcttacagtgtcaaggtaatgttagcagcgtcgtgggtgcttagccgctttgccatgtgcacatagctatctcagcggggatctctatatagtttgctctttagactgttgcaaaaacacacgtgtttgaggttggcttaaaacctgctgatattagcagcaaagagccctgagatgcagagtggatccccgctgtcacatggcagggagtgagcccttcagtcgcactgacctctgtgcaaagggagtgctgagcgctgtggtg

SEQ ID NO: 84020 - DNA, 600 bp, Chicken  19866894380978_1
ctaaatgataaaattaaggttttgcaacccatcccgagccaaggctgtgcaccaccacgcagccatgcccagcctttctattgacacaggccccagtgccaagcccgatgccagcctccactgtaagtcatctccataacagcagtttggggtaaaaccctttcatagattccattccttgaaggctcagctctgtcctgtgcaggtggcacacaaaccaccgttttagactcagacatgaagaccttaactcctcctattcaccgtgctgcagccatccccatgcccacggcccatccrtgtgccagatgcctccgtgaggttttgttatggacaaccagaaaccaaattaggctgcatccaaagagacagcgcgacgttgctaggcgatgacgtctggctgaaaggagccgacagtcatagagttactgatctgtgcaggatgcagcgataaggttatctaattctgcatgtgggactggggtaaatttgcactaagtatgacttcagacacagaggtcaagagggctcagctttggctgcagagccgggcagaggtgaggcttctctgatgcttcaacagccacggccaaggcaaat

SEQ ID NO: 84021 - DNA, 600 bp, Chicken  19866894380978_2
aaccagaaaccaaattaggctgcatccaaagagacagcgcgacgttgctaggcgatgacgtctggctgaaaggagccgacagtcatagagttactgatctgtgcaggatgcagcgataaggttatctaattctgcatgtgggactggggtaaatttgcactaagtatgacttcagacacagaggtcaagagggctcagctttggctgcagagccgggcagaggtgaggcttctctgatgcttcaacagccacggccaaggcaaatcctaagtgctggagtcccactgcatgggcacatgygrccccatagagaaccraccggggggcaggaaaccatacacacaccattctgtaagtctgtcaatgatctttttaaacatcccttattctcccatgcaagaggacaaaaccaaagcacagccttcacactgcctagaagtcaaacccccttcttctgccagggcagcccccagcacccccctaccccactgtgagccccagcacagccactgtggcctcccgctgctggggaagcaggaacgcacccgccgctgcctcacaggatcttggcttgtagcagcaattggcacagagtcatcc

SEQ ID NO: 84022 - DNA, 600 bp, Chicken  19866894380978_3
ccagaaaccaaattaggctgcatccaaagagacagcgcgacgttgctaggcgatgacgtctggctgaaaggagccgacagtcatagagttactgatctgtgcaggatgcagcgataaggttatctaattctgcatgtgggactggggtaaatttgcactaagtatgacttcagacacagaggtcaagagggctcagctttggctgcagagccgggcagaggtgaggcttctctgatgcttcaacagccacggccaaggcaaatcctaagtgctggagtcccactgcatgggcacatgygrccccatagagaaccraccggggggcaggaaaccatacacacaccattctgtaagtctgtcaatgatctttttaaacatcccttattctcccatgcaagaggacaaaaccaaagcacagccttcacactgcctagaagtcaaacccccttcttctgccagggcagcccccagcacccccctaccccactgtgagccccagcacagccactgtggcctcccgctgctggggaagcaggaacgcacccgccgctgcctcacaggatcttggcttgtagcagcaattggcacagagtcatcctt

SEQ ID NO: 84023 - DNA, 600 bp, Chicken  19866894380978_4
ggctgcatccaaagagacagcgcgacgttgctaggcgatgacgtctggctgaaaggagccgacagtcatagagttactgatctgtgcaggatgcagcgataaggttatctaattctgcatgtgggactggggtaaatttgcactaagtatgacttcagacacagaggtcaagagggctcagctttggctgcagagccgggcagaggtgaggcttctctgatgcttcaacagccacggccaaggcaaatcctaagtgctggagtcccactgcatgggcacatgygrccccatagagaaccraccggggggcaggaaaccatacacacaccattctgtaagtctgtcaatgatctttttaaacatcccttattctcccatgcaagaggacaaaaccaaagcacagccttcacactgcctagaagtcaaacccccttcttctgccagggcagcccccagcacccccctaccccactgtgagccccagcacagccactgtggcctcccgctgctggggaagcaggaacgcacccgccgctgcctcacaggatcttggcttgtagcagcaattggcacagagtcatccttatcagctcgcacatt

SEQ ID NO: 84024 - DNA, 600 bp, Chicken  19866894381000_1
acatttcataccatactttcattcatgagcaaattagtatgttttgtgtgttcttgtcatataatttactcctctacttttctgtatgatggcattacagtaaattagttttgttgtactgactgcattacaaacactgcacaatacatttcacatcggtttaatatgtttcattaattgaatttaattgtgtgctttgcaaagatcaatgtactatcatttgctacatcactaaaatgaaaatgctgccatcctcaagtacagtcttttgctcttgctttcagcataaccttttggcartattaaaggtgcctacttgagttatgtgaggataaatgaggccacttgctggatcttactgaagtttaaaagaggatttcggtgagtttgaggaaccctgtgatccaggttcagggaactgtctttttaggtagcaaaacagaaaaaaaatcttgccagagagaaatggaagatgttttggaagcatgccaatgagcttggaaaaagacaggacccctgcatttttacttataatgaccttcatctgctgggaaggtagggaccagaaatattcatataaaatttaatgaagtaagcatt

SEQ ID NO: 84025 - DNA, 600 bp, Chicken  19866894381003_1
tgctgattcaccaccgcgtctattaacgcagtatttgctgaacgttacttcttagaacattctcgagaaatcagatccaggcttgacatttttagtgtatcttaagaatctcaaaacctcagatcgctcagcactgtttgctctcttcgcttcttctttactgtaaaaacgcagattaaaggccactatcacgtatgcagtttcctacagcagtaccacatcaccacctggagcactgtgtccacgtgtggggtcctcagtgcagcagagacatagagaggagggccacagaagtgctcygagggatggaacatgaggacaggctgagaactggggctgtgcagcatggaggggagaaggctgcagggagagctgagagggggctgtgtgtctaaaggggctgtgagaaggggacagattcttcaggagggtgtgtggtgatgggacggggaaatggattgctgctaaaagaggggagatccaggttggatataaggaaggagggaggtgaggcactgcacagactgcccagagaggtggtgcagacacccgaggtcagggaatggggctctgagcactgatggagctgtgggtgtccct

SEQ ID NO: 84026 - DNA, 599 bp, Chicken  19866894381005_1
  misc_feature (1)..(57): n is any nucleotide
nnnnnnnnnnnnnnnnnnnnnnnnnnnnnnnnnnnnnnnnnnnnnnnnnnnnnnnnnccagatgaggactacaaagacagtaaacagtcttagagggggagacgcactgaagagtggttaatgtctccgggtttgctcagcccagagcagaggaggctgaggggacacctcatggcagctgcagctcctcacagggagcgcaggggcagcactgagctctgctctctggtgtcagcaacaggactcaagggaacggtatgcaggtgtgtcaggggagggtcaggtttggtgtttggttcytcaccagagggctacgggcatgtaacaggctccccagagcagagatcgcagccccaggctgccggagttcaaggagcatctgggcacagctctcagaaatatggtttgaattttgagtggtcctgtgaggagccgggagttggactcagtgatccttgtggatttcttccaactcaggatattctatgaaatttcactgttacccaaaggcagagccaatgcctgcaaaccacagactcactatgaactgtacaacaagatgattattccctttcccaacctgaaatctacattaaaag

SEQ ID NO: 84027 - DNA, 509 bp, Chicken  19866894381005_2
tatggtttgaattttgagtggtcctgtgaggagccgggagttggactcagtgatccttgtggatttcttccaactcaggatattctatgaaatttcactgttacccaaaggcagagccaatgcctgcaaaccacagactcactatgaactgtacaacaagatgattattccctttcccaacctgaaatctacattaaaaggggtaatcaaagataagaggactgtacctaacaatatacaagacaaccaattttttgaaagcaagttcttttgaacactttccatctagcattttcctcwctctgagtgccaactccagaggttatgcagtatgaaggattatttcatgcagaagcagaagtctataaagataagtgaatttgaagcctttatagatagtttttgaatgggtgggttcctgaattctctctactaatacattagtgcattacagataaaatcttaaacacattttaatgtcatttccttcttgcctggaataaatttta

SEQ ID NO: 84028 - DNA, 600 bp, Chicken  19866894381018_1
tctgttcagtcaaccaccacagctgtatcagctccggcaagtacagcgggtcaccctaaatgttcctctaactgaaaaaatccagacagcctcaggaaaagtgacatttaaaagctgcttattgtacaaaaatctggaataaacaccataattttaattcttgaaccacacagcagagaggaaaaatccattctagatgcaggctttggcaatacctattttatatttctgtgtatagaataattcagttctcaactgaatattcagttaataacaccataatttgatagatattctcakttattaaccttccccctcctgtttggtctgaaaggattaaaacagtcgaaacaaacggactggtatttgggcaagcacaactaatacctgcagggattgcagtaccmctgggctctgctcagaaccacagattaaggtccacacttggcttaacagttagagaaaaaagacagttgccccaagacatgaacagaactgggatagtcgcctatcatccatgcagatgcaaatataaccactctgaattaagacaaaataaaaagcctcctgaatagctttctggagagctgggctaaaagg

SEQ ID NO: 84029 - DNA, 600 bp, Chicken  19866894381018_2
ttaaaagctgcttattgtacaaaaatctggaataaacaccataattttaattcttgaaccacacagcagagaggaaaaatccattctagatgcaggctttggcaatacctattttatatttctgtgtatagaataattcagttctcaactgaatattcagttaataacaccataatttgatagatattctcakttattaaccttccccctcctgtttggtctgaaaggattaaaacagtcgaaacaaacggactggtatttgggcaagcacaactaatacctgcagggattgcagtaccmctgggctctgctcagaaccacagattaaggtccacacttggcttaacagttagagaaaaaagacagttgccccaagacatgaacagaactgggatagtcgcctatcatccatgcagatgcaaatataaccactctgaattaagacaaaataaaaagcctcctgaatagctttctggagagctgggctaaaaggactttgagcatctcagaaagaatcggtagctttagtagttactatttgcaccttcccctctcaaaagaaaagcattaaaaccacccctaaagccagaaaccagtctg

SEQ ID NO: 84030 - DNA, 599 bp, Chicken  19866894381021_1
  misc_feature (1)..(38): n is any nucleotide
nnnnnnnnnnnnnnnnnnnnnnnnnnnnnnnnnnnnnnacctgacttgtataccacaggggatagatggtagaacagaactctgagctccaatccccatactcccaggtagacagtgggccacctcttctttctcaagttttaagctagagactgttgaaggttcttgcagactgtgctcacttcatgcatggcttcacttatcagtgtagaactgctaatttgtgtagggaagtaggatttaaatacaagaatgcaagtagggaaaaagaacacagtgagtcgcatatgatcttcgatkcttaacttggaatgcagcatttgaataaaattaggtaaattcctttatctccatgtgagagaatgaagttgtaatgaaacaggctagatgtattgcttgtgattccttcttttgaatagggaacagaatgaaataatgtgggttgcactgaagaagaaaatattaacactgtttcctctgtgcatttccacatgcaggtttatttcctgttgtgatctaattcaatcacgattttgtagcagggatttcagagcgtatgatatcattggagtgaaaataaaccgcgcatttagagtgca

SEQ ID NO: 84031 - DNA, 600 bp, Chicken  19866894381022_1
ctataacagttgctgtgaaacttgggcatacatattagcatttaggatgattccagctctatgccatacctgtctgtgactcagggtgaaagagaagagatttgaccaaagaaactgaatggaggttgagaagcaaaccctcttttctgttgcactgtacaatgaacatcactcatagacaaggctagcttctacattaagacttcccagctttttacatctgagccacatcttgattcctgtccacctcttcctatgtttaacagcatatttatggcatctacaaaacgtaacaactargactactactaggtaagccacagatgcattttaagggtctttttactctctttaaaagctgatagtaagatcccaatctaaggattactgaaaataatagaaatccttccattgacttcaatgaggcttaaataaggttcagatgatcagacaaacctctgtagaattgagttctccaagtaagtccaccttaagaaaagtttccaaggtaagttgtatctacatgacatacagcaattctgaatatttagcattagcaactgtaactgcattactattcccagcacatcccatagcagt

SEQ ID NO: 84032 - DNA, 599 bp, Chicken  19866894381026_1
  misc_feature (1)..(156): n is any nucleotide
nnnnnnnnnnnnnnnnnnnnnnnnnnnnnnnnnnnnnnnnnnnnnnnnnnnnnnnnnnnnnnnnnnnnnnnnnnnnnnnnnnnnnnnnnnnnnnnnnnnnnnnnnnnnnnnnnnnnnnnnnnnnnnnnnnnnnnnnnnnnnnnnnnnnnnnnnnnnttttgaaatacttttttagtacctacattccacatgaagttcccacttaactgtacaaatacagtggtcactgctaagagcaaaagagtcaagctccctcctgagctgtgcatggaagtcctatatctctaatgagatgaaaarggcctaaatggaaggacagcatttggacctgtggaagacaactgatccagcagaataagtctcttraggagacctaggactgacagtgttagaaaccccgagctattccatgccaaagagggttcagttyactcagatatattatgtcctactacattaatgtttcaaatgcagcaggttcagaggaagacatacttgccaaaaacaacaacagtttggcttaaagtcaggacctacaayccatagtgtattaagtgccaatattcttgaaatgtttcctatttttatgagtagaacct

SEQ ID NO: 84033 - DNA, 599 bp, Chicken  19866894381026_2
  misc_feature (1)..(90): n is any nucleotide
nnnnnnnnnnnnnnnnnnnnnnnnnnnnnnnnnnnnnnnnnnnnnnnnnnnnnnnnnnnnnnnnnnnnnnnnnnnnnnnnnnnnnnnnnnttttgaaatacttttttagtacctacattccacatgaagttcccacttaactgtacaaatacagtggtcactgctaagagcaaaagagtcaagctccctcctgagctgtgcatggaagtcctatatctctaatgagatgaaaarggcctaaatggaaggacagcatttggacctgtggaagacaactgatccagcagaataagtctcttraggagacctaggactgacagtgttagaaaccccgagctattccatgccaaagagggttcagttyactcagatatattatgtcctactacattaatgtttcaaatgcagcaggttcagaggaagacatacttgccaaaaacaacaacagtttggcttaaagtcaggacctacaayccatagtgtattaagtgccaatattcttgaaatgtttcctatttttatgagtagaacctgaaagtcaaatgctatcatgtagcaagtgtaagaagatattaaaaaccaaatgtgtgaagtgcagc

SEQ ID NO: 84034 - DNA, 599 bp, Chicken  19866894381026_3
  misc_feature (1)..(26): n is any nucleotide
nnnnnnnnnnnnnnnnnnnnnnnnnnttttgaaatacttttttagtacctacattccacatgaagttcccacttaactgtacaaatacagtggtcactgctaagagcaaaagagtcaagctccctcctgagctgtgcatggaagtcctatatctctaatgagatgaaaarggcctaaatggaaggacagcatttggacctgtggaagacaactgatccagcagaataagtctcttraggagacctaggactgacagtgttagaaaccccgagctattccatgccaaagagggttcagttyactcagatatattatgtcctactacattaatgtttcaaatgcagcaggttcagaggaagacatacttgccaaaaacaacaacagtttggcttaaagtcaggacctacaayccatagtgtattaagtgccaatattcttgaaatgtttcctatttttatgagtagaacctgaaagtcaaatgctatcatgtagcaagtgtaagaagatattaaaaaccaaatgtgtgaagtgcagcacatcagaatgattgtggtttgagaacaaaaatatagagagtcaggccactgttcatgaagtac

SEQ ID NO: 84035 - DNA, 600 bp, Chicken  19866894381026_4
agagtcaagctccctcctgagctgtgcatggaagtcctatatctctaatgagatgaaaarggcctaaatggaaggacagcatttggacctgtggaagacaactgatccagcagaataagtctcttraggagacctaggactgacagtgttagaaaccccgagctattccatgccaaagagggttcagttyactcagatatattatgtcctactacattaatgtttcaaatgcagcaggttcagaggaagacatacttgccaaaaacaacaacagtttggcttaaagtcaggacctacaayccatagtgtattaagtgccaatattcttgaaatgtttcctatttttatgagtagaacctgaaagtcaaatgctatcatgtagcaagtgtaagaagatattaaaaaccaaatgtgtgaagtgcagcacatcagaatgattgtggtttgagaacaaaaatatagagagtcaggccactgttcatgaagtactatttcaataattagagtactgatgtccacaaagttggcttgtatgtagtggcaaagatagtgctgtcttaaaaactgatgagctgatttaagactgacagtgttggaaac

SEQ ID NO: 84036 - DNA, 600 bp, Chicken  19866894381047_1
catagaaagtgttgtggaagaagaatcattatgaactaagatgttataagtttcataatgaatgtgctataatatacaatcactcaatgctgaaaatgaagttgaaataggaaatactagaagttacactgtattttcataggttatcctttcaccccatctacagtctaacaattgctctacactcatggctggcaaagcatcgtatgtagtacgtctcaaccactgcataaatatcagaatatcttcttgccatatgcaacatcagacttgtacatgtcatttatgattgggaaatgwcttctaacttctgatatycaccacaggaacagaacatgaaaggtaaaaataatataagggagactaagatccatgtacattaacttctgaggtagcaactgctgaagcatcaaaatgcaccttcatttatgtaaaacaacaaggagataaactgttttttgtgaagtatcaagcagctaagcgctggatatattctaggaagtcctaaccaagaatttaagtagttgttccagcgttagtaaaaacaccaactcactaaccttatgtagggtacacgatcattctgaaccattgtgagca

SEQ ID NO: 84037 - DNA, 600 bp, Chicken  19866894381047_2
agaagaatcattatgaactaagatgttataagtttcataatgaatgtgctataatatacaatcactcaatgctgaaaatgaagttgaaataggaaatactagaagttacactgtattttcataggttatcctttcaccccatctacagtctaacaattgctctacactcatggctggcaaagcatcgtatgtagtacgtctcaaccactgcataaatatcagaatatcttcttgccatatgcaacatcagacttgtacatgtcatttatgattgggaaatgwcttctaacttctgatatycaccacaggaacagaacatgaaaggtaaaaataatataagggagactaagatccatgtacattaacttctgaggtagcaactgctgaagcatcaaaatgcaccttcatttatgtaaaacaacaaggagataaactgttttttgtgaagtatcaagcagctaagcgctggatatattctaggaagtcctaaccaagaatttaagtagttgttccagcgttagtaaaaacaccaactcactaaccttatgtagggtacacgatcattctgaaccattgtgagcagccattgtagttcttcat

SEQ ID NO: 84038 - DNA, 600 bp, Chicken  19866894381050_1
gggaaacctttggcctgacctctgtcagtcattcctgtgactcacagagcaaaggttaactacaaaccacacttggagaacctctgatctccactcattttaagcagagcacaaattcaataatattatggttatttggagtaagactgggtgggatgaatacagtttgccttttgagcccacgcgttttctttaccacagaaagctcttttctgtctccatgaagcactgtaaaatgggaatagtgcctcttttctgtgtgtgtgctttgttttgcctgagtaaaccagccccccacgrtatgtgtcagcactgctgtgggggcagcgggcatttaactatcattactattaccaatccaataggagcaggaggtgaaggctcctcgtccatcctgttcctggaatgagtgatgcagagtaggaacctcctgtttgcaaagagggcaagctgttatctgctaatatggcagcgtttcgccaaatgattaggctgtcagaattatagcaatttgaacatgctgagcaagcttttatatacacaggaacaagatgccggcgtgagattgctgaagaggaataacacrcactggagattgac

SEQ ID NO: 84039 - DNA, 600 bp, Chicken  19866894381050_2
ccagccccccacgrtatgtgtcagcactgctgtgggggcagcgggcatttaactatcattactattaccaatccaataggagcaggaggtgaaggctcctcgtccatcctgttcctggaatgagtgatgcagagtaggaacctcctgtttgcaaagagggcaagctgttatctgctaatatggcagcgtttcgccaaatgattaggctgtcagaattatagcaatttgaacatgctgagcaagcttttatatacacaggaacaagatgccggcgtgagattgctgaagaggaataacacrcactggagattgacaagygcttggcaagcccgtgttcctggggctcatcagacattcgcggctcctctgcgatgctggtgaagagcatactcaagtggctgtatcatagcctgggtgacatctggtgacatgccgttaggcctgttgtgtttctgtgggatgaattcatttgcacaatatttgaaaggaatccatttatgcggagtggaaatattctggcatatgcaagcgacttacaaggcagtaatattttcggtccatcttgtatttggtgacaaaagcgtaattagctacacttag

SEQ ID NO: 84040 - DNA, 600 bp, Chicken  19866894381050_3
tgtcagcactgctgtgggggcagcgggcatttaactatcattactattaccaatccaataggagcaggaggtgaaggctcctcgtccatcctgttcctggaatgagtgatgcagagtaggaacctcctgtttgcaaagagggcaagctgttatctgctaatatggcagcgtttcgccaaatgattaggctgtcagaattatagcaatttgaacatgctgagcaagcttttatatacacaggaacaagatgccggcgtgagattgctgaagaggaataacacrcactggagattgacaagygcttggcaagcccgtgttcctggggctcatcagacattcgcggctcctctgcgatgctggtgaagagcatactcaagtggctgtatcatagcctgggtgacatctggtgacatgccgttaggcctgttgtgtttctgtgggatgaattcatttgcacaatatttgaaaggaatccatttatgcggagtggaaatattctggcatatgcaagcgacttacaaggcagtaatattttcggtccatcttgtatttggtgacaaaagcgtaattagctacacttagccacatgctatcttatgg

SEQ ID NO: 84041 - DNA, 600 bp, Chicken  19866894381056_1
tgcagtgtccaggctgctatcttaccttggcgttgggctttgcagacatcaaatccctccagggagagaactgatggttcagcgccggtgctccgggtgaggtatagcagtatatttttgagttagcagtagctaagcaatactctggttatctggcatggagtttcagcccttgtacacaagcagaggcatgcaaggagcatccatagccacatccataacagaggtcatgtcccaatgacaaacaccagggcagatgtagcacacctctgcatatggcccaacaagcagagagaagcycaggagatcaatacactgtttacatgttgtttattttaggacagttccagctacatttttttcatgtattcaggggcgaacaataagctttagtcttccagagggcaaagatttccctctgaaacgggctccaactcaacaccagcacgagaaccttgctccaagcctctgtgtgattcctgttctgcagccctgatccgaccaacatcacctgtattgacgaactacgaggaacacaaactgctcgcctgtttcatcgcttggaaagacaaacgtatgcagccacaagagtcagtcaga

SEQ ID NO: 84042 - DNA, 600 bp, Chicken  19866894381060_1
ataaagcttttttcatttcttaatatatgttagtgtgacatctgtaggatccagaaacgtactgaataaagttatcttcaaacatagatgctgctagcttaactacgggaacttccagctcctgaatggtgattttggtattactgaaaactgtaccacagcacacgtatcactcccattttattgcctttcacattatcaagtaacaaaatggcacaatgggttggttgttggtttttttttttttttttttgtattctgaaatctatgctaaccaatccattgaaggaatctctgttwtgttaaaattcattactattaaagtacatatcaaaatatatacatattaaatgtgtaaggagatcagcgctctgccaaactgtgctccctgaagcatcatgagatcgatagcaacaactatgtgaagaatcacaacaaaatattgactgtgaaacaaagagttctatttggcatcaaataaaagtctcccatttggcagactaggaatgctccaagtggcagagtattttttccagtcgcagtcaggcaccaaaaagcactcaatgaactgcaattacatagcgtatctgctgtaagcct

SEQ ID NO: 84043 - DNA, 600 bp, Chicken  19866894381063_1
tgaaattctgtgtgagtgactgaaaatgttgcctttctgaagttacataaataaagtatttaaagcaagttgaaagcttaagtctccttaattcacttttagagtggcagatttttatttatttattattactattattattattattattattattatttatggaataatttaacttcagattttataaagttttgaccaagaattttgtgcactctagagactggtgtgcagttatctttggaattttaatagcaagttggggccacagaatcacagtcatggaattatttttttttwaaaaagctcccatgtagcacatgcaagatcctaagcatcccagcataaagttcaaagaagccagtaagaatagcttcaccaggttagcatactcagcttggatactcctctttccatccccacttgcccatctccacagctctcagcctcaccaggctggcactcaaagagattattatccaagacatatgtcatatttacattttattttcaaattaagcttaaagcttaagtgaattaagtgaattttggaagaggatgtaatgacaggatgaagggaaatgttttttagctggatga

SEQ ID NO: 84044 - DNA, 600 bp, Chicken  19866894381070_1
tgttttaagtgggttcatatgagatgcactttaatataattctcttcaattatttttttactttattttatattttgaatgataaagaagcccaccggtggtcagctgtaagacctctcatgcactctgcacagtcctgcaggccaatgatatgaaacagcagcatttcattccacttctgtctgaacaaatagaattaaaggacaaagtgagatacaagacaatggcaaatcagccttttgcctgtaagtgtcatacctgtacacctcctgtgtggtgtttcagcaggagcccagcagycagaggtgacatagctggcctctagaggtagtcttctgtagtgtaaactgggataaggtctattctgaggctgaaacagactatcgcagagtaccttataactgccatcactttaattcctgcaatttgttgcagtgagtaggtttaggtacagcaaagaatgtggtctgacattatttcctgcataggcatttcctatttgttatcttctgccttcagggagagccawcagcagagttttagtaggtatcagcaacaacaggttaacagcaataaatttcatcaattggtcttcatgtc

SEQ ID NO: 84045 - DNA, 600 bp, Chicken  19866894381070_2
aatcagccttttgcctgtaagtgtcatacctgtacacctcctgtgtggtgtttcagcaggagcccagcagycagaggtgacatagctggcctctagaggtagtcttctgtagtgtaaactgggataaggtctattctgaggctgaaacagactatcgcagagtaccttataactgccatcactttaattcctgcaatttgttgcagtgagtaggtttaggtacagcaaagaatgtggtctgacattatttcctgcataggcatttcctatttgttatcttctgccttcagggagagccawcagcagagttttagtaggtatcagcaacaacaggttaacagcaataaatttcatcaattggtcttcatgtcctagaacaaaattcactgcctaaaacataatgtttatattttaactgagttcctagaggacctgcttcaatttctgccccattctctcaaaaaagagaaggtgcacatggtggaaaatgcgccagaggactttggctgaygggaaagggctgtatcatcttgagctgcagacatgcaacttcattcaaaaaatgcatgagtaattatgtggcataattacatggtctac

SEQ ID NO: 84046 - DNA, 600 bp, Chicken  19866894381070_3
aggtttaggtacagcaaagaatgtggtctgacattatttcctgcataggcatttcctatttgttatcttctgccttcagggagagccawcagcagagttttagtaggtatcagcaacaacaggttaacagcaataaatttcatcaattggtcttcatgtcctagaacaaaattcactgcctaaaacataatgtttatattttaactgagttcctagaggacctgcttcaatttctgccccattctctcaaaaaagagaaggtgcacatggtggaaaatgcgccagaggactttggctgaygggaaagggctgtatcatcttgagctgcagacatgcaacttcattcaaaaaatgcatgagtaattatgtggcataattacatggtctacccagataattgcatgtgaaattgagcatgctgtcaggtgctgatgagatttacagctacacatacctttttgtgtgtatgattgcattgattaagatattttaaatatgctctaataacaaggattgttcaattgtgtggtataaactaccctcagccaggtgaaaattgtaacactgcagcataaggccttttcatcgctgatattttca

SEQ ID NO: 84047 - DNA, 546 bp, Chicken  19866894381070_4
ttttgtgtgtatgattgcattgattaagatattttaaatatgctctaataacaaggattgttcaattgtgtggtataaactaccctcagccaggtgaaaattgtaacactgcagcataaggccttttcatcgctgatattttcaagcagaaattgaaaccgttgctccagctactctgtgaaaagctgcctagtgatgatctgcttctcttgtgccagtggaaatcaggaataaaaaggagaaaccaggaaaatcattgaggtcctgctaccactgtcatgtgtctgtaggctgcacacrtaatgacagatacagggtgcaatgtacagtctgggtttttggtgctaacttatcagagcagtatacagatggttatcctgttgcctcaggcagggagcaggaggaaggcctggtagacctgccccgctttggttttattcctcagagtgttggagacttctggtctccttcagaaagctgttgcccttcttatgttggtgtcttatggagttcccatgtaaggcagactcaattcaaggctaggtg

SEQ ID NO: 84048 - DNA, 599 bp, Chicken  19866894381071_1
  misc_feature (1)..(9): n is any nucleotide
nnnnnnnnnttattgtttaaggcttttttttttactcttcccacctaaaacctcacaggaactaccctctgtgagaaggcaccggcctgccttgtgaaatgcaagggagaaatgtaaccaaaagaaaaaaaaaaggccaagtccagacgcgcttttcacatgccctgggatcagtggtgtgtgactgcagtttatatagcatcggatccaggtctggaagcactttctgagttgaggggtctaaggaggcagcggccaggaaggccttgtgtgtctgccctctgtgtgtgctactgagcrggagggaaagctcccaaactgctgcccatgaggggggaaggggaggggaagaatggaacacgcgcaatttacttttaaatggatgaataaggcctcattgttatgaatcccagtttacttttcccggtcaggcacttgaaattttatttatgcttaatagactgcatttggcatgtgtaaagatgacagaggcgtgaattatgaacgaccttccacccctgcaggaagttgtaataattgaaataatagcaaaaaggcgctccctgtgaacggggcccggggctgcgtgctttgaagcg

SEQ ID NO: 84049 - DNA, 600 bp, Chicken  19866894381071_2
cccaaactgctgcccatgaggggggaaggggaggggaagaatggaacacgcgcaatttacttttaaatggatgaataaggcctcattgttatgaatcccagtttacttttcccggtcaggcacttgaaattttatttatgcttaatagactgcatttggcatgtgtaaagatgacagaggcgtgaattatgaacgaccttccacccctgcaggaagttgtaataattgaaataatagcaaaaaggcgctccctgtgaacggggcccggggctgcgtgctttgaagcgccccgcggggcasaggccgtgtcggcagggcccggccttccccacagccacagccactgcgaggggaaaaaggagcatttctgcccctgtctgtgagctgccgtgtgtatgtgtcactgggaagtgggaggatgagcggagaactggctctggaattgatggaggaaagctgaggagaaaggtccaaatggcgaaaagtcaactcttggtctgtggtgaagaactgctgaggctggagggctgtattgggaaagctgagccctgcttcagcatgttctcctgaaatggcatatggagtgtccatgtctgttgg

SEQ ID NO: 84050 - DNA, 600 bp, Chicken  19866894381073_1
tttggcagagttaaagctatatttgactttgccaaaagagagatgggaagtctgaacacctttcccaaatttgcatgccatttcatataatctagttgcactactcactgagactttgagaatataatcaactggaatggttcagctggcgccaggcaggtatggttacaggaataatacatggaggaggtggtaatatgaggtttcttttatttggaggtacactttactatgtggtattttttggaatgactccaattttgtaggacaaaatgtgaaatagaccagttatttgggttkaatttatgttattgaaacaggattactgtcagaaaggctagtgtataactttgttgttggtttcttgttttgttttgttttgttttgttttgttttgttttgttcttgttttcttatactatactgttattccatctttctgacacagaaagatttgcagacttttagtcccatcaacatgctgagccataattgtgattatacttcacttcttgtcagtgtccatcatgctaagcgcttctctaaaaaccctttcactacaacctccagaaaggcttgtggccttatcagttagagtga

SEQ ID NO: 84051 - DNA, 599 bp, Chicken  19866894381074_1
  misc_feature (1)..(60): n is any nucleotide
nnnnnnnnnnnnnnnnnnnnnnnnnnnnnnnnnnnnnnnnnnnnnnnnnnnnnnnnnnnnatgataacagtctgtggaacatcgattgtatttgaaatggcaagaaaatattaatgtctattgacttagttgtcagagtactcaatgtaacgctggcatcatttcaaatggacttatgttcaatgtacagctggaacagaacatgagggattgcagctgtaggaagcagttcacacagctgtttctcttctgttttttcctctgaagagcaaagaaacattttcagctattaaaacaacwattttttccttccttgttttttcctttcagagcccgttttcagtggtcctacctcacctgtggcctctcctgggaatgaaagtgaacctggatctggaccagcacagccaaagaaaattcgaggtgttgggtttggagatatatttaaagaaggctcagttaagcttaagacaagattatccagtaatgaatcagaggataaaaggcaagataaggtttgtagtgcttcatagtctttttctttttttttttacaggggtttcctrtatttaaaaaaggragaaaaaaataacatgaca

SEQ ID NO: 84052 - DNA, 600 bp, Chicken  19866894381074_2
ttctcttctgttttttcctctgaagagcaaagaaacattttcagctattaaaacaacwattttttccttccttgttttttcctttcagagcccgttttcagtggtcctacctcacctgtggcctctcctgggaatgaaagtgaacctggatctggaccagcacagccaaagaaaattcgaggtgttgggtttggagatatatttaaagaaggctcagttaagcttaagacaagattatccagtaatgaatcagaggataaaaggcaagataaggtttgtagtgcttcatagtctttttcwttttttttttacaggggtttcctrtatttaaaaaaggragaaaaaaataacatgacatctgaagaccaaatattgtattggtgttggctgttctaaaatttgtcagtgttgttcrrtaatcagactgtaatcgtctgaggggataccatggaaaaggcaaaagtacagtcttacctgtaaaacaaaacaaaacccccaaacttctgtaagttatatcacagaatcacagaatggcctggaccatgacgaccacagtgcttatctcattccaaccctctgcagtgtgcagggtcgccaacc

SEQ ID NO: 84053 - DNA, 600 bp, Chicken  19866894381074_3
gagcaaagaaacattttcagctattaaaacaacwattttttccttccttgttttttcctttcagagcccgttttcagtggtcctacctcacctgtggcctctcctgggaatgaaagtgaacctggatctggaccagcacagccaaagaaaattcgaggtgttgggtttggagatatatttaaagaaggctcagttaagcttaagacaagattatccagtaatgaatcagaggataaaaggcaagataaggtttgtagtgcttcatagtctttttctttttttttttacaggggtttcctrtatttaaaaaaggragaaaaaaataacatgacatctgaagaccaaatattgtattggtgttggctgttctaaaatttgtcagtgttgttcrrtaatcagactgtaatcgtctgaggggataccatggaaaaggcaaaagtacagtcttacctgtaaaacaaaacaaaacccccaaacttctgtaagttatatcacagaatcacagaatggcctggaccatgacgaccacagtgcttatctcattccaaccctctgcagtgtgcagggtcgccaaccaccagaccagagccacatccagcc

SEQ ID NO: 84054 - DNA, 599 bp, Chicken  19866894381074_4
tttcagctattaaaacaacwattttttccttccttgttttttcctttcagagcccgttttcagtggtcctacctcacctgtggcctctcctgggaatgaaagtgaacctggatctggaccagcacagccaaagaaaattcgaggtgttgggtttggagatatatttaaagaaggctcagttaagcttaagacaagattatccagtaatgaatcagaggataaaaggcaagataaggtttgtagtgcttcatagtctttttctttttttttttacaggggtttcctrtatttaaaaaaggragaaaaaaataacatgacatctgaagaccaaatattgtattggtgttggctgttctaaaatttgtcagtgttgttcrrtaatcagactgtaatcgtctgaggggataccatggaaaaggcaaaagtacagtcttacctgtaaaacaaaacaaaacccccaaacttctgtaagttatatcacagaatcacagaatggcctggaccatgacgaccacagtgcttatctcattccaaccctctgcagtgtgcagggtcgccaaccaccagaccagagccacatccagcctggccttgaatat

SEQ ID NO: 84055 - DNA, 522 bp, Chicken  19866894381074_5
ctgtggcctctcctgggaatgaaagtgaacctggatctggaccagcacagccaaagaaaattcgaggtgttgggtttggagatatatttaaagaaggctcagttaagcttaagacaagattatccagtaatgaatcagaggataaaaggcaagataaggtttgtagtgcttcatagtctttttctttttttttttacaggggtttcctrtatttaaaaaaggragaaaaaaataacatgacatctgaagaccaaatattgtattggtgttggctgttctaaaatttgtcagtgttgttcrrtaatcagactgtaatcgtctgaggggataccatggaaaaggcaaaagtacagtcttacctgtaaaacaaaacaaaacccccaaacttctgtaagttatatcacagaatcacagaatggcctggaccatgacgaccacagtgcttatctcattccaaccctctgcagtgtgcagggtcgccaaccaccagaccagagccacatccagcctggccttgaatat

SEQ ID NO: 84056 - DNA, 521 bp, Chicken  19866894381074_6
tgtggcctctcctgggaatgaaagtgaacctggatctggaccagcacagccaaagaaaattcgaggtgttgggtttggagatatatttaaagaaggctcagttaagcttaagacaagattatccagtaatgaatcagaggataaaaggcaagataaggtttgtagtgcttcatagtctttttctttttttttttacaggggtttcctrtatttaaaaaaggragaaaaaaataacatgacatctgaagaccaaatattgtattggtgttggctgttctaaaatttgtcagtgttgttcrrtaatcagactgtaatcgtctgaggggataccatggaaaaggcaaaagtacagtcttacctgtaaaacaaaacaaaacccccaaacttctgtaagttatatcacagaatcacagaatggcctggaccatgacgaccacagtgcttatctcattccaaccctctgcagtgtgcagggtcgccaaccaccagaccagagccacatccagcctggccttgaatat

SEQ ID NO: 84057 - DNA, 600 bp, Chicken  19866894381077_1
tggtccaaaaattgctcttccgcctcttgcaattttctgttaagccatctggtcagcttgtggggattttgtcttaaccagcagattaaaaaaaaagctggctttggttccattagtaaatctgtcacttgattctctttccaaaggctaaaacagatgcggtgcatgtcatcctgcacagacatcattttgtgcagaaacagtaccagatcatctaataatagttcatgttaaatggtagtgcaggactgggatgtgcctagcttcacgttgctggctgggtatgtagctgtgatgtcwgactactcgctgggtgcctctgctaccacaggataccctctctgggcacacctttagagcagtcgctcatcccaagctaagatgtgtttacactgagtgggataaagccctccttggagctgcctctattcctctgcttaatgttgcaggagtgcaactaaaccagacttctgctaaataggcaactgaagttacaggagagaatgctgtcccaggagttgaagtgctcttggcatttgttgttttcagcccctggattattcctgcagtgcagtgagcgggagactcacaacatgacac

SEQ ID NO: 84058 - DNA, 600 bp, Chicken  19866894381079_1
tccccatgtgccttcctttaagaccaaaaagtggctcatttatgactgatttcatagctattccatctatggttactgtgaagaatgtggagcatggcagtgttgacgttcaagagaactgatgtgcctttcaagatgagagatgatgatgtggcttaagagggagcacagagctagaactcccataataccccttagagcttcaaaacttcatgtgtccagcttatttcttacccttttaagataacttaatcaagaaatcatgaattattattaaagagcagcagcatcttacactayattgctgtcttcatagagacacmttcatataaaactgataccagtgtttatgcattaaaacacagccagatgtagcaagtttcccaggtaccacctcatgctacaaagcatttgtctaccacagggtatgatttcctgcagatctgctgttcagcagtgaattctcaaggtctgggctgaaatacttttacttaccaaggaaaggaaatgttgtaaaatgtctatgtgcgctaggctttccaatgctgagagggttccatgagttattctcatgaaaagggattatttttatggaaatta

SEQ ID NO: 84059 - DNA, 600 bp, Chicken  19866894381079_2
ccaaaaagtggctcatttatgactgatttcatagctattccatctatggttactgtgaagaatgtggagcatggcagtgttgacgttcaagagaactgatgtgcctttcaagatgagagatgatgatgtggcttaagagggagcacagagctagaactcccataataccccttagagcttcaaaacttcatgtgtccagcttatttcttacccttttaagataacttaatcaagaaatcatgaattattattaaagagcagcagcatcttacactayattgctgtcttcatagagacacmttcatataaaactgataccagtgtttatgcattaaaacacagccagatgtagcaagtttcccaggtaccacctcatgctacaaagcatttgtctaccacagggtatgatttcctgcagatctgctgttcagcagtgaattctcaaggtctgggctgaaatacttttacttaccaaggaaaggaaatgttgtaaaatgtctatgtgcgctaggctttccaatgctgagagggttccatgagttattctcatgaaaagggattatttttatggaaattatccatgaatagcatgagaattat

SEQ ID NO: 84060 - DNA, 599 bp, Chicken  19866894381084_1
  misc_feature (1)..(30): n is any nucleotide
nnnnnnnnnnnnnnnnnnnnnnnnnnnnnnagacattttcttaatctcttaatcactcctttttttctctttttataccatcaaagtgaaaagtttgtaaaaaacaaagcaatatttcctccgattttttaaaacctttcaagcagaaaacaaagagaaggattcctctccagtttgttttcagtgcaagaaaagagcttaagagaagagaaagagaatgaacaaaagagaacttctccgctcccttgaaaacaaaggcagacacagctgaggactaaaagaaataaaaccccaacttgygtatattaattccttgttgcaaaataccccattgtgaacaaaaacccattttcaacaaaactaagctttcgtttcrccatattatttgaataaatttctaccatcaggttttttttttccactatcttgataattccctccattccttcctcctcccccaagtctcctttaagcctctgctgaagttttccagtagtgatacagcacattccttgtgctgctgagaagctcagctgcctcccacctcacattcctctcagctgtttttcttcactttactctatgttattcctaattat

SEQ ID NO: 84061 - DNA, 600 bp, Chicken  19866894381084_2
accatcaaagtgaaaagtttgtaaaaaacaaagcaatatttcctccgattttttaaaacctttcaagcagaaaacaaagagaaggattcctctccagtttgttttcagtgcaagaaaagagcttaagagaagagaaagagaatgaacaaaagagaacttctccgctcccttgaaaacaaaggcagacacagctgaggactaaaagaaataaaaccccaacttgygtatattaattccttgttgcaaaataccccattgtgaacaaaaacccattttcaacaaaactaagctttcgtttcrccatattatttgaataaatttctaccatcaggttttttttttccactatcttgataattccctccattccttcctcctcccccaagtctcctttaagcctctgctgaagttttccagtagtgatacagcacattccttgtgctgctgagaagctcagctgcctcccacctcacattcctctcagctgtttttcttcactttactctatgttattcctaattatttatcgtaattaataagatgcctcccctgggcagagctggttgccatgacattgtaagaaatgattctatctttccc

SEQ ID NO: 84062 - DNA, 342 bp, Chicken  19866894381084_3
attccctccattccttcctcctcccccaagtctcctttaagcctctgctgaagttttccagtagtgatacagcacattccttgtgctgctgagaagctcagctgcctcccacctcacattcctctcagctgtttttcttcactttactctatgttattcctaattatttatcgtaattaataagatgcctcccctgggcagagctggttgccatgacattgtaagaaatgattctatctttccccatccctggctcttttttaagcgttgatactgaacatctcactttcaccatctccycagcttcatacacatgtgcaaaaaataattagcaatctaacc

SEQ ID NO: 84063 - DNA, 600 bp, Chicken  19866894381086_1
ttcccagaggaaaatattttttttttatcctgtagatgaaatcattttcaaagaagcaatattctcaatgaatcccaggtgttcctggctccctttgtatgggaatgttaagagggatcacgctgacaaataaactagaaagtctgatatgacagggagttcagaacttcagtaacagtaaggcaaactgaaataaaggatctagtcatctactattagatacacgagtaaataaatgaagacaggttttaacatttatttaacatttcttggcatgagcaggaaaaactgaaaaggtgwagaagacaaatctgctattcagttatgcctttctggagcagcgtgaagagtatattaaaatcctttttttatatgatacgacgtgaatcatttagggctgcaacactcactgaagcagatgcctgctagccaaggttgtgtggtattattgtccagaaaaatgaccaccagtgtaactgctacatacaaacaaataaataatttctttcttcttttttgttaataagaaaaagtgtggtcatattttatttgcttacatagtcaattcttgtgacagtttaaactaatgattatgtaatt

SEQ ID NO: 84064 - DNA, 600 bp, Chicken  19866894381095_1
gtgggttgagtgagcacaaattatctttatgcagtgctacacatttccagtttgctgtgcacaagcagcagattcctccccggctgcttgcccactagataatgtttctccccacagagaaagctggacgtgcacacctgtgaagttcaattgcatactgacctaatccataggatctagggcaagaggaaagctgcacccaagtctcttcctcagggctggtggaagggcaccaaccagctcctctggagctctccctgccacaaagtactcacaggaccaccctgaggcacagtgagrggcacctgggtgccaggtgggcagaaaggcaaagccatcatgctcagaggatgggatgagagtcccctccgattttcggcagttgctttacatgattgcctggctaagaagctgctgcttgatgggtgtcggatgcmtaagggacacccccaaggcatacagggagagcagcggcctctgtaccatgcagcacctacaccatgcccagcctgacttaccccagggactctgctgtcccatccagtcctctcccatcatgtcaggtctccccagatccatcctccacccactccaggataa

SEQ ID NO: 84065 - DNA, 600 bp, Chicken  19866894381095_2
ctgtgaagttcaattgcatactgacctaatccataggatctagggcaagaggaaagctgcacccaagtctcttcctcagggctggtggaagggcaccaaccagctcctctggagctctccctgccacaaagtactcacaggaccaccctgaggcacagtgagrggcacctgggtgccaggtgggcagaaaggcaaagccatcatgctcagaggatgggatgagagtcccctccgattttcggcagttgctttacatgattgcctggctaagaagctgctgcttgatgggtgtcggatgcmtaagggacacccccaaggcatacagggagagcagcggcctctgtaccatgcagcacctacaccatgcccagcctgacttaccccagggactctgctgtcccatccagtcctctcccatcatgtcaggtctccccagatccatcctccacccactccaggataagcatttctgctctttcagcttctgtctgactggttcctgtcctgcctaagaatgtgacccagctacacatattttcaagctcaactacatctttgtgctgaggcagaagacgagtatgctagtttgaggctcccagc

SEQ ID NO: 84066 - DNA, 600 bp, Chicken  19866894381100_1
ctcatgctgtgagtgggcaacaaggaggggcacagcagaagcagaagctgagtccacagcatttgctcctctgttttgtgccgctcggcgcattgccaccgcctccctcctgctgcctctgccagttggtggtggtgggatgccaagcacttgttcttagacatcccttcatctcttgccagggacagtgagtgtttgcagcacggggcggtagccacgccgtgctgctgtagatgtgttttccatctgtctgtgttgctgccgtagaagggctgctcaggtgagcctgagttttgtccrctaatggcatcagccgacctgagcagaatgtgtcccactaccaactgatttaaccacagtaatgggagaggttttaatccctcctctgctggggaaagyrctgctaacagagccatccatggccattacagccccagcagctccatgcggtcagaggccgctcaccttcagccaggagccggcagctgccgaaatcccttcacaccacatgcaaattaggcattgaaaatgctcattacagccaacatgacacgccttcattattccaatataattgtctgaaaggctcagctcgctgct

SEQ ID NO: 84067 - DNA, 600 bp, Chicken  19866894381100_2
cgcctccctcctgctgcctctgccagttggtggtggtgggatgccaagcacttgttcttagacatcccttcatctcttgccagggacagtgagtgtttgcagcacggggcggtagccacgccgtgctgctgtagatgtgttttccatctgtctgtgttgctgccgtagaagggctgctcaggtgagcctgagttttgtccrctaatggcatcagccgacctgagcagaatgtgtcccactaccaactgatttaaccacagtaatgggagaggttttaatccctcctctgctggggaaagyrctgctaacagagccatccatggccattacagccccagcagctccatgcggtcagaggccgctcaccttcagccaggagccggcagctgccgaaatcccttcacaccacatgcaaattaggcattgaaaatgctcattacagccaacatgacacgccttcattattccaatataattgtctgaaaggctcagctcgctgctcaagcttcacttggtgcagaaacgtgataaaaagaaaacaggaagtgcaatcaatgcttgtaatccttttaaataaaaaaggtacttgctagtagctgc

SEQ ID NO: 84068 - DNA, 600 bp, Chicken  19866894381100_3
gcctccctcctgctgcctctgccagttggtggtggtgggatgccaagcacttgttcttagacatcccttcatctcttgccagggacagtgagtgtttgcagcacggggcggtagccacgccgtgctgctgtagatgtgttttccatctgtctgtgttgctgccgtagaagggctgctcaggtgagcctgagttttgtccrctaatggcatcagccgacctgagcagaatgtgtcccactaccaactgatttaaccacagtaatgggagaggttttaatccctcctctgctggggaaagyrctgctaacagagccatccatggccattacagccccagcagctccatgcggtcagaggccgctcaccttcagccaggagccggcagctgccgaaatcccttcacaccacatgcaaattaggcattgaaaatgctcattacagccaacatgacacgccttcattattccaatataattgtctgaaaggctcagctcgctgctcaagcttcacttggtgcagaaacgtgataaaaagaaaacaggaagtgcaatcaatgcttgtaatccttttaaataaaaaaggtacttgctagtagctgcc

SEQ ID NO: 84069 - DNA, 600 bp, Chicken  19866894381100_4
ttaaataaaaaaggtacttgctagtagctgccaacatctttaaaaagctgtgatttccccggagagagcccttatcagccatgactgcgtgtcattccagctgtctgtcaatccatcagaatccagtgccactgacattaagaagccaggcattaagattatcacatttagccataatgttgcacagattgtgttgacatttggaaaatattccaccacaggacccatttgacttctctactttctacccaaagaaaagaaacgctttgaaaagttgccgtggggccctgccctctgcaygggaagggctcagctctgcccacattggagagggaatgagccaggcatgggctgggaggtgtttggccacggaaacaatggtaaacgacctcaaatgaactgattaatctcttaaataactgtgaaaccattttccagaaaaaagttaatctagtctaaatggctctggtgcttttcctgggctccaatcaatatgtggtcgctcgcttttcatgtgtaattcacagtaattgcaaaagagcattttctgaagaaaatgacattctgcaagaagaaatgcaaagagagatgagggccaat

SEQ ID NO: 84070 - DNA, 600 bp, Chicken  19866894381106_1
acttcaatacgagcggaaggacttaagtgcttgtttagattttgggacttgtcgttctgaatcacttctaaaggaatgtttccttcttgttcatgacagaagccattccagtgtgcagcagactgattttgtccccttccgactggattttcccatatactgctaggaatatgtttactcggattgctccataaatcaaccaccaggactctattatttttttcttcttgattaaagtttccaattccactgtcactgttgctgcttgtactattattctgatgaacatctgcatcaccrtcaagaaacgcccttgcacgcattccctcaatcagttcccccatatccctatacaggacagaaataaactgaagaacaggcaaagatgatgttggaaactctaaacagccatttgtgtctggatccgctgtacattccagtccaaaacgtcttgctatgccctggtgaattttatgatgaaataattcaggatccaccataaaaacatggcaagatgtcctcagaaccccttcatcttcctgagccaagcttgcatcatcatttgtctgcattgtaactagtccaaagaatcttctgtca

SEQ ID NO: 84071 - DNA, 599 bp, Chicken  19866894381107_1
  misc_feature (1)..(67): n is any nucleotide
nnnnnnnnnnnnnnnnnnnnnnnnnnnnnnnnnnnnnnnnnnnnnnnnnnnnnnnnnnnnnnnnnnnatgaagatgaaagtgctctttcatcattttgtgaatctaattccctagaaaatgtcagcaggaattatctggtagttctgattcggatttctgtttgattgaatgttcatttttctttaagtaaagatttggaacatttttaaccttgatcatctgtagacattaaatatcttgtggcagctttcaggaggagaggttgtttattgattccattttttagcttagtcacaggytatattgctggtaaaggaatttgaactttctactgctttgtgaacatctacgaatgaggtatttctgtattgggatgttcaagcaaaaagggcgtagtgatggtgatggatttacctaataagccgagtgtcacgtttgccacactgtgtcatattagtggtgcagaacatggggcaaaaggagctcctaatttattttgtataactcttcaagggcaccatctaacttttaacagtaacagagtgggctcgcattactgtaatgagtcagaatcagtttatttatacccggaggtatt

SEQ ID NO: 84072 - DNA, 600 bp, Chicken  19866894381116_1
ataggtcagcactgtgtcaagtatatttccaagcttagatctaagcttttcaagagtttttgacccaaaatacagaatgaggttttcccatgcaagggaccatgatactcttgatggagtagggagataaagaccagggcctgagcttttgtcttctctgagtatcagtttgtggtatgtgtaagttgatgatgattttttttgcctctgttgtaatcttacatgctaagtatccaactgcaattttattttctgtagttggtcaaagtatgatgtatttaattctgtttataactgtasggaatccatgctttcaatgcttacctgacacaaagtcagaagtcagcttcctcagataggcagagggactgggaaaggcagggaggagggcaatacagccaaacattgttaatcaaataattactggaaatttaggaggtgttttgtaggattttctattaatggaagtgtttcttgaactatttctactttattttcctaatgtttctaattctttaactacagggactaccttttccagcaactaatgataccagcatgtaaaagaatgttattagagcaaatctcaacttctgcaga

SEQ ID NO: 84073 - DNA, 600 bp, Chicken  19866894381119_1
actaaggcctgaatttcaactgagtttacaagttatccatgtattttccatttgagatttgagagcggctagaaagtctatttggcaattgtcagtagaaattcaacaaaatagtaaaataatctgacttctgaaaaattataccgaaggcattatgtaaaagttaaactaaaaccaaaataaaggtgaaagttaaaaaataataaatactgtttttttgttgttgttgtttgtttgtttgttttgagcttattcttgtcttctgtccaacagggtaatagaggtcctcctggagtgccrggtttgatgggaaattctggcaaaccggtaagaccattaaactcattcaaaagatctagaaaaatgaaagtcttgcatagaaattgtttttcaaatgtgttgcatcattcctatccccaaaacagggtgaacagggaccagagggggaagcaggtccaacgggaccccggggaccaccggtaagtattgaatacatttctgagtgtatgtagtacttcagtgtcccaagttactgttggtgcacctaactgccagttacagatattactcagttcaagtgataatttttaacataaatac

SEQ ID NO: 84074 - DNA, 600 bp, Chicken  19866894381126_1
tataagtatttccctagtgaatgtgagcgaatttgtctttctagcttctaagcagaactgtgttacccactagaggtgttaactttggttttcatgtggtaagtgatttgttcaggaagacaaagccagaatgtgagagttcaaggcacatatatatgtgtctaagacaagctgacatgcacacaaatgggaaaataagtgattcaagcatacaagccctacttcctatgggttgtaagggcagaagagagatttaattctgagtgctaaatactttcatgtcagaaaaatactatcatygtaagggtagcaattaaatagatgaaggtagttaaggaaagcataggtctcagcaaaaaaaaaaaaaaaaaaagaataggaagagaaggaggtgtaaggtaaatcagtcttcagaccctcggacttcatggagattatttttattgtatggccctttgcaaagctgaagatgtaagatctttgaactgaatcaataaggatttccaacaattaccaggaagtacagtatcttcaagtagtggagtcagttacggtaaatcactacagaagtcagtgaatttttggataatgctcccttag

SEQ ID NO: 84075 - DNA, 600 bp, Chicken  19866894381132_1
tctgagggctccagggcaagagatgtttccagaaacagggagagttctcggggctttggtgcaagagctgtccccagaagcaagtaaggtcctcagtgctctggggaactgcagggctcttggaacacagggatgctccacttgtagggcaggagggcccccatgttccctcccagtggccaatggcacccctgtcttgttctccatagctccaacgagacgctctcctgcgtcatcatctttgtcattgtctactactctctgatgtcgggcgtcatctggtttgtcatgctgacctaygcctggcacacgtccttcaaggcgctgggcaccacctaccagccgctgctgggcaagacctcctacttccacctcatcacctggtccatccctttcgtactcaccgtggccatcctggctgtggcacaggtaatggggatgcatgcccaccttccccccagatccctgcttgctcagatggacgcagccaggtgacatccccatctcaccaggtggatggtgactccgtcagcggtatctgcttcgtgggttacaagaactatcgctaccgtgccggctttgtcctggcacccatcgggc

SEQ ID NO: 84076 - DNA, 600 bp, Chicken  19866894381133_1
tgaaaagaagcggacagaagtataaaagcttgggcaaaaaagagcatcttagtctcttgggacttcatttcatgctgtaattggtgaaaagtctcccttaaaaggttataaatgccatattaatttcattaggaaagcctcctgtggcatattaatttagctcctggcatcgttattgcatcttttcagatacacaaaatcttaggaggcaatttcattaacagtaaagatctgagaaaagcaactattttaaacagattggtgataattcagcttgggagcatgcatgtttattaatawactcayactcctctgattaacaacatactgacacagcaagagatagcaggctgtgctactgaaattacgttatcttcaatgcctttgtctttgcaaagattgcatgaacagttctcaaaagattaatggcctcctcttttatttaaggcagatactcatctttagtaatcatgtgtaaattctgaagccaagcatgaagtttaccatctgacttatcttatgatgctacgaaagaagacttttccgaagcacttggtacactcaatactataggtaattctagacatatgaaatagtctc

SEQ ID NO: 84077 - DNA, 600 bp, Chicken  19866894381133_2
gaagcggacagaagtataaaagcttgggcaaaaaagagcatcttagtctcttgggacttcatttcatgctgtaattggtgaaaagtctcccttaaaaggttataaatgccatattaatttcattaggaaagcctcctgtggcatattaatttagctcctggcatcgttattgcatcttttcagatacacaaaatcttaggaggcaatttcattaacagtaaagatctgagaaaagcaactattttaaacagattggtgataattcagcttgggagcatgcatgtttattaatawactcayactcctctgattaacaacatactgacacagcaagagatagcaggctgtgctactgaaattacgttatcttcaatgcctttgtctttgcaaagattgcatgaacagttctcaaaagattaatggcctcctcttttatttaaggcagatactcatctttagtaatcatgtgtaaattctgaagccaagcatgaagtttaccatctgacttatcttatgatgctacgaaagaagacttttccgaagcacttggtacactcaatactataggtaattctagacatatgaaatagtctcgttgcc

SEQ ID NO: 84078 - DNA, 599 bp, Chicken  19866894381135_1
  misc_feature (1)..(30): n is any nucleotide
nnnnnnnnnnnnnnnnnnnnnnnnnnnnnncccccacagcagctccctgtgcccaatacatacactcagcacaatccttctgcctccagatgtgcacagccgtgactaatgctgatgctgcctcatgcacgtttcacgctgttctcagttttgggatggagagaagcactgctcggcctgccctgctcactgggcatggggtgatggcagagcacagggcccaaactgcatgtcccggtaaccccacctgcaggaggagggctggaagggagctcatgtttctcacacgttgttcaacaygtttatcagcaaaccaagctgtggagagaaaagcattgatgctgacatgtcagcattatgccataagcagcgctgcaactttcaggttgcccaagtcacattaatttcataaaaataacacaagaaaatgacttcctctcaaaacacaacctacagaatagcacttagcatcaatcatggctccattaagcccttacggcatcctgcaggacttgaaactttcccctctgcaaatgcacccagtgttcatctcacagttttacagtcagtgtatccaaatcacagctgccctgcaggaa

SEQ ID NO: 84079 - DNA, 600 bp, Chicken  19866894381135_2
agtcacattaatttcataaaaataacacaagaaaatgacttcctctcaaaacacaacctacagaatagcacttagcatcaatcatggctccattaagcccttacggcatcctgcaggacttgaaactttcccctctgcaaatgcacccagtgttcatctcacagttttacagtcagtgtatccaaatcacagctgccctgcaggaacctaaaaatcaggaaaagtacctcaagaccacccgatgccaggaggcagggcttgctgtcccctcagcccccagccacggcccagccccactgytggagtgtgtggggcggccaggcctggtactgcagggtcaaacacagaccctggggtgtttccaagcttctcatcagctcttgcttagcagaaaaccttccacaaccacagcacattacaaaatacagcagcgggggaagtacttggcattccctagagcattctctcccgaagtgaagctgttgtgtatttgcaacgccacgctggaaggctgggcagtgagggcaggccgctgccagccatgtcagctctggacacgggcaggttgctgcgggcacccgctctgtcagcctgggatgt

SEQ ID NO: 84080 - DNA, 469 bp, Chicken  19866894381164_1
tggcataacttcaagagcagttcagtaagtagttcacaactgctgaccatctggctgttagatctaagagggaactgttaatgttagagctagaacattgccaagctgcaacaaaagcggcatggcagaagtgcatatgggacctttttaatagctctgatagaaatcactgcaattgttttatcttcctattcactcaggtaatgtcacattatttctggtgccaccacagccagaagcactactgaggaagaagttcccttgttcaactatataattagacacagttccccaaagctyccaaactaaggttatatctcaatagcatactggaaaaaaagacaaatttttgtgtaccttcttggtcattccttttcaaaagcagtgggaaagacatagcctcatttagcacagggttaacctggggttaaaggcaaggtaatttaaatgggtttctgccctgtattat

SEQ ID NO: 84081 - DNA, 599 bp, Chicken  19866894381168_1
  misc_feature (1)..(149): n is any nucleotide
nnnnnnnnnnnnnnnnnnnnnnnnnnnnnnnnnnnnnnnnnnnnnnnnnnnnnnnnnnnnnnnnnnnnnnnnnnnnnnnnnnnnnnnnnnnnnnnnnnnnnnnnnnnnnnnnnnnnnnnnnnnnnnnnnnnnnnnnnnnnnnnnnnnnnccatgatttcttctgcttgacttcctcctccttaaaaacatggtaagagatagtccttgcctgaagaattcataccagagacattcaaaggagcaagagaatgttaacattttatacttatacaggctattctatccacaaagaatgaaartgtctgttcacaattaagagcagagcatgagttcaagactgtattactgaccatgctaargattttgggcaattggtttccctttgaatacctcattcaccccctcttctacactattccgcaaggatgcagcatgaattcaaagctttgagttgctgcactgagatgtgaaatgttatttactgtattaatrtttttgcctttgaccattactgcaatcttgtctcatcaaagctcaccccaaagatatatgttgtgtcatatatttatacgagggtaacagcatgcaccaaagacaa

SEQ ID NO: 84082 - DNA, 599 bp, Chicken  19866894381168_2
  misc_feature (1)..(89): n is any nucleotide
nnnnnnnnnnnnnnnnnnnnnnnnnnnnnnnnnnnnnnnnnnnnnnnnnnnnnnnnnnnnnnnnnnnnnnnnnnnnnnnnnnnnnnnnnccatgatttcttctgcttgacttcctcctccttaaaaacatggtaagagatagtccttgcctgaagaattcataccagagacattcaaaggagcaagagaatgttaacattttatacttatacaggctattctatccacaaagaatgaaartgtctgttcacaattaagagcagagcatgagttcaagactgtattactgaccatgctaargattttgggcaattggtttccctttgaatacctcattcaccccctcttctacactattccgcaaggatgcagcatgaattcaaagctttgagttgctgcactgagatgtgaaatgttatttactgtattaatrtttttgcctttgaccattactgcaatcttgtctcatcaaagctcaccccaaagatatatgttgtgtcatatatttatacgagggtaacagcatgcaccaaagacaaactggaggtctacaatataggcttattgtctacaggatataaaaagagagaaccagacac

SEQ ID NO: 84083 - DNA, 600 bp, Chicken  19866894381168_3
aagagatagtccttgcctgaagaattcataccagagacattcaaaggagcaagagaatgttaacattttatacttatacaggctattctatccacaaagaatgaaartgtctgttcacaattaagagcagagcatgagttcaagactgtattactgaccatgctaargattttgggcaattggtttccctttgaatacctcattcaccccctcttctacactattccgcaaggatgcagcatgaattcaaagctttgagttgctgcactgagatgtgaaatgttatttactgtattaatrtttttgcctttgaccattactgcaatcttgtctcatcaaagctcaccccaaagatatatgttgtgtcatatatttatacgagggtaacagcatgcaccaaagacaaactggaggtctacaatataggcttattgtctacaggatataaaaagagagaaccagacacaaggcagatgtcttttgggttccacaatttcaggtttttatggttaactaacagtgctcataatcagcctgatatttctgtgtatcgaaattattctaccactttagcagatgatgtagcacattaatttttat

SEQ ID NO: 84084 - DNA, 600 bp, Chicken  19866894381181_1
cgctgggaggaaaggttgattgctgctgctctattaaaatactaattattttatgaatggactttaaagacagatttcacatgacactttcagttgctgtgcttacagtttccttctttgtgaagcaaagcctactgatgtgcttttaaaaatgatgtttatcccttctcaccttgattctaaatctttcttgagatttgtattttcaagcaaaagctgctcattcctggctttggtttcaacaagctgattctgaaaagactgcaacatacagtgtgttagttcttttatttcattcaytccataatcaacacgcttgaatacgttcaagcatgtcaggtgttaagattcccatttgctttatatagtaagacagcataggtgaggaaacagacctcactaagatcaagagcctgctgtagtagcccacaggtagagaagcagagaactcacagcatagtactgaacctttgcataatgagatgaagacagtgaatgctgcccagagagtttacaagctctgaagacaaaaacgagcagacagaaaccaaacacacatgcatttttatgtggttcttcaggggttaccatttagtgatc

SEQ ID NO: 84085 - DNA, 600 bp, Chicken  19866894381181_2
tatgtggttcttcaggggttaccatttagtgatccacatggacttattcttagcagttccataccgtgagcagcgctctgtaattcggagtagcatctagatttaagaatttttctttgctttttacttctctttgtatatcatcttcagcttttttatattgcctattaggaaaaataaatagttccagcttatttcaattcaattgccacagaaatctaaggttgtttattttgcaggtacacgtgacaagatttccacacactgaactatgatcagaatagaaacactgtcattggkcttctctattattctgggaagctgtttcatatactaactgagtacgtttattcctcaggagacattacagtgcaagcaaatccaatttcagctttctagataacaatctcaaatgatgagaatgtctctcaggtatctgcttgttgctctgtatcatgtaagcaacatgatggagctgagaagctggtattcctttttttttcccttctttccctttaggaaaccagtgaattgagcatagctaatgcagtagtgctgcctgtaaaccagtgcaaaggggaaagtggaaaaacaaacaaa

SEQ ID NO: 84086 - DNA, 600 bp, Chicken  19866894381181_3
ctaactgagtacgtttattcctcaggagacattacagtgcaagcaaatccaatttcagctttctagataacaatctcaaatgatgagaatgtctctcaggtatctgcttgttgctctgtatcatgtaagcaacatgatggagctgagaagctggtattcctttttttttcccttctttccctttaggaaaccagtgaattgagcatagctaatgcagtagtgctgcctgtaaaccagtgcaaaggggaaagtggaaaaacaaacaaaggattatagctcatgtgtctaaatacaacgccytcctggctgcactggcctgagtgagcagctgctcagactgactgagagctatttccaggattaatccaaacttccaacaccattacagtccttggctgttccttacattttagtgacatctagaaaacagaacgtttgccgctccaagttttaacaacagcaaggagaaagaaaactttgagcagtaggaccatgaggcattagatgagactcaccttagctcctttttcatttgattaatttgagattcataataatcaattaggcaaagaaacctggaaaaggaaaaatggtattttg

SEQ ID NO: 84087 - DNA, 600 bp, Chicken  19866894381190_1
atacaacagatgcctttcatgcagcacatctttgtggattcttcatttctaacacctctttgtatcaattcctggtatatgtgaggtctccttgaggtgtttgtccatcacactgctcaggattggctttaggtgagcatcctgcatggccatcagcccaacctgtgctcagcaaagtgggcgcagtgaaggaggggcatttctgctgtgtgtaacagaagggcagcaccgttccttgctggcaggtgggcctctgcaggtttccctgcatcccagccttgttttccctaactggaaccrgagctgggtcactctgctgatggtgcagtgagagccatgaggtgtttctctggctgagatctgagcgatgtttggttgccgtcgcagtgacagaacgctttctccatccctcccaaacacccacaccagaaaaaggtctctgaagtgatgtccgtgatccaacgtggcagcagtgctgtccgtgtccctgcaggtcgtgtcagctgtgatttctggctggtggtggggtggctttgaggtttaattggtcttaagggcactgccaccgctgccttccctgcctgccttgatgtcagcttg

SEQ ID NO: 84088 - DNA, 600 bp, Chicken  19866894381192_1
attaacaaacctctgaaagacagaaaccatatgcctgtatttcctttcatttagaggtaattccttactgtgagcatttgcattcaatgtggcacttttttatgataacagaggtttcacagaagattaaagattttctaactggatatgtttagggagacacagtcactgagtagaagtaaaagtacattagcaaaaaaagaaaacagcttttggtgggtttttgtttgtttgtttgtttgttttatttttttaagttactttccaataatgaaaggaaacaatttctccataactacrcatgcttttcttatgaaggagcagtgagtctgctcacttctatttgctaggaaacaattatataaacagaaataaatcctaccgaattattgtgaaatagccttaaaaatagataaagcacaagtgaaatccttagaagaggtgatgcaggagtaaaactggagggtgaaaactgaaggaattaataaggtgttcttagaacttgataaggtgaagctgacagcagtctgtaccaccttagcaagttaaaggaaaaaaggtttttttttccttcagcacagactccttcaaatatacatg

SEQ ID NO: 84089 - DNA, 600 bp, Chicken  19866894381200_1
cgctcgttacaatggtactaaaactcttccaagttgttattttacctattccacttcatataaagatacgaggatgtgtatctaaaagagctgctgtaaactgaagcagggcgtggatttatggcacactaggcattcctgaaaaattgctcttgagcatgcccttactgtgactccactctcacttcagggcagctaccttgcttgcactaccaaatgagagcatagtctcaggcagccactggccagcagcttgtctgtacgaatcctttgtataagtacttcagttactatgcagtrtcttgtttgaggatccatatatacacagaatcrtacagacctgtaagggtttgaaaggacctcctctagagaccgttragtccacacaccccccctgctaagtacatgctggtgcagatttttaaggggattcaggcatttaacaggctggcacaaagcaagaaaacgctaagtcactacgcatgctacaacaagggcaactcatttctttggcttaactaacggatgtggcacaggtcatttcaaagcacagccccacctaccccttgaaccttttgagttatccaatgctaagctact

SEQ ID NO: 84090 - DNA, 600 bp, Chicken  19866894381200_2
ttgttattttacctattccacttcatataaagatacgaggatgtgtatctaaaagagctgctgtaaactgaagcagggcgtggatttatggcacactaggcattcctgaaaaattgctcttgagcatgcccttactgtgactccactctcacttcagggcagctaccttgcttgcactaccaaatgagagcatagtctcaggcagccactggccagcagcttgtctgtacgaatcctttgtataagtacttcagttactatgcagtrtcttgtttgaggatccatatatacacagaatcrtacagacctgtaagggtttgaaaggacctcctctagagaccgttragtccacacaccccccctgctaagtacatgctggtgcagatttttaaggggattcaggcatttaacaggctggcacaaagcaagaaaacgctaagtcactacgcatgctacaacaagggcaactcatttctttggcttaactaacggatgtggcacaggtcatttcaaagcacagccccacctaccccttgaaccttttgagttatccaatgctaagctactgacaaatagccctttcaacatgcagaaacagta

SEQ ID NO: 84091 - DNA, 600 bp, Chicken  19866894381200_3
tatctaaaagagctgctgtaaactgaagcagggcgtggatttatggcacactaggcattcctgaaaaattgctcttgagcatgcccttactgtgactccactctcacttcagggcagctaccttgcttgcactaccaaatgagagcatagtctcaggcagccactggccagcagcttgtctgtacgaatcctttgtataagtacttcagttactatgcagtrtcttgtttgaggatccatatatacacagaatcrtacagacctgtaagggtttgaaaggacctcctctagagaccgttragtccacacaccccccctgctaagtacatgctggtgcagatttttaaggggattcaggcatttaacaggctggcacaaagcaagaaaacgctaagtcactacgcatgctacaacaagggcaactcatttctttggcttaactaacggatgtggcacaggtcatttcaaagcacagccccacctaccccttgaaccttttgagttatccaatgctaagctactgacaaatagccctttcaacatgcagaaacagtactgtggaggtactgggagacaccgaaaaagcatactcctttttaa

SEQ ID NO: 84092 - DNA, 600 bp, Chicken  19866894381201_1
gaattataaacatccatgtgtctctcatttgaatgcctcctcgagtttccttgacagctgggggagagagaggctcccaggccttccagcagagcccgagccaccgacacggctctcgcaccgacgcagcctttgtgggaacgctgctctgccggctccgctgacctctgtgaggtggtggcaggcagcagggctgccaggaggagaagcacagaggccaggccatgaggcatggccggaggggaggctgggggagtgcagggggtgggacagggcctgctccgtcaggaggctgtgcayggcgtggggctgagctgagcgcattcaggcctggcatgaggggaaagccagggaagcaccaagcatccctgcagctcacatccctcctgctctccctgctcatycrctgtgcatcctcccactgccagggccctcccaccactgtgctgaattacgaggtgccgctgcttggactttgttcgaggtgatgcagagtctctggcatcaggaacacagaaygcttgcttggaatggagcaaaaagtctgcacacaaacatctttctggtgctcagaggtgtgcactcaggctgcaggcaccc

SEQ ID NO: 84093 - DNA, 600 bp, Chicken  19866894381201_2
cgacacggctctcgcaccgacgcagcctttgtgggaacgctgctctgccggctccgctgacctctgtgaggtggtggcaggcagcagggctgccaggaggagaagcacagaggccaggccatgaggcatggccggaggggaggctgggggagtgcagggggtgggacagggcctgctccgtcaggaggctgtgcayggcgtggggctgagctgagcgcattcaggcctggcatgaggggaaagccagggaagcaccaagcatccctgcagctcacatccctcctgctctccctgctcatycrctgtgcatcctcccactgccagggccctcccaccactgtgctgaattacgaggtgccgctgcttggactttgttcgaggtgatgcagagtctctggcatcaggaacacagaaygcttgcttggaatggagcaaaaagtctgcacacaaacatctttctggtgctcagaggtgtgcactcaggctgcaggcacccaggagggtgggcagaccccccagccccagcaatgcagctttgccctgacaggcacagtgagctgctgctgggaggtgcaggcaggacgacgtgggcaccggggg

SEQ ID NO: 84094 - DNA, 600 bp, Chicken  19866894381201_3
acacggctctcgcaccgacgcagcctttgtgggaacgctgctctgccggctccgctgacctctgtgaggtggtggcaggcagcagggctgccaggaggagaagcacagaggccaggccatgaggcatggccggaggggaggctgggggagtgcagggggtgggacagggcctgctccgtcaggaggctgtgcayggcgtggggctgagctgagcgcattcaggcctggcatgaggggaaagccagggaagcaccaagcatccctgcagctcacatccctcctgctctccctgctcatycrctgtgcatcctcccactgccagggccctcccaccactgtgctgaattacgaggtgccgctgcttggactttgttcgaggtgatgcagagtctctggcatcaggaacacagaaygcttgcttggaatggagcaaaaagtctgcacacaaacatctttctggtgctcagaggtgtgcactcaggctgcaggcacccaggagggtgggcagaccccccagccccagcaatgcagctttgccctgacaggcacagtgagctgctgctgggaggtgcaggcaggacgacgtgggcaccgggggag

SEQ ID NO: 84095 - DNA, 600 bp, Chicken  19866894381201_4
aggccatgaggcatggccggaggggaggctgggggagtgcagggggtgggacagggcctgctccgtcaggaggctgtgcayggcgtggggctgagctgagcgcattcaggcctggcatgaggggaaagccagggaagcaccaagcatccctgcagctcacatccctcctgctctccctgctcatycrctgtgcatcctcccactgccagggccctcccaccactgtgctgaattacgaggtgccgctgcttggactttgttcgaggtgatgcagagtctctggcatcaggaacacagaaygcttgcttggaatggagcaaaaagtctgcacacaaacatctttctggtgctcagaggtgtgcactcaggctgcaggcacccaggagggtgggcagaccccccagccccagcaatgcagctttgccctgacaggcacagtgagctgctgctgggaggtgcaggcaggacgacgtgggcaccgggggagctgctgccaatcgttctggcagaagagaagctgctacagatggcagctgccagcagggaacgaacagcaaaaacagaggaatccgcgacagaaattatggagagagagagaga

SEQ ID NO: 84096 - DNA, 600 bp, Chicken  19866894381203_1
ttaggcttatttttaggtatgcaattaagcttgctgaagagccacacagttaatcatttcatttatcttttgactattccatgtaatggttgttcaaagtgttcttaggagcggcccaactcagtatttttggcagtatttttggctctggctgtcttagctttcaagtggtgatataaaaattaaagacaaagtacagactgacaaatatcttttacgaatatctcccaaagcctttctgaagcttggaaagaatgatgagatgttccttggagtcattgctattcaaatacagaatcyttttcctcctggaatatctaatgtaaggcataaatggagattcacryttttctcctcagatcttggagtggattgaaggaaaggagagaaatataagagccctgctgtccacaatgcatactgtcctatgggcaggggagaccaagtggaaacctgttagcatggcagatcttgtaactccagagcaagtgaagaaggtctaccgacgggcagtgcttgtcgttcatcctgacaaggtaagcttttcctagttcccattgatcagaaattgtcactgttctcaaaaataaggttaattat

SEQ ID NO: 84097 - DNA, 600 bp, Chicken  19866894381203_2
cagttaatcatttcatttatcttttgactattccatgtaatggttgttcaaagtgttcttaggagcggcccaactcagtatttttggcagtatttttggctctggctgtcttagctttcaagtggtgatataaaaattaaagacaaagtacagactgacaaatatcttttacgaatatctcccaaagcctttctgaagcttggaaagaatgatgagatgttccttggagtcattgctattcaaatacagaatcyttttcctcctggaatatctaatgtaaggcataaatggagattcacryttttctcctcagatcttggagtggattgaaggaaaggagagaaatataagagccctgctgtccacaatgcatactgtcctatgggcaggggagaccaagtggaaacctgttagcatggcagatcttgtaactccagagcaagtgaagaaggtctaccgacgggcagtgcttgtcgttcatcctgacaaggtaagcttttcctagttcccattgatcagaaattgtcactgttctcaaaaataaggttaattatgaagtgctaaatatgctcgctcaatgtattggtacaaacaartgtg

SEQ ID NO: 84098 - DNA, 600 bp, Chicken  19866894381203_3
agttaatcatttcatttatcttttgactattccatgtaatggttgttcaaagtgttcttaggagcggcccaactcagtatttttggcagtatttttggctctggctgtcttagctttcaagtggtgatataaaaattaaagacaaagtacagactgacaaatatcttttacgaatatctcccaaagcctttctgaagcttggaaagaatgatgagatgttccttggagtcattgctattcaaatacagaatcyttttcctcctggaatatctaatgtaaggcataaatggagattcacryttttctcctcagatcttggagtggattgaaggaaaggagagaaatataagagccctgctgtccacaatgcatactgtcctatgggcaggggagaccaagtggaaacctgttagcatggcagatcttgtaactccagagcaagtgaagaaggtctaccgacgggcagtgcttgtcgttcatcctgacaaggtaagcttttcctagttcccattgatcagaaattgtcactgttctcaaaaataaggttaattatgaagtgctaaatatgctcgctcaatgtattggtacaaacaartgtgt

SEQ ID NO: 84099 - DNA, 600 bp, Chicken  19866894381203_4
cacryttttctcctcagatcttggagtggattgaaggaaaggagagaaatataagagccctgctgtccacaatgcatactgtcctatgggcaggggagaccaagtggaaacctgttagcatggcagatcttgtaactccagagcaagtgaagaaggtctaccgacgggcagtgcttgtcgttcatcctgacaaggtaagcttttcctagttcccattgatcagaaattgtcactgttctcaaaaataaggttaattatgaagtgctaaatatgctcgctcaatgtattggtacaaacaartgtgtagaaacattccagccttggttaaagcttttagtcctcttgggactgcatctctttgctctgtcacatcaggaggctgtcagctctaaggagcagaaaggctgaagagccaggaagctgttaagctgttaacaaggtcagaaagcctcagcagtgtttttttctcatcaaagaataagtgaaaaccatttgtggaaagtgaacaatatgtgtttgagaatctagctgcacagaggtctgctgctggtagtctcccttgatagatgtgatacccctgtttctgcttttgtttcaggc

SEQ ID NO: 84100 - DNA, 600 bp, Chicken  19866894381203_5
tcacaaatgtcacagatcaaccaaactctggctggaaattcagaagtttcagaaaacaaagagcctaatacttatcatgaagaacaagagaaaggtttccttatgcttgtttcaagaatcctgagctcaaaaggaactctagccatctggcttgtcatctgagagccacagggctacagttccttgtacctttttttttcccctttggattccagtggggtgagagagaacacattctgggaaaaggtgggattgttctgtctctgacacagtgtagctggtgaatttcctacttttttktgtgtgtgtgaaatgtgataatggcaacacttcacttgagttctgtaactgctggtgaagcccagactttgatgtattttcttcctcggtttggatcaaacttcatcaaatttaagtgctcagatgtggtttaggcacacttctaacagtcaccatttgctgcttagttgctcatatagcatagtatgcctgagtagagacaaagctgaagcctgggtagatcactgtggcagcttactgctgctttatgcattaatactgtacttcacctcacagtccagcagtgaaatgtgtggaaaa

SEQ ID NO: 84101 - DNA, 600 bp, Chicken  19866894381208_1
tccaggacactggagttatacatcgcaatttggtgaggagagaaagctgtttgacattaaatcaacacagagcataatcagtctgcagcaaataaacaaactcactatctctctgtgaagctgcccagggcaaggctaagcagcatggggaaatcccaggcttcatggggctttggaagcagaaagctgagctaactcagctgtgacacaagagatcaccatgaagagcacatggtctggaaaacagctcaactgcgtaggtgggtggcagcttgaaaatgaatgagagaggtctgggakcatgaacgactgatgttaatagcagttggacttaagttcacggggagaaattattgagcttactcagacttgcataggaggagattgcattcaagaagaaagtcctgggccccagcctgcagcccttgtacttgggctgctgaacagtttgactctgctatgctgtttgattatcactgcagtatacctcctacctaatacactgccagaacatggacatgaactgtccacacactgcatggacacacagggcaaggcagcttctgggtcagaccgtgtctgcaatagcaaatgaaggaa

SEQ ID NO: 84102 - DNA, 600 bp, Chicken  19866894381214_1
attatactgcatgaggctgtggggctgaaaattgcaataatccctgcagagagaattcttcccaagtgctacctatgtattccagctcggtgctgggataactgtggccttctgtggtctgatcatctgtgattgcacaaagacagcatctcagagcccaaccctgcaccaagagccctaacgccatgtcttgcattaacatggcagagcatccctgctttgtggctgccaagaagccacagctggccaagtgacttccaccagctgcagccctccaccagaggcttcagtggagattcrtgcttcccatggacacatctggggtaggagaattcctattcataatccttggtaccagcaatgctgagaacaggtcctgctgcaatataatcaacccaagcacaaatcatgtgtctggaggtgcccaactgacttgtaactgacatcaaaaatgcagggagaaacatgcatatgcaggagaaaatacaaggttttctgccaaatactagccctgcattaaagtgtttctcttgcattcaggatgtgttgcttttctattaccgtgtgaagaatcagatcttaatttaccaagaaaatgct

SEQ ID NO: 84103 - DNA, 600 bp, Chicken  19866894381216_1
taaatgttatctagctagccctcagtgtttgtacagatctgagaggaataatagaggagccaaaaaacaagactgcaattttgataccattgcatataagatatttccatgactggcaacactgtgttactcccaaatgctgcaaataacaggctgaaggaatctgtagctccagtgaatcatgtcagtatcattcgcttctctgctcaaatcaggtggacagcatacaggggttgtaacaggtcaaatacaaattccagacagtcttacaaagctatgcttaaaaaggataagcatttygtagtcaaaaagctgtttctatgccagatttggaatgctgagtaaccaacatgaagaggtggattatcattgtgattcagtctaagaacttggaatgcttacaggttaccagagaaaaattacagatggtcatgcatttgcaccccacctccttaaaatgctctcttgaggttgtcaaaagaaagtatactttttgataagtgactttgacttaagtgacatttgctggacagtgggttgatttttttacaaaaaaagaatatgggagttatatgctgtaatataggtgtcttaacatca

SEQ ID NO: 84104 - DNA, 600 bp, Chicken  19866894381220_1
atggcctttgcacccagcctacatcagtggtggtgggtgtgctcagccctagcagtgcttggtagagcactcagaagctatggaggtttggagagcacctacaaataacattaagtaaacaaaccaattattatgtgtgatcaacatgtcaggttttcctaactggtagcagtccataacaggtatatccacaggacaggtctcagcacactttagcctgaagcctattaacacagttgtccaggaagacgttgcttgagagttggggaacataacagcttgctgtaagttcagctttcygtgatgttgtgcgtatcatcctacagcccctgcagggttttgattgatgccatgtaaacactttcaatctccagatctcggggattggcggtttgtttattcaccttccactccctacatctgggagtaacattttgcttacagaagtcccacaccagcttattcgcctcataaactgaacttacataccagaaattatacaaattctctgagcatcctgggagtttcactgaagtctcatgtaagagccacagaaaagcttgttggtattaccaagatccagatgcaaaccaagttgga

SEQ ID NO: 84105 - DNA, 599 bp, Chicken  19866894381221_1
  misc_feature (1)..(43): n is any nucleotide
nnnnnnnnnnnnnnnnnnnnnnnnnnnnnnnnnnnnnnnnnnnccatacaaacagaagtgcccatggtagtcttctaacacttgactatatcaaagcctttagtgatagagagtattttatcttgatttatttggttagagacactgacaaaattaattgttgacaaaaaaaagaagttccaactactttgaagactttttaaacatttttattgctattattattttgctctaagcaaacacatatagagcctttggcttaaatattaagcaagcaagcaagttctgcagtacaagtgmacgtatgctmtatctgtacagaatatctattacactttttgtagcttctgaactgagactttcagtcccagattttagtaaccaactcctarattaatttatacccaaagagaagttgttttttctgaagtagaataattcaaaccgagtgctttgtcagttcctagaaaatgggagacaactcccaaatacatccacacacatagagtctgctcatgcttcttattttgcgccccctcccacctctgcctggttgctgaagttgcagtttgattctttttttttcagattacaatgac

SEQ ID NO: 84106 - DNA, 599 bp, Chicken  19866894381221_2
  misc_feature (1)..(33): n is any nucleotide
nnnnnnnnnnnnnnnnnnnnnnnnnnnnnnnnnccatacaaacagaagtgcccatggtagtcttctaacacttgactatatcaaagcctttagtgatagagagtattttatcttgatttatttggttagagacactgacaaaattaattgttgacaaaaaaaagaagttccaactactttgaagactttttaaacatttttattgctattattattttgctctaagcaaacacatatagagcctttggcttaaatattaagcaagcaagcaagttctgcagtacaagtgmacgtatgctmtatctgtacagaatatctattacactttttgtagcttctgaactgagactttcagtcccagattttagtaaccaactcctarattaatttatacccaaagagaagttgttttttctgaagtagaataattcaaaccgagtgctttgtcagttcctagaaaatgggagacaactcccaaatacatccacacacatagagtctgctcatgcttcttattttgcgccccctcccacctctgcctggttgctgaagttgcagtttgattctttttttttcagattacaatgactgtaaaattg

SEQ ID NO: 84107 - DNA, 600 bp, Chicken  19866894381221_3
aaagcctttagtgatagagagtattttatcttgatttatttggttagagacactgacaaaattaattgttgacaaaaaaaagaagttccaactactttgaagactttttaaacatttttattgctattattattttgctctaagcaaacacatatagagcctttggcttaaatattaagcaagcaagcaagttctgcagtacaagtgmacgtatgctmtatctgtacagaatatctattacactttttgtagcttctgaactgagactttcagtcccagattttagtaaccaactcctarattaatttatacccaaagagaagttgttttttctgaagtagaataattcaaaccgagtgctttgtcagttcctagaaaatgggagacaactcccaaatacatccacacacatagagtctgctcatgcttcttattttgcgccccctcccacctctgcctggttgctgaagttgcagtttgattctttttttttcagattacaatgactgtaaaattggctcttctgtttccgtcatcctttccatcttaatttttctgtattttctccgctggcacagaataatcgccaaaataatggca

SEQ ID NO: 84108 - DNA, 600 bp, Chicken  19866894381223_1
ttttaacacctctttatataggtaagcataaaagcttgcagttccagtggctgtgtaaatggttagtgtgcctgtccatccaaacaagtgtcaagaatcaggaaataatcaccctggggagaggaattttaggaactgagaggataggttgcagggcacctgcatggtaaaactgtttatttggcaatacagaggaagaactggtccttggatgttgtgatcccatcacagcatttcaggatatgccacaaaaagacatctctgttcctttgccttacagtccatgtactgaacagctcycctgaaccatcaattacaacacacaatcagctctcctaagcaagagtgtcacagcacagccttggcaaattgcctttcctcccacttctccctcattaaagtcctcctctcttgctagatctttaattagcttgtcatcagcagtttggcttggattgaatgctctgcgttctccgaaatgaaaccatataagacagatggaacaccaaaagcagcaagagagtagggtaagaagacacttaaagcaatcagtacgtgctcgtaacctcaagggcagtaataagattcctgctggcttgg

SEQ ID NO: 84109 - DNA, 434 bp, Chicken  19866894381224_1
gaagtgagggaacacagaaaaattgttcttctgaggactgaatatgtattccctagagggagttacagcacagggcagtgaaatgctggatacagctgaaaagtatctgccccgagttcagaccaaaaggaattatttcaggatgcaatagtaataaataagttttttactcttacataaaataaaactattgggagaagacattcttgaggaaaaaaacataacttttgcaacaagcagcacgagttttcccattaccagagcgtctcaactttgcccggccagacaaacgggtatctwaatgggattcccaaaaatcagcatcagcaagggaacagactgcttccacctccctccaggccgtaagtgctatgatgcagtgcttcctctccatctgagaagctgaagtttggattgagacgctgtacaaaacg

SEQ ID NO: 84110 - DNA, 600 bp, Chicken  19866894381226_1
gattgaaataagtagaggaaaaatacctaacagtcagagctgctaatcaacgccatggtcttacaaaggaagagataataattattgatgggaatatttagaaatacagtgtaggagtcctggggtgagataacaaggcccaatccctccaaagccccccagggaacaaatgaagaagcctaattggctttttgatctcagacatctaaattacccgaattgcattgtgcaagtgcattcagcagattgcattcagcagattgcaaactggtcagccaccaaaccctgccacactgtgcrctgtgcttcaaaactgaacagcctgctgaaactgatgagacagctctcatctctcaggaggtcaaactagttgtgtaggcataggcagggggtctatctgtagtggaaaagcaaagcagcaaacaaacaaacaaacaaaacccagcaataaaacagtgcctatcaagttatagttgcacaacccagtgctactctgggctcctggcaaggcccccgtgttgtttgctattattaaccatcttgtgcaaaaaccaacccaggagccaaggcaatgctaaagtggttacaaaagtatttcac

SEQ ID NO: 84111 - DNA, 600 bp, Chicken  19866894381226_2
tacccgaattgcattgtgcaagtgcattcagcagattgcattcagcagattgcaaactggtcagccaccaaaccctgccacactgtgcrctgtgcttcaaaactgaacagcctgctgaaactgatgagacagctctcatctctcaggaggtcaaactagttgtgtaggcataggcagggggtctatctgtagtggaaaagcaaagcagcaaacaaacaaacaaacaaaacccagcaataaaacagtgcctatcaagttatagttgcacaacccagtgctactctgggctcctggcaaggrccccgtgttgtttgctattattaaccatcttgtgcaaaaaccaacccaggagccaaggcaatgctaaagtggttacaaaagtatttcacctgtagggtagacaaatggggaggttgccttgaacactcattcctctgtcaggcccaaggattgaggatgcaacgcagtgagagctcacattgggaagttttgtttccaactaaaaggtcaaactgaagaaactgatggacccagagcagcgccaagacagctttccaatttgttccagttcacttacatccttgccaagggaagaagaag

SEQ ID NO: 84112 - DNA, 600 bp, Chicken  19866894381235_1
aagacaagcaacaagatgaacagagaaaggtaaaagagacaagtcacctctgtgcatctcacagaaaaaaaatcaatttcacaaagctttcctcccaatagcaggataaatttagggtaggggtgatcacaaaacatgaaaagattaacaactaatgaagaaagcagtgagtagtacagcctcctcatcaagtatgcagcatgaaaaagataaccagacaaaaaaaatctgaagataattgcagatatggaatgctgaataatgatactttatccttgttctaacaccacaataaggagytagggcacataagcagagaagacgtactgaacatgcctccagttcagtccaaaacagaaaaggtgaggggaatgtttagccttgtttttatgttactttgatcattttttctttttgaagcagagacaggacagagataaggttgttggaagaatctgttaaaaagattggaatcaagctgttactttaatgatagtagtgttagcgtgcactacctgcatagacttctctttaaacataactacagatacactttgcagtcagaggtctttgtaagggcttgacaaagcattaagtatg

SEQ ID NO: 84113 - DNA, 599 bp, Chicken  19866894381236_1
  misc_feature (1)..(144): n is any nucleotide
nnnnnnnnnnnnnnnnnnnnnnnnnnnnnnnnnnnnnnnnnnnnnnnnnnnnnnnnnnnnnnnnnnnnnnnnnnnnnnnnnnnnnnnnnnnnnnnnnnnnnnnnnnnnnnnnnnnnnnnnnnnnnnnnnnnnnnnnnnnnnnnntgctctggaagaaccgggcaaaaataaataaataaataaacaaactgcagaatgatctgcttaagtctattcacaaagatacaaggataaccaaactccaggcttcttagatttttacctcatctagatacaaaaaacactttcaactcaatgaarttttccacccccaatttaagtctgacaaatcaaaaatattaaactacttcattcaaccacgtgcactatgctataaggacaagcatatccataaaaggggtagcaggatgcttctccaatgagcctgcagactgcttctgaagcaatgtttataaaatgaacccacaatcactcacttctcatgctacttactttaggatgaatttttctcctcagcttactgctatgtttcataaaggatgcaaaataccccatgattatcgattaaatagaactcaagaaaaaaaaaaaaaggaaca

SEQ ID NO: 84114 - DNA, 600 bp, Chicken  19866894381243_1
gagaaaggactcatctctgttgatgctagatgcccttgtctgggctacaaaagcactagtctggctttctggagcccctgcactgcactctgagcatccaatctcatgaattaagatgattttagcccttcctttgccaggtcagcgtacggcagccgaacagaaggtctgtcagataaggtgacccattttatatgagatataagttcagtccattactatacaacagtcttcacttatacaatggagatgggaatctctaatgaatcatagaataaaagaatcatagaatggtttggkttggaagggacctttaagatcacctagttccaatcccctgctataggcaggaacrcctccctctagaccaggttgctcaaagccccatccagcctggccttgaatgctttcaggattaactttgacattaatcatatttaaatagagcaaaaatgcaggaaagtctgtttgaatgccccttcctgaaaaatgacttcatgacaacctcactaggccacctgttccagtgtctcaycacccttactagaaagaatttcttcctgaagtctagtctagatttaccctcttccagtttaaagc

SEQ ID NO: 84115 - DNA, 600 bp, Chicken  19866894381243_2
ctagtctggctttctggagcccctgcactgcactctgagcatccaatctcatgaattaagatgattttagcccttcctttgccaggtcagcgtacggcagccgaacagaaggtctgtcagataaggtgacccattttatatgagatataagttcagtccattactatacaacagtcttcacttatacaatggagatgggaatctctaatgaatcatagaataaaagaatcatagaatggtttggkttggaagggacctttaagatcacctagttccaatcccctgctataggcaggaacrcctccctctagaccaggttgctcaaagccccatccagcctggccttgaatgctttcaggattaactttgacattaatcatatttaaatagagcaaaaatgcaggaaagtctgtttgaatgccccttcctgaaaaatgacttcatgacaacctcactaggccacctgttccagtgtctcaycacccttactagaaagaatttcttcctgaagtctagtctagatttaccctcttccagtttaaagccatttccccttgtcctgtcactacatgtccttctagaaagtccctccgcagcttt

SEQ ID NO: 84116 - DNA, 600 bp, Chicken  19866894381243_3
cttatacaatggagatgggaatctctaatgaatcatagaataaaagaatcatagaatggtttggkttggaagggacctttaagatcacctagttccaatcccctgctataggcaggaacrcctccctctagaccaggttgctcaaagccccatccagcctggccttgaatgctttcaggattaactttgacattaatcatatttaaatagagcaaaaatgcaggaaagtctgtttgaatgccccttcctgaaaaatgacttcatgacaacctcactaggccacctgttccagtgtctcaycacccttactagaaagaatttcttcctgaagtctagtctagatttaccctcttccagtttaaagccatttccccttgtcctgtcactacatgtccttctagaaagtccctccgcagctttcctgtaggccccttcaggtactgaaaagcctctatgaggttcccctagagatttctcttctccaggctgaagagcttgagctgtctcaacctgtccctgtaaggggaggtgctccggccctctcatcatctttgcggcccttctctggacacactccaacagctaatggcatccagacat

SEQ ID NO: 84117 - DNA, 600 bp, Chicken  19866894381261_1
tgctcttgacttgctgcactgaaggccctatcccagacccagtgagatcaaggacttagtgcactgtgtgaattcaagtgttttggtgttctgtgtatgaacagatttatgttccggtgagttgtatgtttttccactccttggatgggcatgtttgtgtacctctgcaaatggcatacatgttcccttctccttatcatcagtatcccagcttgcagtacatttttatcaaagccttcagtgtttacttctggatctgagatcatacaagcattctacggggtaaaaatttttttgtgyatatagacatgttgctgacatttttgcagaattcagcatgcctgcacaatgtttttcataatttcttctgcattcagttgtgaaatcaagggaaaacgcctcttatgttgtgtcagtaaaatctgtgcctaaggcagtccttgtaagacagatggaatcttcagtcttggtgtactgtagcatccagttacttgattagatttctgggttttaggattgcagcgctacccagattgtattggaatgaagtcagggatggcttaaacaatggaaactacagtagaagtgttcataattgtg

SEQ ID NO: 84118 - DNA, 600 bp, Chicken  19866894381261_2
aaaacgcctcttatgttgtgtcagtaaaatctgtgcctaaggcagtccttgtaagacagatggaatcttcagtcttggtgtactgtagcatccagttacttgattagatttctgggttttaggattgcagcgctacccagattgtattggaatgaagtcagggatggcttaaacaatggaaactacagtagaagtgttcataattgtgcactttggaaaaggtatgaaatgagacctgagatgtattacagtttttggcatatgcaaattctgaacactgttccaaaaattaggataatyggctgattggatcttaaatatatttaagagtatcatgaagaagtaaataggaatctgtccaccagagagaacagtgttgctgcttattcttctgcacttcttcactccttaacataagttcttgatcagcatttgcatgaggcttctggtttctggtcatcagtatgaatgaaagtcacagggtaccatgagtacatctatctagttttacactgtggagtcatttttttataatatcagttattaattgggtgagagtaaaatcataaaatcacatcctaaaagcaaatcataaaagca

SEQ ID NO: 84119 - DNA, 600 bp, Chicken  19866894381262_1
gattaaaatcatgttaaaaaaagtgtctaatttctaatcttaatctgatttcatctttctgccacgttgtctttgcaatttcactactggattaaatagtcctttggtagacagttcattctccttctgaaggtacaaatacactgtatttagggttcttctttgtaagtttagcacgttgagttcaacaagctcctggctgatggaaaaaaggatatacaaatggacagcagactttatctctgtccatgaggcagtaagtacaaagattatttataccattaccatcatattaaagtraaaaaggagatgttaagttagcatacctctatcagtactgtgatttttaccaagacatccacttaatgtaccaaaattgatttgaagtgcagagtagatcaaagtaaagcactcaaaagttaggaattttaaaacagaggaaaactctgaaacagcaattctgagtcgtcatacagcaatatcctctcctcgttatctcccaacaactctatttacctgagtataaaactgtgtatgttggaagttagtttaaaatatcaaactttaaagtcagcctttgccacttggtcataatttcag

SEQ ID NO: 84120 - DNA, 600 bp, Chicken  19866894381262_2
aaggggaaatgataataatggtgtcagcatttctctaaagagctcagaagagcttttataatggaaattttgaagcaacctacatataggattcatataagctccttctgaaataaactgaaggaagaaggaggcaagaaaaagtacataatgcatactcaccatgctaaaatatgacaaaataatgattcctctactctccacatgtaccaaaagttatcatgttcaaaagtaaacagattgactactgctattacatgtgatacatatgaggtaataattacaaataacaactttatmtcatccacttcaacttgtatayccaaggctgtggtgccataatcatatcaaaaatgagacaggtgcactrcagtactaactacagcaaaggcaggattaagtcaggtaaactcctgaaaagtatcaagcctgtcccctgcttgactctgagaacaaaatccttgcattaaaatgagaagacacttttttctgacccacaacaraagtcacctcagcatgtgatggctccaattaagatttgataatctgatggaaacaatctgtgtgcagacagcgaattctgcagcagaggtagagctt

SEQ ID NO: 84121 - DNA, 600 bp, Chicken  19866894381262_3
gtcagcatttctctaaagagctcagaagagcttttataatggaaattttgaagcaacctacatataggattcatataagctccttctgaaataaactgaaggaagaaggaggcaagaaaaagtacataatgcatactcaccatgctaaaatatgacaaaataatgattcctctactctccacatgtaccaaaagttatcatgttcaaaagtaaacagattgactactgctattacatgtgatacatatgaggtaataattacaaataacaactttatmtcatccacttcaacttgtatayccaaggctgtggtgccataatcatatcaaaaatgagacaggtgcactrcagtactaactacagcaaaggcaggattaagtcaggtaaactcctgaaaagtatcaagcctgtcccctgcttgactctgagaacaaaatccttgcattaaaatgagaagacacttttttctgacccacaacaraagtcacctcagcatgtgatggctccaattaagatttgataatctgatggaaacaatctgtgtgcagacagcgaattctgcagcagaggtagagctttagcacttacgaaactcacatt

SEQ ID NO: 84122 - DNA, 600 bp, Chicken  19866894381262_4
tgaagcaacctacatataggattcatataagctccttctgaaataaactgaaggaagaaggaggcaagaaaaagtacataatgcatactcaccatgctaaaatatgacaaaataatgattcctctactctccacatgtaccaaaagttatcatgttcaaaagtaaacagattgactactgctattacatgtgatacatatgaggtaataattacaaataacaactttatmtcatccacttcaacttgtatayccaaggctgtggtgccataatcatatcaaaaatgagacaggtgcactrcagtactaactacagcaaaggcaggattaagtcaggtaaactcctgaaaagtatcaagcctgtcccctgcttgactctgagaacaaaatccttgcattaaaatgagaagacacttttttctgacccacaacaraagtcacctcagcatgtgatggctccaattaagatttgataatctgatggaaacaatctgtgtgcagacagcgaattctgcagcagaggtagagctttagcacttacgaaactcacattactgtgatagattgtcaaatatgtgttgaacttgaacagctgtctgtg

SEQ ID NO: 84123 - DNA, 600 bp, Chicken  19866894381262_5
catgtaccaaaagttatcatgttcaaaagtaaacagattgactactgctattacatgtgatacatatgaggtaataattacaaataacaactttatmtcatccacttcaacttgtatayccaaggctgtggtgccataatcatatcaaaaatgagacaggtgcactrcagtactaactacagcaaaggcaggattaagtcaggtaaactcctgaaaagtatcaagcctgtcccctgcttgactctgagaacaaaatccttgcattaaaatgagaagacacttttttctgacccacaacaraagtcacctcagcatgtgatggctccaattaagatttgataatctgatggaaacaatctgtgtgcagacagcgaattctgcagcagaggtagagctttagcacttacgaaactcacattactgtgatagattgtcaaatatgtgttgaacttgaacagctgtctgtgcacctactcttaacccacaaaaaggtgaggtgattttacttatgttacctcacagcaaaagaacattaagctgagttacttgggctttatagaatacactagagaacagaagtaaaaaactagacagtagctc

SEQ ID NO: 84124 - DNA, 600 bp, Chicken  19866894381264_1
ctcctcaggtcttttttttttttctatgtcatatgcagaaaagtcaaaacaaataaaaatgcacattttctccctttaactggtcaacctataagctacaatattacttttaatcctcttctgtttcagcagcagacctatttctatgtagcacttctgttggcaattttcctccaagcgctttgaatgtgttcataataagagtgttagtttagtgattgctgcactaatgtgatgtaaggaatgaaaagaatgattcatttcttattctaaagctttaaatacaaattaacacacacraaaaaaagccccactaatcttcttttggggagatttagatgttacagtattacacagcctacttaaaagcaataaaagaaataaccttagaaaattaagcaaaatgaattttcaattagtttcagaaaccttgacaaatgcattttgaaatgaaagagtaaaacgcaactttgttcagtataaattgaaawtttcttttgtgcctaatatagttcacttataattagccgaagattttgttctggtttgaaacaaagttccatcttgagattactatgtactgtgtacacagaactttta

SEQ ID NO: 84125 - DNA, 600 bp, Chicken  19866894381264_2
ttcataataagagtgttagtttagtgattgctgcactaatgtgatgtaaggaatgaaaagaatgattcatttcttattctaaagctttaaatacaaattaacacacacaaaaaaaagccccactaatcttcttttggggagatttagatgttacagtattacacagcctacttaaaagcaataaaagaaataaccttagaaaattaagcaaaatgaattttcaattagtttcagaaaccttgacaaatgcattttgaaatgaaagagtaaaacgcaactttgttcagtataaattgaaawtttcttttgtgcctaatatagttcacttataattagccgaagattttgttctggtttgaaacaaagttccatcttgagattactatgtactgtgtacacagaacttttatcaagaaaggctgttgctgcagggtttgctttgacagcctttatcatagctttacagaaatgaaaagtgaaagaacacagctggttttaacaatggggcatgttcaacattagaccaaaacacattagatattgcaaaatattgcacattatatttatagctccatgcaagtttttgaaattcatgctgat

SEQ ID NO: 84126 - DNA, 600 bp, Chicken  19866894381267_1
gcatagaaagcagtcagctacaaaattaagttctaggaccatccctgaatttgtctagcttcatggccttggcttggacctaattatggtaactactgcaaaagaaagtgaaagagagaaagataaaataattgcttaaattccagtagctcctggaaaaaaaaacaaccaacatttgacctttattatctactaacttctacctctaaccttttactccatttcttgcttttaatatactgttgctggcacaatagagtccaaagaaaaaatagactctggaaaaagagtgagactccrgggagacagttatttactggcagtttcacaaccacccctgcacttctaatgaaatttcatttgtcaaattcagtgcaagttggtgacaagccaagcctattctgcctgccttttagctcagaaacatccttttggtctcccactcctaagtagtgtctttatttcatttgagaagcctcatgagggaaaaaaaaaacaactgcagcttgtaattaagaagccactctgaacctctgatggaggtgacttattttagtatgaaaatggagttaaaattttgaaacagagttaacaccatgc

SEQ ID NO: 84127 - DNA, 600 bp, Chicken  19866894381274_1
actgctgtggagctgccttgcagcctggcctagacctggtccctcttagccatcacgcttacgttatttcttcccctctgctctgtcttcatatgcaactgttcacatttccttttttaatgacatgcttagctcattagcagcactcctcctttcaatctgctctttgtcctctcccagttacgaagcctttggtttcatcctcagctgaactgtccaacagatttgatggtggggctttgatttacctgctgcaattggaagacttcagagtgcagctttaaaatgctgagtagaaakgctttgtgctagcccaggtccacaacactgctgcttagaaactggaccacactgcctgagagggctgcaaggagcttgtgggtgcyaagggaatctttctggtatacattagtatgtgtttggtctgtgttgcaacttactragcccctctcctgtctctgccatgctcctgcccaggtgtgccaagtcagcgcccagcagcctgtgcagactgagctgctgatgcggtaccaccagctgcagtcccgcctggccaccctcaagatagagaacgaagaggtaagagctcatccttctccc

SEQ ID NO: 84128 - DNA, 600 bp, Chicken  19866894381274_2
cttcatatgcaactgttcacatttccttttttaatgacatgcttagctcattagcagcactcctcctttcaatctgctctttgtcctctcccagttacgaagcctttggtttcatcctcagctgaactgtccaacagatttgatggtggggctttgatttacctgctgcaattggaagacttcagagtgcagctttaaaatgctgagtagaaakgctttgtgctagcccaggtccacaacactgctgcttagaaactggaccacactgcctgagagggctgcaaggagcttgtgggtgcyaagggaatctttctggtatacattagtatgtgtttggtctgtgttgcaacttactragcccctctcctgtctctgccatgctcctgcccaggtgtgccaagtcagcgcccagcagcctgtgcagactgagctgctgatgcggtaccaccagctgcagtcccgcctggccaccctcaagatagagaacgaagaggtaagagctcatccttctccccayctcttgtgctygtgtgtggggtgtgcagtgctgagatctccctttgcagctcatgctagggcaagcccggtacttacgagctg

SEQ ID NO: 84129 - DNA, 584 bp, Chicken  19866894381274_3
gcactcctcctttcaatctgctctttgtcctctcccagttacgaagcctttggtttcatcctcagctgaactgtccaacagatttgatggtggggctttgatttacctgctgcaattggaagacttcagagtgcagctttaaaatgctgagtagaaakgctttgtgctagcccaggtccacaacactgctgcttagaaactggaccacactgcctgagagggctgcaaggagcttgtgggtgcyaagggaatctttctggtatacattagtatgtgtttggtctgtgttgcaacttactragcccctctcctgtctctgccatgctcctgcccaggtgtgccaagtcagcgcccagcagcctgtgcagactgagctgctgatgcggtaccaccagctgcagtcccgcctggccaccctcaagatagagaacgaagaggtaagagctcatccttctccccayctcttgtgctygtgtgtggggtgtgcagtgctgagatctccctttgcagctcatgctagggcaagcccggtacttacgagctgcttgtgggccagttgttttgcctccagatgtcattttttt

SEQ ID NO: 84130 - DNA, 423 bp, Chicken  19866894381274_4
ttgtgctagcccaggtccacaacactgctgcttagaaactggaccacactgcctgagagggctgcaaggagcttgtgggtgcyaagggaatctttctggtatacattagtatgtgtttggtctgtgttgcaacttactragcccctctcctgtctctgccatgctcctgcccaggtgtgccaagtcagcgcccagcagcctgtgcagactgagctgctgatgcggtaccaccagctgcagtcccgcctggccaccctcaagatagagaacgaagaggtaagagctcatccttctccccayctcttgtgctygtgtgtggggtgtgcagtgctgagatctccctttgcagctcatgctagggcaagcccggtacttacgagctgcttgtgggccagttgttttgcctccagatgtcattttttt

SEQ ID NO: 84131 - DNA, 412 bp, Chicken  19866894381274_5
caggtccacaacactgctgcttagaaactggaccacactgcctgagagggctgcaaggagcttgtgggtgcyaagggaatctttctggtatacattagtatgtgtttggtctgtgttgcaacttactragcccctctcctgtctctgccatgctcctgcccaggtgtgccaagtcagcgcccagcagcctgtgcagactgagctgctgatgcggtaccaccagctgcagtcccgcctggccaccctcaagatagagaacgaagaggtaagagctcatccttctccccayctcttgtgctygtgtgtggggtgtgcagtgctgagatctccctttgcagctcatgctagggcaagcccggtacttacgagctgcttgtgggccagttgttttgcctccagatgtcattttttt

SEQ ID NO: 84132 - DNA, 472 bp, Chicken  19866894381278_1
attaagttgccaaccactttgcagacccctaagcagagagtttaagagcatcttccctagcaacccctggcggagcagtttggctgctcagtgctggtagggatctgcagatcctgggttggggtccagtttctctgttctgacatggcaaaattgcccacaaaaacaaatgcttgctagttgcttgttatctttttggagctttatgcctcttggctggctggtccaatgatacttgagagctatgttgtggtatcattataagctatgttgagtatctaagaagctgggtgtagccarcctctttctcctccgtttgcctgaaaactttacatatatggtcatatacaatacagccaacgtgcagagtcttccacttccacaggactttaaactctcacatggttcctatgtttccactctattttatcaaatttcagccttccagacctttgctcgtttcttacttcgg

SEQ ID NO: 84133 - DNA, 599 bp, Chicken  19866894381281_1
  misc_feature (1)..(174): n is any nucleotide
nnnnnnnnnnnnnnnnnnnnnnnnnnnnnnnnnnnnnnnnnnnnnnnnnnnnnnnnnnnnnnnnnnnnnnnnnnnnnnnnnnnnnnnnnnnnnnnnnnnnnnnnnnnnnnnnnnnnnnnnnnnnnnnnnnnnnnnnnnnnnnnnnnnnnnnnnnnnnnnnnnnnnnnnnnnnnntgttgagttaatagatttttgatactgcaaaagtaatgaacaactaaagttatatctttattgcagatgacagctgtcttattactgcattttatttttggggtgacttcaaatattgggaaaatygtaataartaaatctgatgtagtgcccaagagcagtataagttttcatgaaggctgccacttcatcagtatggtagatgatgctgaacatataagaaaaatctattttacattaaagttcacatccaagtgatttaaatattgcaagttaattgttattctgctgtatatcactatcattagtgatatttcatcatcattatcatcatcatcatcattatcatgctgtacatcactaaatcattattctgctgttccttatatgtggttggcagataatttgaggtgtagtattccttt

SEQ ID NO: 84134 - DNA, 599 bp, Chicken  19866894381281_2
  misc_feature (1)..(166): n is any nucleotide
nnnnnnnnnnnnnnnnnnnnnnnnnnnnnnnnnnnnnnnnnnnnnnnnnnnnnnnnnnnnnnnnnnnnnnnnnnnnnnnnnnnnnnnnnnnnnnnnnnnnnnnnnnnnnnnnnnnnnnnnnnnnnnnnnnnnnnnnnnnnnnnnnnnnnnnnnnnnnnnnnnnnnntgttgagttaatagatttttgatactgcaaaagtaatgaacaactaaagttatatctttattgcagatgacagctgtcttattactgcattttatttttggggtgacttcaaatattgggaaaatygtaataartaaatctgatgtagtgcccaagagcagtataagttttcatgaaggctgccacttcatcagtatggtagatgatgctgaacatataagaaaaatctattttacattaaagttcacatccaagtgatttaaatattgcaagttaattgttattctgctgtatatcactatcattagtgatatttcatcatcattatcatcatcatcatcattatcatgctgtacatcactaaatcattattctgctgttccttatatgtggttggcagataatttgaggtgtagtattcctttcgctagtg

SEQ ID NO: 84135 - DNA, 600 bp, Chicken  19866894381291_1
actgatttcaagtcccacattcagtcagttttcacctctgggaaagaaaaattcatgtatttgaaatggaaaaaaaaagaattaaatactacaagtactaaaaatgtcctttttttttttttgctacatattttctaaaaacagatgttcagaaaatgttatgagaaaaaactaagcaaaaacctgctgctctgccaaggtctcaatgcattacccacgttacagaactgactgcattacagcagaaaagacaagccttgtgattccaggagttctgacccacttctcttatgtaattayttttcagtaggctataagcaaatactgagagctcaggtttgcctgagggaggaaagggagctgagatcagcgaggcacagcaacaccagaggagctccaaaatagcctttctctcctcattttcatatcatctcagcagtgtgagctctttaagggaagaaaacacrgcagaggatgttctgatgttttctcaggtttacctttcctgaaaatcatcctgaaatccctttgcccacagcctgctctgctgcggaggaatgcaataaagcagcgcgggttcttgcacagacagggagtggc

SEQ ID NO: 84136 - DNA, 562 bp, Chicken  19866894381291_2
aaaactaagcaaaaacctgctgctctgccaaggtctcaatgcattacccacgttacagaactgactgcattacagcagaaaagacaagccttgtgattccaggagttctgacccacttctcttatgtaattayttttcagtaggctataagcaaatactgagagctcaggtttgcctgagggaggaaagggagctgagatcagcgaggcacagcaacaccagaggagctccaaaatagcctttctctcctcattttcatatcatctcagcagtgtgagctctttaagggaagaaaacacrgcagaggatgttctgatgttttctcaggtttacctttcctgaaaatcatcctgaaatccctttgcccacagcctgctctgctgcggaggaatgcaataaagcagcgcgggttcttgcacagacagggagtggcactcagcatcaacctgcctccgtaaactggagctcattacggggaaatgcaatgtttgctctgcctgccaggaactgcagttcagagctgggaagcagcgctgctccccgcctccctccgagcactcct

SEQ ID NO: 84137 - DNA, 600 bp, Chicken  19866894381292_1
tatgattcaaagaagaaatcccacaccacagtagattacttatcatatatttgattctgcacatggattacacatataatgccacaactcaaagcttcatcacttgctttcatctgcaataatatcctcttatgggattttccttaaggaaaaaagctgcctcttctaacccatgaaaaagcagccactgaactgtgctcctgaacaaagcagaaaaacctgagctgtcattgtaaatcagagcaaactgcatacaggctattcacatgtacatagaagaggagaacatcactttatgtrgaagatatacggctgcctccaaatttgcacttactttagtgaatgggcacactgctttcttctttatcatcttcagggaaactgtactatgccagtaaggagtctgagttgcaccaattcttactaagattacacaccattttggttggtgttttgcatgctaaataggcacacctcacattttccaactagaatagttggaaatgcacattcagaattcactaaatcccaattctctgatttgcaaggagcagactcaacttatccactcaaggatagcaacctaaaagatgtagctgt

SEQ ID NO: 84138 - DNA, 600 bp, Chicken  19866894381299_1
gctgtgtattcaccccttagaaggatggtttccctctgaagttcttagttgctcagcatatgatttaaagattactgcaaagccctttgtacagttttctgcttcttgtgaaaatacaaatagttttatcgactcagagggcttttattccatataaagaaagaaggcaatggagagaaagatggagggggagagagacttgaacagcttgagagcacagtgtatgtgcttggtagaactcagtaaaaaaaatctttttgcaagagtctttgtggtcacagatgcttatctgtataattytaagtgatgccctcagatttttttaaggctattctgctgctacaagtccagacagcagtggttttgttgtctttgtgctcagtgtcaacaattcttagagcagggagaagttctatgaaagagaaggtttgaaaaatcattttttactgtacactgagaaatgcgtttaggactgcatatacctttaaggataaaagttcctctttttttgtctgagtaacagccatgagctgaagtaatcttcacgtttccatagaaaaatgagcattatgaaaggaggattttaaaatcaatatgaat

SEQ ID NO: 84139 - DNA, 404 bp, Chicken  19866894381299_2
cagggagaagttctatgaaagagaaggtttgaaaaatcattttttactgtacactgagaaatgcgtttaggactgcatatacctttaaggataaaagttcctctttttttgtctgagtaacagccatgagctgaagtaatcttcacgtttccatagaaaaatgagcattatgaaaggaggattttaaaatcaatatgaatcttaattagctaattgtgtctagaaactggttcattatgtatgattattatagaatgtattattattatgaatgtatgtcccaaaagaagtggaaatcakgtatctaggaactagcagagtatgtgtgtcaggacgagattttatctttactgtcattagaaaaacaaagttagaatacaagggttttttggggggttgtttgg

SEQ ID NO: 84140 - DNA, 600 bp, Chicken  19866894381304_1
cggttagctgtgggtagcctgggtagggactgtcttccttgaattccttcattgggttgttgagctgattacatagcaaacgcttgtgaagaaccagtaatcagagtatgcacatttagtggagtttctctggaagtctactctataggttaaataatcattatatcaatataactgagagtgtaagttaactctgaatgctacaagcaaaagttgtcttttggactttgtttttttggggtttgataggactgatgagttcagaaatggtctttttgttcccactttctctggactgcrcaytaatttcctttgttctttatgtcctcagctggaaaaggcactcacccctgagacattattacagtggaccaatcccagcatgatggccaacaccaaagtgaatgtatttcttccaaagtttagtgtggaaggcgattatgacctgaagccactcctggaaagcctcggcatgacaaatgtctttaatgagagtgcatcagatttctctgagatgtgtgaaaccaaaggtgtggttttgtcaaagatcattcataaagtctccttggaagtaaatgaacagggtggagagtctctaga

SEQ ID NO: 84141 - DNA, 600 bp, Chicken  19866894381304_2
ttagctgtgggtagcctgggtagggactgtcttccttgaattccttcattgggttgttgagctgattacatagcaaacgcttgtgaagaaccagtaatcagagtatgcacatttagtggagtttctctggaagtctactctataggttaaataatcattatatcaatataactgagagtgtaagttaactctgaatgctacaagcaaaagttgtcttttggactttgtttttttggggtttgataggactgatgagttcagaaatggtctttttgttcccactttctctggactgcrcaytaatttcctttgttctttatgtcctcagctggaaaaggcactcacccctgagacattattacagtggaccaatcccagcatgatggccaacaccaaagtgaatgtatttcttccaaagtttagtgtggaaggcgattatgacctgaagccactcctggaaagcctcggcatgacaaatgtctttaatgagagtgcatcagatttctctgagatgtgtgaaaccaaaggtgtggttttgtcaaagatcattcataaagtctccttggaagtaaatgaacagggtggagagtctctagaggt

SEQ ID NO: 84142 - DNA, 600 bp, Chicken  19866894381304_3
acattattacagtggaccaatcccagcatgatggccaacaccaaagtgaatgtatttcttccaaagtttagtgtggaaggcgattatgacctgaagccactcctggaaagcctcggcatgacaaatgtctttaatgagagtgcatcagatttctctgagatgtgtgaaaccaaaggtgtggttttgtcaaagatcattcataaagtctccttggaagtaaatgaacagggtggagagtctctagaggtaccaggatatcggattctgcaacacaaagatgaatttaaagctgaccatccrtttatctttttgtttaggcacaacaaaactcgcaatgtgattctttcaggcagattctgttccccataagcagagaatattaattatgaaaaaraacataaatttatggtgatgcatgttcctgtaaagcttggtgtcctgactatcacctttgaaaggaattctaagaggttcatatatcaacagggtaatacaatrtactctacatatgcagcagaactagtttatttccttttatttaatccccttaagctgaaggattcccactgtkcagaacacatgatatttgactaagaagta

SEQ ID NO: 84143 - DNA, 588 bp, Chicken  19866894381304_4
agccactcctggaaagcctcggcatgacaaatgtctttaatgagagtgcatcagatttctctgagatgtgtgaaaccaaaggtgtggttttgtcaaagatcattcataaagtctccttggaagtaaatgaacagggtggagagtctctagaggtaccaggatatcggattctgcaacacaaagatgaatttaaagctgaccatccrtttatctttttgtttaggcacaacaaaactcgcaatgtgattctttcaggcagattctgttccccataagcagagaatattaattatgaaaaaraacataaatttatggtgatgcatgttcctgtaaagcttggtgtcctgactatcacctttgaaaggaattctaagaggttcatatatcaacagggtaatacaatrtactctacatatgcagcagaactagtttatttccttttatttaatccccttaagctgaaggattcccactgtkcagaacacatgatatttgactaagaagtattccatcctcatccacgagaatattttgttcctctgtgacatctttttccaaaacaaaatgaacagagaacctgtttttgaa

SEQ ID NO: 84144 - DNA, 484 bp, Chicken  19866894381304_5
cataaagtctccttggaagtaaatgaacagggtggagagtctctagaggtaccaggatatcggattctgcaacacaaagatgaatttaaagctgaccatccrtttatctttttgtttaggcacaacaaaactcgcaatgtgattctttcaggcagattctgttccccataagcagagaatattaattatgaaaaaraacataaatttatggtgatgcatgttcctgtaaagcttggtgtcctgactatcacctttgaaaggaattctaagaggttcatatatcaacagggtaatacaatrtactctacatatgcagcagaactagtttatttccttttatttaatccccttaagctgaaggattcccactgtkcagaacacatgatatttgactaagaagtattccatcctcatccacgagaatattttgttcctctgtgacatctttttccaaaacaaaatgaacagagaacctgtttttgaa

SEQ ID NO: 84145 - DNA, 411 bp, Chicken  19866894381304_6
acaaagatgaatttaaagctgaccatccrtttatctttttgtttaggcacaacaaaactcgcaatgtgattctttcaggcagattctgttccccataagcagagaatattaattatgaaaaaraacataaatttatggtgatgcatgttcctgtaaagcttggtgtcctgactatcacctttgaaaggaattctaagaggttcatatatcaacagggtaatacaatrtactctacatatgcagcagaactagtttatttccttttatttaatccccttaagctgaaggattcccactgtkcagaacacatgatatttgactaagaagtattccatcctcatccacgagaatattttgttcctctgtgacatctttttccaaaacaaaatgaacagagaacctgtttttgaa

SEQ ID NO: 84146 - DNA, 600 bp, Chicken  19866894381307_1
catcaagaacctcttgctgagaacctcccaccaaataaaacacttaatttctgccatgcaaataaatgcattcctcatctgaatatctctgatcttggcatcgcatcacatgtgataagaacacattaattgaatccttctgttattattaacagatatgaacatttattgcaattcatttctacaaatagaaataagctcctcttgcattttcttaatgaatgcaagttctgaacatgtttggagcacttaatagtctcagtatagagtgcagacaataactcatttaattctactgtrcaaaagtactacatatataataatacatatttaatacaatatgtatataatacataaatatttacatagtacttaatacttactgtgtatatataatatatactgtgtaaatactgtatatatactgtataaatgtagagaaaatccacttcagaaagtctgaagaaaaatcagccagtaaatatttcagaaagtgatttaattagtctcaataatattgaaaaggtactaaagaagtagttttagtgactgcttgagcactttcctagttgatggaggactgcctaaattgtgatctga

SEQ ID NO: 84147 - DNA, 436 bp, Chicken  19866894381308_1
tattcatactgtaaaatatggtatcacgtagtgtcataatgcaatatttaaaacaacagtgcaatacaaaagcaagaaaatgagagcagggagagaaaaagctgaaaaatgatctgccagtgaacagagctattctggagatcaaaattaaaggaagtttgaggggggaaggaagcaaggtgtttgtgtgggcatccttgtttgaggtgggtgagcacaaggcttcctttaaagatatctcccatacagccttaagcaacaaatggtgtcatctatacgatctagttctcttcaagctcycttaagagctgaagcaacagactagacattaaaaagaaacataacctctttgaagacagactgttcttaagatgtgccagcttttctgtaatgctgttttagtaccacttctctaattttacctctacacctgtga

SEQ ID NO: 84148 - DNA, 599 bp, Chicken  19866894381317_1
  misc_feature (1)..(124): n is any nucleotide
nnnnnnnnnnnnnnnnnnnnnnnnnnnnnnnnnnnnnnnnnnnnnnnnnnnnnnnnnnnnnnnnnnnnnnnnnnnnnnnnnnnnnnnnnnnnnnnnnnnnnnnnnnnnnnnnnnnnnnnnnnnnattctaaagttccaagtctataataaatggcataacaaactagtgcagtatctctatgagtttggtgctggcataaggaaaaagactgacaaacccagctttaacatgctgaaaacctcctaaagaaagcagattgactttataattttgctaatatttgcataaaattaacattwctactgagatgattgttaattcattccaacttgcagatgtaaatatttgctgatccaaaagtgctttccttagtctcatttcagactaaactccttattcaacttctgatggttagttacacaaacacaggcagcatattggagcaaccagcaaactgctctgttataccaatgcagcgcagcataaaaactttaggcaggaattggcaggagatatttcactgcatttgtgtgatgttctttaaccagttttcatgcattcccatttcatgtaaatatagccatgtagagctaattct

SEQ ID NO: 84149 - DNA, 600 bp, Chicken  19866894381317_2
aactccttattcaacttctgatggttagttacacaaacacaggcagcatattggagcaaccagcaaactgctctgttataccaatgcagcgcagcataaaaactttaggcaggaattggcaggagatatttcactgcatttgtgtgatgttctttaaccagttttcatgcattcccatttcatgtaaatatagccatgtagagctaattctgtggtacaggcaatcgtttgagactcggcagagattaaagggatactgttaacctcactcttgcctctagctggaatatttcctgaatyttttgaagcttttatgtattttttcaataatctaggagcaaaaataattaaaatgcctctttatttttctgtcaattcctcgtactttgaatgccagaagccacaaacttgttataggaagctagtagtcttgacgtggtgataccaagagtcttaaaataaaggagaaaggaataaaatacacccttgaacctaatttcaattcaaaagagaaagaaaaaaaaatcccaggcttgttaacctaaatagtatgtgcaaatatgcataagacaacagccccttggtaacatttttcccaca

SEQ ID NO: 84150 - DNA, 600 bp, Chicken  19866894381325_1
agtggttggacagagtctgaaaaatagaaatgctacgaaaggaggagccagtaaaatgttaaaatgcggacatcatcacaatagtaagaaacattgctctagattctgtattaaagaagacttagtatactaagtatgaccagtagacatgtatgaatggcaaaaggaagactcacaagaagaagaaagaaagaacactgcacaatattctcaaatcttgctgtgtggctgaggactgaaaaaagttctgctaccctccagggtgactgctgaaaacacagtggtggatcaataaaactmaagatttttgataatccatttgaaatattttcagtaagttgtacagaaaaagtagaatgcctgggatcaggcccaccaagatgagcaaatacaataaataaacaaataaatcaaaactaaacaaccaacatgcatttgctccttcatttgtgggaatttactccattatgggctgcgtctggtttcagacttcaaagaacccaagcattcatttaggaaaccacctttctcctgccttcctgttgtagagaaagtgtattttctttgaaaccgtgtgtttctttccgctgcagtggcctc

SEQ ID NO: 84151 - DNA, 600 bp, Chicken  19866894381326_1
tttattttagttgaaattgtggtttgtgacttatattactccaaaatagcaattttcctaactagagcaatttgtcaggttataaataatgtaaatagaaactgctgtatcatatacatactttacataatatctaaagataaaatattcagctgacaaatctaattacttattgattatgagtttctagaagttaaaaaaaaaatgatggcttctttgctgaagacacaaaaaagcaacacactgagatagatgaaaaaattaaccatttctttcaagttttccattgtatttatacaygtttttacttgtttggtttttttgtgtgtgtggtttttttgactgagcaaggtcattgaatgacagtcacagaaactacattttttaagcagatgttgcaggatgtcggagaaagttccttttcagttgtaagcaaaaatactgtttcatttctatgaattgatcggtttttcttggtgagcagaaacattatgtatgatttgactactttaacagttgagctttagtttaatagtctattaactgaaccaagatttccatgatgtaaattactgatagtaaatcttgacaaaaaraagt

SEQ ID NO: 84152 - DNA, 600 bp, Chicken  19866894381326_2
acaygtttttacttgtttggtttttttgtgtgtgtggtttttttgactgagcaaggtcattgaatgacagtcacagaaactacattttttaagcagatgttgcaggatgtcggagaaagttccttttcagttgtaagcaaaaatactgtttcatttctatgaattgatcggtttttcttggtgagcagaaacattatgtatgatttgactactttaacagttgagctttagtttaatagtctattaactgaaccaagatttccatgatgtaaattactgatagtaaatcttgacaaaaaraagtctacaatgataaagttattaaacaatactgataacaaacctgcttattgatattatttctattattacattgtcagttagtgagtcagaaaaagatttttatttttgaatgcagcataatacatatacatatagaatgcctataaatgcctattaatatagacatacataagaagataatacctattaagataaatataggtatgtatctcctacagttgtaatgtttataaaggtaaatgcagatatgcctataaatacaggtatagttattgctgtatgtaacagtggccattt

SEQ ID NO: 84153 - DNA, 599 bp, Chicken  19866894381327_1
  misc_feature (1)..(28): n is any nucleotide
nnnnnnnnnnnnnnnnnnnnnnnnnnnnccgtcaacaaaaaggctccgcgggaatgcgccgctgtgtcaacacggagcgcggacgcgtgcacggcacaaatggccccaagagaggagacgcagaggctcggtgcgaagcgctccgcagcggacacatggccggcagagggatggtggcaccgggcggggtggggggcaacgggcagccccggcagctactccgcaggagcggactcttgctgtcgagacgcttctgtaggtccccgggaggcgcctgcgtacggagctcggacgcggagsggggaattccgccccgaagtggtggagacggtggcactggcaggggtccttatttccctgacacatccctgacatagtctcgctgatacgctccttctaacgttttcccccatttgagataaggcttcactagcatagtggctttttgatgggtatccttactgaggaaaagtgccttctttcactctttttcatatgctgctggtcctttatcccactgccagcatcagctgctccgtgtgcatggttttatgccaaacttgtaccgcatgcctcagcacagagggagctccgttcta

SEQ ID NO: 84154 - DNA, 599 bp, Chicken  19866894381331_1
  misc_feature (1)..(33): n is any nucleotide
nnnnnnnnnnnnnnnnnnnnnnnnnnnnnnnnnttcaagtgtgtttcggaagatgcaaccccttgccatgttttctgtgcctgtgctactgcctgccagtgtatcagtcagaccctgtccagaaaatgtgttctcgactgcattaacatgagctaattaatcctacttcagaatacaggcagagcgggcaatggagtgcctgcaccccacataggcatgttttcgctgatgggaagcacagcacccctcccaacataatctttatttatagtaataagggacaagaataaggaaagagakggaaggaaaaatctcgaggccgcagtgctattctaaaatatatttgagaattgaaacaacagcttttactatcatttgggggatgaaatgcagctggcagttcctaaaacaattgcattttcggtgtcagtatgagaggataatgatcatgggtacaaggaataaaagagcgtaaattaaatttgttctgactattgtttaaatagctgagcttcagggagatcgagcccctggatgagcccatgcagatcaaaataaaattaaggggtgatgatgactacctccatgactgcatactg

SEQ ID NO: 84155 - DNA, 600 bp, Chicken  19866894381342_1
aaaggagtacctttgcaggtgctgagccgcttacggcaagtttagtgggtatgtttgtattggattcttggctctcttaaacataactgtccgcctcctctgtgtgccatgagatgcaggtcctttaaaatcgttgaagaaaaggaacagaggtgaagcatccctctggttcaggtgctcaccccacaacactcccacccggcagcactgggctgcccctcctgctcacaccatctcataatggcatttgcctcctgaaatgctgtgtgtctctgtttaaatatagccagtatttcctcrctgggaattctaccagcgttatttattttctttgcctcgcttgtcataaccccatcctttgactgcagcacaaaaattaattgtcccaggcctccctacgattcccttgtgtagcactgaatcaaatatctaacgttcagtcgacattgatcttggcttcattagctgcagccctgttttgagtgtttctaggcaacataatactggtcttgctgcagaaaggatccctcatccctcactcgcacacccactgctgacatttttgtgaaaacatttgtacagatctgccaatctgcctct

SEQ ID NO: 84156 - DNA, 599 bp, Chicken  19866894381345_1
  misc_feature (1)..(95): n is any nucleotide
nnnnnnnnnnnnnnnnnnnnnnnnnnnnnnnnnnnnnnnnnnnnnnnnnnnnnnnnnnnnnnnnnnnnnnnnnnnnnnnnnnnnnnnnnnnnnnnatgggttgatggttgcactagatgatcttagaggtttttttccacccttaatgattctgtgactctatgatctcattgaagaaggacaaaagcatgctagagtgcatctacatccaaagtgccccaggtatggcactatgaaaagtatcttcatcaggggatggcgggcatggaacaggcttcacagggcaatgatcaaggcccygaratgctggagttcaagagacgtttggactttgctctcagacattggatttgggttttaggtggtcctgtgtggagccaggagttggacttggtccttgtrggcccactctaactcagaatattcatggtgctatgattccattttgctgctagctatcatgtgccctctccccatggtgcaactacacatagctctcagcatggtgcacatggagsaaattaagggatgggtgaagatgtgggcacagccccagctcacagygtggctgggcaacggggatgaacacagtgtccttg

SEQ ID NO: 84157 - DNA, 599 bp, Chicken  19866894381345_2
  misc_feature (1)..(92): n is any nucleotide
nnnnnnnnnnnnnnnnnnnnnnnnnnnnnnnnnnnnnnnnnnnnnnnnnnnnnnnnnnnnnnnnnnnnnnnnnnnnnnnnnnnnnnnnnnnnatgggttgatggttgcactagatgatcttagaggtttttttccacccttaatgattctgtgactctatgatctcattgaagaaggacaaaagcatgctagagtgcatctacatccaaagtgccccaggtatggcactatgaaaagtatcttcatcaggggatggcgggcatggaacaggcttcacagggcaatgatcaaggcccygaratgctggagttcaagagacgtttggactttgctctcagacattggatttgggttttaggtggtcctgtgtggagccaggagttggacttggtccttgtrggcccactctaactcagaatattcatggtgctatgattccattttgctgctagctatcatgtgccctctccccatggtgcaactacacatagctctcagcatggtgcacatggagsaaattaagggatgggtgaagatgtgggcacagccccagctcacagygtggctgggcaacggggatgaacacagtgtccttgcaa

SEQ ID NO: 84158 - DNA, 600 bp, Chicken  19866894381345_3
gatggttgcactagatgatcttagaggtttttttccacccttaatgattctgtgactctatgatctcattgaagaaggacaaaagcatgctagagtgcatctacatccaaagtgccccaggtatggcactatgaaaagtatcttcatcaggggatggcgggcatggaacaggcttcacagggcaatgatcaaggcccygaratgctggagttcaagagacgtttggactttgctctcagacattggatttgggttttaggtggtcctgtgtggagccaggagttggacttggtccttgtrggcccactctaactcagaatattcatggtgctatgattccattttgctgctagctatcatgtgccctctccccatggtgcaactacacatagctctcagcatggtgcacatggagsaaattaagggatgggtgaagatgtgggcacagccccagctcacagygtggctgggcaacggggatgaacacagtgtccttgcaaagcacaggagcgtcattcctgaagctgatgctgggctacagggcatggagcttgtgactcatctgaaagatgatatgtcctggggcgtggaagctgcagg

SEQ ID NO: 84159 - DNA, 600 bp, Chicken  19866894381345_4
ccaggtatggcactatgaaaagtatcttcatcaggggatggcgggcatggaacaggcttcacagggcaatgatcaaggcccygaratgctggagttcaagagacgtttggactttgctctcagacattggatttgggttttaggtggtcctgtgtggagccaggagttggacttggtccttgtrggcccactctaactcagaatattcatggtgctatgattccattttgctgctagctatcatgtgccctctccccatggtgcaactacacatagctctcagcatggtgcacatggagsaaattaagggatgggtgaagatgtgggcacagccccagctcacagygtggctgggcaacggggatgaacacagtgtccttgcaaagcacaggagcgtcattcctgaagctgatgctgggctacagggcatggagcttgtgactcatctgaaagatgatatgtcctggggcgtggaagctgcaggaggagcagcttcccagcaggagcacttccaactgcatcactggcaagtgattcctggtgctgcttccttgcaccaacaacctatgttgcctctgtccagaagaatatgggcaatgt

SEQ ID NO: 84160 - DNA, 600 bp, Chicken  19866894381345_5
atggaacaggcttcacagggcaatgatcaaggcccygaratgctggagttcaagagacgtttggactttgctctcagacattggatttgggttttaggtggtcctgtgtggagccaggagttggacttggtccttgtrggcccactctaactcagaatattcatggtgctatgattccattttgctgctagctatcatgtgccctctccccatggtgcaactacacatagctctcagcatggtgcacatggagsaaattaagggatgggtgaagatgtgggcacagccccagctcacagygtggctgggcaacggggatgaacacagtgtccttgcaaagcacaggagcgtcattcctgaagctgatgctgggctacagggcatggagcttgtgactcatctgaaagatgatatgtcctggggcgtggaagctgcaggaggagcagcttcccagcaggagcacttccaactgcatcactggcaagtgattcctggtgctgcttccttgcaccaacaacctatgttgcctctgtccagaagaatatgggcaatgtggaatcatgtccagatctagcagggatggcagcatgccaccagtgg

SEQ ID NO: 84161 - DNA, 560 bp, Chicken  19866894381345_6
gagcgtcattcctgaagctgatgctgggctacagggcatggagcttgtgactcatctgaaagatgatatgtcctggggcgtggaagctgcaggaggagcagcttcccagcaggagcacttccaactgcatcactggcaagtgattcctggtgctgcttccttgcaccaacaacctatgttgcctctgtccagaagaatatgggcaatgtggaatcatgtccagatctagcagggatggcagcatgccaccagtgggtaacagataccaactcatctcattgagactttttggagccagayaagctgtagcacttggaactcccggtgatgtcttttcttcctcttaaattttactgcagccaccctatcctcacattcctgtcctcgatgacatgtcaagccctctgattcctgccaaggagctgagtgtcagcatgcagaacatgccattcaagctgtgtagacacagagcagtcagcaattaggctttaggagggtgctgattgcctcagcagagggatctttgcagcatgcaagatctgaagtgaggtctggctttt

SEQ ID NO: 84162 - DNA, 600 bp, Chicken  19866894381347_1
gctaccatttgtaaacaaaaatagcccaaattgcagctctgtcttgggatttggtcacttcaggtcacagaaagctctacattacgtcttggttaaggtgatgtaaccatcactatcgtatgctagtgccttccaagtaaggtaatactaagaacctaatattaaagttttataaaatctctaccacttttctcttctaggtggtggtggtgtcaaagcagacattttattgacaaaatcagaaaattggaacaatttcttttgtctcatttaatggttgcactttctgaatgtttttgkttttttttcccatgagttttactaagcaaaaaacttagcagtttctgtttatgaaaataagagggagctaaagagtctaaaactttgtaatagcaggatactttgctgagtggccaaattagggctggattttggagtttgatttggaaaacataacctttaaaattttatatactttcagaggaaacatctgaaaaatagttaacagctaatggtactttcatcatgtatcatacagagcttttggttttacttcagtgcctaactgatgtatttttctcataaagaatcaaaatcact

SEQ ID NO: 84163 - DNA, 599 bp, Chicken  19866894381351_1
  misc_feature (1)..(8): n is any nucleotide
nnnnnnnnctctctaagaatattgcttactgtttgcacagaaggcccttgtccagtaagtcgtatctgtgcaaacatattcttgcagccattaaattcagttgatttgatcagagttcagtcacccaaaagtacctcttacagtacattttataacactcatcatctggctttctctttgttccttgtataacaacttctcaacatccagatgtatccaaattctgcacagataaacaggattagctgttttcaaattgaagtaaacatacttattctgaattgtcaaacctgtatacaytataaatgcagtagtaaaagttgatggatagataagttcaactgtatattgaaatggaacaaaatagctctgttatttttccagttgactgcagaaaaaatttgtttcatgtgtgaatttgcatctcaaaaagaagagttgctgtttgctatgcagtaatttcaaatccttcctcttttcctttttgcatacctaattgctttgtctttttgattcaaaattttaagcaggtatctggataattctccacatgcttaaaaaatgaaataagaaatgattgtttaattgccactagtaga

SEQ ID NO: 84164 - DNA, 508 bp, Chicken  19866894381355_1
  misc_feature (1)..(160): n is any nucleotide
nnnnnnnnnnnnnnnnnnnnnnnnnnnnnnnnnnnnnnnnnnnnnnnnnnnnnnnnnnnnnnnnnnnnnnnnnnnnnnnnnnnnnnnnnnnnnnnnnnnnnnnnnnnnnnnnnnnnnnnnnnnnnnnnnnnnnnnnnnnnnnnnnnnnnnnnnnnnnnnncagacctgcttgtactccctccagccccgctggaagctgacgctgccgttggtgcggagctggatgaccgtccagccgccgccgtctgtctccatgtcgcagaacgcctacagtggggaacggagcagctctgagtgggscgatgygtcccactgccagcggggttggctcgtggctgagcggggacatcccactgttgggccccacggtgccctctgtgggctgcgctcaccttcctgggctcgctcaggttggtgatgtgcagggtgtacaccccgctggcacggctgccggcccggagcacctcggtgcagtcctggaagcgctgctcctcagcaggcagcaggg

SEQ ID NO: 84165 - DNA, 502 bp, Chicken  19866894381355_2
  misc_feature (1)..(154): n is any nucleotide
nnnnnnnnnnnnnnnnnnnnnnnnnnnnnnnnnnnnnnnnnnnnnnnnnnnnnnnnnnnnnnnnnnnnnnnnnnnnnnnnnnnnnnnnnnnnnnnnnnnnnnnnnnnnnnnnnnnnnnnnnnnnnnnnnnnnnnnnnnnnnnnnnnnnnnnnnncagacctgcttgtactccctccagccccgctggaagctgacgctgccgttggtgcggagctggatgaccgtccagccgccgccgtctgtctccatgtcgcagaacgcctacagtggggaacggagcagctctgagtgggscgatgygtcccactgccagcggggttggctcgtggctgagcggggacatcccactgttgggccccacggtgccctctgtgggctgcgctcaccttcctgggctcgctcaggttggtgatgtgcagggtgtacaccccgctggcacggctgccggcccggagcacctcggtgcagtcctggaagcgctgctcctcagcaggcagcaggg

SEQ ID NO: 84166 - DNA, 599 bp, Chicken  19866894381361_1
  misc_feature (1)..(198): n is any nucleotide
nnnnnnnnnnnnnnnnnnnnnnnnnnnnnnnnnnnnnnnnnnnnnnnnnnnnnnnnnnnnnnnnnnnnnnnnnnnnnnnnnnnnnnnnnnnnnnnnnnnnnnnnnnnnnnnnnnnnnnnnnnnnnnnnnnnnnnnnnnnnnnnnnnnnnnnnnnnnnnnnnnnnnnnnnnnnnnnnnnnnnnnnnnnnnnnnnnnnnntgaattcatcccttaattgagaaaccagaccacaaatgacttaaagtacctcctacagaacagccattttcaacaaaggacagttcaacatgacctgaaaamcctacagatggaatatgcaggtcacctgtaccatgctaattgatgtttctctagctcatctgatggcttgcaataattaaaaacatctacaaatcagtatcaaaagaacacttttcttctaaatatccacatctctcatgagaacattaaatcacaacaaacttcattaygctgcatgatttgcacagagatctctcccgttagcttactcttttttgatagcataatgtttttcccttccattctcagacacggagatcgaaggatttcaaggtttgtcctcctatgtacatctgata

SEQ ID NO: 84167 - DNA, 599 bp, Chicken  19866894381361_2
  misc_feature (1)..(28): n is any nucleotide
nnnnnnnnnnnnnnnnnnnnnnnnnnnntgaattcatcccttaattgagaaaccagaccacaaatgacttaaagtacctcctacagaacagccattttcaacaaaggacagttcaacatgacctgaaaamcctacagatggaatatgcaggtcacctgtaccatgctaattgatgtttctctagctcatctgatggcttgcaataattaaaaacatctacaaatcagtatcaaaagaacacttttcttctaaatatccacatctctcatgagaacattaaatcacaacaaacttcattaygctgcatgatttgcacagagatctctcccgttagcttactcttttttgatagcataatgtttttcccttccattctcagacacggagatcgaaggatttcaaggtttgtcctcctatgtacatctgatacttttccagcacagagttcaagctataacacttccaggtcccagaataaagcagtgttcctttcttgtaagtcacgctgagagcacatttaagcctacagagctaagactactccttccagaatgatcatgaagctaaacctgaaaatattttcccatatttccaacctg

SEQ ID NO: 84168 - DNA, 600 bp, Chicken  19866894381365_1
cagatcggcctgctcttttacaacacagcttcatctcagctggcttttttttgttgtggtaggaacgagcagtgagctgtgaggataatcagtactgagggcatattacaaatttaaaaaaaaatggacggaagtggatattatcccaaaagcagtttttgttctcaggtgttcaaggggtctcatacatgccaatgtgctgcagaaatagacatacagaatcatagaattgttcaggttggaaaagaccctaaagatcatcgagtccaacagcaacccgaccatactgccctaacctcracaatgctctgctgaatcacrtccctgagcaccacatccaaatggtttataaacacatccagcgatggtgactcaaccacctccctggggagcctattccagtgcttaacaaaatatcttcaactcataactgttattractgaactgtgtttatggctacaggactgccacttggcaggactgccatgcagccagcacacgccgaaaaggcagtgagctgcaatctatttttttttgcatttccctcataccagcacaccatgctagcacttggaaggacagcatctccttcttgttct

SEQ ID NO: 84169 - DNA, 600 bp, Chicken  19866894381365_2
aacacagcttcatctcagctggcttttttttgttgtggtaggaacgagcagtgagctgtgaggataatcagtactgagggcatattacaaatttaaaaaaaaatggacggaagtggatattatcccaaaagcagtttttgttctcaggtgttcaaggggtctcatacatgccaatgtgctgcagaaatagacatacagaatcatagaattgttcaggttggaaaagaccctaaagatcatcgagtccaacagcaacccgaccatactgccctaacctcracaatgctctgctgaatcacrtccctgagcaccacatccaaatggtttataaacacatccagcgatggtgactcaaccacctccctggggagcctattccagtgcttaacaaaatatcttcaactcataactgttattractgaactgtgtttatggctacaggactgccacttggcaggactgccatgcagccagcacacgccgaaaaggcagtgagctgcaatctatttttttttgcatttccctcataccagcacaccatgctagcacttggaaggacagcatctccttcttgttctgcatcttaaagacattttaca

SEQ ID NO: 84170 - DNA, 600 bp, Chicken  19866894381365_3
attatcccaaaagcagtttttgttctcaggtgttcaaggggtctcatacatgccaatgtgctgcagaaatagacatacagaatcatagaattgttcaggttggaaaagaccctaaagatcatcgagtccaacagcaacccgaccatactgccctaacctcracaatgctctgctgaatcacrtccctgagcaccacatccaaatggtttataaacacatccagcgatggtgactcaaccacctccctggggagcctattccagtgcttaacaaaatatcttcaactcataactgttattractgaactgtgtttatggctacaggactgccacttggcaggactgccatgcagccagcacacgccgaaaaggcagtgagctgcaatctatttttttttgcatttccctcataccagcacaccatgctagcacttggaaggacagcatctccttcttgttctgcatcttaaagacattttacaaaggaactcctatcattccttttatattacagatgggaaaataagggtacaaaaacacatgtagtgacttgctccagaaagrtaagtgcctactctttttaacagatcattagcaaat

SEQ ID NO: 84171 - DNA, 600 bp, Chicken  19866894381365_4
ttgttcaggttggaaaagaccctaaagatcatcgagtccaacagcaacccgaccatactgccctaacctcracaatgctctgctgaatcacrtccctgagcaccacatccaaatggtttataaacacatccagcgatggtgactcaaccacctccctggggagcctattccagtgcttaacaaaatatcttcaactcataactgttattractgaactgtgtttatggctacaggactgccacttggcaggactgccatgcagccagcacacgccgaaaaggcagtgagctgcaatctarttttttttgcatttccctcataccagcacaccatgctagcacttggaaggacagcatctccttcttgttctgcatcttaaagacattttacaaaggaactcctatcattccttttatattacagatgggaaaataagggtacaaaaacacatgtagtgacttgctccagaaagrtaagtgcctactctttttaacagatcattagcaaatttaacacaagtcttcatagtcccctgacaagtaccttaataggctcgacaagagaaagacagaattaaccagtttattgccagacagaaa

SEQ ID NO: 84172 - DNA, 600 bp, Chicken  19866894381365_5
gcttaacaaaatatcttcaactcataactgttattractgaactgtgtttatggctacaggactgccacttggcaggactgccatgcagccagcacacgccgaaaaggcagtgagctgcaatctatttttttttgcatttccctcataccagcacaccatgctagcacttggaaggacagcatctccttcttgttctgcatcttaaagacattttacaaaggaactcctatcattccttttatattacagatgggaaaataagggtacaaaaacacatgtagtgacttgctccagaaagrtaagtgcctactctttttaacagatcattagcaaatttaacacaagtcttcatagtcccctgacaagtaccttaataggctcgacaagagaaagacagaattaaccagtttattgccagacagaaaatgagggatgaggtttagttctggactatatttcaagcagtcaatttatccatacagtacacagctatattctctgtttatggtgttctatttgatgcagcatataacctccctggagctgggtcattgaagcatgataaccacacacaggtatctaatgagagatgatttaaa

SEQ ID NO: 84173 - DNA, 600 bp, Chicken  19866894381373_1
tgtacccggcactgatccatggggaacactgctaattacaggcctccaatcagactctgacctgctgatgacaaccctctgagctctgccagtcagatagttgtcaatccacctcaccatccactcatccattccagacttcctaagtttgataacaaggatgttgtgggagacagtgtcaaacaccttgctgaagtcaaggtacacaacatccactgctctctctccatctacccaaatagtaatgatatcatagaaggctaacaggttggtcaagaatgatttctccctggtgaatcsttgttgactactgataagcttcttctcttccacttgcttggagatggcatccagaacaagttccttcacctttccaaggatggaagggaggctgactgacctgtagtttcccagatcctccttgtcctttttgaagactggagtaacactggatatcctctagtcattgaccacctctcctgttctccaagatctttcaaagatgacagagagtgattcagcaatcatctctgccagctccctcagaacacgtagatgcattccatagagaccaatggacctgtgtgcactgatttttgc

SEQ ID NO: 84174 - DNA, 600 bp, Chicken  19866894381377_1
ctgtcagtgtgatttgggggggatagcatagaacaagacctaagtaccaactgagaattagccaactgatcttagtaaatgagcatttcatatttggaagggaacaggtattcacaattcttttaggagaaacaaccagtttacttttttattaagagattcagctatgtcaatacagatgtcctaccagatttaccatcacagcagggactaattctttctagacacaaaaccatgtgtggtcactggctgacctacaggagtgcctgttttctctccactccgtatctgcctttctgrtttactatcaaagctcttcaatagtgcattcttatttctttctgctcagacaagagaaaaaacagcgtgtgatgaataagctaatgagtgcctgggttgatccctgctcatccctcactgagtcacctaggtgcagggtgagccagcgcctccatcttgtgcttggctgtcgtgtaccgtgtctggcagcccaaccagcctgtccttcatgaaggagttccatggttaagtttgccttgctccaattaatactgcctgatgttactttgtgtttgggaagaaccagagaaatgagctgct

SEQ ID NO: 84175 - DNA, 600 bp, Chicken  19866894381378_1
ttgagttggcccaaaatgccatgaaacgtaccaattttccaccccaattattatggggtccatgcaagtagaatttgaaagaccacgcagatacactgggtcagctctgcacacaaactgatgctaaatacatttgggctttcaatatcccttcactattcacctcctgacttctggaggtgctgccaacaaatgggtccttcaaccactgaagcccatgaggaccaaccccccccccaggaggcacagggaccgactgaagctaagtgctttgctgaaggccacagattaaagccaggytgaggygagggcccctrccttcctgtttcctgttgccatgaccaggttacaaggcctccgccccaccactgaccccataccttcattgctgccccatgatcgtgcacaggcctgttgatcaatcccggtcttctgccctgacacagcttgctcagcaaaaccttctcactcatttccctttccaggcaaagctttacagtcccttcttttccccatcttgctggtggaacacgtggatgcccacgcgctaacaaggaagcacttcagtaccagcagccctctactgctgaggatggcagc

SEQ ID NO: 84176 - DNA, 600 bp, Chicken  19866894381378_2
tggcccaaaatgccatgaaacgtaccaattttccaccccaattattatggggtccatgcaagtagaatttgaaagaccacgcagatacactgggtcagctctgcacacaaactgatgctaaatacatttgggctttcaatatcccttcactattcacctcctgacttctggaggtgctgccaacaaatgggtccttcaaccactgaagcccatgaggaccaaccccccccccaggaggcacagggaccgactgaagctaagtgctttgctgaaggccacagattaaagccaggytgaggygagggcccctrccttcctgtttcctgttgccatgaccaggttacaaggcctccgccccaccactgaccccataccttcattgctgccccatgatcgtgcacaggcctgttgatcaatcccggtcttctgccctgacacagcttgctcagcaaaaccttctcactcatttccctttccaggcaaagctttacagtcccttcttttccccatcttgctggtggaacacgtggatgcccacgcgctaacaaggaagcacttcagtaccagcagccctctactgctgaggatggcagcctcttc

SEQ ID NO: 84177 - DNA, 600 bp, Chicken  19866894381378_3
gccatgaaacgtaccaattttccaccccaattattatggggtccatgcaagtagaatttgaaagaccacgcagatacactgggtcagctctgcacacaaactgatgctaaatacatttgggctttcaatatcccttcactattcacctcctgacttctggaggtgctgccaacaaatgggtccttcaaccactgaagcccatgaggaccaaccccccccccaggaggcacagggaccgactgaagctaagtgctttgctgaaggccacagattaaagccaggytgaggygagggcccctrccttcctgtttcctgttgccatgaccaggttacaaggcctccgccccaccactgaccccataccttcattgctgccccatgatcgtgcacaggcctgttgatcaatcccggtcttctgccctgacacagcttgctcagcaaaaccttctcactcatttccctttccaggcaaagctttacagtcccttcttttccccatcttgctggtggaacacgtggatgcccacgcgctaacaaggaagcacttcagtaccagcagccctctactgctgaggatggcagcctcttcttaccttaagc

SEQ ID NO: 84178 - DNA, 600 bp, Chicken  19866894381386_1
ccaagacgggctctgcaaaaaaggtgcttccaaaactcacctttagagcagtgagtgaaggatctcaacctcataccttgaagatatctattcaccaattcctatgttaagagagattagcacccccttatacactcttctaatgaaattgtcaacggatcagcagatttcaggagctatttcctaaaaactcatagtaagtgtcaggcttaaataatggaaactggcaaaagggatgtgggctcaatcctcctttttccttctccgtaaattacacaaggacccctgctccactcctcygccgctgcctacttccttcaaagaggggcatctttgggacatctgataaggaagcttagagttatcttgcccaaagcctgcttaaaaaacagccaacccccccctccctgcctgcacatacattcaactcatttgactgattttccaaagagaggagcagctgaataattttggcaacaaaaatataaatctccttgctctgtatctttaaaacaataacgaagtgctattttaaacagagtgaatgaaacctttagcaaatctcacctatttcagtttttttttttctgttaaatactg

SEQ ID NO: 84179 - DNA, 600 bp, Chicken  19866894381386_2
aaggacccctgctccactcctcygccgctgcctacttccttcaaagaggggcatctttgggacatctgataaggaagcttagagttatcttgcccaaagcctgcttaaaaaacagccaacccccccctccctgcctgcacatacattcaactcatttgactgattttccaaagagaggagcagctgaataattttggcaacaaaaatataaatctccttgctctgtatctttaaaacaataacgaagtgctattttaaacagagtgaatgaaacctttagcaaatctcacctatttcagyttttttttttctgttaaatactgaaatgtgaaaaaaaaaaaaaaaaaagaatgagcatgaccaaccaaagaatcaagaggtacatacacacctaaggagaattgtagagtctctaatgcatacaaattccccagtggcagcagtttttacatggtacagctggctaatagaaaccacagaaacatgtttaaagtatgcttaaggcccttttaccttaagaaagaaagcagcagtgacaatgtgtttgcctcctggcacagttaggggcacaccgcagcctttaatgctagcagcctccgt

SEQ ID NO: 84180 - DNA, 600 bp, Chicken  19866894381386_3; identical to SEQ ID NO: 84179

SEQ ID NO: 84181 - DNA, 600 bp, Chicken  19866894381386_4; identical to SEQ ID NO: 84179

SEQ ID NO: 84182 - DNA, 600 bp, Chicken  19866894381386_5; identical to SEQ ID NO: 84179

SEQ ID NO: 84183 - DNA, 600 bp, Chicken  19866894381386_6
ctacttccttcaaagaggggcatctttgggacatctgataaggaagcttagagttatcttgcccaaagcctgcttaaaaaacagccaacccccccctccctgcctgcacatacattcaactcatttgactgattttccaaagagaggagcagctgaataattttggcaacaaaaatataaatctccttgctctgtatctttaaaacaataacgaagtgctattttaaacagagtgaatgaaacctttagcaaatctcacctatttcagtttttttttttctgttaaatactgaaatgtgyaaaaaaaaaaaaaaaaagaatgagcatgaccaaccaaagaatcaagaggtacatacacacctaaggagaattgtagagtctctaatgcatacaaattccccagtggcagcagtttttacatggtacagctggctaatagaaaccacagaaacatgtttaaagtatgcttaaggcccttttaccttaagaaagaaagcagcagtgacaatgtgtttgcctcctggcacagttaggggcacaccgcagcctttaatgctagcagcctccgtgacttttgtgacttttcttcactgtcacaca

SEQ ID NO: 84184 - DNA, 600 bp, Chicken  19866894381398_1
gtggtggtggatgagctgagggtttcttcacgtttttgttttttttttttatccttttttgaagctggtttgatttcttcagcgtttttctttcttctcaagctttcttggggttttgtttaaacacttctctctgcggtgatgcagagagcagcactgatttagctccttgtcattacataaaaccccaagctaaaaatgccgtctctttcatccgcccgtttcctgcgtcccaaacttacagaaggcaagtttaaaaagaaggaagaggccacgttaggacctcgggtggcaggaggytgggcacagcctcatgggctgctggctgatagcatggctgggatggggtgggacgcggcgattcggcagacgggagagcggagggtccgttgtgcagccgggctgggggtcctgcagtgtcccgggtgttggtaaagggtgcgtggcgtttctctgctctgtctcacaaaagtcccaggccggcagagggcagccggagcacaaattcctccaatggatggaaaaactctgcctgatttctgtcttctgtatacagcaacgctgtcctgacactgaggttttgcatcttatccaagataa

SEQ ID NO: 84185 - DNA, 600 bp, Chicken  19866894381407_1
tatacacacccttcagtccaggatttatcactcttaattccatgtcttcccatgctaaactgcaagtctccccacactttactcccggtttacacacactttaccacatttactcatactctacaccgggtgtactcatacctttctctgggttttactcacactttagtctgagtttactctcgccttgctttgggtttatgcacactttaccaggctttactcatattcttctaagggtgtactcacaccttactctgggttttactcacactttactttgggtctacatacactttmctctgggtttagtcacacactacaccagttgtactcacactttattctcagtttattcacacttttctctgggtttactcacaattttctacagtatttactcaccctttacttcaggtttacttgagctcgctaagccaggttctcgcagctgataacagatgcttttctgcagacctaaacaattagcacagacagtgtgcctccgtttttttcaaaatcgcatcattagctatcctatatttggaatgcaaggatgcaggctcagagagtaaaaacacaaattaacaaagcagcagc

SEQ ID NO: 84186 - DNA, 600 bp, Chicken  19866894381408_1
attttgttttactgccacccagtaacagaaaaagctatttcagctgtgtcagagtggaacagcaaatgtcatataaaatccaggtgacctattaaatacaggtatttgtagagtttccacccctacacccaccctgcccctgaacacgcaatttttctccccagaacacttttctgaatgtgaagcttacacgaaacattaaatatagccatgatttccattgtgttcctcttttaaaaatgtcttatatcattaacaaaggttctaattttccattttgtagtcttttcttgcttatcygagacattccattgcagaaatgtgtgggatactcactgtatgcagcaagtactaacaaaagaggaaatggagaacattaatgcatattgtttccaaggaaacaaagcatcagattatactgaaaagaaaagaaaaaaaaaaaagagagaattttttttcccctagaaaacaaggaaacatagggagtgaaaaagctaatgaataaatgacttaggtaaataatcaaccaattaaaaaattatccaaatcgagaaattctgtaaaatagataatattgcctagttttcaactactgcctta

SEQ ID NO: 84187 - DNA, 600 bp, Chicken  19866894381408_2
tgccttacattcatttttctttttttttcatagtactttttattgtgaaaggataaatgccattcataaaccatgcttatgatgtcttactgatcaaaaaatgtttttgttcaagaccttatccatggatacattccttactttttgagattaagtctttactgagtataaaagggagttctgttataatcaactggagaaagtaaaaaaaaacaaaactctattaaagctttcaaatcacaccatttcaaataccagttttcaacctagataaacacatacataccacaagatccacaragactttgatgttttgttatcaaataagtatcatgttatgtcactgttcactcacaaattcagagctcagtaatttcggcaatcaggattctgattttctgaccaagggtcataatgtaatgttagagatctaggttggcttaagaaaaacactgaggacaacagctagctcacagttttgaaaagggggctgaaatgaacaggagactcaactatagaaatgggaaaacagccagatttgtggaagtacttcaacttggagttatataaggaagtcttgcgtgaagaagaggagcaatg

SEQ ID NO: 84188 - DNA, 599 bp, Chicken  19866894381414_1
  misc_feature (1)..(277): n is any nucleotide
nnnnnnnnnnnnnnnnnnnnnnnnnnnnnnnnnnnnnnnnnnnnnnnnnnnnnnnnnnnnnnnnnnnnnnnnnnnnnnnnnnnnnnnnnnnnnnnnnnnnnnnnnnnnnnnnnnnnnnnnnnnnnnnnnnnnnnnnnnnnnnnnnnnnnnnnnnnnnnnnnnnnnnnnnnnnnnnnnnnnnnnnnnnnnnnnnnnnnnnnnnnnnnnnnnnnnnnnnnnnnnnnnnnnnnnnnnnnnnnnnnnnnnnnnnnnnnnnnnnnnnnnnnnnnnnnnnnnnaaaaatggcacagaagctctttkgaaagtaaggtgtgttttgctgtttttttccttggaacatcttttgaagtgcttacccacaggcaggatggatggagcaaataactacactgcattccagcaaaccttgcacgttcattcagatgtaaaaactgtttgactgtgaccagaatctcaaggtaactaatgagaaaataaagcaagttgctggaatttggttgtaatgcccattaaattccaggtaggagttcaacaattaaaatccagggcagtgcttgggtaatgcratccccgcrctgcctgcccctcgtgtgctggca

SEQ ID NO: 84189 - DNA, 599 bp, Chicken  19866894381414_2
  misc_feature (1)..(11): n is any nucleotide
nnnnnnnnnnnaaaaatggcacagaagctctttkgaaagtaaggtgtgttttgctgtttttttccttggaacatcttttgaagtgcttacccacaggcaggatggatggagcaaataactacactgcattccagcaaaccttgcacgttcattcagatgtaaaaactgtttgactgtgaccagaatctcaaggtaactaatgagaaaataaagcaagttgctggaatttggttgtaatgcccattaaattccaggtaggagttcaacaattaaaatccagggcagtgcttgggtaatgcratccccgcrctgcctgcccctcgtgtgctggcagcaacctttgcagaacactcttgtagcgtgacggccacctggtggagctgaattataggtggcagcagagcaacccgtctgtaccttgctggaaagggcggaacgtctcgttccaggtgaacagagccatgggtgtcttacaagtaaatcatataatcacttgagtcagctggggagcagaagagtttaaaggaaaaaatgtgttttcaaatgttttaagggctgcaccttaaaggtattgagacaattcctgaagatgcagtgca

SEQ ID NO: 84190 - DNA, 599 bp, Chicken  19866894381414_3
  misc_feature (1)..(2): n is any nucleotide
nnaaaaatggcacagaagctctttkgaaagtaaggtgtgttttgctgtttttttccttggaacatcttttgaagtgcttacccacaggcaggatggatggagcaaataactacactgcattccagcaaaccttgcacgttcattcagatgtaaaaactgtttgactgtgaccagaatctcaaggtaactaatgagaaaataaagcaagttgctggaatttggttgtaatgcccattaaattccaggtaggagttcaacaattaaaatccagggcagtgcttgggtaatgcratccccgcrctgcctgcccctcgtgtgctggcagcaacctttgcagaacactcttgtagcgtgacggccacctggtggagctgaattataggtggcagcagagcaacccgtctgtaccttgctggaaagggcggaacgtctcgttccaggtgaacagagccatgggtgtcttacaagtaaatcatataatcacttgagtcagctggggagcagaagagtttaaaggaaaaaatgtgttttcaaatgttttaagggctgcaccttaaaggtattgagacaattcctgaagatgcagtgcatgctgctcc

SEQ ID NO: 84191 - DNA, 600 bp, Chicken  19866894381420_1
aggtttagtagtagaactcagacaaatacttttagcatgactttagcctatacattactttgtatactgtattattacaagatatttcctgtgcttgaagccatacttttaattcacagaacttaaaaaggcttcaaatacactaactctaaatgcagggaccacaacagagaagggagagggaccatgttcaaatcaacacaacttcaatcacaagtgcaaggaaggtagaaatttactcttagcactccagataaatgtctgcttggcacttgaaactgctgcctcttctcatgctgmcaagcatttgatatcccagctggtgtttgtgagaaggctattatccttcagctcatgaagagggaggcttactatgagccctgacttcttacagcataagtcacttaaatcctgtaatcttgcaaaacatcaggtctaatggctgttaatatcatttaaatagtactgtaattaataataaatttgaaatatatgtagagcctttatgctcacagtagacactaaattatcagacccaagttttgtcaaggtatatattgaaaactgctttacatctattatttttcttaattgtaaaca

SEQ ID NO: 84192 - DNA, 599 bp, Chicken  19866894381433_1
  misc_feature (1)..(62): n is any nucleotide
nnnnnnnnnnnnnnnnnnnnnnnnnnnnnnnnnnnnnnnnnnnnnnnnnnnnnnnnnnnnnnctgtaggtgttcctgttggttgcagagaatttgaactagatgacctttaaaggtcccttccaactcaaacgtttctatggtctgatcccctcccactgctgagcattcctcccaccagcactcgtggtgctgtgggcatatgaaacagcacagtgctctgcatccagccagcctgttgcaaaatgaatgaattatacctttcctttccaaagtcagatggctgggaaacctctgtgckcctgggatgtaactccagccccaggtggaagagtcaccaggagatattctggttgcagctgttgacttcagattctgggagatgtgtctgcatgcccaagacgtgttgggagagagagtggtgcttgcaggctctgttgcttcatcatccccgtggggttgcacaccctgcattgcacaagtggggtgtgtgtctgagcacacacagtccagcccaaatgagaaggcagatgctcagaagagccaggctctccctgcacgattctcaaggagattggggctgttttgtttgaattacct

SEQ ID NO: 84193 - DNA, 600 bp, Chicken  19866894381436_1
atgagatgcttggcaagcaaataaaggtcatacatcatcatgatatatttgtaagaaacattcctgcaacataatctttgcactgcatatgcaccctagaaatgggatacaccttcccctcacaggctgcaggacagtgattactggtaaccccatcaggtagcttgcttataactacttcaaagccactctagaatggtaaaaggattctccatggtcacggccatacaggttactcacatctacaattaagcaagacctgctatggagcacagtccctgcactgcgatcattcatccygggaacagttcctggaatgcttttgatctgggctattctcaaaccattcccaggcaaagtgacagatcactctcaatagtcattgaaaatttcactactgggtttttgaggatgcaacagttttagtggcaaggccagaagcttctctgtgcatggtgctagctacacagcacaggtatatgcaaagttatttacagcacagcgtaagagatagactgtcttacaccaacttgttttcccatagaaagtttttgagatatctaaacagttgctcaggaatcttggttcctagactgcaga

SEQ ID NO: 84194 - DNA, 521 bp, Chicken  19866894381436_2
aacagttcctggaatgcttttgatctgggctattctcaaaccattcccaggcaaagtgacagatcactctcaatagtcattgaaaatttcactactgggtttttgaggatgcaacagttttagtggcaaggccagaagcttctctgtgcatggtgctagctacacagcacaggtatatgcaaagttatttacagcacagcgtaagagatagactgtcttacaccaacttgttttcccatagaaagtttttgagatatctaaacagttgctcaggaatcttggttcctagactgcagaaayctgctgaaggagaggatctaaatctgtaggattgtgacacaaatacaaccgacctccttttagcacttcaggaacactaaattgctatcatataacaaatacaccaaacaatcaagactaatatttctttttgatgctcctaacaaacattttggccttaatatgtatgtcatactataagaaaatatgaattacttggaattcacttttttttttcattt

SEQ ID NO: 84195 - DNA, 600 bp, Chicken  19866894381440_1
gataactagcagttgtttaaataggacagcgccgggttagtttgaggctgaaatctgtctatagctctaacagcaatttgctcaccagccctctgccttctcaattcatagaactgatgttttatatgtagcattctcttgactcatccccacaccgttctactgacttacgaaaacaggcaaggctttggtttcaccacttaccttcaattctttggactgagatgtcagtaggatcgatttaggtgttgtggcttccttggaggtctcttcactttgtactttattcactgatgggtycaaatgacccttaggctcattcttctcactgggaccatgtggaagagtggtctgtcttctgttctttccatgtcctagaaggaaggagtcttcctctgcacttccttgagcatggctatccctgtccactctgcgagtttctctatcacatgtaatgattgcagactcaggtataagatttttctctttatcaggaaagctggattgcaaaactgattcctgcaccttcgtttgttgctgcacccctctgtcactgctgctgtgtttgagtgatgaacagagggctgctctggctgtgca

SEQ ID NO: 84196 - DNA, 600 bp, Chicken  19866894381445_1
attacactgctgtagtaaatagctcaatcaacacaagatccgaagatgggtttcactgcaaaatctaattcaaaagtcatatctatttacaacaaggataaccaaatatttcatttgagaacttaagataaatctagaagcaaagagcatgtaaaagagaaatttattctacttgtactatatatatgaaaactttattaatttttatggctaatgctttgtaaattaaaagtctatcttcctgtcgtaccaaaatgcagagtgaaaaataattgctttgcatggaaacaaaattgggawtcacgcatgattagcaaataccatactgtatgctctgcagtcacctctctgaaggctctgtcytattccttgaagaaggaatacacattataaggaagagtccattagcatttgagatgtaggagagtctcttagccaatctctaaagcactgagtatgtgtgaaggaattgattccacggatatcagatcgagcagcctattgctgttccacaaaaggaactatgtaagctggggatgctgacagtagcagacaggatttctcaaatattgttttcttcatatgagcacgatgagtctc

SEQ ID NO: 84197 - DNA, 600 bp, Chicken  19866894381445_2
tctaattcaaaagtcatatctatttacaacaaggataaccaaatatttcatttgagaacttaagataaatctagaagcaaagagcatgtaaaagagaaatttattctacttgtactatatatatgaaaactttattaatttttatggctaatgctttgtaaattaaaagtctatcttcctgtcgtaccaaaatgcagagtgaaaaataattgctttgcatggaaacaaaattgggawtcacgcatgattagcaaataccatactgtatgctctgcagtcacctctctgaaggctctgtcytattccttgaagaaggaatacacattataaggaagagtccattagcatttgagatgtaggagagtctcttagccaatctctaaagcactgagtatgtgtgaaggaattgattccacggatatcagatcgagcagcctattgctgttccacaaaaggaactatgtaagctggggatgctgacagtagcagacaggatttctcaaatattgttttcttcatatgagcacgatgagtctcatcacagtttttataagagaaataagtgaatacccttggcagaaaaatacgcttctgtgttga

SEQ ID NO: 84198 - DNA, 600 bp, Chicken  19866894381449_1
tactttttttcatttggatgcacagctttcctggttcattgggaattgctgttacatgcaacctgtgaatccctgtcccgacaagaacctttgtttgcctgtctctcacagctcttgtgtctcatgtatgtgtccccatttcccctaggcttgatcccttctccctctgtgcactggaacttgctcactgttggaggcaacctctttccctttactaatgtaatgacttctgcttaacactagccaggccccagataggttccttgcactgctgtgttccaaagaaactgagagcaaagrggtgagaaaaatctgcaatccagtaggacctgagggctgcgctgggtacaaagcataagatttatggctacatttcctttgctctttgtaaaacacagttttctattttcaacaaaacgcttaattctaaaaagtcaaagggacattttaaagtatagtacatggtttctcaggttggatgcacaattaaaaaaaaaaaagcactgaataactgtgctattgtgctgcctgcaaactaagaattattgcagtgtgtcagaattcccccgaaggtacatatttggtctaaaagtgaagaat

SEQ ID NO: 84199 - DNA, 600 bp, Chicken  19866894381454_1
gacgtcagcatcattagagatgaagctaagctacaggtttagaatccaaatctgagttcctttccaaactgaagaacctcggactcgtttcattgttttatagaaacaaaaacccatgaggttttgatctgcatcagaaaactcgggcatgctccagaacctggctttggtctgggccccatgcctgcctgtaacagctggttataaagtgtttactcagcatcgcttgtccggctcattcattttgcagcctctgtgctacttgtgtgctgtcatgtatacttggcatcctttacctgytttcatccacaatcaagtaaagcaaaacacttctttcgctttcaaacagaggagacaaaatgctggatggcaggagcacagaggagaatcacctcaaacatttcagctcctcatttctggcacccagggagccacaaaacatagaggttttgtacaaaaacagcactcttgagtaacttgcagtgagctgctactggtgtataccacgcagagcttttctttgttggcgctactgctttatagcgttcaaaaataacccaaacaggttaggtagtaaccgagatattatctgagtaaatt

SEQ ID NO: 84200 - DNA, 600 bp, Chicken  19866894381456_1
agaagtatttcattaaatgagcagtgtattgagtgggttaaatttgcagtggttcttgacactctttacaggtttttcctattttaagtatgacagcagtgaatgcatttgcatagttatcgacatgctgtcactgcacgtttacattttaaacagaaccttttttccctgaaactgttcagattgtgcattaattcttcaactctgctgcattgcttggaattatcctggtgctacaaaatcattttaaaatcatcttaactggacccttgagactccctatgctctgattctgcatcrttgttcaagagctcatcactgacgtagccctcatgtgctggagaaggggttatttgatcactgacagtagaataatgcacttcagttttaagatgcaaatgcagttagggtggaataattagtcagtttcctccaacatgtagatggcagtggcaccattgactttgacaaacctgcagtattacatctcaagtcagaatttgactcgaagcctgactagcgaactcatttaactcccacggtgcataaatatgactttttcttatcatggcataaaaggtgaggtgtatttaaacaaat

SEQ ID NO: 84201 - DNA, 600 bp, Chicken  19866894381457_1
caagtgaatttcttcatgtcatagccaaatgccttcatccaaagttatgtcatctcttcttccatgagagtttaaaacaaaacttctgtttaggtatagactttccactctgacagtaataaagccagctttctccctctgtctctggatagcagataaatagtaacagattttgcagacttgcaagagactctctggctgagagtctgaaactcaacccagggacagattttttaaaaatgaataaattggaaagaatgtaataaaattaaactgtgtggatttcatcaaagctgcacyatgtaaaggcatttgtagtggctcagaccaaagccagcccctgcacaagccacccttgttgttggctatatggatcaaagaacagtgtggtggcacaggggcagagtcgctgtgcacagagacttacctgattggtttgttcagcttgctgcatttacaggagctgggagcatcacctggttgctgtagcattaacacggtggtacagtggaacctcagcctttgagtaatgtgtttgtgtgtggtgtgagcatgagaaaactggagggagtgaagagaacttcttgacagttctgtctt

SEQ ID NO: 84202 - DNA, 600 bp, Chicken  19866894381463_1
ataccattgtgtgacaaagtgtaaaacacgtctcctcaccactcagactgaatgtagtgtgcacaggcttcctgctgccatgtgatagcttttccactatccacttccccaccccagctgtgccattaggagaagtcatttagaaaacgtgactgcttttactcctaatagcaggtgtggtctctacacagagctcactgtgttagaagttacagatccagaaatgtacagccaatattcctcatgatagatgatttatgaaatgtaggagcaatcctgggaagggtctctgcagagtcyttcctgagccatagaggaagagggagggagggctctctcatctcccttacagagtagaagttcacggctgataccaaaaccagctgtgagaactccagtcttcctcttctagatgtcagcaatgcagtataagcagcaggacgtgttttctctccctgattggggtcaagctcttctctgaacttccactgttgaataccttaattactctgttatgtctcatctgactccaccaactctaagagcaaaccccttcctttccttctctctcgttgggtaactaaagttgtgcaagagctg

SEQ ID NO: 84203 - DNA, 600 bp, Chicken  19866894381467_1
gtcagaaagccgttgtaatttgcctcgggcatggctgtaatttggtggtggttgaagtgatcactcgttattttagtaggtcccatcatccccacagaaaaatgctcacaggcaggagatgtgtacccaagtatgacagaaataggtggtaaaagcagaatgagcctcaccctgagcaaccctcaaaagagcagggcaaataaaccatggcctcctacctccacaatggcaccaaaggcagattcagaccaagttaggacagaaaccagtctgaaaaacaaacaaacaaacaaaaaatcytctttcaaagcaaaaattgttcggagaaaacttgtacgcagcagctgctattggggcagagggaagagtaaaaaaaaaaagcctctcctagaagacttgcagggcagcagcctgctaaacgtgaccacatcaggaaacagtcctcaccacagcttcatcagggtgagctgagacaacaccatgaatgtgggagaccagtaggaccaagtgttactggcagcgtgcagtacaaactgaaagcatccatagacaattgaaaccacattgcatgaatcctcctcaaatcacaaggttaatgca

SEQ ID NO: 84204 - DNA, 599 bp, Chicken  19866894381468_1
  misc_feature (1)..(264): n is any nucleotide
nnnnnnnnnnnnnnnnnnnnnnnnnnnnnnnnnnnnnnnnnnnnnnnnnnnnnnnnnnnnnnnnnnnnnnnnnnnnnnnnnnnnnnnnnnnnnnnnnnnnnnnnnnnnnnnnnnnnnnnnnnnnnnnnnnnnnnnnnnnnnnnnnnnnnnnnnnnnnnnnnnnnnnnnnnnnnnnnnnnnnnnnnnnnnnnnnnnnnnnnnnnnnnnnnnnnnnnnnnnnnnnnnnnnnnnnnnnnnnnnnnnnnnnnnnnnnnnnnnnnnnnncacctggactgctgctatggtgagagggactggcaytgctttgctctgctgctgccagctgtatcctgagtgcacactccttatctccatctctcaccatagctgggcwggaggggctctgtggctttttcttttaactcactaatcattcctkggctgacaagtcccagggactgtgaacagattgctctcctggctcagaaatagagcccacaccttgccttcaccctgactgctgcaaatgtgccctcagatggccctgtgatgccatttttgtcttctaacgggagctgaatgtcactgctctcccagyagggccacatgctggcagagtg

SEQ ID NO: 84205 - DNA, 599 bp, Chicken  19866894381468_2
  misc_feature (1)..(191): n is any nucleotide
nnnnnnnnnnnnnnnnnnnnnnnnnnnnnnnnnnnnnnnnnnnnnnnnnnnnnnnnnnnnnnnnnnnnnnnnnnnnnnnnnnnnnnnnnnnnnnnnnnnnnnnnnnnnnnnnnnnnnnnnnnnnnnnnnnnnnnnnnnnnnnnnnnnnnnnnnnnnnnnnnnnnnnnnnnnnnnnnnnnnnnnnnnnnnnncacctggactgctgctatggtgagagggactggcaytgctttgctctgctgctgccagctgtatcctgagtgcacactccttatctccatctctcaccatagctgggcwggaggggctctgtggctttttcttttaactcactaatcattcctkggctgacaagtcccagggactgtgaacagattgctctcctggctcagaaatagagcccacaccttgccttcaccctgactgctgcaaatgtgccctcagatggccctgtgatgccatttttgtcttctaacgggagctgaatgtcactgctctcccagyagggccacatgctggcagagtggagccctggtcgtgtgccgtgccaggcagagctgaacggctgtcaggagggacagcacctcagggtctttaga

SEQ ID NO: 84206 - DNA, 599 bp, Chicken  19866894381468_3
  misc_feature (1)..(146): n is any nucleotide
nnnnnnnnnnnnnnnnnnnnnnnnnnnnnnnnnnnnnnnnnnnnnnnnnnnnnnnnnnnnnnnnnnnnnnnnnnnnnnnnnnnnnnnnnnnnnnnnnnnnnnnnnnnnnnnnnnnnnnnnnnnnnnnnnnnnnnnnnnnnnnnnnncacctggactgctgctatggtgagagggactggcaytgctttgctctgctgctgccagctgtatcctgagtgcacactccttatctccatctctcaccatagctgggcwggaggggctctgtggctttttcttttaactcactaatcattcctkggctgacaagtcccagggactgtgaacagattgctctcctggctcagaaatagagcccacaccttgccttcaccctgactgctgcaaatgtgccctcagatggccctgtgatgccatttttgtcttctaacgggagctgaatgtcactgctctcccagyagggccacatgctggcagagtggagccctggtcgtgtgccgtgccaggcagagctgaacggctgtcaggagggacagcacctcagggtctttagagttctgttggttggggttcaaaaaggcaaaccccaaaccaaaaga

SEQ ID NO: 84207 - DNA, 600 bp, Chicken  19866894381468_4
gctatggtgagagggactggcaytgctttgctctgctgctgccagctgtatcctgagtgcacactccttatctccatctctcaccatagctgggcwggaggggctctgtggctttttcttttaactcactaatcattcctkggctgacaagtcccagggactgtgaacagattgctctcctggctcagaaatagagcccacaccttgccttcaccctgactgctgcaaatgtgccctcagatggccctgtgatgccatttttgtcttctaacgggagctgaatgtcactgctctcccagyagggccacatgctggcagagtggagccctggtcgtgtgccgtgccaggcagagctgaacggctgtcaggagggacagcacctcagggtctttagagttctgttggttggggttcaaaaaggcaaaccccaaaccaaaagagctctcacacagtgtgaattttcctctcccttctgaccccaaaaatatgaaagcaaggtctaccctaaccaggctgcaaggtgaaatctgccccatcccaccgcarctcccctggggacgctggctcaaggcagcagttggcctgctgtacctctgctcc

SEQ ID NO: 84208 - DNA, 600 bp, Chicken  19866894381468_5
ctgtgatgccatttttgtcttctaacgggagctgaatgtcactgctctcccagyagggccacatgctggcagagtggagccctggtcgtgtgccgtgccaggcagagctgaacggctgtcaggagggacagcacctcagggtctttagagttctgttggttggggttcaaaaaggcaaaccccaaaccaaaagagctctcacacagtgtgaattttcctctcccttctgaccccaaaaatatgaaagcaaggtctaccctaaccaggctgcaaggtgaaatctgccccatcccaccgcarctcccctggggacgctggctcaaggcagcagttggcctgctgtacctctgctccacaggctgcccaaccctcctgtaaataagacaaagggaaagagaagcgatccatcttatcagcacatgggaaatggggacgcaccatcagtcccacagatgcgtcagcactgctgtactttggactccctgtaatgactgttccactttgtaattttccaagcaaaaatcgtttcgtctctgcagtaaactgcacgctgaaaattgccaccgctgaagcagcagggcctgaggtactgcacctctc

SEQ ID NO: 84209 - DNA, 600 bp, Chicken  19866894381470_1
ttaatgtttaaaataaatacagagatgaggcagattagaccccaaatgccactggattatgaagaaacaaaggtctatgagatacacatccaggccactgacagggaaggactgtctaagcactgcaaggtagaggtgtgggtggaggatgtggatgacagtgtccctgaagtggcaatcacctcccacaccaacaccctctccaaggctactctgctgaacacagtggtggtgttcttcagcttgcaggaccaggacttggggcacaatggcaggacaaggtgtgaactgctggatgascatttcagcacttgagcgtttcactgctgactgatgaagcatacatgctggtgacgttggaaggactgraccaggaggaggtgtcaaagtacaacatgacagtgtgggccagcgacatgggctctcccacactctcagcattgaagacactgctggtgtggctcttggacattaatgacaacgtatacaccttctctcagactattacaccataatgctaagcaacgacaagcctgtgggtaagatcctgaaccgtcttgatgctatggacacgtacatggctgaaaacacccatgtgag

SEQ ID NO: 84210 - DNA, 600 bp, Chicken  19866894381470_2
aaggtctatgagatacacatccaggccactgacagggaaggactgtctaagcactgcaaggtagaggtgtgggtggaggatgtggatgacagtgtccctgaagtggcaatcacctcccacaccaacaccctctccaaggctactctgctgaacacagtggtggtgttcttcagcttgcaggaccaggacttggggcacaatggcaggacaaggtgtgaactgctggatgascatttcagcacttgagcgtttcactgctgactgatgaagcatacatgctggtgacgttggaaggactgraccaggaggaggtgtcaaagtacaacatgacagtgtgggccagcgacatgggctctcccacactctcagcattgaagacactgctggtgtggctcttggacattaatgacaacgtatacaccttctctcagactattacaccataatgctaagcaacgacaagcctgtgggtaagatcctgaaccgtcttgatgctatggacacgtacatggctgaaaacacccatgtgagatacatactggagccaaaaccactagggaccactgatgtgacacacttattgttggtggatgccaagag

SEQ ID NO: 84211 - DNA, 600 bp, Chicken  19866894381474_1
aaataccagtctcaagggaagacaattattcagaagcgtagcactgaacacttgcctgaaagagactggctaatgttaaaattctgatttcagtgttcttttgccatatatgtaaatatatgtgcttatatgcattaaaacattatctgcctgtgtgaagagcagttctgaataaggcttttacctccgcagttttgttcgcattggattagataacctgtatgtattatagcaccattgattcaattaaacaaaaaaacttctttcagacttcaaataattcaaaaactgccccaaacrcatgaaaactgtatgarttcacttgtaagacatgacttcattttgacttataattgctaaaagtttggactcagagctgctagttatatacttgtaagcaatacatatyttctatatatgtaatggaaygtgtattttcgtgtgtaactataaatgaaaaatgggccaaaattttctgaaataatctaaactgggaatcccaggacctcttaactgatacattcagtcccccaggaggctaaacatttttgaagaacacattgctaatgcctaaaatcaggaaagccctttcccttatgt

SEQ ID NO: 84212 - DNA, 600 bp, Chicken  19866894381474_2
gaagacaattattcagaagcgtagcactgaacacttgcctgaaagagactggctaatgttaaaattctgatttcagtgttcttttgccatatatgtaaatatatgtgcttatatgcattaaaacattatctgcctgtgtgaagagcagttctgaataaggcttttacctccgcagttttgttcgcattggattagataacctgtatgtattatagcaccattgattcaattaaacaaaaaaacttctttcagacttcaaataattcaaaaactgccccaaacrcatgaaaactgtatgarttcacttgtaagacatgacttcattttgacttataattgctaaaagtttggactcagagctgctagttatatacttgtaagcaatacatatyttctatatatgtaatggaaygtgtattttcgtgtgtaactataaatgaaaaatgggccaaaattttctgaaataatctaaactgggaatcccaggacctcttaactgatacattcagtcccccaggaggctaaacatttttgaagaacacattgctaatgcctaaaatcaggaaagccctttcccttatgtttaaatctaacacatct

SEQ ID NO: 84213 - DNA, 600 bp, Chicken  19866894381474_3
atgtaaatatatgtgcttatatgcattaaaacattatctgcctgtgtgaagagcagttctgaataaggcttttacctccgcagttttgttcgcattggattagataacctgtatgtattatagcaccattgattcaattaaacaaaaaaacttctttcagacttcaaataattcaaaaactgccccaaacrcatgaaaactgtatgarttcacttgtaagacatgacttcattttgacttataattgctaaaagtttggactcagagctgctagttatatacttgtaagcaatacatatyttctatatatgtaatggaaygtgtattttcgtgtgtaactataaatgaaaaatgggccaaaattttctgaaataatctaaactgggaatcccaggacctcttaactgatacattcagtcccccaggaggctaaacatttttgaagaacacattgctaatgcctaaaatcaggaaagccctttcccttatgtttaaatctaacacatctgaattctctcttgagtagagatgctttccagaagtgagagacttargatgctatctagagatgtcacatgctaattttaggcataaaatttg

SEQ ID NO: 84214 - DNA, 600 bp, Chicken  19866894381474_4
atgcattaaaacattatctgcctgtgtgaagagcagttctgaataaggcttttacctccgcagttttgttcgcattggattagataacctgtatgtattatagcaccattgattcaattaaacaaaaaaacttctttcagacttcaaataattcaaaaactgccccaaacrcatgaaaactgtatgarttcacttgtaagacatgacttcattttgacttataattgctaaaagtttggactcagagctgctagttatatacttgtaagcaatacatatyttctatatatgtaatggaaygtgtattttcgtgtgtaactataaatgaaaaatgggccaaaattttctgaaataatctaaactgggaatcccaggacctcttaactgatacattcagtcccccaggaggctaaacatttttgaagaacacattgctaatgcctaaaatcaggaaagccctttcccttatgtttaaatctaacacatctgaattctctcttgagtagagatgctttccagaagtgagagacttargatgctatctagagatgtcacatgctaattttaggcataaaatttgtatatatatataaatatatc

SEQ ID NO: 84215 - DNA, 600 bp, Chicken  19866894381474_5
tttggactcagagctgctagttatatacttgtaagcaatacatatyttctatatatgtaatggaaygtgtattttcgtgtgtaactataaatgaaaaatgggccaaaattttctgaaataatctaaactgggaatcccaggacctcttaactgatacattcagtcccccaggaggctaaacatttttgaagaacacattgctaatgcctaaaatcaggaaagccctttcccttatgtttaaatctaacacatctgaattctctcttgagtagagatgctttccagaagtgagagacttargatgctatctagagatgtcacatgctaattttaggcataaaatttgtatatatatataaatatatctgttatgataaagcatatagagtatgtagataaaaatatataaagtatgcagatatatatatacactttatatattataatatatattatgtatactttatcataacagatattttcctgctgtgctgagattttgaacttattaaaatcaatagaactgtttacagcaactctgattactaatgacacctataacatggatttccatctctctttgggtttgccacgactgag

SEQ ID NO: 84216 - DNA, 600 bp, Chicken  19866894381478_1
actgggctctgtaacacactgcacacacattaacacatatctgaaagacgtatgcgcaatttcgatttcaaaaagcctgaggaacaagttcaatagctctatatctaagttaaacatttcattaagtgctttatatggcacagactttactagttaagatactatttctggtatgtgttaaagcctgttaaatgtggaaatgcttccaaaacaaactctaaagagaagcaagagactacatttgaaacatctggttaaaaaataggtttgtacaatggtcataagcaaggagcgaattaracaaagtacaaggaatattataacaattcatctgtgcttctcactgcctcccggcccctctgtgcagyrggtttcataaacctcagaagctggacatcccttccgattatgccagaaccatggcattttcagcacagagtgataacaaagcacctgtacaattccaccctttacttcaatcattcagttacattactggcagcaatgtgcagtcttaatgacaggaatctgtacagagtaagcagtatcagagcagctccatcacaaatataacagaaagcctgttccgaacatggtaaa

SEQ ID NO: 84217 - DNA, 600 bp, Chicken  19866894381478_2
caaaaagcctgaggaacaagttcaatagctctatatctaagttaaacatttcattaagtgctttatatggcacagactttactagttaagatactatttctggtatgtgttaaagcctgttaaatgtggaaatgcttccaaaacaaactctaaagagaagcaagagactacatttgaaacatctggttaaaaaataggtttgtacaatggtcataagcaaggagcgaattaracaaagtacaaggaatattataacaattcatctgtgcttctcactgcctcccggcccctctgtgcagyrggtttcataaacctcagaagctggacatcccttccgattatgccagaaccatggcattttcagcacagagtgataacaaagcacctgtacaattccaccctttacttcaatcattcagttacattactggcagcaatgtgcagtcttaatgacaggaatctgtacagagtaagcagtatcagagcagctccatcacaaatataacagaaagcctgttccgaacatggtaaaacaggtgtttgggggccccattgtatgctgccaatcctcttccctcctcaggttgccctactacctgc

SEQ ID NO: 84218 - DNA, 600 bp, Chicken  19866894381478_3
aaaaagcctgaggaacaagttcaatagctctatatctaagttaaacatttcattaagtgctttatatggcacagactttactagttaagatactatttctggtatgtgttaaagcctgttaaatgtggaaatgcttccaaaacaaactctaaagagaagcaagagactacatttgaaacatctggttaaaaaataggtttgtacaatggtcataagcaaggagcgaattaracaaagtacaaggaatattataacaattcatctgtgcttctcactgcctcccggcccctctgtgcagyrggtttcataaacctcagaagctggacatcccttccgattatgccagaaccatggcattttcagcacagagtgataacaaagcacctgtacaattccaccctttacttcaatcattcagttacattactggcagcaatgtgcagtcttaatgacaggaatctgtacagagtaagcagtatcagagcagctccatcacaaatataacagaaagcctgttccgaacatggtaaaacaggtgtttgggggccccattgtatgctgccaatcctcttccctcctcaggttgccctactacctgcc

SEQ ID NO: 84219 - DNA, 600 bp, Chicken  19866894381483_1
aatttggcaacatgtatcttatataccctatcatataccaaacatttattgtttatattgtatccatacacacatatacagcctctggaccacgttcacgcagtcccatggatgcagagacagaagactctcgcacttagagccgcaaatgcaaagacagatgaactcacgagcactgaaatgacgtgttgatgtttcctggaaccagcagagctttggatggcctgtaaacgttcccaatgcttcctttacaacctcgctggtatgacattctaataatccaacccgaaaacaactttrgcttttkccaggttggactggaaagaggaacaaaagttctcccagctayatataaacagctttgattttggggcacatcccagccagtgcctgcaagggcacaaacaagttctgaaacgcactgctctcctcacgtgggataggccaaaccagcgagcggctcagctyttccaaaattcagccagcaaaaacgtggtctgtagtaagacacaaattcagagtagatcagcagctcgcaaaacacagccaagcctgtgctgctgctacgccccttcccaaaaaaggctgccgctgagaacc

SEQ ID NO: 84220 - DNA, 600 bp, Chicken  19866894381483_2
caacatgtatcttatataccctatcatataccaaacatttattgtttatattgtatccatacacacatatacagcctctggaccacgttcacgcagtcccatggatgcagagacagaagactctcgcacttagagccgcaaatgcaaagacagatgaactcacgagcactgaaatgacgtgttgatgtttcctggaaccagcagagctttggatggcctgtaaacgttcccaatgcttcctttacaacctcgctggtatgacattctaataatccaacccgaaaacaactttrgcttttkccaggttggactggaaagaggaacaaaagttctcccagctayatataaacagctttgattttggggcacatcccagccagtgcctgcaagggcacaaacaagttctgaaacgcactgctctcctcacgtgggataggccaaaccagcgagcggctcagctyttccaaaattcagccagcaaaaacgtggtctgtagtaagacacaaattcagagtagatcagcagctcgcaaaacacagccaagcctgtgctgctgctacgccccttcccaaaaaaggctgccgctgagaaccacttgtt

SEQ ID NO: 84221 - DNA, 600 bp, Chicken  19866894381483_3
tgtttatattgtatccatacacacatatacagcctctggaccacgttcacgcagtcccatggatgcagagacagaagactctcgcacttagagccgcaaatgcaaagacagatgaactcacgagcactgaaatgacgtgttgatgtttcctggaaccagcagagctttggatggcctgtaaacgttcccaatgcttcctttacaacctcgctggtatgacattctaataatccaacccgaaaacaactttrgcttttkccaggttggactggaaagaggaacaaaagttctcccagctayatataaacagctttgattttggggcacatcccagccagtgcctgcaagggcacaaacaagttctgaaacgcactgctctcctcacgtgggataggccaaaccagcgagcggctcagctyttccaaaattcagccagcaaaaacgtggtctgtagtaagacacaaattcagagtagatcagcagctcgcaaaacacagccaagcctgtgctgctgctacgccccttcccaaaaaaggctgccgctgagaaccacttgttggttcacatggggtcccaaacagttcctctctcaaagagagc

SEQ ID NO: 84222 - DNA, 600 bp, Chicken  19866894381483_4
acgagcactgaaatgacgtgttgatgtttcctggaaccagcagagctttggatggcctgtaaacgttcccaatgcttcctttacaacctcgctggtatgacattctaataatccaacccgaaaacaactttrgcttttkccaggttggactggaaagaggaacaaaagttctcccagctayatataaacagctttgattttggggcacatcccagccagtgcctgcaagggcacaaacaagttctgaaacgcactgctctcctcacgtgggataggccaaaccagcgagcggctcagctyttccaaaattcagccagcaaaaacgtggtctgtagtaagacacaaattcagagtagatcagcagctcgcaaaacacagccaagcctgtgctgctgctacgccccttcccaaaaaaggctgccgctgagaaccacttgttggttcacatggggtcccaaacagttcctctctcaaagagagcggcacagggcgcccagggaggtggcaccgtccctgcaggcattcaagaaccrtgtggatgcggcactgaggggcgtggtgagcaggcaccggtggtgctgatggttgatgaccttttag

SEQ ID NO: 84223 - DNA, 386 bp, Chicken  19866894381483_5
caaacaagttctgaaacgcactgctctcctcacgtgggataggccaaaccagcgagcggctcagctyttccaaaattcagccagcaaaaacgtggtctgtagtaagacacaaattcagagtagatcagcagctcgcaaaacacagccaagcctgtgctgctgctacgccccttcccaaaaaaggctgccgctgagaaccacttgttggttcacatggggtcccaaacagttcctctctcaaagagagcggcacagggcgcccagggaggtggcaccgtccctgcaggcattcaagaaccrtgtggatgcggcactgaggggcgtggtgagcaggcaccggtggtgctgatggttgatgaccttttagtggtcctttccaacctcaa

SEQ ID NO: 84224 - DNA, 600 bp, Chicken  19866894381495_1
ctggtgttgtagacactgtcctagtcagtcccacagggatccttcagtacaaggagttatcaagggttggtagctagatttgctttatttctacttggggctttctctagaaagcattgtcttcagagccattgctagtgcttaccctgttctaaaatgaaggtaactacattagccactggtatggcatgtgtcccttccacagctctcacatgaaatactgtctactcttagtagagcctcaacaacttacctgggtttcacccacggagctcatacactccacaaagtaggactgtrgtgatgtctccaggacctgtgcatgtcctatgttgtatcctcacatcatccattaatgggaataaggtgggatgttgctgcagcaggaatgcttactagtcagattgtggactgcaagggcagtcatgctctctccctgccttacttcttctcgtagcaatgtttaacgttagaaggccatctcagtgtaaattgagttcagggatcttgagtgttttgttttgttttgctttgttctccatctggcaattatttagatggtagtagcataaagctggaactttctatatcacatttcat

SEQ ID NO: 84225 - DNA, 599 bp, Chicken  19866894381496_1
  misc_feature (1)..(186): n is any nucleotide
nnnnnnnnnnnnnnnnnnnnnnnnnnnnnnnnnnnnnnnnnnnnnnnnnnnnnnnnnnnnnnnnnnnnnnnnnnnnnnnnnnnnnnnnnnnnnnnnnnnnnnnnnnnnnnnnnnnnnnnnnnnnnnnnnnnnnnnnnnnnnnnnnnnnnnnnnnnnnnnnnnnnnnnnnnnnnnnnnnnnnnnnnnagtatattttggaaaccatcatgagctctgcttcgaaacagtgagaatggagagcatttttcactgaacaagaaaacttccagttggctgcttccttattaagggatgtaataytatttacctgaagtcagacagcagagccacaagaagaaactgttgctctcaaacatatttcagcactggttacatttggttactttcttgaatgctttcgcttcttccttgataacaaaggctttccatttggggcattttatccaatttrtcctttcgtctcctccacaaactcaaaggaagaaaggaaaagtgactaagagcatcagggctgggctgctatcccagctggctgtcccgagctttgttgtttcaggcagcaagtaaatttttaggaagtccttgttggggagattgtt

SEQ ID NO: 84226 - DNA, 599 bp, Chicken  19866894381496_2
  misc_feature (1)..(35): n is any nucleotide
nnnnnnnnnnnnnnnnnnnnnnnnnnnnnnnnnnnagtatattttggaaaccatcatgagctctgcttcgaaacagtgagaatggagagcatttttcactgaacaagaaaacttccagttggctgcttccttattaagggatgtaataytatttacctgaagtcagacagcagagccacaagaagaaactgttgctctcaaacatatttcagcactggttacatttggttactttcttgaatgctttcgcttcttccttgataacaaaggctttccatttggggcattttatccaatttrtcctttcgtctcctccacaaactcaaaggaagaaaggaaaagtgactaagagcatcagggctgggctgctatcccagctggctgtcccgagctttgttgtttcaggcagcaagtaaatttttaggaagtccttgttggggagattgttcccctgtatcyctcaccgcacctatgtctgcatgcagatgggcaaggcagagcagaaaagaaatgcccatgttttacaaggaaaccaagaaacagaaataggcaaaacctgagatagaaggagaaactgaacaagtattccagagttcaag

SEQ ID NO: 84227 - DNA, 600 bp, Chicken  19866894381496_3
aagtcagacagcagagccacaagaagaaactgttgctctcaaacatatttcagcactggttacatttggttactttcttgaatgctttcgcttcttccttgataacaaaggctttccatttggggcattttatccaatttrtcctttcgtctcctccacaaactcaaaggaagaaaggaaaagtgactaagagcatcagggctgggctgctatcccagctggctgtcccgagctttgttgtttcaggcagcaagtaaatttttaggaagtccttgttggggagattgttcccctgtatcyctcaccgcacctatgtctgcatgcagatgggcaaggcagagcagaaaagaaatgcccatgttttacaaggaaaccaagaaacagaaataggcaaaacctgagatagaaggagaaactgaacaagtattccagagttcaagtcagggccccacttgcaggttggtcctatacaaattctctggcatctgccctgggggaagtaaggaacttaatatctttaagggctctgtcttggcagatcaaatcaggggtatctgcacagcacttgaaaaaccttgaacagaaggctctatcaaagca

SEQ ID NO: 84228 - DNA, 600 bp, Chicken  19866894381497_1
ttgaaatctgatggcagaattttggaggtgtcagtggagaaacacctacacttacagaagtcttggcagcacgtagctccagtggggcttgttggtgtgtttgggattgactggaaaatggaattaaagttcattttggagaaggtttgggatggatgacagcccaatttaaacactacgtggaatgtattctacttgtctcctaagttcctgaaagcaattctgaaacgtgggcactgtttaaaaacacacagatgtggactagcacggcttgttgtccttgtgtgaggattttgttcyttagaagactttgcaacaactgacatacttctatattaacattttacaggatctcatggttggagatgaagcaagtgaattacgttcaatgctggaagttaattatccaatggagaatggcatcgttcggaactgggatgatatgaagcacctctgggattacacatttggaccagagaaacttaatattgacacaaaaaattgtaaaatactgcttacagagcctcccatgaacccaactaaaaacagagagaagatcgtggaggtatgtctctctagtaggagctaagatgtgctgtt

SEQ ID NO: 84229 - DNA, 600 bp, Chicken  19866894381505_1
aaacagcttcagactttgtggagagagtcttaaaaaccaaaacaaacactcaaacttagttgcagtgcttgcaggtgctacgtattcaccaattacacacagctcttacctttctggcttgttaacagactgctggaagtaatgttctgccatacgcaacagttccaagtactttgcagagccttccatttctccctgtttaatccagcacacaagcaggaatgtaagcaattctccctccacttgcttttcacggccagatttcataactacaactattcctcaaactgatatttttgsctgggaaaattcagaacaagtaatatattgctttgccatttatacttggagcacggtataggaaatgggcctaaggtgctttcacagccagatataaagatatttactgcaacatcacacatgaaaaacaatcaaagcgaatgctgtaatgctcacagcagggcagatttactacactaaagttacagctgtatgcaaacagtgaataaatctcacgatgtttgggaattactctctgaagtggcactgtgatactataagaacgttcccctcttgcaataactaaaagatatcaagtta

SEQ ID NO: 84230 - DNA, 462 bp, Chicken  19866894381505_2
ggcagatttactacactaaagttacagctgtatgcaaacagtgaataaatctcacgatgtttgggaattactctctgaagtggcactgtgatactataagaacgttcccctcttgcaataactaaaagatatcaagttaaccattctgacagaattttccagttttaccatctataaacctcaaataattattcaaagccatcttaatttccaaaataaatagattaattttgaagggggacaaaccacacatgcctcctttgaagatattcatggattttccatagctggaagcattaratttcgtgccctgctagaaatacatacaaaagttcaagagctaaaaactgtactgctttttttttttttcctggatcatgtaaaagatacacacagacacaatacttcaccttaaaagtatccttttccttcaggctgtggaggtacctctcccacagggga

SEQ ID NO: 84231 - DNA, 600 bp, Chicken  19866894381506_1
gattgtaaggctgttacagtaaatcaccccattgacgctcttgttctgcaggtgctacgttatcttctgctctgactgatatattttcatttccccacatctctgacttacctggtgttcttctcagtggctgtgtcccagctgagaggttaccagggcgtttagagtacatttattttggaataattgcacagaattaatccagctttcacaaaagctcaggagaagcatctagttgaaagcagcatttagttgacttacagccaaaataaaacagaacagtccttttgtattcccagycagtgctgcaggaaaaggtttagcttaaccacactaaccttttagcagtgagatcttttccacggtaggcagctttttgggtgatatatacgttcatagataatgggacttgctcttgagcaaggcatctgttgacctttttctcttggtgtagttgtctatatccagatatttggtggggagagttgaatagataatagagttttatttttacgtggaataatattgcatccaagacttagaaggcagtcttgaaaaataatatgctttttcatttcttttatttcttgagcagtattt

SEQ ID NO: 84232 - DNA, 599 bp, Chicken  19866894381512_1
  misc_feature (1)..(45): n is any nucleotide
nnnnnnnnnnnnnnnnnnnnnnnnnnnnnnnnnnnnnnnnnnnnnctctacatgtgaatgaatttctgaatacatcagtcatcacatttgaaaaagggatcctaacgtgaacaaaattttccacttcaaagtaaaaatattgatcttgtcttcctttcaagtgttctttggcttactgagaaagccacaataactttcaaacaaaacttgagacaagcttggtagtcatccttttgttctcatcaagtagcaatagtcatcttctgtttgccttgattccatctcatgaatgtctgactytgtttttcttggtaggtcataaatttccacaaaagtatcaactgtcacactgtgaagagggccaataagtataattgctaatgtagatggaataggaattctttctgatgcttacttcatccttagtaaaactgaatagtaaatgcaaaatcaaaattgtcccatttcatttctggcctgacatttattggcatatataagacaggaaaatcaagaaaagtaaattacatctaagggtactcttctttcttaattctgttgtgctcctatcaagctctttaaactgagtcttgcagtgt

SEQ ID NO: 84233 - DNA, 599 bp, Chicken  19866894381515_1
  misc_feature (1)..(5): n is any nucleotide
nnnnntctcttacatgtagctttacattaagtgcagactgctgctagctaacattcaaaggtctgtaaagagacaggagaaaaaacagaactcaaaccagcccaaggacacatgtcattggtgtagattgtagtctgcaacaacattgtcctggcaatacagactatagttccaggtatgtgatggtctgtttgtctgtccagacagaaaataacctttgaaaaagaagtcctgacagcaaaggagaaactgcttcagttttttttatttataaaaatacccaaactttaaaaacccacygagatgaaaccagcacctagataagggtgttggtctacactatgggcagaaaaacagagacagcagtgacatccttcagagagctattttaattcattccatatagctgctatggatagttgtaactacctctgatkgatcttgggcacggtacctctatccacatccccacagaggaatctcacccttttctttcacctacctacttctcagctgttcccctcagggagttcctgaagtgtagcagtgttgagagcagtcagctgccctgcctgctagcatggggccaccagtctccg

SEQ ID NO: 84234 - DNA, 600 bp, Chicken  19866894381515_2
caacaacattgtcctggcaatacagactatagttccaggtatgtgatggtctgtttgtctgtccagacagaaaataacctttgaaaaagaagtcctgacagcaaaggagaaactgcttcagttttttttatttataaaaatacccaaactttaaaaacccacygagatgaaaccagcacctagataagggtgttggtctacactatgggcagaaaaacagagacagcagtgacatccttcagagagctattttaattcattccatatagctgctatggatagttgtaactacctctgatkgatcttgggcacggtacctctatccacatccccacagaggaatctcacccttttctttcacctacctacttctcagctgttcccctcagggagttcctgaagtgtagcagtgttgagagcagtcagctgccctgcctgctagcatggggccaccagtctccgtttccggatgcattcccagatccatttgggagacacccgcttagcaccaggattctcatcaatgtccccaataatgtgtgttgctgaggctgtgtcatactctgtcacgagatcaccatcgtacgctatgaagtagcg

SEQ ID NO: 84235 - DNA, 439 bp, Chicken  19866894381521_1
gggaaaaaggacatctcaagaagtgatacccagggctcacagctgtgctacagttgtcagggttttgtatggatagtggaggaaaccttagaagagctacggaaaacttgacattcagaacctaaaaaggatggatattgcacaatgtctttgagatgcagatcaaagtcagtagatacttcccaaaaagggacacatatgagccatatctcaacattaaaacatcccccgctcctgaatcttattgaactatctagatcttagttttgcagctgactctttcaatatcttgggtcaaaycaataaccttgatctagatacacctgaagtttagatctggattcagactttggaagctttgcctgtctagaaaatgcatctttctctaaaacttgttgcacacaaaaggtccctttagcaatcaagaactttgaccact

SEQ ID NO: 84236 - DNA, 600 bp, Chicken  19866894381527_1
tgagagggttaaagtgcggctgaggttattttgtatctagctgctggtttgtgtccatgggaaataatagctaaaaaaaaaagtctctgatttatgttggggggacttattgcagctcttccttttggtggctcttttttctgtactatccatctctttgcctgtgcaataactcagtatgtagaaatctattaactgaaaagatcatggcagagtgtctctgtatctggttttcaaccaaataaggttctggagcaagtcttagtatgagtaaatgctaaagaaatggaaaactttaayggccgcttcagcataaggctgtaaccttttcctagatactgaaaccctgtattctgttcaattggagttacaggactcctaggggtgaagttattttcttcagtaggaagctttcaactttgtgaatgaagtagaagggcgacccgtttgttgcatagaccacctgcccctccaaagttcattccattgcagatcatgcagttcatgtgagtgaacttcttaaaaagaaatttgggggcaatctgtaggatttacaaaaaatcccctttgttgaaacacatcttgtgttgtatcatgtcc

SEQ ID NO: 84237 - DNA, 599 bp, Chicken  19866894381533_1
  misc_feature (1)..(62): n is any nucleotide
nnnnnnnnnnnnnnnnnnnnnnnnnnnnnnnnnnnnnnnnnnnnnnnnnnnnnnnnnnnnnnatttatttatttatttatttagtaagagtaatatattaaaagttttatactatattcctactgttctaatgttttttcactgaaatgtcattacccacatcaattacttcacagttggtacctttgcagtgtagcacaggtacgctgtacatgaggaaccaggctctgtctgaaacttaacaaacgaaggatatgcaaagatgttgcctgtcattcttcttgtgagacatttctggasctgccggggtcagttgctctgagaaaccaacaatccagcaggaagcatacggctgttaatccaactgtgcggtgatttcaacctgcaatagctgacrggccatcccttggctcctggctggggcctgtgctttcaggttcacatctgtcagaacctctggcaggccagcagcagcacctgsttgtcatattagttgtcatattccctcttcctcagtctctgtgagaccctgaataggaaagggtcttggatatgggttctcatctcagggacttaaacttttccctaaagtcaccctt

SEQ ID NO: 84238 - DNA, 600 bp, Chicken  19866894381533_2
ttaaaagttttatactatattcctactgttctaatgttttttcactgaaatgtcattacccacatcaattacttcacagttggtacctttgcagtgtagcacaggtacgctgtacatgaggaaccaggctctgtctgaaacttaacaaacgaaggatatgcaaagatgttgcctgtcattcttcttgtgagacatttctggasctgccggggtcagttgctctgagaaaccaacaatccagcaggaagcatacggctgttaatccaactgtgcggtgatttcaacctgcaatagctgacrggccatcccttggctcctggctggggcctgtgctttcaggttcacatctgtcagaacctctggcaggccagcagcagcacctgsttgtcatattagttgtcatattccctcttcctcagtctctgtgagaccctgaataggaaagggtcttggatatgggttctcatctcagggacttaaacttttccctaaagtcacccttcagtgcttttttccatttgccacacagaggtgggcactgcctccagcatgccctggggtagctaaagtatgcatgagagctcaggaaaagttcctcag

SEQ ID NO: 84239 - DNA, 600 bp, Chicken  19866894381533_3
acctttgcagtgtagcacaggtacgctgtacatgaggaaccaggctctgtctgaaacttaacaaacgaaggatatgcaaagatgttgcctgtcattcttcttgtgagacatttctggasctgccggggtcagttgctctgagaaaccaacaatccagcaggaagcatacggctgttaatccaactgtgcggtgatttcaacctgcaatagctgacrggccatcccttggctcctggctggggcctgtgctttcaggttcacatctgtcagaacctctggcaggccagcagcagcacctgsttgtcatattagttgtcatattccctcttcctcagtctctgtgagaccctgaataggaaagggtcttggatatgggttctcatctcagggacttaaacttttccctaaagtcacccttcagtgcttttttccatttgccacacagaggtgggcactgcctccagcatgccctggggtagctaaagtatgcatgagagctcaggaaaagttcctcaggactctcaggagacattctggagcatgaatttgtaggtaggaggtgcaactctgggtagcgcagagctgctgggcagatggtgc

SEQ ID NO: 84240 - DNA, 600 bp, Chicken  19866894381540_1
ttcagcctctacagcacagtcacaagattcctgtccagatcttatatctcttcccactccagaatgacacaacttccacacactttggtagtaaaaggcctgtttgttagaataccttttatttgctaccttccattatttactgtgcatgacaaggtcacttatgaagcctagtatctgtgcgaagatgtaacagaacaatccctatggccaagaacaggttacagtgtgagtaactcctcttcaagttgactaaattagaaaatctatatggaaaggaataaaaaacatctgctttgyttttctyttttgattttaattttagtgtattgatattgcctgtatctctgtgagctagataagttatttacagactcagaaagagcaccattgcttgttggattgagcaatggaaagaatgcctctgccatttaggaatttgctgccatattgatagctttcttctgcaacatagactttaattgtagtgactccttcaaatacttttcctgtaattccttctgttattttttttttctttcgagttatttttagatgaatcaaagctttctgcttttctgaagctttcagtgacttcag

SEQ ID NO: 84241 - DNA, 600 bp, Chicken  19866894381540_2
tctacagcacagtcacaagattcctgtccagatcttatatctcttcccactccagaatgacacaacttccacacactttggtagtaaaaggcctgtttgttagaataccttttatttgctaccttccattatttactgtgcatgacaaggtcacttatgaagcctagtatctgtgcgaagatgtaacagaacaatccctatggccaagaacaggttacagtgtgagtaactcctcttcaagttgactaaattagaaaatctatatggaaaggaataaaaaacatctgctttgyttttctyttttgattttaattttagtgtattgatattgcctgtatctctgtgagctagataagttatttacagactcagaaagagcaccattgcttgttggattgagcaatggaaagaatgcctctgccatttaggaatttgctgccatattgatagctttcttctgcaacatagactttaattgtagtgactccttcaaatacttttcctgtaattccttctgttattttttttttctttcgagttatttttagatgaatcaaagctttctgcttttctgaagctttcagtgacttcaggacatcc

SEQ ID NO: 84242 - DNA, 600 bp, Chicken  19866894381540_3
cttttcctgtaattccttctgttattttttttttctttcgagttatttttagatgaatcaaagctttctgcttttctgaagctttcagtgacttcaggacatccactcctttcaggacttgacagcctacaccttgcaaagacacaaaggaacacactttgcaattaaagcaatgaaagttagaagactcactgcccacagcctgtgtttgaagaaagcccttacattgcagtacttctgtttcctgtatcccttccataccaaggttccctaagcagagcataaagcagggggcctcayaggggaccctactcaagccaagttcctagcaaacatcacagatctggctagtgctagcccataggactgcaaggacaagcactgcctgaagcaatgataaaaatgtttgctctatacctttgttctattctgtatactgaacaaaataccttggagctggggaaattgcatgtcagtgctgacatttattctagatccaaaataaattacatacaggactttttggtatctggctgtgcatacctgtctacacatatattctgaagaaaatgagcagggttagcagaacagcctgcagca

SEQ ID NO: 84243 - DNA, 600 bp, Chicken  19866894381554_1
caaacaggaccctcctactttgttcttcctggctgcggataagcagatgttgcagcaaccttttatccacatcagacttccaaatcactacatctgtgtctgtcccacgttatttggtgatgacaaccagcaggctggcctgcgtgcaacacaaatcatcaaagccttacgtacaactttaaacgtgcatgttttctcctgtggctcaagaacaaaggcaacgttgggatcagcttctgactgtgaagctgcccaacaaagcagctgactttaatgtttttttcctgaacgtgccacttyttgagatcccagtgcagagcatttaaaaccttccctgagatggtgtgaggtgccagccccacagctactcaccccatcagctagggcagcacccagaagttgggcagctgaccgttggtgtcctttgctgctatacctctatatgaagagccaatgaaatctagagagcccagggtggcacgagggataatgcctattgccacaggatttgggtgagagaattgaacggaggaaaaaaataaagmaagcactgttaagcagagtgccagcagttccctgagctttctatttttagtgaaa

SEQ ID NO: 84244 - DNA, 600 bp, Chicken  19866894381554_2
aagctgcccaacaaagcagctgactttaatgtttttttcctgaacgtgccacttyttgagatcccagtgcagagcatttaaaaccttccctgagatggtgtgaggtgccagccccacagctactcaccccatcagctagggcagcacccagaagttgggcagctgaccgttggtgtcctttgctgctatacctctatatgaagagccaatgaaatctagagagcccagggtggcacgagggataatgcctattgccacaggatttgggtgagagaattgaacggaggaaaaaaataaagmaagcactgttaagcagagtgccagcagttccctgagctttctatttttagtgaaacactttaagtgggttttaggaaagtggatttgcttgagcagttgagagtaatttgaacacctggaaaacgcagcatttaattgagcttctactgactgtgcgtcacggtctcctttatgttttatcacagcagtgggagagccatgctcatgtgtggtctcattagcagattgactgcttctgctctgtgttttgttgctcatcccttcccatgggaacctcttgctgtttgaagagctcctgag

SEQ ID NO: 84245 - DNA, 600 bp, Chicken  19866894381561_1
cttggcaaggtagcatcagtaacaattccctctgagcatatccatcttgtgaagtaagtggctgtcatttgctcattgagtggaggaaaaaagaaagcttattggaggtttgagtaagaaagccaagtgtttcagtgctccttggatgattaagcatctttggatctgtgaaggacattaatgactgcccttgccttcgcctacctgagtcagcatctctttcttatgagacacaggtgccagtgcttacaggtggaacaggcactcacggagttgaaatgtgcatggaagtaagtggakggtacagccctcaagcaaggaaggaagacttaaggtgcagttcagtgatggacttaatgactgaagggratgctgtgtcactttaggcgtgtttcctactttcttttcttcatcaggagtgagcaaatccaactcgcttcttgcccacatagggaagaggtagctggtgagtcctggatcaactcaaagccctagagtaaggaaaatgcctgttgtgccttttttatactgtagccgaggagatgtgcactgcttactgagcagggtgccactgagggcacacctggcttgtatttctca

SEQ ID NO: 84246 - DNA, 600 bp, Chicken  19866894381561_2
tgctcattgagtggaggaaaaaagaaagcttattggaggtttgagtaagaaagccaagtgtttcagtgctccttggatgattaagcatctttggatctgtgaaggacattaatgactgcccttgccttcgcctacctgagtcagcatctctttcttatgagacacaggtgccagtgcttacaggtggaacaggcactcacggagttgaaatgtgcatggaagtaagtggakggtacagccctcaagcaaggaaggaagacttaaggtgcagttcagtgatggacttaatgactgaagggratgctgtgtcactttaggcgtgtttcctactttcttttcttcatcaggagtgagcaaatccaactcgcttcttgcccacatagggaagaggtagctggtgagtcctggatcaactcaaagccctagagtaaggaaaatgcctgttgtgccttttttatactgtagccgaggagatgtgcactgcttactgagcagggtgccactgagggcacacctggcttgtatttctcatttctcactgcgaaaacaaaatatcacaaggatggaaatactagctaaaatgtcatgtcactgtctagc

SEQ ID NO: 84247 - DNA, 600 bp, Chicken  19866894381563_1
ctgcccatgtaatcttcagttttcaacccttttccctttctgccccaaaggaaaacacaatggtgaatgacagatgaagtccaaggagaatttctcttctatataagttctataggagggcacacctttgtatgaaagaggagaaacttgggattttggagaggcagcttctccattcaggcagtctaccacatagttgatgtgaatggtacagtccatctgaccttcctcccagcaggtgaatcctgtgcttttgccattagctttcaagctgtttctgcaggtatcagtccacacaayacaaacattgcaatagcacggatatgatgagctgtttctccagtttttacttcaaactacagacccttaaagcctcaaaagaacttcatatgccagtgccccagtgttttaaagatcaaagcagaaagcagcacaactaattcccatgcaaggcagagggttatattttcaattcacctcttaaacatatttatataattctgagtgcaaatatggtattgacttgtatgagaacagcaaactgggaagtgagatttctaattaccctatgtccacaggagcatgtgataatgaggaaaa

SEQ ID NO: 84248 - DNA, 600 bp, Chicken  19866894381566_1
aactcacagagttgaggacagttccttttcatccctgttcttacttcctttgatttctatagctctgcttaccaacgtgaataacagatcttgttgtaggaagaatttgcaaaacttctcaacatgatatggctaatggaaaatcatatattctctataatagcttcagttaaactcaatttttagtaagaaatgatacatctacatcagagtgataggttactccctcaaaaaaattaattttacaagataaaccaaaatacatattttcataaagtcacagaaagtattgtttttcayacatcactacatagccactttggtgctgatattctgcactagcacttcctggagttggatttacagaccacttattgtactactagatgctatgagacagcacaacaatccacatgaagttggctgcattctacattcctgaatataaaagactagaaagcacattcggatcatccagagtgaaaagcattctgtaaatgtaaatgattataaattggtgctgttgaatctgagtaaaatttactgtgaacaacagactttacatctctttcacacacgagagcacatatacatgcaaag

SEQ ID NO: 84249 - DNA, 600 bp, Chicken  19866894381571_1
tagaaacaaatggattaaaggtcactagcttgaaaccccacagtagcagcagaagaaatggacagataatcaattgctaaatagttaaaaggagagcttggagagcttttatcttgaaaccttctctgctcctcttaagctttctcatgtacaaggagatggtgtagcttgcttacatttgcatgccttacctgtttttcagactcatgcatagaggaatggaaagcatttagtgagctctgagggaatcaagcacttacttggctcctggcttttattgtgaatgagactgaagattgktgtgaactattatatggtagttctttggctgaaaattgaagaaaaataagctgctctaagtcaatccaaaacaggaggtgatgggctggggaagaaagtttgataaagtgaatggggggggggggggggacgaagccacaaaattctgtttgttttgtttgtttgtttgttttgttttgttttctgcaaaataccttatcagcagtgcaactgtgctacttacaaatgaatactgtgaaaccacctaaaggaaattcattcactttctaaaagctcactctaaaaacactgccaaaaatt

SEQ ID NO: 84250 - DNA, 600 bp, Chicken  19866894381573_1
ttgagtcagagcagagacctggcttgccacacccaacaccgtatccatcccatgtatgctgtttccatcctttgtagtactttttagaaacagcaaagacaggagagaaaaaaaagaaaaacagagtctcggtgggaatagtccagctgcttcagttttgaccgacaacttaaactaagtgtagatgtcagtatgaggggtaagctagtgagaaatcagcccatatgtgctcttagtcacctgagagcagtaggggtaggtcttgaaaagttgactttaaaagattataaccataagaaygtgatgggtccaatacatttgtatttagtgtgaccacataactgtaaaataaaggaaattcctaaaggaaatgtttttgtcacataaacactgagccacagcaaacacatctggcaaagctgaagatccagctccctagactgagcatcagaataccataaataatgtcaagaggcagaaatggggctgtcagatactgctactgtcattatcctattacactgaataaccatgagctttacttgtttatggaaactgtcaattgatattttaatctgtaagtgaagaaaacattactat

SEQ ID NO: 84251 - DNA, 600 bp, Chicken  19866894381574_1
ttctgagcaacaattctaattgcaaactgatcaagaaatttctcattaaaggcacgtttgatctttggttttattcagcattttcaaaggagaaatgctgattgttacaacatctctactgcacttcatagagtgcttaaattcctgctcgtgcctaaaccagggacttgccttttcctagtcacagagcgttcgctaaccccattatgataagcagaccccacatattcaaacagcactgttatgtgtttgtggcaataaaaagggaatattcgtgtttgaaggggacagtgggagttmagtgggaaaagctggaatggaatgtaaggagaaaaacatagtgctgaggtccagtgattgctcgtgtttgtgcagtgagatggcttatggtgtttgttggtagatcacaaacagagcagtggctgcagctgtccttcctccatgcaaacaccatgatcttaatctggtgctaatttcgtgagttaattttagcttatattttaggtgacagcctaatggcttttaaggattgtacctacatgcatcagcctcgtggcaatatcctctcatatggtgggtgtcaattatgtaacgcttgat

SEQ ID NO: 84252 - DNA, 600 bp, Chicken  19866894381582_1
ggccggcagagcacagccaagctctggggtcatggcctgggctgcacatgcgaccaggcatggggtgccagaggcagtgagaagcaagtggccgtgcagcccttgttccagcccgatgatatcagcctgggagagaaaggcaaggcgagctcggaacattatggagctgccaaagaaaacactgtcttcacaatgaacaaaagtctgattaattattaattgcctgccagctaattagcattcccttgggcagctgtctacagaatgccttatatttccaacccaccccaggccaacatmatctatgtaaatggctttggatcagaattagcaactgattcgttgcctgaaacaagttgttcccctcctctcatctcctcctgccacccctttttccgccacccaggggtttgagctcattacagcgtaagctaagcagaaaacaccccttgctgatgtctttctctgcagttcttgctcagcctttccgaggaacacagacacctcccaccagccctcagccttcacaacatggggccaacgtcagtgtctcggcactgacacaaagccatggccatggagcaggagcagctccaggct

SEQ ID NO: 84253 - DNA, 600 bp, Chicken  19866894381590_1
aaaggaaataaaagcagggtcaaagtaggagatccataaaagtgccatcgaaaggaagctgattaaaattttatttggaaagtcgcagtgttattagctccatcaaaagaacctttgtgagcatcagagagggtgattaggggattttcaagacatttaatccctctccccctcccagcaatgctgctgagtcaatgatcagccattccactccccgcttcaccttgcagggagatctggcagccactgcttctttatatttgatgcagcattacttgcctgcattttgcatttctatgwgctaactattagggacagacaccaacttgtttcctcagagccacctctgcagccctccaccttccactgagtatgacaagtattaaacttgcaccgtttcaaaagaggaggtggcagatggcagcaaagccagcaaaacaaagccaaaacccaaagatgggctggattcaccctgagctgtgaatcacatctttaaacgtctctctccatcaaacagtttcattgtcatggctcgtgtgcatctttatccactcgagctcaagagctgtgtttcaacacagttgtggtaccttatgtgga

SEQ ID NO: 84254 - DNA, 599 bp, Chicken  19866894381591_1
  misc_feature (1)..(172): n is any nucleotide
nnnnnnnnnnnnnnnnnnnnnnnnnnnnnnnnnnnnnnnnnnnnnnnnnnnnnnnnnnnnnnnnnnnnnnnnnnnnnnnnnnnnnnnnnnnnnnnnnnnnnnnnnnnnnnnnnnnnnnnnnnnnnnnnnnnnnnnnnnnnnnnnnnnnnnnnnnnnnnnnnnnnnnnnnnnnatatgatctgaggactgtttttaaagacaaggttttgccagcctgccagctgcagtgggtctgctaatttatcagttcgcctctctcaggggtataattgccagatgctttctgatgctcactacatyggaatcaacatcctcctaaaacctatgaaaataaactatagtagtgctacttgagataggaaaaaagctgtagtcagcactaaggcatggtggttgtaacatgtcacagcagactctgtgattgcaatggtcttctgtgacaaaatgaggccaagtgaaggaaaacattttccaaatgctaagcatacttctctacgtacgtattcatatcacttaatattttacacttgtatcacatcgatgatacaaaatatttcatctcagacaatgtgagcttgttttcaataacctcattgtgt

SEQ ID NO: 84255 - DNA, 600 bp, Chicken  19866894381591_2
ctcctaaaacctatgaaaataaactatagtagtgctacttgagataggaaaaaagctgtagtcagcactaaggcatggtggttgtaacatgtcacagcagactctgtgattgcaatggtcttctgtgacaaaatgaggccaagtgaaggaaaacattttccaaatgctaagcatacttctctacgtacgtattcatatcacttaatattttacacttgtatcacatcgatgatacaaaatatttcatctcagacaatgtgagcttgttttcaataacctcattgtgtccagtaatttatrctaaactctgcccacagagggctaatcttgatattctgtaagagaaacataagaagtccacgttgttacagctgtaaatgctatcagttatggaggacacattctgggcgtggggcagcagagctctcactaagtgtcctgcaagtgttgctcaactaaagaattttcagatttcagayrragactggagatttatttaaaagcttaaaatataatrcaggataaatgtatatcagtttcaaatgtttgtgtttcttaatattcatttttatattttaatattttaaaatacataagaaa

SEQ ID NO: 84256 - DNA, 600 bp, Chicken  19866894381591_3
tctacgtacgtattcatatcacttaatattttacacttgtatcacatcgatgatacaaaatatttcatctcagacaatgtgagcttgttttcaataacctcattgtgtccagtaatttatrctaaactctgcccacagagggctaatcttgatattctgtaagagaaacataagaagtccacgttgttacagctgtaaatgctatcagttatggaggacacattctgggcgtggggcagcagagctctcactaagtgtcctgcaagtgttgctcaactaaagaattttcagatttcagayrragactggagatttatttaaaagcttaaaatataatrcaggataaatgtatatcagtttcaaatgtttgtgtttcttaatattcatttttatattttaatattttaaaatacataagaaatgaaggaaatttaaaaaaaaaaaaaaaaagggagagagaaaatttgaggcacattccataattaggctgtgcccagcaatacaaagtaatgttgactccagtttaggtacccataacagcattaatttacaacagcagcaaaaaaagaagatatatattagactatttcagcatcttct

SEQ ID NO: 84257 - DNA, 600 bp, Chicken  19866894381591_4
ctacgtacgtattcatatcacttaatattttacacttgtatcacatcgatgatacaaaatatttcatctcagacaatgtgagcttgttttcaataacctcattgtgtccagtaatttatrctaaactctgcccacagagggctaatcttgatattctgtaagagaaacataagaagtccacgttgttacagctgtaaatgctatcagttatggaggacacattctgggcgtggggcagcagagctctcactaagtgtcctgcaagtgttgctcaactaaagaattttcagatttcagayrragactggagatttatttaaaagcttaaaatataatrcaggataaatgtatatcagtttcaaatgtttgtgtttcttaatattcatttttatattttaatattttaaaatacataagaaatgaaggaaatttaaaaaaaaaaaaaaaaagggagagagaaaatttgaggcacattccataattaggctgtgcccagcaatacaaagtaatgttgactccagtttaggtacccataacagcattaatttacaacagcagcaaaaaaagaagatatatattagactatttcagcatcttctt

SEQ ID NO: 84258 - DNA, 600 bp, Chicken  19866894381591_5
tacgtacgtattcatatcacttaatattttacacttgtatcacatcgatgatacaaaatatttcatctcagacaatgtgagcttgttttcaataacctcattgtgtccagtaatttatrctaaactctgcccacagagggctaatcttgatattctgtaagagaaacataagaagtccacgttgttacagctgtaaatgctatcagttatggaggacacattctgggcgtggggcagcagagctctcactaagtgtcctgcaagtgttgctcaactaaagaattttcagatttcagayrragactggagatttatttaaaagcttaaaatataatrcaggataaatgtatatcagtttcaaatgtttgtgtttcttaatattcatttttatattttaatattttaaaatacataagaaatgaaggaaatttaaaaaaaaaaaaaaaaagggagagagaaaatttgaggcacattccataattaggctgtgcccagcaatacaaagtaatgttgactccagtttaggtacccataacagcattaatttacaacagcagcaaaaaaagaagatatatattagactatttcagcatcttctta

SEQ ID NO: 84259 - DNA, 600 bp, Chicken  19866894381591_6
gtatcacatcgatgatacaaaatatttcatctcagacaatgtgagcttgttttcaataacctcattgtgtccagtaatttatrctaaactctgcccacagagggctaatcttgatattctgtaagagaaacataagaagtccacgttgttacagctgtaaatgctatcagttatggaggacacattctgggcgtggggcagcagagctctcactaagtgtcctgcaagtgttgctcaactaaagaattttcagatttcagayrragactggagatttatttaaaagcttaaaatataatrcaggataaatgtatatcagtttcaaatgtttgtgtttcttaatattcatttttatattttaatattttaaaatacataagaaatgaaggaaatttaaaaaaaaaaaaaaaaagggagagagaaaatttgaggcacattccataattaggctgtgcccagcaatacaaagtaatgttgactccagtttaggtacccataacagcattaatttacaacagcagcaaaaaaagaagatatatattagactatttcagcatcttcttagctttcccagttaaggctcagtaagttagccccact

SEQ ID NO: 84260 - DNA, 599 bp, Chicken  19866894381599_1
  misc_feature (1)..(116): n is any nucleotide
nnnnnnnnnnnnnnnnnnnnnnnnnnnnnnnnnnnnnnnnnnnnnnnnnnnnnnnnnnnnnnnnnnnnnnnnnnnnnnnnnnnnnnnnnnnnnnnnnnnnnnnnnnnnnnnnnnnncagtgcaggcaaatccatcagggacagaggtgaaggtcagtaagaaaatgaagcaatgttacatgaaatgatttttcattcttgtattactgaaggcactttgctgcaagaccttaaacatccatttcttagttaaagtgacccagacactcatttcttggagtgacaggctaggaacaaaatmgatttttacaaacttctacttactaagagcatggcgctatgcattttgctcagattaaacagagcctaccagccaagcctgcctccaaaacagcacgacaagcagtaatcgaggcaagcagcagccaataagccacagctttctctaatgccaagagaaaacttctttatgcaagccggcrttctacccttcccagtctgcccagacttgccccctcactgtgtgctttaccacrttattgacatagcacaagatggtttttgctgacagatgaacacgagacagtgctccctttcatc

SEQ ID NO: 84261 - DNA, 600 bp, Chicken  19866894381599_2
aaatgatttttcattcttgtattactgaaggcactttgctgcaagaccttaaacatccatttcttagttaaagtgacccagacactcatttcttggagtgacaggctaggaacaaaatmgatttttacaaacttctacttactaagagcatggcgctatgcattttgctcagattaaacagagcctaccagccaagcctgcctccaaaacagcacgacaagcagtaatcgaggcaagcagcagccaataagccacagctttctctaatgccaagagaaaacttctttatgcaagccggcrttctacccttcccagtctgcccagacttgccccctcactgtgtgctttaccacrttattgacatagcacaagatggtttttgctgacagatgaacacgagacagtgctccctttcatcaagtacccagctctgctcagacagcaggctaccrggagtgcagtctgccactgctaccttacaaaccacggcttcccatgcagcgcagccgtagaatgggatccttgactggactaccaagtcatcacataaaccagaaacaygytcgtgtcgttagagtgaacccactgctcctgattctg

SEQ ID NO: 84262 - DNA, 600 bp, Chicken  19866894381599_3
atccatttcttagttaaagtgacccagacactcatttcttggagtgacaggctaggaacaaaatmgatttttacaaacttctacttactaagagcatggcgctatgcattttgctcagattaaacagagcctaccagccaagcctgcctccaaaacagcacgacaagcagtaatcgaggcaagcagcagccaataagccacagctttctctaatgccaagagaaaacttctttatgcaagccggcrttctacccttcccagtctgcccagacttgccccctcactgtgtgctttaccacrttattgacatagcacaagatggtttttgctgacagatgaacacgagacagtgctccctttcatcaagtacccagctctgctcagacagcaggctaccrggagtgcagtctgccactgctaccttacaaaccacggcttcccatgcagcgcagccgtagaatgggatccttgactggactaccaagtcatcacataaaccagaaacaygytcgtgtcgttagagtgaacccactgctcctgattctgattttgctaaacttcaaatccaagctgccacaaggacaactccaagctgccacc

SEQ ID NO: 84263 - DNA, 600 bp, Chicken  19866894381599_4
gcgctatgcattttgctcagattaaacagagcctaccagccaagcctgcctccaaaacagcacgacaagcagtaatcgaggcaagcagcagccaataagccacagctttctctaatgccaagagaaaacttctttatgcaagccggcrttctacccttcccagtctgcccagacttgccccctcactgtgtgctttaccacrttattgacatagcacaagatggtttttgctgacagatgaacacgagacagtgctccctttcatcaagtacccagctctgctcagacagcaggctaccrggagtgcagtctgccactgctaccttacaaaccacggcttcccatgcagcgcagccgtagaatgggatccttgactggactaccaagtcatcacataaaccagaaacaygytcgtgtcgttagagtgaacccactgctcctgattctgattttgctaaacttcaaatccaagctgccacaaggacaactccaagctgccaccaggaatggcagttccttacctgcagcaaatcaggggcrggyaaatgacacgcagcctttcactgcagctccctacatgggtttaagtcgcagttttaa

SEQ ID NO: 84264 - DNA, 600 bp, Chicken  19866894381599_5
ctctaatgccaagagaaaacttctttatgcaagccggcrttctacccttcccagtctgcccagacttgccccctcactgtgtgctttaccacrttattgacatagcacaagatggtttttgctgacagatgaacacgagacagtgctccctttcatcaagtacccagctctgctcagacagcaggctaccrggagtgcagtctgccactgctaccttacaaaccacggcttcccatgcagcgcagccgtagaatgggatccttgactggactaccaagtcatcacataaaccagaaacaygytcgtgtcgttagagtgaacccactgctcctgattctgattttgctaaacttcaaatccaagctgccacaaggacaactccaagctgccaccaggaatggcagttccttacctgcagcaaatcaggggcrggyaaatgacacgcagcctttcactgcagctccctacatgggtttaagtcgcagttttaagcacaaactgaatgaattcaaaaacacttctgcagcagatcaagtgttaaaagaatactgctgcttccattccgttccatccagcacacacagcaaaccacacagccct

SEQ ID NO: 84265 - DNA, 600 bp, Chicken  19866894381599_6
ctaatgccaagagaaaacttctttatgcaagccggcrttctacccttcccagtctgcccagacttgccccctcactgtgtgctttaccacrttattgacatagcacaagatggtttttgctgacagatgaacacgagacagtgctccctttcatcaagtacccagctctgctcagacagcaggctaccrggagtgcagtctgccactgctaccttacaaaccacggcttcccatgcagcgcagccgtagaatgggatccttgactggactaccaagtcatcacataaaccagaaacaygytcgtgtcgttagagtgaacccactgctcctgattctgattttgctaaacttcaaatccaagctgccacaaggacaactccaagctgccaccaggaatggcagttccttacctgcagcaaatcaggggcrggyaaatgacacgcagcctttcactgcagctccctacatgggtttaagtcgcagttttaagcacaaactgaatgaattcaaaaacacttctgcagcagatcaagtgttaaaagaatactgctgcttccattccgttccatccagcacacacagcaaaccacacagccctgc

SEQ ID NO: 84266 - DNA, 600 bp, Chicken  19866894381599_7
aacacgagacagtgctccctttcatcaagtacccagctctgctcagacagcaggctaccrggagtgcagtctgccactgctaccttacaaaccacggcttcccatgcagcgcagccgtagaatgggatccttgactggactaccaagtcatcacataaaccagaaacaygytcgtgtcgttagagtgaacccactgctcctgattctgattttgctaaacttcaaatccaagctgccacaaggacaactccaagctgccaccaggaatggcagttccttacctgcagcaaatcaggggcrggyaaatgacacgcagcctttcactgcagctccctacatgggtttaagtcgcagttttaagcacaaactgaatgaattcaaaaacacttctgcagcagatcaagtgttaaaagaatactgctgcttccattccgttccatccagcacacacagcaaaccacacagccctgctcaggcacacagctaagcaagctttaccagtgctgagcatgttgtagcgagctgaaataaaggtgaatatgcagagcttcgccctcctaaaggtgcggtatctgcaatgagtggaaagagctatgggaa

SEQ ID NO: 84267 - DNA, 600 bp, Chicken  19866894381599_8
acgagacagtgctccctttcatcaagtacccagctctgctcagacagcaggctaccrggagtgcagtctgccactgctaccttacaaaccacggcttcccatgcagcgcagccgtagaatgggatccttgactggactaccaagtcatcacataaaccagaaacaygytcgtgtcgttagagtgaacccactgctcctgattctgattttgctaaacttcaaatccaagctgccacaaggacaactccaagctgccaccaggaatggcagttccttacctgcagcaaatcaggggcrggyaaatgacacgcagcctttcactgcagctccctacatgggtttaagtcgcagttttaagcacaaactgaatgaattcaaaaacacttctgcagcagatcaagtgttaaaagaatactgctgcttccattccgttccatccagcacacacagcaaaccacacagccctgctcaggcacacagctaagcaagctttaccagtgctgagcatgttgtagcgagctgaaataaaggtgaatatgcagagcttcgccctcctaaaggtgcggtatctgcaatgagtggaaagagctatgggaagcg

SEQ ID NO: 84268 - DNA, 600 bp, Chicken  19866894381604_1
ttggaggtgctataaatgctcttaacagtaagcattatgcaaggaggaatcctggaactgctgaaggcgcaaggaaaacttcctccagcttctgtaggatcaggattccctcttaaattggttagtaaatgtttgcaggattggattcaaaaacagcagggaacaatgcagaatgtatatttttaattatttttatttccactaaataagaaatataaatgaaatcagatcatttctagagaaaaaaatcacctcaggtgacttttagaatgagtattgtaaggaaatatgagtgttaaygtagcacttttgtttcagtagaattgtatgtcctttctaagtcagatttcrtcatgcttttaatgtcatagtgaaatggataacattaccttttctaaacaaagaaataagccttatattcagtgtatctctttttgttctacattgcatatccaaatgtcatatggtaaatgtggctaatgraagctcttagtaaggggaaaaaaatgttatgatcttcctaaaatgtatttgagaccacattgaactttatttatatgaaaaatcattcccgctaaaggtatgctgtaccarcacaca

SEQ ID NO: 84269 - DNA, 600 bp, Chicken  19866894381604_2
ctggaactgctgaaggcgcaaggaaaacttcctccagcttctgtaggatcaggattccctcttaaattggttagtaaatgtttgcaggattggattcaaaaacagcagggaacaatgcagaatgtatatttttaattatttttatttccactaaataagaaatataaatgaaatcagatcatttctagagaaaaaaatcacctcaggtgacttttagaatgagtattgtaaggaaatatgagtgttaaygtagcacttttgtttcagtagaattgtatgtcctttctaagtcagatttcrtcatgcttttaatgtcatagtgaaatggataacattaccttttctaaacaaagaaataagccttatattcagtgtatctctttttgttctacattgcatatccaaatgtcatatggtaaatgtggctaatgraagctcttagtaaggggaaaaaaatgttatgatcttcctaaaatgtatttgagaccacattgaactttatttatatgaaaaatcattcccgctaaaggtatgctgtaccarcacacatattgagattctgaagcgttttcccagttttccctaaatatgtcttttggt

SEQ ID NO: 84270 - DNA, 594 bp, Chicken  19866894381604_3
taattatttttatttccactaaataagaaatataaatgaaatcagatcatttctagagaaaaaaatcacctcaggtgacttttagaatgagtattgtaaggaaatatgagtgttaaygtagcacttttgtttcagtagaattgtatgtcctttctaagtcagatttcrtcatgcttttaatgtcatagtgaaatggataacattaccttttctaaacaaagaaataagccttatattcagtgtatctctttttgttctacattgcatatccaaatgtcatatggtaaatgtggctaatgraagctcttagtaaggggaaaaaaatgttatgatcttcctaaaatgtatttgagaccacattgaactttatttatatgaaaaatcattcccgctaaaggtatgctgtaccarcacacatattgagattctgaagcgttttcccagttttccctaaatatgtcttttggttgttaaatggataaataaactgaatgcaaacaattaactctacatgaaaaatggtgtcacaaagacaagattaggtctaaaactttttatatcaaatcatgccttgctgatgtctcgtcctaatgt

SEQ ID NO: 84271 - DNA, 483 bp, Chicken  19866894381604_4
gttaaygtagcacttttgtttcagtagaattgtatgtcctttctaagtcagatttcrtcatgcttttaatgtcatagtgaaatggataacattaccttttctaaacaaagaaataagccttatattcagtgtatctctttttgttctacattgcatatccaaatgtcatatggtaaatgtggctaatgraagctcttagtaaggggaaaaaaatgttatgatcttcctaaaatgtatttgagaccacattgaactttatttatatgaaaaatcattcccgctaaaggtatgctgtaccarcacacatattgagattctgaagcgttttcccagttttccctaaatatgtcttttggttgttaaatggataaataaactgaatgcaaacaattaactctacatgaaaaatggtgtcacaaagacaagattaggtctaaaactttttatatcaaatcatgccttgctgatgtctcgtcctaatgt

SEQ ID NO: 84272 - DNA, 599 bp, Chicken  19866894381610_1
  misc_feature (1)..(53): n is any nucleotide
nnnnnnnnnnnnnnnnnnnnnnnnnnnnnnnnnnnnnnnnnnnnnnnnnnnnnttcttaaagtaatcatggggataaagaacctggtgttcaatacgttggtagcttgattgctgtcaggattcactgttttcatgttctcaggcagtaaagcagaagaccaattcagagcttcaaacttggcttcccccttacaacggcagtgtcgctggctggccctaggaacgctcatttgcatgaaataaataaagctgaacaacatgtcttctgcttggggttatgccaatacaagtttagttargtttgtgtttgttttaagactggtctcatttgaaatctcatgccattaatcagtgcaacatggtaattacagcaggaaattatatatactgtcaagtaagtacatgcttagcaaaaaakcacaaaaccaatattataataagcatgagctgtacctcactctcagagtaacttcatagtgaagcttttgctggctgccaggagctgggatgaaaccctttatgctgatgcccaagcctagtgaagtgagggttcttgactccctgtatgatatggtgagatgtttgtaggatggtgcta

SEQ ID NO: 84273 - DNA, 600 bp, Chicken  19866894381610_2
gattcactgttttcatgttctcaggcagtaaagcagaagaccaattcagagcttcaaacttggcttcccccttacaacggcagtgtcgctggctggccctaggaacgctcatttgcatgaaataaataaagctgaacaacatgtcttctgcttggggttatgccaatacaagtttagttargtttgtgtttgttttaagactggtctcatttgaaatctcatgccattaatcagtgcaacatggtaattacagcaggaaattatatatactgtcaagtaagtacatgcttagcaaaaaakcacaaaaccaatattataataagcatgagctgtacctcactctcagagtaacttcatagtgaagcttttgctggctgccaggagctgggatgaaaccctttatgctgatgcccaagcctagtgaagtgagggttcttgactccctgtatgatatggtgagatgtttgtaggatggtgctagttgtcttgctgggcttcatcaatttgtgttttgatgagacccatttctgttayktttgatggaatgccaaatragaaaaagtaataaaaatcatgcctacattttaattgattctactc

SEQ ID NO: 84274 - DNA, 600 bp, Chicken  19866894381610_3
tgcaacatggtaattacagcaggaaattatatatactgtcaagtaagtacatgcttagcaaaaaakcacaaaaccaatattataataagcatgagctgtacctcactctcagagtaacttcatagtgaagcttttgctggctgccaggagctgggatgaaaccctttatgctgatgcccaagcctagtgaagtgagggttcttgactccctgtatgatatggtgagatgtttgtaggatggtgctagttgtcttgctgggcttcatcaatttgtgttttgatgagacccatttctgttayktttgatggaatgccaaatragaaaaagtaataaaaatcatgcctacattttaattgattctactcttaagtactgtattttcttttcttctgctttcagtagatcactggttttacctgcagcaggtgcagcatgttctaatactgatgtttaacgtaaccatggtcacagttacttgcaagtgttttgttgactgataacaaaccactattccatcttgtaatattatgtatttcattactaacactgtaatcatttctagtgcaagcattgcactgacataaaaacatactaaacca

SEQ ID NO: 84275 - DNA, 600 bp, Chicken  19866894381610_4
gcaacatggtaattacagcaggaaattatatatactgtcaagtaagtacatgcttagcaaaaaakcacaaaaccaatattataataagcatgagctgtacctcactctcagagtaacttcatagtgaagcttttgctggctgccaggagctgggatgaaaccctttatgctgatgcccaagcctagtgaagtgagggttcttgactccctgtatgatatggtgagatgtttgtaggatggtgctagttgtcttgctgggcttcatcaatttgtgttttgatgagacccatttctgttayktttgatggaatgccaaatragaaaaagtaataaaaatcatgcctacattttaattgattctactcttaagtactgtattttcttttcttctgctttcagtagatcactggttttacctgcagcaggtgcagcatgttctaatactgatgtttaacgtaaccatggtcacagttacttgcaagtgttttgttgactgataacaaaccactattccatcttgtaatattatgtatttcattactaacactgtaatcatttctagtgcaagcattgcactgacataaaaacatactaaaccag

SEQ ID NO: 84276 - DNA, 600 bp, Chicken  19866894381610_5
aggaaattatatatactgtcaagtaagtacatgcttagcaaaaaakcacaaaaccaatattataataagcatgagctgtacctcactctcagagtaacttcatagtgaagcttttgctggctgccaggagctgggatgaaaccctttatgctgatgcccaagcctagtgaagtgagggttcttgactccctgtatgatatggtgagatgtttgtaggatggtgctagttgtcttgctgggcttcatcaatttgtgttttgatgagacccatttctgttayktttgatggaatgccaaatragaaaaagtaataaaaatcatgcctacattttaattgattctactcttaagtactgtattttcttttcttctgctttcagtagatcactggttttacctgcagcaggtgcagcatgttctaatactgatgtttaacgtaaccatggtcacagttacttgcaagtgttttgttgactgataacaaaccactattccatcttgtaatattatgtatttcattactaacactgtaatcatttctagtgcaagcattgcactgacataaaaacatactaaaccaggtgttatctcactttttcc

SEQ ID NO: 84277 - DNA, 600 bp, Chicken  19866894381613_1
acaggcttgaagaaatcataaaactaagagtgtgagctgagtctactggaaagaaaaggaggaagatttgggtctttatcttagcttttgcacccaaagggtatagggaaaaactgtactatgccttattacaaattttcaaagggatttgcattattgcctaatttatcctcataactactctcagagaaaacagcaatcttgtaatacagttacaacaaaggctttggatgattggtctcaacagtttatctataaggtagataaaactaccagctacttattgcctgtaacaatttwaaatcatgtcattgacgatgcaatattttatacatgtgagtgttcaattgggttggggtctgagtactttgccccaccgcttctctgtagtcagtgaagaaacagattttttgtaagtgcatctgtgattaatcttcccccaaggagaaactcttatgcaaaggcctagaacaatcatatctattcttctcaaaataatttcagaccctacgtacacagctagtcatccatcctacagttttccttctgctcctatgccattaaagatccccaaagttgagcctgacattggcaatgtgc

SEQ ID NO: 84278 - DNA, 600 bp, Chicken  19866894381613_2
actttgccccaccgcttctctgtagtcagtgaagaaacagattttttgtaagtgcatctgtgattaatcttcccccaaggagaaactcttatgcaaaggcctagaacaatcatatctattcttctcaaaataatttcagaccctacgtacacagctagtcatccatcctacagttttccttctgctcctatgccattaaagatccccaaagttgagcctgacattggcaatgtgcattcgctcgctccttttgtgacagcagctgtgactgctgacagcagttgccagagccaagcacaytctttggactcagccagraattctgcaactgcaagaaaactcactaaaatatttaggagcaaaatgagtgttgaagtcagtgaagtgcatcatcacttgcgtggagctatactctcctgtaccaaagatatgattacacttaaaaaaaaaaaaaaaagccagtctttaagttttttaaggaacattcctgtgttccttattcctacttaaattcagagcatttagaaatgtgtcagtcttgaagactttttgtccagggaattcaaattgctcaatgcagtcacacggcatacttttctt

SEQ ID NO: 84279 - DNA, 600 bp, Chicken  19866894381613_3
tctgtagtcagtgaagaaacagattttttgtaagtgcatctgtgattaatcttcccccaaggagaaactcttatgcaaaggcctagaacaatcatatctattcttctcaaaataatttcagaccctacgtacacagctagtcatccatcctacagttttccttctgctcctatgccattaaagatccccaaagttgagcctgacattggcaatgtgcattcgctcgctccttttgtgacagcagctgtgactgctgacagcagttgccagagccaagcacaytctttggactcagccagraattctgcaactgcaagaaaactcactaaaatatttaggagcaaaatgagtgttgaagtcagtgaagtgcatcatcacttgcgtggagctatactctcctgtaccaaagatatgattacacttaaaaaaaaaaaaaaaagccagtctttaagttttttaaggaacattcctgtgttccttattcctacttaaattcagagcatttagaaatgtgtcagtcttgaagactttttgtccagggaattcaaattgctcaatgcagtcacacggcatacttttcttctgagctatgattcattc

SEQ ID NO: 84280 - DNA, 600 bp, Chicken  19866894381619_1
gcattagatttgatggaccattaaactgtctttatctgataggttgatgatatactttaactaccataacctgtcccagtcatatcataatactgttgcaataacctgggtttatctactggaaggtagcactgaaagaagcaccttctaactcaattgactgttgtcacataatgactatcattttaatgaaaacctcagcattttaatcttcagctttgggaagtgtaggaaccgaactatcaagtaataactatgcccttgaaaagggggggagttaaacaatgatatttttctccyctaaagaccattttctgtacaccctatgtacacttgatattctgtcaatgcaattatgctgccagtattaacagcagtgcggtgtggactattgcaggtggaacaaccagaaaacttgctcaaaaatattatactaggcatgcagcaactttgttcacagccaaaaatgtggacctctaatttctgacatatatagatttgctagactcagagcaactgttagctagaagcatttgacaactgccctgtgaaacagccctttaaaattgacagccacttatagtcagccaggggaaaaaa

SEQ ID NO: 84281 - DNA, 600 bp, Chicken  19866894381638_1
aaagctgaggacagccccagcacacaaacagcttgagtaattcttttgatcttgcccaccctccttaatacagagatccaccctctgaatgcattattagattagcacacaggctgcatgtcttgttagcacagcaggatcagacaaaagcaggcaaagaaaggggagaggcttttcacaggcaagttgtcaatatgcatttggaaattcctaacagtgtgctagtgttgctgactgtggcatttgccaggagagagcagctccacagactcccaaagtggcactacggggatacaccartgggttgcttgcgttccttgtccatgggttacaatggcaggataatgtgtgtgtacttcccagaaaggctttcctggcagctgcagcaggatctggggtcagccagaccttcagagtgagagaagggtgctcagtggcatctctacctgggaaggaggaaccacaacataccatgggtgatttggcatctatcgatttcaagtggtatgttttactagagcacaatgtagaacaaacacactctagagctagagaacttgggtaggcgaggcagctgaaaataagcaggctggggagaaa

SEQ ID NO: 84282 - DNA, 600 bp, Chicken  19866894381640_1
tgtggctgagtaactgtggtaatgtcgtatgaggacaagggaagaaagggaagaaagaaagcaataagaacaaacagttggatagggattgcttaaatcaacagaacatcccagatggaaaaaaaaaatcacagaactgcagttcaagagcaatgaacagcagagaaagagcttctcaagtcaaagaaagcatttgcgtaactacaagcagcttttcagaagcaatactggcttcagctttcttctccattttgcactgaaatctgcttcactaccaagcatggcacaatcctgcaaaaygatgcagacattatcttgggaaaaatcatgtaggcccaccatttaagaacatcagtagttagcatctacatctcccactgacttcagttagtttctaaaacactgaatccctgcaagcctatctagctttaaatactagctttatggcctgaaatttgaaaacattctgtattgaaatcgacagaaaaagcagatgtaatttgtttcaaagatcaataaaagattcagattaaaatatgttttgtacttttaacactcgacagtgttaaataagaattacttttttttttaatatataga

SEQ ID NO: 84283 - DNA, 600 bp, Chicken  19866894381644_1
gtctataaatatagaatgacagaatcatctaggttggaaaagaccttcaagatcaccaagtccaaccatcagcttgacctaccaagacccaccagtaaatcacgacccttgttgccacaatcacacttctcttatttcttcagtacttccagtgtctcactagaaaatactctttggaaaagaactaaaaagcccaggcaaaaattatatatatatatggagagagagactttatattgacttaaagggatgaagttgataacaataaggaaaggtgtggtccagaaggacattctgcaraaatatttgtagctgttcatcttgtgaaactggagaaaggaaggaggaaactcaatgaagtgaaaaagcaacctagatgtggctttgcagtccacattgttttgggctgtgtagttgttgactccttttgctccttctcccttgaactccacgaccggtctatacatatattgccagcatcagctgaattaccagctggggggcagaagtattctagaccttatcaggacccatcaagttatgaatttatgaactgcattgcacaacaggattttgagattggattcctgatcacaagtt

SEQ ID NO: 84284 - DNA, 599 bp, Chicken  19866894381653_1
  misc_feature (1)..(105): n is any nucleotide
nnnnnnnnnnnnnnnnnnnnnnnnnnnnnnnnnnnnnnnnnnnnnnnnnnnnnnnnnnnnnnnnnnnnnnnnnnnnnnnnnnnnnnnnnnnnnnnnnnnnnnnnnttttgggtctgggtgatgaaacatttaaattctttggttttcaatttcctgattaaagccatcaggatagagttcccaggatcttccttctggggaaggatgaattatatggatatgtttcatttgattaaggaagggtagcttctctgcagctgctaaggaatactatggaagaaagttcagtaagtctttttmacaaattttctcttttatttttagattttttggtggattgattttagatataaaaagaaaggctccattcttctggagtgacttcagggatgctctcagtctacagtgtctggcatcatttttgtttctctactgtgcttgcatgtctcctgtcatcacgtttggtggtctactgggagaagcaactgaaggtcgtatagtatgtgttaaatctgaattttttaaaacaaacttacattgctagattcgtggttagtatttttttactgttccctggggataaatatatattaaaatct

SEQ ID NO: 84285 - DNA, 600 bp, Chicken  19866894381653_2
ttctctactgtgcttgcatgtctcctgtcatcacgtttggtggtctactgggagaagcaactgaaggtcgtatagtatgtgttaaatctgaattttttaaaacaaacttacattgctagattcgtggttagtatttttttactgttccctggggataaatatatattaaaatctatttttatgtttatatacatatatttatatattaaaaatatatatttcaaatgtatttgtttcattatttagaagtctacaaatcagtatgttacaaaaaagaaccagttggaaaatttatacacwcttctctctctgtatcatattcagagtgcaatagaatcgctgtttggagcatccatgactggaattgcctattctctctttggtggacagcctctcactatacttggcagcacaggaccagttctagtgtttgagaagattttatttaaattttgcaagtaagtgacatagagctatttaaaatttctaacatgttataaaatgtagtagtttaccaataacgtttatagaatcttcctaagcaaggtgaagacttacttcattgatttattcatgtaccaactgatgtttgaggtgaga

SEQ ID NO: 84286 - DNA, 569 bp, Chicken  19866894381654_1
tccacaccttcacttcagaggcacttccatgtcagatgccattttgtcagactgcacctctgctaccatctgttacatgacaacagaatgtataaatattggtgtaaggttcaacctctattgtcatacgctgtcaacatctgcctctgacatattgggccaacttaataaaataggaggcattactttggaccagccctcataaagcataaaatatagttaacgtacgtaaataacaaaacttattattattattattatttttattaaaacgtaaaagagtaaaaaaaaaaacatatmactattgggatatttgaccttgcttttgtgaatctaatgcatcaggttggtttgatgraaatttctgctgmycttagtgagttctcatggtgttagatgtttgatgaaatattactcttcctgtacttcattcttcaaaacagtttttcacaaacgtgtctactgccaaagagcaatgacacgagtaaggcattattgtgaagcaagagatatctttctctggtaagacaggtcatatagaagccgaataatgagacatgaccagattt

SEQ ID NO: 84287 - DNA, 511 bp, Chicken  19866894381654_2
tctgctaccatctgttacatgacaacagaatgtataaatattggtgtaaggttcaacctctattgtcatacgctgtcaacatctgcctctgacatattgggccaacttaataaaataggaggcattactttggaccagccctcataaagcataaaatatagttaacgtacgtaaataacaaaacttattattattattattatttttattaaaacgtaaaagagtaaaaaaaaaaacatatmactattgggatatttgaccttgcttttgtgaatctaatgcatcaggttggtttgatgraaatttctgctgmycttagtgagttctcatggtgttagatgtttgatgaaatattactcttcctgtacttcattcttcaaaacagtttttcacaaacgtgtctactgccaaagagcaatgacacgagtaaggcattattgtgaagcaagagatatctttctctggtaagacaggtcatatagaagccgaataatgagacatgaccagattt

SEQ ID NO: 84288 - DNA, 498 bp, Chicken  19866894381654_3
gttacatgacaacagaatgtataaatattggtgtaaggttcaacctctattgtcatacgctgtcaacatctgcctctgacatattgggccaacttaataaaataggaggcattactttggaccagccctcataaagcataaaatatagttaacgtacgtaaataacaaaacttattattattattattatttttattaaaacgtaaaagagtaaaaaaaaaaacatatmactattgggatatttgaccttgcttttgtgaatctaatgcatcaggttggtttgatgraaatttctgctgmycttagtgagttctcatggtgttagatgtttgatgaaatattactcttcctgtacttcattcttcaaaacagtttttcacaaacgtgtctactgccaaagagcaatgacacgagtaaggcattattgtgaagcaagagatatctttctctggtaagacaggtcatatagaagccgaataatgagacatgaccagattt

SEQ ID NO: 84289 - DNA, 497 bp, Chicken  19866894381654_4
ttacatgacaacagaatgtataaatattggtgtaaggttcaacctctattgtcatacgctgtcaacatctgcctctgacatattgggccaacttaataaaataggaggcattactttggaccagccctcataaagcataaaatatagttaacgtacgtaaataacaaaacttattattattattattatttttattaaaacgtaaaagagtaaaaaaaaaaacatatmactattgggatatttgaccttgcttttgtgaatctaatgcatcaggttggtttgatgraaatttctgctgmycttagtgagttctcatggtgttagatgtttgatgaaatattactcttcctgtacttcattcttcaaaacagtttttcacaaacgtgtctactgccaaagagcaatgacacgagtaaggcattattgtgaagcaagagatatctttctctggtaagacaggtcatatagaagccgaataatgagacatgaccagattt

SEQ ID NO: 84290 - DNA, 600 bp, Chicken  19866894381665_1
ttagggcagctccgattcagcagatgccttgtattaataatatacagttgcgacaggaaatgtggtttaggttcctggaaaaacataaaaagttaattccattactccatttcagggtgcctttcctcaaacgctaaactggttttgattacacagaaaccttatagtgagaaaactttgtcaagactattaacttatcagtgcttatcctccttcgtacacatcccctactgccaacctacgtgctgagctacctgtgaacaagcctagaacacacaaaatggacctacaaaatctggratggtacagacccctttttcyaatactatttcaattattatttttccttagatatactgtgttctgcttcccattctctctttattctgcctgaataagagccctcggtttgaagaaacatttcaacaacagcagccccccaaaacctcttacccatggcaatgagacaaatcacagtaattgatctctagagggagtcttctaaaggttgaagcacaaacactttccagaactctgctgcaatgagcatgaactcaaacaaacattcagtttgctatctgcattttgtcacttgatcca

SEQ ID NO: 84291 - DNA, 600 bp, Chicken  19866894381665_2
agatgccttgtattaataatatacagttgcgacaggaaatgtggtttaggttcctggaaaaacataaaaagttaattccattactccatttcagggtgcctttcctcaaacgctaaactggttttgattacacagaaaccttatagtgagaaaactttgtcaagactattaacttatcagtgcttatcctccttcgtacacatcccctactgccaacctacgtgctgagctacctgtgaacaagcctagaacacacaaaatggacctacaaaatctggratggtacagacccctttttcyaatactatttcaattattatttttccttagatatactgtgttctgcttcccattctctctttattctgcctgaataagagccctcggtttgaagaaacatttcaacaacagcagccccccaaaacctcttacccatggcaatgagacaaatcacagtaattgatctctagagggagtcttctaaaggttgaagcacaaacactttccagaactctgctgcaatgagcatgaactcaaacaaacattcagtttgctatctgcattttgtcacttgatccattctgagcagctggcttggaa

SEQ ID NO: 84292 - DNA, 599 bp, Chicken  19866894381669_1
  misc_feature (1)..(65): n is any nucleotide
nnnnnnnnnnnnnnnnnnnnnnnnnnnnnnnnnnnnnnnnnnnnnnnnnnnnnnnnnnnnnnnnngatttcacaaacatgaattaaagaaacagaaaaaaaaaaaaaaagtctcccaaccattcagtaatggaaatgcttcgaacaatttgtagaccagcatggcaaattcgttgatgcactgtctctgctgggtaaaacatccctcagtagttaaagtggaacaaactcgtcgcttgttctcgctgacaaattttcccttgacattctgtgcagtgcacaaagtgtttgaataatctckgttygtacggtttttcaactcaggcatgcaaggaaaaaggaacttcaaaaagagaatattttacctgacgcactcttttaaggcttcagtaattagagaactgcaaaggtcaaaatagccatcaatatcgtgagcaacagagtagaagtaacatgttgaagaggaagtgagttggttggctgtaacttaatacgccataagcactgagatgtggatctgcagtgacaagcagcaaaagaaacagtaacacataaccaccatcagacatttactttgctgcaatcacaccaaaagctgta

SEQ ID NO: 84293 - DNA, 599 bp, Chicken  19866894381669_2
  misc_feature (1)..(61): n is any nucleotide
nnnnnnnnnnnnnnnnnnnnnnnnnnnnnnnnnnnnnnnnnnnnnnnnnnnnnnnnnnnnngatttcacaaacatgaattaaagaaacagaaaaaaaaaaaaaaagtctcccaaccattcagtaatggaaatgcttcgaacaatttgtagaccagcatggcaaattcgttgatgcactgtctctgctgggtaaaacatccctcagtagttaaagtggaacaaactcgtcgcttgttctcgctgacaaattttcccttgacattctgtgcagtgcacaaagtgtttgaataatctckgttygtacggtttttcaactcaggcatgcaaggaaaaaggaacttcaaaaagagaatattttacctgacgcactcttttaaggcttcagtaattagagaactgcaaaggtcaaaatagccatcaatatcgtgagcaacagagtagaagtaacatgttgaagaggaagtgagttggttggctgtaacttaatacgccataagcactgagatgtggatctgcagtgacaagcagcaaaagaaacagtaacacataaccaccatcagacatttactttgctgcaatcacaccaaaagctgtaagta

SEQ ID NO: 84294 - DNA, 599 bp, Chicken  19866894381672_1
  misc_feature (1)..(149): n is any nucleotide
nnnnnnnnnnnnnnnnnnnnnnnnnnnnnnnnnnnnnnnnnnnnnnnnnnnnnnnnnnnnnnnnnnnnnnnnnnnnnnnnnnnnnnnnnnnnnnnnnnnnnnnnnnnnnnnnnnnnnnnnnnnnnnnnnnnnnnnnnnnnnnnnnnnnntctgtcctcctgcaggagagcagagagggactctcatagcagggaagtaggagatatgtgaatagtgattttttttatggcacaaaaaataacagtttcagtttgccagtgctgaagggccgcttggtctagcaggagggtttctaagccrggtgtatattgagcactaactggtagagctgttgctataatgagcacacgctctttcctccagtggtgatgcggagttgaggctgtttaactattagctatgtgagacttaaggactcttcaaatatgctttttctgacatcagaatgactgcctgttcttccttatagctcttcacttgcacagctataggtaggaaggaggaggaggaactggctgtgccaactgtgaagtctcttttcaagactctgttagattctctatcagaaaaatgacttcagatcacacagcattacacag

SEQ ID NO: 84295 - DNA, 600 bp, Chicken  19866894381672_2
tgagcacacgctctttcctccagtggtgatgcggagttgaggctgtttaactattagctatgtgagacttaaggactcttcaaatatgctttttctgacatcagaatgactgcctgttcttccttatagctcttcacttgcacagctataggtaggaaggaggaggaggaactggctgtgccaactgtgaagtctcttttcaagactctgttagattctctatcagaaaaatgacttcagatcacacagcattacacagggatgacatgttatccttgctaccacaacatggaaagcagmcagattcctcccaaggcattaaacrtcctccttctcttctayatcggctaacatatttaccaagcagcctgatttaagaaatgccccttagtctaatggaaggcagacaaatcgttgcagttgcagctgagctgactttgccttggtagctgtggcacaagtggggcwgttggaacaggcaggaatggccaagaatactgagttctctgtcattttctcttgatccagctccctgcggtgaagaagggagggggtgatggctgaaaagcagaagtactcgtgggttccaagtgctaactc

SEQ ID NO: 84296 - DNA, 600 bp, Chicken  19866894381672_3
gtgatgcggagttgaggctgtttaactattagctatgtgagacttaaggactcttcaaatatgctttttctgacatcagaatgactgcctgttcttccttatagctcttcacttgcacagctataggtaggaaggaggaggaggaactggctgtgccaactgtgaagtctcttttcaagactctgttagattctctatcagaaaaatgacttcagatcacacagcattacacagggatgacatgttatccttgctaccacaacatggaaagcagmcagattcctcccaaggcattaaacrtcctccttctcttctayatcggctaacatatttaccaagcagcctgatttaagaaatgccccttagtctaatggaaggcagacaaatcgttgcagttgcagctgagctgactttgccttggtagctgtggcacaagtggggcwgttggaacaggcaggaatggccaagaatactgagttctctgtcattttctcttgatccagctccctgcggtgaagaagggagggggtgatggctgaaaagcagaagtactcgtgggttccaagtgctaactcatcctcctaacccatsgattgattt

SEQ ID NO: 84297 - DNA, 600 bp, Chicken  19866894381672_4
ctgtttaactattagctatgtgagacttaaggactcttcaaatatgctttttctgacatcagaatgactgcctgttcttccttatagctcttcacttgcacagctataggtaggaaggaggaggaggaactggctgtgccaactgtgaagtctcttttcaagactctgttagattctctatcagaaaaatgacttcagatcacacagcattacacagggatgacatgttatccttgctaccacaacatggaaagcagmcagattcctcccaaggcattaaacrtcctccttctcttctayatcggctaacatatttaccaagcagcctgatttaagaaatgccccttagtctaatggaaggcagacaaatcgttgcagttgcagctgagctgactttgccttggtagctgtggcacaagtggggcwgttggaacaggcaggaatggccaagaatactgagttctctgtcattttctcttgatccagctccctgcggtgaagaagggagggggtgatggctgaaaagcagaagtactcgtgggttccaagtgctaactcatcctcctaacccatsgattgattttcatggcttggggaaag

SEQ ID NO: 84298 - DNA, 600 bp, Chicken  19866894381672_5
gaactggctgtgccaactgtgaagtctcttttcaagactctgttagattctctatcagaaaaatgacttcagatcacacagcattacacagggatgacatgttatccttgctaccacaacatggaaagcagmcagattcctcccaaggcattaaacrtcctccttctcttctayatcggctaacatatttaccaagcagcctgatttaagaaatgccccttagtctaatggaaggcagacaaatcgttgcagttgcagctgagctgactttgccttggtagctgtggcacaagtggggcwgttggaacaggcaggaatggccaagaatactgagttctctgtcattttctcttgatccagctccctgcggtgaagaagggagggggtgatggctgaaaagcagaagtactcgtgggttccaagtgctaactcatcctcctaacccatsgattgattttcatggcttggggaaagtgctgtacctccattaaaatacatctccgagggaaagacactcaataacatgaataattgaacactataaacaaacgacaaataaaacagcctaatagcaggggatgtgggaccattgtactgcat

SEQ ID NO: 84299 - DNA, 600 bp, Chicken  19866894381672_6
cattaaacrtcctccttctcttctayatcggctaacatatttaccaagcagcctgatttaagaaatgccccttagtctaatggaaggcagacaaatcgttgcagttgcagctgagctgactttgccttggtagctgtggcacaagtggggcwgttggaacaggcaggaatggccaagaatactgagttctctgtcattttctcttgatccagctccctgcggtgaagaagggagggggtgatggctgaaaagcagaagtactcgtgggttccaagtgctaactcatcctcctaacccatsgattgattttcatggcttggggaaagtgctgtacctccattaaaatacatctccgagggaaagacactcaataacatgaataattgaacactataaacaaacgacaaataaaacagcctaatagcaggggatgtgggaccattgtactgcattaaaatagatcgggtctgaagtgactgaattatgctttgtcaggaagggagggatatcaatatcgtaagggaagctatccagtgcagatgccacaggctgcattcccctgccaaggagtgcttccccaggactgtgtcccaagcagcc

SEQ ID NO: 84300 - DNA, 600 bp, Chicken  19866894381678_1
ctagtgagtgacttaatcagatcaggtgaagtgccaaaatatgaggcaccacaccagttgggcacatatctgatgtgatgtgttaatctgcggtgtaagataagctgcctttcagataggctcagatttggaagtggtacataaagttgtgtaagattcattccctcgctctggcatagaatatcctacatctgtttgcatgaatttaacccatggttgaatgaactgccacactgatactgcatatattcaaaaagcccttattcctaatgttaactaattatgattactatatgcccrttaaaatttcccagagaaaacttttattgtgaaaagtattttttttcttgatggaaaattaatcttttccataaacakttttatcctttcccccaaaatgctcagctgaaaaacctatttttcactttatgatcaggccatgtttacagttctagcccctcaccctgtaacctatagcaatgctaaatatatgtgtagagaaggttagtaggcagaaaagagtttaagttaacatgtagttatttaatttacctcgcctcgtgcatcgtttcctgatttagacccataatactttgcaga

SEQ ID NO: 84301 - DNA, 600 bp, Chicken  19866894381678_2
tgtgttaatctgcggtgtaagataagctgcctttcagataggctcagatttggaagtggtacataaagttgtgtaagattcattccctcgctctggcatagaatatcctacatctgtttgcatgaatttaacccatggttgaatgaactgccacactgatactgcatatattcaaaaagcccttattcctaatgttaactaattatgattactatatgcccrttaaaatttcccagagaaaacttttattgtgaaaagtattttttttcttgatggaaaattaatcttttccataaacakttttatcctttcccccaaaatgctcagctgaaaaacctatttttcactttatgatcaggccatgtttacagttctagcccctcaccctgtaacctatagcaatgctaaatatatgtgtagagaaggttagtaggcagaaaagagtttaagttaacatgtagttatttaatttacctcgcctcgtgcatcgtttcctgatttagacccataatactttgcagagtactcatttcgttccagtggtgggccatcattttaataaggcaaggtctgcaacactcaccaatgggtcttctgttt

SEQ ID NO: 84302 - DNA, 600 bp, Chicken  19866894381679_1
tctgcttgcctggctgttcctccagtcctgcttgagtatctcagtgctgtgctaatacagtaggaatgtgtactaatactaatcaaaacatgtcttccattgtgatcctttgctagcactgctggatgttttaaaataccttcttagacctgatgctctctgactgctatcttcatttccctcacagcagctaggtgcattttctcttttaagtgagtatttcagaaatctggaggtggtgaatactctgtattttccagaaccacttctattactgtctgcacattatctagccctttyccaaccagagatatagaccctgtcacagcactgggcccctccctcccttccctgcaaagaagcaggaggaaaaaaattgcttcataaattcccctatttcatcacccgctgactccagtttgcctctgtgattttactggagtaattgtcttgtttactttctgtctggtgcaggtttgtccacagtgccctgcgctttctgtgagcctctttgtaagtctgatactcaatatctctttctggttccttaataatcctcctaactcattctctttttttttttttataggacttctggat

SEQ ID NO: 84303 - DNA, 600 bp, Chicken  19866894381684_1
ttacttcaaagccattcctccttgtcctatcactagcagaacatgtaaaaaatcagtctccctcctgtttctaagctcccttcaagtactggaaggacaccatatgttattcccagggcattctcttctccaggatgagcaagcccatcttcctcagcctttcttcatagaagaggtactccagcccttaatatgtacccactgtgtgtgtgcagaaggcagctgtacagggtctaaaggaaaggaggtggatggcagatatgtcaccctcagtgcatgctcagctctctgagggacacrtggtatgagcatgtttgttcctttggtttgagcaggattgttccttcaaggaaagaaatgtctccgtcaaattttattctgggtagagagtattgcacataaatatacataatttctcagcctagtgtagagatggtcagcagcagcacttccttgtgcattattcacagttctgctctacctgcaattggctctttacccagagcagctgagcgactgcttctcaagtaggtggtttgctttatgctggctgtttggttctcaggcagcatggctgcagacattaccagaaagcaagga

SEQ ID NO: 84304 - DNA, 600 bp, Chicken  19866894381691_1
actgcaaggaggacatcagagaaggacaacagagctgtgagggctctggagcacaagtctgatgggcagcagctgagagaactgggatgggtcagtctggagaagaggaggctcaggggagaccttactgctcccatacatctctgtgacaggaggttgtgttgaggtcggggtcagctctttttccacctaactgtgataggacaagaggtgatggcctcaagttgcaccgggagagggtcaggttggatattaggaaacattccttctcacaatgagtggtgatgcagtggcacaggstgcacagggagctggcagtcaccatccctgaagatgttcaagaatagtggagatgtagcactgatggacatggtgcccatggatgasatgaactgatagtcggactggattatcataaaggtcttccagctttaatgatttcatgaagagcactatcaaataaaaccatctttgtgcctgagcagatgcatgcagtgagctgtaaatgtgtacgtgaactcatggtgctgtatgctgatcatcaggatccaagctgtctgctcgctgccctcagcacatgtggggcaatggctttccatc

SEQ ID NO: 84305 - DNA, 600 bp, Chicken  19866894381691_2
tgggtcagtctggagaagaggaggctcaggggagaccttactgctcccatacatctctgtgacaggaggttgtgttgaggtcggggtcagctctttttccacctaactgtgataggacaagaggtgatggcctcaagttgcaccgggagagggtcaggttggatattaggaaacattccttctcacaatgagtggtgatgcagtggcacaggstgcacagggagctggcagtcaccatccctgaagatgttcaagaatagtggagatgtagcactgatggacatggtgcccatggatgasatgaactgatagtcggactggattatcataaaggtcttccagctttaatgatttcatgaagagcactatcaaataaaaccatctttgtgcctgagcagatgcatgcagtgagctgtaaatgtgtacgtgaactcatggtgctgtatgctgatcatcaggatccaagctgtctgctcgctgccctcagcacatgtggggcaatggctttccatctcgcagccaccgctgacctttctgtggttgtgacagcagagcttgatgcaaagtgctctgggaacctctgctgaaagtatttgatga

SEQ ID NO: 84306 - DNA, 600 bp, Chicken  19866894381705_1
gcagagtctgttgtgacaggacaaggggaaatggtttcacactcgaacagaggagattagattggatatgaggaaaaagttttttactgtatgggtgcagtggttctggcgcaggttgcccagtgaggggacagataccccatccttgttgacacccaaggtcaggttggatggggctctgagcacctgatggagctgtagctgtccctgttcactgcaggggagttggaccagatggcctttaaaggtcctttccaacacaaatgattctatgattctatgaaacacagcaggcagccrgccagcacaatgtgggtgttgtatcaggagtctcgctttcaattgctgtgtttagcctcggactgagtaacgtgcatgtgaaaattagcgcctgtcttgctaaaaggtgaatgctgaatacaatgaattaagaaagcacgctgtatagattgctgcaattatatcatcagggaggctcatgtacaccgtgcggtgctgtgattcatagtgttacaagtaaataacaggagattaaaaatgctcttgggttctcatctgtaatgtagcccagtttaaggttatacttatcaaaatgatcgg

SEQ ID NO: 84307 - DNA, 600 bp, Chicken  19866894381716_1
gatccagttctaggagctggttgacttgatcaattcggccatgtatagtgctagaagggaacaaataaatagctacagtcactaatacacacagcaataggagctaacaataatcaagaggtaaagtaagaggtcttcttacataagagggagacactgactatttagttgtcattatggctagaaatgaaattaattaagtcattgagcaattaattcattggtcaatctgcctagccatataaagtctgaagtaatatcatataaacagttcattataggcaagcaatcatgtaataygaagatttatgtaaaaagaaaatattaatccacctgtggatagcatcttcctaatacataaaataaattgccctccaaaaataatattttataaattgttgtttagcttttccagttaggcagaacagattaataatataatttgtgaacctgaaaataagcaccaattactaagaataatcataaattttaatcacaattcaggtgtttttattttatgtaattcaaaattaaagtaaaaaacatcacacactcaatcactatataattctcttggctcacatattacaaatatacttc

SEQ ID NO: 84308 - DNA, 600 bp, Chicken  19866894381719_1
ttctttccttcagttttgcttggaaggacgactaagctggtgccacttcctccacattcacctgtatcgtaattactaaggctttcagtatgcattaagcttgatttgttttaattgcagtttcaatagaatccatgatttatgtgaatgtctcagccaatggcttcaaaaaaaaagaaatatctgcagtcttgtcagtcattggaccaacatatcacataacataacaggcagtataaatcttattcacagtccactaaaaacaatgaaaaaggactttaagagagagagagagagagyaaaaaaaaaaaagactctcaaacataaggaatttggatcaagttcttgaaattttcccattaatttcccaaatctacaatcttgaagaccaccacatctaccaactcctgcacacctgagcgctccacgtggaggagcaaacagcacagccaccactgtggcactttgatggcggctttggcaaaggatgcagactctggaggaggcttgttgagactgaatgcatggcatcatcctgcccacctcaaaaacttggtaaaagagggaaaaagaatctgtaatcaccaaagactgtgcact

SEQ ID NO: 84309 - DNA, 600 bp, Chicken  19866894381720_1
ccaagtgaggggttttagttgagttagctttgttttgttggagctgcagcaggaaaggaagaaatccagctcttgccatcatggttaggcaaccaaagatgaaaaaacactataagcgtaagaggaaagttgtagcgtggaaggaactacatggagttatccaccacttccaagtttgcagctattctgtagaacctttgtactgctaccaggctccttaatgcattcagagaatcatggaatcgttatggttggaaaagatctctacgatcaccaagtccaaccacccacccatccccrctgtgcccactaacccggcaagaagggcaagaagagttttcttcggtctcaagagttgaaaagaaaaatggaaaaaaaaacaaaacagtttcaaagcaaaaagtcctttcaaattagaaaaaccagacggtgcccttgagtgatgccaaagcaaagacataggacttgttctaaactcaagcatacttgcacatacatgtgcttacatatgtayacgtatgctatggcatgctgctctcccacaggaaaatgagtccagcaaacccactggatcgaggagacctcccaggtcattggcaa

SEQ ID NO: 84310 - DNA, 600 bp, Chicken  19866894381720_2
tccttaatgcattcagagaatcatggaatcgttatggttggaaaagatctctacgatcaccaagtccaaccacccacccatccccrctgtgcccactaacccggcaagaagggcaagaagagttttcttcggtctcaagagttgaaaagaaaaatggaaaaaaaaacaaaacagtttcaaagcaaaaagtcctttcaaattagaaaaaccagacggtgcccttgagtgatgccaaagcaaagacataggacttgttctaaactcaagcatacttgcacatacatgtgcttacatatgtayacgtatgctatggcatgctgctctcccacaggaaaatgagtccagcaaacccactggatcgaggagacctcccaggtcattggcaacaggcagtgggaaactgatccccagttgttccctaactctctcctcaccgtgagaagcggggggttgtgacagcagctctggctgcagcagccattctcaccactggctggagctgaaccggccccctggctcaggcacgtgcccgtggaccacggacacatccatccttcccaaccacgtgccccaaccgggggtcccggccctgcagcacgg

SEQ ID NO: 84311 - DNA, 600 bp, Chicken  19866894381731_1
aagaattcaccaccatacaacagcttctttcatttaatatttagtaatgcatgaaaagtaaaccttttctattttacctataggatgcaaataactgttttactttctaggcaccatcattctactgggaaattgaaatagtttcctatggagatacagatgatgacactggtccaatagtttcatttggattcgctacagaggcagaaaaacgggatggggcttggacaaacccagtgggcacctgtctttttcataagtatgttggagatgaacagccaaaattggtcttgctcagtwtgcctmtatgcttcttagagagaatgtgacaatctcgttgtggcaggcagtagatgcatttaaaattttgcctgtactgtagttgtgtagacttcagttgctgttgagttgtaatmatttcagagctcttcttaattttcttcttcttgtattaattcttagcaatgggcgagcagtgcattacaatggctccagcttgttacagtggaagagtgttcgattggatgtgactctttctcctggtatgtaagagcacagctaattagcttaactggtatatcaaaaacattccttaaaygt

SEQ ID NO: 84312 - DNA, 600 bp, Chicken  19866894381731_2
tcaccaccatacaacagcttctttcatttaatatttagtaatgcatgaaaagtaaaccttttctattttacctataggatgcaaataactgttttactttctaggcaccatcattctactgggaaattgaaatagtttcctatggagatacagatgatgacactggtccaatagtttcatttggattcgctacagaggcagaaaaacgggatggggcttggacaaacccagtgggcacctgtctttttcataagtatgttggagatgaacagccaaaattggtcttgctcagtwtgcctmtatgcttcttagagagaatgtgacaatctcgttgtggcaggcagtagatgcatttaaaattttgcctgtactgtagttgtgtagacttcagttgctgttgagttgtaatmatttcagagctcttcttaattttcttcttcttgtattaattcttagcaatgggcgagcagtgcattacaatggctccagcttgttacagtggaagagtgttcgattggatgtgactctttctcctggtatgtaagagcacagctaattagcttaactggtatatcaaaaacattccttaaaygtaaggga

SEQ ID NO: 84313 - DNA, 600 bp, Chicken  19866894381731_3
tcattctactgggaaattgaaatagtttcctatggagatacagatgatgacactggtccaatagtttcatttggattcgctacagaggcagaaaaacgggatggggcttggacaaacccagtgggcacctgtctttttcataagtatgttggagatgaacagccaaaattggtcttgctcagtwtgcctmtatgcttcttagagagaatgtgacaatctcgttgtggcaggcagtagatgcatttaaaattttgcctgtactgtagttgtgtagacttcagttgctgttgagttgtaatmatttcagagctcttcttaattttcttcttcttgtattaattcttagcaatgggcgagcagtgcattacaatggctccagcttgttacagtggaagagtgttcgattggatgtgactctttctcctggtatgtaagagcacagctaattagcttaactggtatatcaaaaacattccttaaaygtaagggaaactgtagatgagagaagagagaaatcagtgctgttcttttgatgatgatatattttgataggtgatgtggctggaattggatgggaaagagcagaaggaactccacccc

SEQ ID NO: 84314 - DNA, 600 bp, Chicken  19866894381731_4
twtgcctmtatgcttcttagagagaatgtgacaatctcgttgtggcaggcagtagatgcatttaaaattttgcctgtactgtagttgtgtagacttcagttgctgttgagttgtaatmatttcagagctcttcttaattttcttcttcttgtattaattcttagcaatgggcgagcagtgcattacaatggctccagcttgttacagtggaagagtgttcgattggatgtgactctttctcctggtatgtaagagcacagctaattagcttaactggtatatcaaaaacattccttaaaygtaagggaaactgtagatgagagaagagagaaatcagtgctgttcttttgatgatgatatattttgataggtgatgtggctggaattggatgggaaagagcagaaggaactccacccccaccagggcagcctgctaaaggcagagtttattttacttattgcgggcagcgacttgggccatacctagaggatgtctctggtggaatgtggccaattgttcacatacagaaaaaggcaagttcttaacataaatatcttgtttgatatatgtgtcattctgataatcaagttgagataagg

SEQ ID NO: 84315 - DNA, 600 bp, Chicken  19866894381739_1
ttgtatgtgactgggaacaaccaatcacgtccacactcagttctaacacaaggcaatgaatctcctgcaaatttcagaaccaaatcagtgagttctgggctcctgctgctgctatctggcagcaggaacttccctagcaagaaaatttattcatgagcaatagtagcataggtggcctagttataattattcactccctcaccatgcatgcacatcatggacacacattaatgtgggcaaagtcaagaaactggaagtactgcacctccaatcagcatttacttccagtgaattttctgstgaattatctaccagttttccttggaacaatgccaccaagagtggctgctgcctggctctgtttcctcctggctagacacatcccctgaaattatgcaaaggcataggctatactgtgttcattcaaaagagagtccaaaaccttagaggaaagaagattgtgatgaaggttccactcttcatctgtgcttgttggacacatttggcaaggaatgtcaccaactgatytctctcatgctgagcagctggaggaatgatgtcatccatattttataaagcaggagataagtcactctattc

SEQ ID NO: 84316 - DNA, 391 bp, Chicken  19866894381739_2
taatgtgggcaaagtcaagaaactggaagtactgcacctccaatcagcatttacttccagtgaattttctgstgaattatctaccagttttccttggaacaatgccaccaagagtggctgctgcctggctctgtttcctcctggctagacacatcccctgaaattatgcaaaggcataggctatactgtgttcattcaaaagagagtccaaaaccttagaggaaagaagattgtgatgaaggttccactcttcatctgtgcttgttggacacatttggcaaggaatgtcaccaactgatytctctcatgctgagcagctggaggaatgatgtcatccatattttataaagcaggagataagtcactctattcttagctgtaatacttaata

SEQ ID NO: 84317 - DNA, 599 bp, Chicken  19866894381745_1
  misc_feature (1)..(142): n is any nucleotide
nnnnnnnnnnnnnnnnnnnnnnnnnnnnnnnnnnnnnnnnnnnnnnnnnnnnnnnnnnnnnnnnnnnnnnnnnnnnnnnnnnnnnnnnnnnnnnnnnnnnnnnnnnnnnnnnnnnnnnnnnnnnnnnnnnnnnnnnnnnnnntgcaagagctactcttgcttttagcaaaacctggccctaaaaacagcagctgagctatgcctgctcacactgaagctgaatgtaaccctgcgatctaatcctggctttggcagcaggcagctgtggcccttgaagtgtagcatggctactgtccctgycttctccagccaggacgcaggccagcagcagctctgtgccagagtagctcccagcatgtttttactctcccaagaaacatggatgacgttaaaaataaagactgtgtgagatgggtacttgaccctccccagaagagctaggcaggatgccacagcttgtgcgctgtgatgtttgcagcactattagactttccttaattaaactgctggtttaataaaatagatagccatcacagcaattgaaactggatgcaaagcacaagatgtctgcttgttctagctaccctgccacctgaacg

SEQ ID NO: 84318 - DNA, 600 bp, Chicken  19866894381748_1
ttcagacaagctaggtctcagagacaacccaatatgtgatgctcctcttgggttttgaattggttttatgagacttggaagagaagcaatgtgtttttgctgagcagtccaagtaagagatggctttcgtatttttttttccatgaatgaggtaggtcaggccattatacccttgtttggagatggagactgtctcatctcctcttttttctacagctatatgagttatataaggtctctgaataaatcactttcaaatggtagtaacctgaacttgttctctcacatccttgatttcartgtagtttgccaaaagccattgttgggtttttttaggtgttcacccactactttgcagaaaaggaagatcagcttgcaatacttcttgatactttaactctaaaggtttcattaagttctatttacttttagcttctgattctatatatttctttcacaaaggttaggcagagtatcaaggagaaatggaaaaagcaatgaaatttttaagatatttcctagaagcaatttatagtaacatgtgtacttatgtacacctattgttgctcaaaggctgacagctcttactcacttaggtgc

SEQ ID NO: 84319 - DNA, 600 bp, Chicken  19866894381750_1
aatttctcaggagtgagacttggccagttctatccattgcccagttaaagtctgcccagcttaaagctgatttgactttggttttaggaaaataagtgttttcctttgagcatcttcaaaacttcttgcggttactgagtttgcagcattatctcttatctgaggaatgctaaccatgataaacaaggaactaatcagggccaaatgtgagttttggcagttgctttggctttgcagcgtttggtacatgaggacgcgtgcagatcaaaaccctgcaggctctataaacgctgcgggccrgaaactcatacacattctgctgcttatttccctttgtgtgcataacctgagtgctggtgattagtggttggtttcattctttgtctcgaaaccrctaactgctggtaaaaaaggcaataaattctcgtgtagcaaagtgtgttaacagaacataacatacctgagttaaagggatgccttctggttaatgcgatgygctcagtgttttatgtgttcagtgttgctgttattgagaaaatacatttcaaggtaacggggtgatagtaatgcgagtgaaatgaacacctatagtgctgttgt

SEQ ID NO: 84320 - DNA, 600 bp, Chicken  19866894381750_2
agtgttttcctttgagcatcttcaaaacttcttgcggttactgagtttgcagcattatctcttatctgaggaatgctaaccatgataaacaaggaactaatcagggccaaatgtgagttttggcagttgctttggctttgcagcgtttggtacatgaggacgcgtgcagatcaaaaccctgcaggctctataaacgctgcgggccrgaaactcatacacattctgctgcttatttccctttgtgtgcataacctgagtgctggtgattagtggttggtttcattctttgtctcgaaaccrctaactgctggtaaaaaaggcaataaattctcgtgtagcaaagtgtgttaacagaacataacatacctgagttaaagggatgccttctggttaatgcgatgygctcagtgttttatgtgttcagtgttgctgttattgagaaaatacatttcaaggtaacggggtgatagtaatgcgagtgaaatgaacacctatagtgctgttgtgtcagtataatttctacctacaggaaaaaaaacctcctatgaaatgatgattcaggtcaatatttcactgtgatgtttttcgccaattggggat

SEQ ID NO: 84321 - DNA, 600 bp, Chicken  19866894381750_3
agggccaaatgtgagttttggcagttgctttggctttgcagcgtttggtacatgaggacgcgtgcagatcaaaaccctgcaggctctataaacgctgcgggccrgaaactcatacacattctgctgcttatttccctttgtgtgcataacctgagtgctggtgattagtggttggtttcattctttgtctcgaaaccrctaactgctggtaaaaaaggcaataaattctcgtgtagcaaagtgtgttaacagaacataacatacctgagttaaagggatgccttctggttaatgcgatgygctcagtgttttatgtgttcagtgttgctgttattgagaaaatacatttcaaggtaacggggtgatagtaatgcgagtgaaatgaacacctatagtgctgttgtgtcagtataatttctacctacaggaaaaaaaacctcctatgaaatgatgattcaggtcaatatttcactgtgatgtttttcgccaattggggatcataggatatttgggtagaagagcatagataaactgatactgctgactggggatgtgcttgtacaaatttgctgtcattcaggcttatgtatttcccatatt

SEQ ID NO: 84322 - DNA, 600 bp, Chicken  19866894381761_1
tgcatcctcctgcatgggcctctcatccttaccttctatgagattttatttatacagatgtttaaggccggggaagtgatttatctcatcttgatagtcttcttctgaatggcttttaaaaacttgttctgtgttgtcaaagtccagaggggttttttggtcctgtggggacaattggtgtgctggcggaagctggatgcagcaggtggccctatttctgtctgtgccccgatttcagtctgtgcaatacaatgagttgcattggtgtttaaactgtgtgtttattcacgctgctcgacraaatgtcactgtgatatagaaacaactcttcctgcgtaacaataactgacttgacacttgtgacagcattaaatgaatgaaaattatgacattacagtgaaatatttccagcagagatamggcgggagaactggcttcaacaggtagggagaaggctgaggtactcagtgagttctttgccttgggcttcactgacagccaggcttcccatatctcttgtgtttcggaacaagtaggtaggaattaggggattcaaatctcttctttagtgcacttgagttggggcaatcgcaggtatga

SEQ ID NO: 84323 - DNA, 600 bp, Chicken  19866894381761_2
aacttgttctgtgttgtcaaagtccagaggggttttttggtcctgtggggacaattggtgtgctggcggaagctggatgcagcaggtggccctatttctgtctgtgccccgatttcagtctgtgcaatacaatgagttgcattggtgtttaaactgtgtgtttattcacgctgctcgacraaatgtcactgtgatatagaaacaactcttcctgcgtaacaataactgacttgacacttgtgacagcattaaatgaatgaaaattatgacattacagtgaaatatttccagcagagatamggcgggagaactggcttcaacaggtagggagaaggctgaggtactcagtgagttctttgccttgggcttcactgacagccaggcttcccatatctcttgtgtttcggaacaagtaggtaggaattaggggattcaaatctcttctttagtgcacttgagttggggcaatcgcaggtatgaatacagactgggagaagcagccatgaggagcaggacttggggatcctgatggatgaaaagctgggcataagccagcagtgtgtgcttgcaacccaggtggccagcagtatcctgggctgc

SEQ ID NO: 84324 - DNA, 599 bp, Chicken  19866894381764_1
  misc_feature (1)..(132): n is any nucleotide
nnnnnnnnnnnnnnnnnnnnnnnnnnnnnnnnnnnnnnnnnnnnnnnnnnnnnnnnnnnnnnnnnnnnnnnnnnnnnnnnnnnnnnnnnnnnnnnnnnnnnnnnnnnnnnnnnnnnnnnnnnnnnnnnnnnnttccctcgaagaaacagcttttccctgagaaaaagcccatatattgctaagcctgatactgcatgttcctgttaattcactgttaacagggaattttctattgacattaaagatgtttaagctggtatgtaaccgatgttaactactgtccaagcagcagaaagcccrtggacgggataggagggtagagggtgcagtgaatacttacttgtacagccacagcgtcatgcaacatgaaaactatcagccaattccttgcctggctgctgcraattgtcactgaattcaattaacctgtgacaattcctcacaagatgaagctctggctagcaaataaaagaatatacacaagtaataaaaaaagttttacctcgctgtggctttgtttacacttaaaagctctatttaggtaataaatctgttaattccagctgctggacaagcacaagagtggccaagctggccac

SEQ ID NO: 84325 - DNA, 599 bp, Chicken  19866894381764_2
  misc_feature (1)..(29): n is any nucleotide
nnnnnnnnnnnnnnnnnnnnnnnnnnnnnttccctcgaagaaacagcttttccctgagaaaaagcccatatattgctaagcctgatactgcatgttcctgttaattcactgttaacagggaattttctattgacattaaagatgtttaagctggtatgtaaccgatgttaactactgtccaagcagcagaaagcccrtggacgggataggagggtagagggtgcagtgaatacttacttgtacagccacagcgtcatgcaacatgaaaactatcagccaattccttgcctggctgctgcraattgtcactgaattcaattaacctgtgacaattcctcacaagatgaagctctggctagcaaataaaagaatatacacaagtaataaaaaaagttttacctcgctgtggctttgtttacacttaaaagctctatttaggtaataaatctgttaattccagctgctggacaagcacaagagtggccaagctggccacgctcatctgcactcagtggagtgccctttgcagcagcaaaagctattcctgcagggtgatctgttggtcctgtcatactctactgaaattccagtcttcccca

SEQ ID NO: 84326 - DNA, 600 bp, Chicken  19866894381765_1
tgtgaaactgccagcctttacagtctgtgaaatatatgaatactttctttctgtcagtttcaaagcatttggaaaaggaacgtgtatctggggtacttgctgtgaaactgggacagccaccaattgattttcccagggtcacattcttagtcagtgacagagcaggcagcacatgagctaaccctgtggagttttatttcaggaagcaaagcccagcagcaacctctgagatctacaacaccatgagagacacagaaacacgtgaacgtggctctgcgttggtttgtgatgtctgtgggscacaggaactgaaagtcccgtggaaccaattgcaaagcactcacctgtgtctgccaccgtgctggagccaggccgatcagagcgtgtttgccggctgacagcacagacacacagccagtgtttgcagtgcacacaccgcaggcagggcagggctcacctcaccyacccgccgctgcctggagtaccaggtaccccggttaactacataaaggcccccatttaaccctcccgtaacctgaacagcaccgcaattacttatttaaaactgactcgatattgcagctggttggatgtagaagc

SEQ ID NO: 84327 - DNA, 600 bp, Chicken  19866894381765_2
ggcagcacatgagctaaccctgtggagttttatttcaggaagcaaagcccagcagcaacctctgagatctacaacaccatgagagacacagaaacacgtgaacgtggctctgcgttggtttgtgatgtctgtgggscacaggaactgaaagtcccgtggaaccaattgcaaagcactcacctgtgtctgccaccgtgctggagccaggccgatcagagcgtgtttgccggctgacagcacagacacacagccagtgtttgcagtgcacacaccgcaggcagggcagggctcacctcaccyacccgccgctgcctggagtaccaggtaccccggttaactacataaaggcccccatttaaccctcccgtaacctgaacagcaccgcaattacttatttaaaactgactcgatattgcagctggttggatgtagaagcgcagctggctatatttgggtaaaaccaagaaaggaggcacaacacggcgctcggctttggacggggcaggaggtgagggccggccctcgtcctacaagcagcagccccgcgctgcggccgggccgggtacccgtcagcagggacagggctaccccacacccgct

SEQ ID NO: 84328 - DNA, 600 bp, Chicken  19866894381773_1
aaataattcatcccctgaactggaatttcagtggtggagaaaatcctttgccctgcagcttgagtgggaaaatgtctcttcttgtcattcttcaaggttgccagtacacagtttggctggtagtagagtgtgtgttgaggaaagtagttatgtctcactgaagaattgattcataagatgaatcacaagttcctgggctacctccttatccagtgtgtacttttctgtaattttgatggagaccaaaatttgcatcgtttaccttcttgcccacgattataggattgtgaatatgacttytttccctcatatttcaaatatgtgcttctttcttaaagctagagggctccactcctgcagtgttatttaccactggagtcttcacagcagaatacttacatcttttattcttgttaatgcaaactgtagaacgggaaaaatacctgtggatgacatggagcaaacaaacgtgccatatatttatgctattggagatatactgcaggacaggctggaactcacaccagtggcaatccaggcaggaagactgttagttcaaaggctttacgcggggtcaacccttaaggtaagtaaccaact

SEQ ID NO: 84329 - DNA, 600 bp, Chicken  19866894381773_2
gtgttatttaccactggagtcttcacagcagaatacttacatcttttattcttgttaatgcaaactgtagaacgggaaaaatacctgtggatgacatggagcaaacaaacgtgccatatatttatgctattggagatatactgcaggacaggctggaactcacaccagtggcaatccaggcaggaagactgttagttcaaaggctttacgcggggtcaacccttaaggtaagtaaccaactgctacaaaactttgtcactgtactacttctaagtagatgtggtgctctgaattttcagygttatwtgctgtagtatttttttccttttgttttcaatgtcatacatagttctgctacaaattgaatatgaactaaagatcaaatctgccaataagtcaacacgtttgtacctgagaagctgagtctatgamgaaaagtgtttacatctcatgttagcgcaatagtatatttccatcaagttatgctagtccaagtaggagtaacatggatgcttatttacaccttatatttcatatgtaaataggaggaaaggagaatgcctttaaagaaatgttatcgatgcgccatttatgtgggtg

SEQ ID NO: 84330 - DNA, 600 bp, Chicken  19866894381773_3
tttaccactggagtcttcacagcagaatacttacatcttttattcttgttaatgcaaactgtagaacgggaaaaatacctgtggatgacatggagcaaacaaacgtgccatatatttatgctattggagatatactgcaggacaggctggaactcacaccagtggcaatccaggcaggaagactgttagttcaaaggctttacgcggggtcaacccttaaggtaagtaaccaactgctacaaaactttgtcactgtactacttctaagtagatgtggtgctctgaattttcagygttatwtgctgtagtatttttttccttttgttttcaatgtcatacatagttctgctacaaattgaatatgaactaaagatcaaatctgccaataagtcaacacgtttgtacctgagaagctgagtctatgamgaaaagtgtttacatctcatgttagcgcaatagtatatttccatcaagttatgctagtccaagtaggagtaacatggatgcttatttacaccttatatttcatatgtaaataggaggaaaggagaatgcctttaaagaaatgttatcgatgcgccatttatgtgggtgtttgtc

SEQ ID NO: 84331 - DNA, 600 bp, Chicken  19866894381773_4
gagatatactgcaggacaggctggaactcacaccagtggcaatccaggcaggaagactgttagttcaaaggctttacgcggggtcaacccttaaggtaagtaaccaactgctacaaaactttgtcactgtactacttctaagtagatgtggtgctctgaattttcagygttatwtgctgtagtatttttttccttttgttttcaatgtcatacatagttctgctacaaattgaatatgaactaaagatcaaatctgccaataagtcaacacgtttgtacctgagaagctgagtctatgamgaaaagtgtttacatctcatgttagcgcaatagtatatttccatcaagttatgctagtccaagtaggagtaacatggatgcttatttacaccttatatttcatatgtaaataggaggaaaggagaatgcctttaaagaaatgttatcgatgcgccatttatgtgggtgtttgtctctccctcgtaaccataggtcataaggaaaaagatttttctcttgtacaatttgcagtagctgtatcaggttctgttgtcagccagatttagagcttgaatgagttgtttatttaaggttgacagg

SEQ ID NO: 84332 - DNA, 599 bp, Chicken  19866894381776_1
  misc_feature (1)..(5): n is any nucleotide
nnnnncccaaggatttctggggaaattctaaccgaacaagcccctgcacacacaggagtcttgtgcaagtcagaataaccaactggagcttaaacacttatctccgaggcttatctaatatgtatcaatatccacaaaagctcccacaggaagcagaatcagtgttttcttttgctttacaagaagtacacgatagctgccctaggaagagcagagagccctcccagttctcctcacccccctcccaactccgcatgcaacacgaggcagtcccagtgcaaacaggggcttcagatacasgtgaccttactgcactgacagcagtcatgctctcactgccargcccgtgcaagcgagaagaggggcagggaagggaaggaacctgaccatcaccttcatctccaggatcctttcgctgtcctcagcagctcctgtcaaactcttccagtcacaagggggtggccaggtgacatccagatgagccactgccacatctgtgccatgcaagcagctcttcatgccctcatctcacttctaatcgagcttgctggcctaggaaagaaattaaggagaccacgtgagacagtcccatcagccag

SEQ ID NO: 84333 - DNA, 600 bp, Chicken  19866894381776_2
cctgcacacacaggagtcttgtgcaagtcagaataaccaactggagcttaaacacttatctccgaggcttatctaatatgtatcaatatccacaaaagctcccacaggaagcagaatcagtgttttcttttgctttacaagaagtacacgatagctgccctaggaagagcagagagccctcccagttctcctcacccccctcccaactccgcatgcaacacgaggcagtcccagtgcaaacaggggcttcagatacasgtgaccttactgcactgacagcagtcatgctctcactgccargcccgtgcaagcgagaagaggggcagggaagggaaggaacctgaccatcaccttcatctccaggatcctttcgctgtcctcagcagctcctgtcaaactcttccagtcacaagggggtggccaggtgacatccagatgagccactgccacatctgtgccatgcaagcagctcttcatgccctcatctcacttctaatcgagcttgctggcctaggaaagaaattaaggagaccacgtgagacagtcccatcagccagacaggctaaccagaaactgctggcctacgggaacaggggtggt

SEQ ID NO: 84334 - DNA, 600 bp, Chicken  19866894381778_1
ctttgtggattgtttataaacaattaattgcaaatacccgtcaaaattgcaatgatgtttgttaaattgtatcacaaacagtgttttgtgtgagagctaggcactgaagtacttttgttaccgttttactattgtgtactgtaatactattagtattattttccttatggtttaagaaaaaagcactatcgcctcatgaagctagaattggaattttctcacaaaagaaacaagctcccagacagtaccaaaatagtatccaggtggactgcataattcctaaatgagacatgtcttcaytgtttttattttaagttagagacacccactggggatgttggttgctttgacatgtctgtcttttattttgacctaggatcttggacccagtaaatctttcttgatgaacattttattgtcaccaggaagtctagtggaaaaaaaaaamcaacacattttggttagagcaaacagtttttccaaaggaaagcagttctgttgaaaaattctcractagtactaattataacacaccttttaaaatagaaatagmacaaacttatcaaaatgggatgaaagaagaataatctgtcagcacct

SEQ ID NO: 84335 - DNA, 600 bp, Chicken  19866894381778_2
attagtattattttccttatggtttaagaaaaaagcactatcgcctcatgaagctagaattggaattttctcacaaaagaaacaagctcccagacagtaccaaaatagtatccaggtggactgcataattcctaaatgagacatgtcttcaytgtttttattttaagttagagacacccactggggatgttggttgctttgacatgtctgtcttttattttgacctaggatcttggacccagtaaatctttcttgatgaacattttattgtcaccaggaagtctagtggaaaaaaaaaamcaacacattttggttagagcaaacagtttttccaaaggaaagcagttctgttgaaaaattctcractagtactaattataacacaccttttaaaatagaaatagmacaaacttatcaaaatgggatgaaagaagaataatctgtcagcaccttggatcagtctttggagaataatccatctcatccattgggcacaaccaaccagccaactaatcaaacccatttcatggtaaatgatgccttatttgcctcaatctataactttttcatccaatgtgtaaggtaggtgaagtgggattc

SEQ ID NO: 84336 - DNA, 600 bp, Chicken  19866894381778_3
attttctcacaaaagaaacaagctcccagacagtaccaaaatagtatccaggtggactgcataattcctaaatgagacatgtcttcaytgtttttattttaagttagagacacccactggggatgttggttgctttgacatgtctgtcttttattttgacctaggatcttggacccagtaaatctttcttgatgaacattttattgtcaccaggaagtctagtggaaaaaaaaaamcaacacattttggttagagcaaacagtttttccaaaggaaagcagttctgttgaaaaattctcractagtactaattataacacaccttttaaaatagaaatagmacaaacttatcaaaatgggatgaaagaagaataatctgtcagcaccttggatcagtctttggagaataatccatctcatccattgggcacaaccaaccagccaactaatcaaacccatttcatggtaaatgatgccttatttgcctcaatctataactttttcatccaatgtgtaaggtaggtgaagtgggattcatctggtctgatagcattgtctaagactaagtgattcaatgaagtgccttctaaaggacattat

SEQ ID NO: 84337 - DNA, 600 bp, Chicken  19866894381778_4
tagtatccaggtggactgcataattcctaaatgagacatgtcttcaytgtttttattttaagttagagacacccactggggatgttggttgctttgacatgtctgtcttttattttgacctaggatcttggacccagtaaatctttcttgatgaacattttattgtcaccaggaagtctagtggaaaaaaaaaamcaacacattttggttagagcaaacagtttttccaaaggaaagcagttctgttgaaaaattctcractagtactaattataacacaccttttaaaatagaaatagmacaaacttatcaaaatgggatgaaagaagaataatctgtcagcaccttggatcagtctttggagaataatccatctcatccattgggcacaaccaaccagccaactaatcaaacccatttcatggtaaatgatgccttatttgcctcaatctataactttttcatccaatgtgtaaggtaggtgaagtgggattcatctggtctgatagcattgtctaagactaagtgattcaatgaagtgccttctaaaggacattatttgttttaaggtagatgtctagaataggaatactgtagatg

SEQ ID NO: 84338 - DNA, 599 bp, Chicken  19866894381785_1
  misc_feature (1)..(87): n is any nucleotide
nnnnnnnnnnnnnnnnnnnnnnnnnnnnnnnnnnnnnnnnnnnnnnnnnnnnnnnnnnnnnnnnnnnnnnnnnnnnnnnnnnnnnnntctggaaaactcttttgtatgtatagttttgtttatattgtccatgctctcaaattctctggcctctcattcaaatgtaaaaggttcctgacttcataacctcgaagtgatattacatagtaactaccaataaattcagaactgaaaactgctcattactgatccctctgttcaacccctgagtattaacagcaatggaacttacttctgtcstaagaaacttttctcaaatgttatgaattatccagtagacatgaccctaaaacttaggttctttcagtggaatacagttgccctaatacaagacactttcttctcagtastgttaggttttatacttactgatttcttcttatggaacttgtatgatgctggtaggtcatacctaagttctgtgaacagtataaaaaaaatgacactgttaytctacaatgattattgtaagcaaattgttgtaagcttattaacttatatcctacatctaagttttgtttcttctattgcccacctct

SEQ ID NO: 84339 - DNA, 600 bp, Chicken  19866894381785_2
tagttttgtttatattgtccatgctctcaaattctctggcctctcattcaaatgtaaaaggttcctgacttcataacctcgaagtgatattacatagtaactaccaataaattcagaactgaaaactgctcattactgatccctctgttcaacccctgagtattaacagcaatggaacttacttctgtcstaagaaacttttctcaaatgttatgaattatccagtagacatgaccctaaaacttaggttctttcagtggaatacagttgccctaatacaagacactttcttctcagtastgttaggttttatacttactgatttcttcttatggaacttgtatgatgctggtaggtcatacctaagttctgtgaacagtataaaaaaaatgacactgttaytctacaatgattattgtaagcaaattgttgtaagcttattaacttatatcctacatctaagttttgtttcttctattgcccacctctgagccttgactggataatagttttgacctctatgctagatttcttcactaattaggagtgaaratttgaactgcctatatcagacgtaagtggacagctgagcagcaaaaa

SEQ ID NO: 84340 - DNA, 600 bp, Chicken  19866894381785_3
accaataaattcagaactgaaaactgctcattactgatccctctgttcaacccctgagtattaacagcaatggaacttacttctgtcstaagaaacttttctcaaatgttatgaattatccagtagacatgaccctaaaacttaggttctttcagtggaatacagttgccctaatacaagacactttcttctcagtastgttaggttttatacttactgatttcttcttatggaacttgtatgatgctggtaggtcatacctaagttctgtgaacagtataaaaaaaatgacactgttaytctacaatgattattgtaagcaaattgttgtaagcttattaacttatatcctacatctaagttttgtttcttctattgcccacctctgagccttgactggataatagttttgacctctatgctagatttcttcactaattaggagtgaaratttgaactgcctatatcagacgtaagtggacagctgagcagcaaaaatgtatcttaagcacttaggcaacttccatgtcttaagtaagttgtatgactataaaccacatagctcatgatagttaagaatcaggaaaataactgaactgc

SEQ ID NO: 84341 - DNA, 600 bp, Chicken  19866894381785_4
ttcagtggaatacagttgccctaatacaagacactttcttctcagtastgttaggttttatacttactgatttcttcttatggaacttgtatgatgctggtaggtcatacctaagttctgtgaacagtataaaaaaaatgacactgttaytctacaatgattattgtaagcaaattgttgtaagcttattaacttatatcctacatctaagttttgtttcttctattgcccacctctgagccttgactggataatagttttgacctctatgctagatttcttcactaattaggagtgaaratttgaactgcctatatcagacgtaagtggacagctgagcagcaaaaatgtatcttaagcacttaggcaacttccatgtcttaagtaagttgtatgactataaaccacatagctcatgatagttaagaatcaggaaaataactgaactgcccaaaatacttgattgactgcaatggcaggatgctttctcatttaagaactgacctttggttttgttattccttctgaagcaggaagatgagtaacctctgcctgaagacaaaagctagtccaagaagaaatcaaattctacacaaaata

SEQ ID NO: 84342 - DNA, 599 bp, Chicken  19866894381788_1
  misc_feature (1)..(62): n is any nucleotide
nnnnnnnnnnnnnnnnnnnnnnnnnnnnnnnnnnnnnnnnnnnnnnnnnnnnnnnnnnnnnngcagtgggcagggagggatggagtaggagatggacagaggggagtatacataccatgaggaggtatcccccagccactcggatggcactgacgtcagagaaggacttcatgatgtcgttgagcgtggtggtggagaaggcatggatgttctgcgtggcattgggtgggatggagtcctgtgccagctgcatggcatacatcccattagacagagccaggacacgtcaccccataacargacccaaagggtgagcawcgcctggggacccgctggaccataagcatggtgctgggacccatggccgtgtgaaactggggcagaggggagctgttcctggtgcccacctccacaaatttcctctgccaggcctccaggatagcacctgccttctcctcactccagctgatgtcatggatctcgtagtcatccttgaagtgctcatacagctgccgggggctcatgagaaggaacattgtctgcagggcctcagcactggggagacacaagagcattctgttgggatcagggctgcagca

SEQ ID NO: 84343 - DNA, 599 bp, Chicken  19866894381788_2
  misc_feature (1)..(44): n is any nucleotide
nnnnnnnnnnnnnnnnnnnnnnnnnnnnnnnnnnnnnnnnnnnngcagtgggcagggagggatggagtaggagatggacagaggggagtatacataccatgaggaggtatcccccagccactcggatggcactgacgtcagagaaggacttcatgatgtcgttgagcgtggtggtggagaaggcatggatgttctgcgtggcattgggtgggatggagtcctgtgccagctgcatggcatacatcccattagacagagccaggacacgtcaccccataacargacccaaagggtgagcawcgcctggggacccgctggaccataagcatggtgctgggacccatggccgtgtgaaactggggcagaggggagctgttcctggtgcccacctccacaaatttcctctgccaggcctccaggatagcacctgccttctcctcactccagctgatgtcatggatctcgtagtcatccttgaagtgctcatacagctgccgggggctcatgagaaggaacattgtctgcagggcctcagcactggggagacacaagagcattctgttgggatcagggctgcagcaccgtgtcctgggcccccc

SEQ ID NO: 84344 - DNA, 437 bp, Chicken  19866894381788_3
gtgctgggacccatggccgtgtgaaactggggcagaggggagctgttcctggtgcccacctccacaaatttcctctgccaggcctccaggatagcacctgccttctcctcactccagctgatgtcatggatctcgtagtcatccttgaagtgctcatacagctgccgggggctcatgagaaggaacattgtctgcagggcctcagcactggggagacacaagagcattctgttgggatcagggctgcagcaccgtgtcctgggcccccccagagccccccagaatctgtccctcttattyccagccttgttccaaagcactgtctccgttgccaaagcattcccttgggtgctggatgagagcaccaccactacaggaccccatgccgtacccagtgatcctgcactgcagcctttaccttaacagcttgcccttgg

SEQ ID NO: 84345 - DNA, 477 bp, Chicken  19866894381794_1
cagtttcattggtgtgccatcattttcaatcattacctctaataccaaattgagattttataattacgtgtcttaatgaaatagttcttgtatattaatctctccttattttccctgtcaatgatgtgcactaaaacttgggaattttactgcctaatgaacagaaaacgtgacaatacactgtaaacgtctcctttcaaaaggagcaagtttgagtggtctaattttacatcttataactgttttggagattgttttcattccagtgattgactagagcagtagatgttcaaaatgcaygttgctatttccacttttaagtgtgtattatcacaaatgaagtttgtacaatccctgttttgggtgctgtgttgacttacacataatagagtaagaaatgtttaatagtgatttaatcccacaggaagcattttttgcttttgaaataatgcaaataatattctgtgttgcattgaa

SEQ ID NO: 84346 - DNA, 599 bp, Chicken  19866894381807_1
  misc_feature (1)..(121): n is any nucleotide
nnnnnnnnnnnnnnnnnnnnnnnnnnnnnnnnnnnnnnnnnnnnnnnnnnnnnnnnnnnnnnnnnnnnnnnnnnnnnnnnnnnnnnnnnnnnnnnnnnnnnnnnnnnnnnnnnnnnnnnnnttaataaagcaaaaacatgttaagtaaaacagcttcctcattacagcatctaccattaagtgttaataaagattcctagattgataactgagtcacgtatcctctgtcaacactgctgggagaaaagcaattgtcagttcttctacttgtatccaactacgtatcaatgcaaccaaaawttgtcttctttaagtatttgccagctaattcacaactaacccacaatttaagctgaagcaaatcacttcactgcatctgtcagatcagttttgagagacaacacagtcctggcttaatcctttaaacactcagatatgtagctgtggcactgaaacaaggaaggtagttgtcctgggtttctgttcttaactcagatcttaagtaaaccgaatccctctctcaaaatgcctatctctccacagggattatcaacagagtcgggctgacactgatcccaattcaggtgcctcagatacay

SEQ ID NO: 84347 - DNA, 600 bp, Chicken  19866894381807_2
wttgtcttctttaagtatttgccagctaattcacaactaacccacaatttaagctgaagcaaatcacttcactgcatctgtcagatcagttttgagagacaacacagtcctggcttaatcctttaaacactcagatatgtagctgtggcactgaaacaaggaaggtagttgtcctgggtttctgttcttaactcagatcttaagtaaaccgaatccctctctcaaaatgcctatctctccacagggattatcaacagagtcgggctgacactgatcccaattcaggtgcctcagatacaygtctaaaattagggaaatctgggacacgaagcgtggtgcagtgccatctgggagagctcacagaacattttccactgtccattcagatggcattgtgttgctctgcacaagacttgaggaatgttctgttgggtaacaaagggaacaattacatggaaaataccctttgttagaagaaaccatgaatgagtacctttggatttaggaattatattaatgtggtcacttccccgtgcatttcatatagctttgaaggacctcttgcaggatgtcatgacagctcttggaagatatgctgcc

SEQ ID NO: 84348 - DNA, 592 bp, Chicken  19866894381809_1
ggtgtccgggcccagcctgggggctttcgcaggccggcagcacgcagccgagccagccatccattacccagtaatggggagattgcagcaaaaatggcagtgagggaaaggaatacatcactggtaattatctctaaccagaaatctcctccactgctccaagccccatcattccagccctattctaataaagtgacacctttttaattatggtaaggacaaatctgaaattccggtaagtaattagcatacataatttgccatctctgacacaatgtgactttatcacaggctagctcrgtgcaaggcagaagtgcaaggctgctgtatatcctgttttaattttagagaaacccaaactgtccatttatttttattacaatgtatttctcgagtacttgagtggacagtgctgagagtgctccgagagtgcaaataaacagcagcagccttggaatgttaaatttaagagttgttttcaagaacaggacacttaatttcacaataaactatgtttttatgtacctccacgatacccactgttactgagagaagaagctagctgggcccatttttgggtgcacaggaccaa

SEQ ID NO: 84349 - DNA, 600 bp, Chicken  19866894381811_1
tcctcttgtaaaaggaaaaagaacccacccattaaaaagtgcatcagggaagaaatccttacatttcttttcttagccaccaaatgccactcttccacagttccaaggcaatttcttttctacggacacatcagtcattttcaacatgcaaggactcctcccattaaatgagaagcacaatcccatcactgcccatatgtagtgtgttaagtagactttttttcacctggtttaagagtttccctctgactgtaaccagcgtttatttagacatggaaatggtggcaacaaaaggaaatycagtagaagcaagaaccctctggtcccatacagacagttgctgttccacttgcttccccactggaaatggaacaaaggcagagtctcacagtcctatgtgtccaacattctggagtccttcctttcaccacacagaactacatttctccttcacttctacatacaacaacaacaaaaaaaaaggaaaagaaaatctactctgtgcaagtttctggctcagcaccttgtatccagagtacccacacaggccactgggagcatcccttgcatgcttctgcaaaggcaacatgtgcccaaagc

SEQ ID NO: 84350 - DNA, 600 bp, Chicken  19866894381821_1
aatacagtttcaacgtccttagtgtcttatcaacatcaagttgcattttggtataacttgcaagctggcatctcacatcttaataaattctccttattctgtgcgattattctcatgggtggagaagttagcaagttagacctactttaatgtccaaaagaagctgaatatcacagtatttcaaaacaaagcacatcttagatcatgtagttagacaatcaggttcacattttccttctgaattagtattttatatataatgtgctttaaatgaataatttcacagtacctatagaacargaatttcagatgttcttatttgcaactttcctttttaaaccgtaagaaaacrtttttgggaaatgaagaaaggaagttttctcatctttttacaatatccttctttgttttctgatgccattctgatgacctcattgtgacagaccatattccttaaatatatctaataactgatctctgtgtttacatttgcatttgacttggagatagctcctgtttatcggaggaggtcttcagtttgatagttacttaaaaccatcacatgaaaatccagcctagaagaaaacagttaggtgaaaa

SEQ ID NO: 84351 - DNA, 600 bp, Chicken  19866894381821_2
ataacttgcaagctggcatctcacatcttaataaattctccttattctgtgcgattattctcatgggtggagaagttagcaagttagacctactttaatgtccaaaagaagctgaatatcacagtatttcaaaacaaagcacatcttagatcatgtagttagacaatcaggttcacattttccttctgaattagtattttatatataatgtgctttaaatgaataatttcacagtacctatagaacargaatttcagatgttcttatttgcaactttcctttttaaaccgtaagaaaacrtttttgggaaatgaagaaaggaagttttctcatctttttacaatatccttctttgttttctgatgccattctgatgacctcattgtgacagaccatattccttaaatatatctaataactgatctctgtgtttacatttgcatttgacttggagatagctcctgtttatcggaggaggtcttcagtttgatagttacttaaaaccatcacatgaaaatccagcctagaagaaaacagttaggtgaaaataactgaagtatttttttttccattatattagtatttacacataacatttga

SEQ ID NO: 84352 - DNA, 600 bp, Chicken  19866894381828_1
gaataaaactcaggtgggagcgcaggttggagctgcaatgtaatcttaggaaaggcactgctggtgtggaacgacggcagcgtcttaggggacaggatgggtaaatagctgtcccttcaggtgccccattgtacggtgaggatgatccgttcggggaggagttaagaccggtcattgattccagagatgtggtggatgctctgtccatggagacacccacggtgaggctggacagggctccgagcacctgatggagctgtaggtgtgcctgctcattgcaggggggttggaccagatggyctttaaaggtcccttcaactcaaacgactctgtgactctatgattccacttggttaaaaactgtactctgcgagagcagtgcaagcttgagctctgtgcagcactgggatcartttttaggagatgtgtttgtatcacagccttctctctggaggggacatgaggagggtttccctcatctactcaaccatctgttccagggaatttgcagggttatcttccagcaccagtaccttggctgaaagcagatgggaagtttggagtggaggcattcctgtgctagacagcttacgtgggcag

SEQ ID NO: 84353 - DNA, 600 bp, Chicken  19866894381828_2
ccttcaggtgccccattgtacggtgaggatgatccgttcggggaggagttaagaccggtcattgattccagagatgtggtggatgctctgtccatggagacacccacggtgaggctggacagggctccgagcacctgatggagctgtaggtgtgcctgctcattgcaggggggttggaccagatggyctttaaaggtcccttcaactcaaacgactctgtgactctatgattccacttggttaaaaactgtactctgcgagagcagtgcaagcttgagctctgtgcagcactgggatcartttttaggagatgtgtttgtatcacagccttctctctggaggggacatgaggagggtttccctcatctactcaaccatctgttccagggaatttgcagggttatcttccagcaccagtaccttggctgaaagcagatgggaagtttggagtggaggcattcctgtgctagacagcttacgtgggcaggctgtggaaatcaggctggaaattggcttgtgttgagcagtctggtcccaatacgctgagatgtcaaaccccttgtgtgagaagaggttggtattagaggtaaagaatggtgc

SEQ ID NO: 84354 - DNA, 600 bp, Chicken  19866894381829_1
ggaaaaaaagcaaacaaggtttgcctgataggtttcttattttttcgacttaaacctgtccatcgacataggacttctgtgtacaaatcttatcttcgctgtgccctcagacaacatagctaaaacaaaatgactggtctgtagaagtagttctgcttatcaacttggacactgctgctctggctaagctacaacacaattagccaaggagggagaagaaaagacaagttgactctatcccagtggtgatagctcttagcttgcagtgctggagtcaggtctaggctcctgctccttaayggtaggtcacaaaaaaagaggccaaacctattagaactttcctgctagagacatgaatccaagatyttcaccttagattgcagaccctgtagcaggctttgcacgtctgtgcyctgaccacagagttgctggggataagggagctcctcctcataaggaaaactacaccagcttttgagatgtccgttccaagaggctgcttcgcagcatggctgagaatccccaggccagggagaggcctccctccagcatcaatcaggcacttcattcctgctggagaggaaaacctgcctcttcttc

SEQ ID NO: 84355 - DNA, 600 bp, Chicken  19866894381829_2
cataggacttctgtgtacaaatcttatcttcgctgtgccctcagacaacatagctaaaacaaaatgactggtctgtagaagtagttctgcttatcaacttggacactgctgctctggctaagctacaacacaattagccaaggagggagaagaaaagacaagttgactctatcccagtggtgatagctcttagcttgcagtgctggagtcaggtctaggctcctgctccttaayggtaggtcacaaaaaaagaggccaaacctattagaactttcctgctagagacatgaatccaagatyttcaccttagattgcagaccctgtagcaggctttgcacgtctgtgcyctgaccacagagttgctggggataagggagctcctcctcataaggaaaactacaccagcttttgagatgtccgttccaagaggctgcttcgcagcatggctgagaatccccaggccagggagaggcctccctccagcatcaatcaggcacttcattcctgctggagaggaaaacctgcctcttcttcctgaccatctctgagcaggtaacaaatcttcccacatctgtgtcataagcaccttcacctaggctg

SEQ ID NO: 84356 - DNA, 600 bp, Chicken  19866894381829_3
acatagctaaaacaaaatgactggtctgtagaagtagttctgcttatcaacttggacactgctgctctggctaagctacaacacaattagccaaggagggagaagaaaagacaagttgactctatcccagtggtgatagctcttagcttgcagtgctggagtcaggtctaggctcctgctccttaayggtaggtcacaaaaaaagaggccaaacctattagaactttcctgctagagacatgaatccaagatyttcaccttagattgcagaccctgtagcaggctttgcacgtctgtgcyctgaccacagagttgctggggataagggagctcctcctcataaggaaaactacaccagcttttgagatgtccgttccaagaggctgcttcgcagcatggctgagaatccccaggccagggagaggcctccctccagcatcaatcaggcacttcattcctgctggagaggaaaacctgcctcttcttcctgaccatctctgagcaggtaacaaatcttcccacatctgtgtcataagcaccttcacctaggctgaaggactcttaagaacagtggcagcattagtactgcagcaattccac

SEQ ID NO: 84357 - DNA, 600 bp, Chicken  19866894381831_1
ctttctacagaccacagaactgatttatgtcttgtacttcataagtttgctttagtctgtggtgatatgttagccataagcaaagtatatgtgtgacttacattcaatggagggaagctcagaaataaatttgttggttatgtttgacctttatcttgcaggaaatgttgcatagtctttttcttgttgtcttttttaagtcctaaatgctgactataagcactgagaggattcatactatgaactcagctcttgctttaccactttacatgactgtaaaatgggtatagaggtgagacrggcttcattaggggagcggctgctttaggacttgcaggttgattctttaagggatggtggtggttggttactcctagagttgtcctgacacaccactcctatgtgctagtgatgatgcaggagatcaccacccaggtgcaamttgcaggctgctgtgtaggcagggatgctgctgtgctgcttggtgacttctgcttctggagtggtccagttcttgcacagaggatacttaatgctttctgaagtgctcatctcatgtgtctgcaattgcagtggtgaacagtggtgtagttacagact

SEQ ID NO: 84358 - DNA, 600 bp, Chicken  19866894381831_2
tttgacctttatcttgcaggaaatgttgcatagtctttttcttgttgtcttttttaagtcctaaatgctgactataagcactgagaggattcatactatgaactcagctcttgctttaccactttacatgactgtaaaatgggtatagaggtgagacrggcttcattaggggagcggctgctttaggacttgcaggttgattctttaagggatggtggtggttggttactcctagagttgtcctgacacaccactcctatgtgctagtgatgatgcaggagatcaccacccaggtgcaamttgcaggctgctgtgtaggcagggatgctgctgtgctgcttggtgacttctgcttctggagtggtccagttcttgcacagaggatacttaatgctttctgaagtgctcatctcatgtgtctgcaattgcagtggtgaacagtggtgtagttacagactagaactagagaaacactgaaaagggtaaatggtcctacttcyagagcctctgattggcagtcctcctgcagtaaggttttgccaatgtttgtaggaagrtaacartgctcttgtgtwattggccaaaggaagttgtgctcat

SEQ ID NO: 84359 - DNA, 600 bp, Chicken  19866894381831_3
ttctttaagggatggtggtggttggttactcctagagttgtcctgacacaccactcctatgtgctagtgatgatgcaggagatcaccacccaggtgcaamttgcaggctgctgtgtaggcagggatgctgctgtgctgcttggtgacttctgcttctggagtggtccagttcttgcacagaggatacttaatgctttctgaagtgctcatctcatgtgtctgcaattgcagtggtgaacagtggtgtagttacagactagaactagagaaacactgaaaagggtaaatggtcctacttcyagagcctctgattggcagtcctcctgcagtaaggttttgccaatgtttgtaggaagrtaacartgctcttgtgtwattggccaaaggaagttgtgctcatgctacaaaatatatgttctgggtggatgtgaggaactgttctgtggaccttggaggcaataagaaaactgctggttacagcattaattactcatagggatgatggctcagtataacaaccaggaaggcttaaaagcaattgcaccgaaccatttcacttaggctagcagtatctgcacagtacttctgtaaaataatagg

SEQ ID NO: 84360 - DNA, 600 bp, Chicken  19866894381831_4
tatgtgctagtgatgatgcaggagatcaccacccaggtgcaamttgcaggctgctgtgtaggcagggatgctgctgtgctgcttggtgacttctgcttctggagtggtccagttcttgcacagaggatacttaatgctttctgaagtgctcatctcatgtgtctgcaattgcagtggtgaacagtggtgtagttacagactagaactagagaaacactgaaaagggtaaatggtcctacttcyagagcctctgattggcagtcctcctgcagtaaggttttgccaatgtttgtaggaagrtaacartgctcttgtgtwattggccaaaggaagttgtgctcatgctacaaaatatatgttctgggtggatgtgaggaactgttctgtggaccttggaggcaataagaaaactgctggttacagcattaattactcatagggatgatggctcagtataacaaccaggaaggcttaaaagcaattgcaccgaaccatttcacttaggctagcagtatctgcacagtacttctgtaaaataataggcaatataaaagtgactgtaaacagttgcaagccaaggaaagtgtcttcccagggagt

SEQ ID NO: 84361 - DNA, 600 bp, Chicken  19866894381831_5
ctagtgatgatgcaggagatcaccacccaggtgcaamttgcaggctgctgtgtaggcagggatgctgctgtgctgcttggtgacttctgcttctggagtggtccagttcttgcacagaggatacttaatgctttctgaagtgctcatctcatgtgtctgcaattgcagtggtgaacagtggtgtagttacagactagaactagagaaacactgaaaagggtaaatggtcctacttcyagagcctctgattggcagtcctcctgcagtaaggttttgccaatgtttgtaggaagrtaacartgctcttgtgtwattggccaaaggaagttgtgctcatgctacaaaatatatgttctgggtggatgtgaggaactgttctgtggaccttggaggcaataagaaaactgctggttacagcattaattactcatagggatgatggctcagtataacaaccaggaaggcttaaaagcaattgcaccgaaccatttcacttaggctagcagtatctgcacagtacttctgtaaaataataggcaatataaaagtgactgtaaacagttgcaagccaaggaaagtgtcttcccagggagtcagaaa

SEQ ID NO: 84362 - DNA, 595 bp, Chicken  19866894381831_6
caggagatcaccacccaggtgcaamttgcaggctgctgtgtaggcagggatgctgctgtgctgcttggtgacttctgcttctggagtggtccagttcttgcacagaggatacttaatgctttctgaagtgctcatctcatgtgtctgcaattgcagtggtgaacagtggtgtagttacagactagaactagagaaacactgaaaagggtaaatggtcctacttcyagagcctctgattggcagtcctcctgcagtaaggttttgccaatgtttgtaggaagrtaacartgctcttgtgtwattggccaaaggaagttgtgctcatgctacaaaatatatgttctgggtggatgtgaggaactgttctgtggaccttggaggcaataagaaaactgctggttacagcattaattactcatagggatgatggctcagtataacaaccaggaaggcttaaaagcaattgcaccgaaccatttcacttaggctagcagtatctgcacagtacttctgtaaaataataggcaatataaaagtgactgtaaacagttgcaagccaaggaaagtgtcttcccagggagtcagaaatcagccg

SEQ ID NO: 84363 - DNA, 600 bp, Chicken  19866894381840_1
atgaaataattgtctgtgataggcaaaagaaagcaagaataacttaaacagagaagtttagccccttggaatactctctatctgcttttaaaactgcagtatccatacataaattaaataagacttataaatccacgttactcaagctcagtgaggaagttctgactttctgtgctagcctttgttcttgtcagtgtgagtgactactcagaaaaactaattattttgcactggtactgggaatgcatctgtgagtaggacccctagtctcctgttagccagactaactttttatcttgygggtcctgctgcttctctaaatatttctctttaatttgaagaacctgttttcctggttgaagagatttctggggaggggaccagggactactgatgttcagctggactctgagctcctgcaggctgccagaccggagttcataatcagcagtgggtgagagttctctgatgctgtgagattatgaatgcctttccttatcgaaggcgttgagcaccgatacttctcatcacagagagtggtggaaagctctycttccacctctgctgtaacgctcaccaagaagctatttgctaagaaac

SEQ ID NO: 84364 - DNA, 600 bp, Chicken  19866894381840_2
gagtaggacccctagtctcctgttagccagactaactttttatcttgygggtcctgctgcttctctaaatatttctctttaatttgaagaacctgttttcctggttgaagagatttctggggaggggaccagggactactgatgttcagctggactctgagctcctgcaggctgccagaccggagttcataatcagcagtgggtgagagttctctgatgctgtgagattatgaatgcctttccttatcgaaggcgttgagcaccgatacttctcatcacagagagtggtggaaagctctycttccacctctgctgtaacgctcaccaagaagctatttgctaagaaacgtacaatttctccrgaagaactkatatrttgttaaaaagaaaattattttaaagcatgggacaccttcatttttgtttgattgttgcttttcccccttaccttragcccccagagtgaatatgatcataaagatgagcactgtttatcttcaggaacgcctgtgggcttagtctgtttatttggattatcacataatgtcacttgctgatgttttggtatgccttatcaatgtatgaaatgaaattcaacac

SEQ ID NO: 84365 - DNA, 600 bp, Chicken  19866894381840_3
ctctaaatatttctctttaatttgaagaacctgttttcctggttgaagagatttctggggaggggaccagggactactgatgttcagctggactctgagctcctgcaggctgccagaccggagttcataatcagcagtgggtgagagttctctgatgctgtgagattatgaatgcctttccttatcgaaggcgttgagcaccgatacttctcatcacagagagtggtggaaagctctycttccacctctgctgtaacgctcaccaagaagctatttgctaagaaacgtacaatttctccrgaagaactkatatrttgttaaaaagaaaattattttaaagcatgggacaccttcatttttgtttgattgttgcttttcccccttaccttragcccccagagtgaatatgatcataaagatgagcactgtttatcttcaggaacgcctgtgggcttagtctgtttatttggattatcacataatgtcacttgctgatgttttggtatgccttatcaatgtatgaaatgaaattcaacactttggtttggacatgtgaatagcagagtgacataagacctaacttacccttttccactctat

SEQ ID NO: 84366 - DNA, 600 bp, Chicken  19866894381840_4
tttctctttaatttgaagaacctgttttcctggttgaagagatttctggggaggggaccagggactactgatgttcagctggactctgagctcctgcaggctgccagaccggagttcataatcagcagtgggtgagagttctctgatgctgtgagattatgaatgcctttccttatcgaaggcgttgagcaccgatacttctcatcacagagagtggtggaaagctctycttccacctctgctgtaacgctcaccaagaagctatttgctaagaaacgtacaatttctccrgaagaactkatatrttgttaaaaagaaaattattttaaagcatgggacaccttcatttttgtttgattgttgcttttcccccttaccttragcccccagagtgaatatgatcataaagatgagcactgtttatcttcaggaacgcctgtgggcttagtctgtttatttggattatcacataatgtcacttgctgatgttttggtatgccttatcaatgtatgaaatgaaattcaacactttggtttggacatgtgaatagcagagtgacataagacctaacttacccttttccactctatgctattgct

SEQ ID NO: 84367 - DNA, 600 bp, Chicken  19866894381840_5
ctttaatttgaagaacctgttttcctggttgaagagatttctggggaggggaccagggactactgatgttcagctggactctgagctcctgcaggctgccagaccggagttcataatcagcagtgggtgagagttctctgatgctgtgagattatgaatgcctttccttatcgaaggcgttgagcaccgatacttctcatcacagagagtggtggaaagctctycttccacctctgctgtaacgctcaccaagaagctatttgctaagaaacgtacaatttctccrgaagaactkatatrttgttaaaaagaaaattattttaaagcatgggacaccttcatttttgtttgattgttgcttttcccccttaccttragcccccagagtgaatatgatcataaagatgagcactgtttatcttcaggaacgcctgtgggcttagtctgtttatttggattatcacataatgtcacttgctgatgttttggtatgccttatcaatgtatgaaatgaaattcaacactttggtttggacatgtgaatagcagagtgacataagacctaacttacccttttccactctatgctattgctgctgt

SEQ ID NO: 84368 - DNA, 600 bp, Chicken  19866894381840_6
gactctgagctcctgcaggctgccagaccggagttcataatcagcagtgggtgagagttctctgatgctgtgagattatgaatgcctttccttatcgaaggcgttgagcaccgatacttctcatcacagagagtggtggaaagctctycttccacctctgctgtaacgctcaccaagaagctatttgctaagaaacgtacaatttctccrgaagaactkatatrttgttaaaaagaaaattattttaaagcatgggacaccttcatttttgtttgattgttgcttttcccccttaccttragcccccagagtgaatatgatcataaagatgagcactgtttatcttcaggaacgcctgtgggcttagtctgtttatttggattatcacataatgtcacttgctgatgttttggtatgccttatcaatgtatgaaatgaaattcaacactttggtttggacatgtgaatagcagagtgacataagacctaacttacccttttccactctatgctattgctgctgtgacaactgccagagcaagcatcctttcaacgttgggtacttcttcaggctattttgggatctttcccagctgattt

SEQ ID NO: 84369 - DNA, 599 bp, Chicken  19866894381842_1
  misc_feature (1)..(18): n is any nucleotide
nnnnnnnnnnnnnnnnnntgataatgatgctgcagagcacatgtcaaaaagatggcagcaagagcttcactttgatgactctgctgccactgcaacagtaggaataaaagcccttcaaaaacagatggtctggctgctcctaattaaggtgattagcacgtggtgtcaagaaactacaaaatcccaacataacttgttgagcaaagcgcaaagcctgaggaacaaggagaagtcaggggcaattcctcttgctgagctcagagtaccttgtcaatcacagcactgcagtaacagcacttyacaggctcttccttaacactgtgcaggaacttctggggcattgcctccactaggatggctgtgctgcctgaggcaggaacaaggacctctctattttccttgcaaaaatgtcaattctaagaaaaggagaaatgtcagcttttaaaaagccagcatcctggctacttgaaaataccctaataaagacaaggtaacagcttgctcctgtctcttttgtctctacctattgtaatctcagtaccatgttatgaaacaggactcagcaaactatttctgcaggcctgattcaagagctatct

SEQ ID NO: 84370 - DNA, 455 bp, Chicken  19866894381842_2
ctaataaagacaaggtaacagcttgctcctgtctcttttgtctctacctattgtaatctcagtaccatgttatgaaacaggactcagcaaactatttctgcaggcctgattcaagagctatctatggaaagactgtccaagatgtccttttcagatacttagaaatccttaagacatctgcatggtaaaaagctagagtcatccagctctctgggaaggcaattcagttacacatctactgcagaaacagagccaaaatcacaacagagctgtacaagtttatgtattttgaaaactgcrgcagactggggtctgcagtaacccacaagaagctgtattcagcatgccatggtgtctgtctccccagccttgtactatacgggatgcaagaacagaggttccctcaggtatagtgaaactgtttgcttaaaagagaacttcgaaacatgggttga

SEQ ID NO: 84371 - DNA, 600 bp, Chicken  19866894381844_1
taacaaaaagtttttagtaaaacagtatgtgtttcattgttcacttgctcaataaccttaagtatagagcactactacatttacatacctcatcataactgtttgtctgtctggccgcacatctattaagatcttcattatctgaggttcaaatcccatatccagcattctgtcagcctcatctaaaacctgcttagaacaaggtgtttgcatctattcttcaggtaagggtttcagcaaggcatttcatagcagatcactttcatggtaagtgtctttaatttagaagccatttcctartttaycacaaaacctgttcactttgttacacccctccagtttcttttgcactttttcatttagtagtacgtttgcagacagaacaagaaaaatccatatcatctctgagaacacaaagtcaatgaaggaatatacttcatgtttttgttggttcgttttctaaaacactcataatggtggacctctacacaatatactttcaatgaaaagtttttagaaacataccagcttagacccttatatgaactaggaaaaaaaagacagactgtaccttttggctcatgctaggataccagcatt

SEQ ID NO: 84372 - DNA, 600 bp, Chicken  19866894381844_2
aaaagtttttagtaaaacagtatgtgtttcattgttcacttgctcaataaccttaagtatagagcactactacatttacatacctcatcataactgtttgtctgtctggccgcacatctattaagatcttcattatctgaggttcaaatcccatatccagcattctgtcagcctcatctaaaacctgcttagaacaaggtgtttgcatctattcttcaggtaagggtttcagcaaggcatttcatagcagatcactttcatggtaagtgtctttaatttagaagccatttcctartttaycacaaaacctgttcactttgttacacccctccagtttcttttgcactttttcatttagtagtacgtttgcagacagaacaagaaaaatccatatcatctctgagaacacaaagtcaatgaaggaatatacttcatgtttttgttggttcgttttctaaaacactcataatggtggacctctacacaatatactttcaatgaaaagtttttagaaacataccagcttagacccttatatgaactaggaaaaaaaagacagactgtaccttttggctcatgctaggataccagcattcccaa

SEQ ID NO: 84373 - DNA, 600 bp, Chicken  19866894381858_1
tccggtctttcttttttttttttttctttctcctgctcatgtttctgtaaacaccctttttgttcctcttcatatcccttgctggattctactccaactggacttcagctttctgaacctcatccatacactgttagacagtgtccctctttttctcacagttatcatagaatcatagaatggcctgggttgaaaagtaccacagtgaccatcgagtttcaacccccctgctatatgcagggtcgccgaccaccagaccaggctgcccagagccacatccaacctggccttgaatgcctycagggatggggcatccacaacctccctgggcaacccgttccagtgcgccaccaccctttgtgtgaaaagcttyctcctaaaggaatctgaggaatctcttaggctcctcttattcctaggactgtataccttggaattattccccagctttttttctacatatgagattaattcttttccatccattttttttagccagaaattttaatgcactttccaaagctgttactttcgtataaaacaaattcttctacattttacactgctgcaatagtatccttcccttcaatctttacttcc

SEQ ID NO: 84374 - DNA, 600 bp, Chicken  19866894381858_2
atcccttgctggattctactccaactggacttcagctttctgaacctcatccatacactgttagacagtgtccctctttttctcacagttatcatagaatcatagaatggcctgggttgaaaagtaccacagtgaccatcgagtttcaacccccctgctatatgcagggtcgccgaccaccagaccaggctgcccagagccacatccaacctggccttgaatgcctycagggatggggcatccacaacctccctgggcaacccgttccagtgcgccaccaccctttgtgtgaaaagcttyctcctaaaggaatctgaggaatctcttaggctcctcttattcctaggactgtataccttggaattattccccagctttttttctacatatgagattaattcttttccatccattttttttagccagaaattttaatgcactttccaaagctgttactttcgtataaaacaaattcttctacattttacactgctgcaatagtatccttcccttcaatctttacttccttacataatctatcagtgttcagatacattggtacataaaggcagcactgtaaaatagaagacattgcactgt

SEQ ID NO: 84375 - DNA, 600 bp, Chicken  19866894381859_1
acataacacaagcaagacatctcagaaagcagtggtattctgcctgggttatgggtgcccctttgtgtttgcagtcaccaccattgctgtcacattgccgtggaacacttacaccagaaaggatgcctgctggctcaactggaaggacagcaaagctgtcttggcctttgtcatacctgccctggccatcgtggccatgaatttgttcatcactgcagttgtgataataaaaatactaaggccgaacattggggacaggacaaacaaacaagagaggaagaccttctttcaaatttgcaraagtcttgtcatcttgacaccactgttaggcctcacgtggggatttggtcttgccaccatcatcagaaatagccaccagactttccacatcctctttgctctgctcaatgccttgcaggtgagttgcacataggcatgggttttgtttcatcttatgcccatttaacaagcagtgacattcctgcagtgctgtgcttgaggggaatgaaaacagtacaggaaggctcaggtttgtcttacacatcttcactcccaaagggctctttgggaaacccattccaggcattcataccttgtatg

SEQ ID NO: 84376 - DNA, 600 bp, Chicken  19866894381862_1
agagagcatggggtacacctgtgtgcacacagcattcaactgtgaacaaggtggggtagaaatcaaatcacaactcacggcaacacccaaggcagtgccttggagatggagaacaacacgtagcctcagtgggaccatcagagaggaggcaaatggtttaaaagcacatgagcaacatcaacctctcaaaccaacattgcattatccccccagtacacatccttacgctgtgattgcttacatggcctgaaggacagcatctggccatgccttgggactggacatttaagtttttctttkgcccagacgggaaatctgattctcaaacaaaactagagaaatktaaaagtttgggtgggtgggtgttaatccctcttgctggcatgaaaagtgttttcacacctttctctaggcttcargcaaaggcagtttagctcatggctcttcaaaccatgggacaaggtgggacatgctgaccaacgtggtcctcaggcaatcagttaccatctatccccagctaggctggttctgccagaggtaacgtattatttggtataaatctgaaattatttaacgctagtcaaataatgaagcaagcca

SEQ ID NO: 84377 - DNA, 600 bp, Chicken  19866894381862_2
gaacaaggtggggtagaaatcaaatcacaactcacggcaacacccaaggcagtgccttggagatggagaacaacacgtagcctcagtgggaccatcagagaggaggcaaatggtttaaaagcacatgagcaacatcaacctctcaaaccaacattgcattatccccccagtacacatccttacgctgtgattgcttacatggcctgaaggacagcatctggccatgccttgggactggacatttaagtttttctttkgcccagacgggaaatctgattctcaaacaaaactagagaaatktaaaagtttgggtgggtgggtgttaatccctcttgctggcatgaaaagtgttttcacacctttctctaggcttcargcaaaggcagtttagctcatggctcttcaaaccatgggacaaggtgggacatgctgaccaacgtggtcctcaggcaatcagttaccatctatccccagctaggctggttctgccagaggtaacgtattatttggtataaatctgaaattatttaacgctagtcaaataatgaagcaagccaagttcttcctttgaaaagaagacatccaacatgtttgcagtgt

SEQ ID NO: 84378 - DNA, 600 bp, Chicken  19866894381862_3
gtagcctcagtgggaccatcagagaggaggcaaatggtttaaaagcacatgagcaacatcaacctctcaaaccaacattgcattatccccccagtacacatccttacgctgtgattgcttacatggcctgaaggacagcatctggccatgccttgggactggacatttaagtttttctttkgcccagacgggaaatctgattctcaaacaaaactagagaaatktaaaagtttgggtgggtgggtgttaatccctcttgctggcatgaaaagtgttttcacacctttctctaggcttcargcaaaggcagtttagctcatggctcttcaaaccatgggacaaggtgggacatgctgaccaacgtggtcctcaggcaatcagttaccatctatccccagctaggctggttctgccagaggtaacgtattatttggtataaatctgaaattatttaacgctagtcaaataatgaagcaagccaagttcttcctttgaaaagaagacatccaacatgtttgcagtgtttcaatgcactgggactttgtagggaagatctaaataaaaagatgtgttgaggaaagatttagtaaactattcaca

SEQ ID NO: 84379 - DNA, 599 bp, Chicken  19866894381870_1
  misc_feature (1)..(201): n is any nucleotide
nnnnnnnnnnnnnnnnnnnnnnnnnnnnnnnnnnnnnnnnnnnnnnnnnnnnnnnnnnnnnnnnnnnnnnnnnnnnnnnnnnnnnnnnnnnnnnnnnnnnnnnnnnnnnnnnnnnnnnnnnnnnnnnnnnnnnnnnnnnnnnnnnnnnnnnnnnnnnnnnnnnnnnnnnnnnnnnnnnnnnnnnnnnnnnnnnnnnnnnnntattcagaatataactgcacactttacaaagggatatagtctctgtccttaaaagtttacttctaaagacaaggagagttgaacacctttatctccttscaagacataacctgctgggctgggttcctagtcaatatctgtgtggcttcgttcaccagtcagccatgcagccaaacaaattagctttctaatggtatgcagccacagttttattgctttaactcagatatgcaatgccagttataatatatttttgaactggtttgttttcttccaagatgttgagagagaggaaagctcccagagtccctccatttccatagtccacatacaggaagagtaataaagtaaattaagagcaactttgaacattttagtctatggattaccctgacaac

SEQ ID NO: 84380 - DNA, 600 bp, Chicken  19866894381870_2
tcaatatctgtgtggcttcgttcaccagtcagccatgcagccaaacaaattagctttctaatggtatgcagccacagttttattgctttaactcagatatgcaatgccagttataatatatttttgaactggtttgttttcttccaagatgttgagagagaggaaagctcccagagtccctccatttccatagtccacatacaggaagagtaataaagtaaattaagagcaactttgaacattttagtctatggattaccctgacaactgagtcttgccagtcattccagcccttctccraaagctaattgtagaaccacgaataacaaaacaagcagcctttactagctggatattccttgtgctggctgctttctcatctgcctgacattctaagccttgcatcaccttggttattttgaaagagagaatattattgagaagaagacctcattcttctgctcacaatgacttttccaggccagttattaatttcatgtgcatcatctggagcagtttattattcggtaggctggaaattcagcacgagtataacccaggaaaagaaaggtccagccagaatctcactcagaaattctg

SEQ ID NO: 84381 - DNA, 600 bp, Chicken  19866894381872_1
acagcgattcaaaaggggaccagaggaaaggatttaaactaaggctcttttggtaacattctgatcctttggcaagccggtctgtcttgctgcaaaaagaatgtaacagtttataaggaaacttaagaacagaacttctgtttgagatagctctccaggagaagaattgaaaaacaaaaacacattgaagagtcacagcaacattcctcattttttcaaaccacagaaacagagcaatattgagttatttggcatagttatgcacaggtgaaagcttaacatggtccatggaacaattakgtaagcactgatatggtttgaaagttttcatttttagaaaggtgctgttcttgttaacagttaaaaaaaatcttattcaaaacaaagttttgattccttcacagttcagaaaaatcagagtggtaacactgagaaacattttgagagcttctcttcaggaatattacagaccaaaacttaagttgtaagaacaygacacttaaatacgtgttgaacatgcaagagagaagtctgtttccaggcactcagatgctctgggtagaagacaaaccatgcctgcattcctaagctagatggttt

SEQ ID NO: 84382 - DNA, 600 bp, Chicken  19866894381872_2
acagcaacattcctcattttttcaaaccacagaaacagagcaatattgagttatttggcatagttatgcacaggtgaaagcttaacatggtccatggaacaattakgtaagcactgatatggtttgaaagttttcatttttagaaaggtgctgttcttgttaacagttaaaaaaaatcttattcaaaacaaagttttgattccttcacagttcagaaaaatcagagtggtaacactgagaaacattttgagagcttctcttcaggaatattacagaccaaaacttaagttgtaagaacaygacacttaaatacgtgttgaacatgcaagagagaagtctgtttccaggcactcagatgctctgggtagaagacaaaccatgcctgcattcctaagctagatggtttccataactatctgtctgcatctatcattccttcatgcctggccccagaactaacactgctataccctgtgttggctgagtttttacttactttggctaatgtctgatttgatcaaaaacaaaatcccaccactaaaccctgagctttaaaaggcaaaatgaacaaagcagcattaccagtagacatgtcccagt

SEQ ID NO: 84383 - DNA, 600 bp, Chicken  19866894381874_1
cagattcactcatgtttatatggagggaaaaaaaagacttcaaggttatgaagaagcttaatgcagaactttattattatttttaccttacagtacattctttgaaacacccctccctctttgttttagtttcaaatcccttaactacctgcttagagccatgcaagccttgatttagtgcaagtactatcaagctcaatggctgataaacagtttaattttttgttccttagagagaagaacagaaagaaaagtctaagcacacagcacactttaaattgctgtaacagcagcagtagycataacagttagactgggctgccatatacgatcctaggggtaggctgcacagaaaggaagcatccctacagtaccagtcctgtcatatacaaaatgctccagggaatacacaagcctgcttaagtgtcagacagagggcagaaaagaactgctactttaccctgtggttatcactgcaaagtctgggatatcacttacatggttttactgctgacaggcaatcattggttttgcagcccgacaattaagcagaaatctcttcctggtgaaaacgaaattagccttaaaaacgctctgaga

SEQ ID NO: 84384 - DNA, 600 bp, Chicken  19866894381876_1
gagaaatggagctacttgctctgcttcaatatagaagactcaaaagattaacattgtaaaaccaacattttatcctcttagtttccctgatatagaaaagatacctgacagtcgccatgtaggaatggcattgtatgaactgtgaaaaatgaaagctgtttgagggatgtttctgagattcttatccaagagcaaatttaaagttactgtcattatattgttttaaaacatatgtttgtacaaatattaaacatgctcataatcccaacagcatgtctttgaactgcagcagctaaatastgataattttctttgtgcccacaggatgtcatagttcactttagaatacagtcattaaaaattaggggaacaattccagtctttgttatcaggctttgcaacatacatattttcaccaaaggacccaatgaaaataggcataggtatctgctgttcaacttgtaaaatgtcagaatccatatgtgcacagagacttctttttttttggatggaagaaccgcttttgccttaattgagattctctttgcttcagtgaattttacatcagtgggagcaccaacttcagtgggattgatggta

SEQ ID NO: 84385 - DNA, 564 bp, Chicken  19866894381876_2
taaagttactgtcattatattgttttaaaacatatgtttgtacaaatattaaacatgctcataatcccaacagcatgtctttgaactgcagcagctaaatastgataattttctttgtgcccacaggatgtcatagttcactttagaatacagtcattaaaaattaggggaacaattccagtctttgttatcaggctttgcaacatacatattttcaccaaaggacccaatgaaaataggcataggtatctgctgttcaacttgtaaaatgtcagaatccatatgtgcacagagacttcsttttttttggatggaagaaccgcttttgccttaattgagattctctttgcttcagtgaattttacatcagtgggagcaccaacttcagtgggattgatggtattttgtcagttgggttctcaagcatccaagcctgtctgcagaactgtgttgctttcattgcccagttacttcccatgagatttttttagatcaaaatattacagttcaaacacgactgccaccatcagccttttagtcggtctaagcgatcacaatcattta

SEQ ID NO: 84386 - DNA, 600 bp, Chicken  19866894381877_1
aggtgaactctttaaaaaataggatcctttgagttgcatgtttcttgtttttaattaattgaatttctcttcagatactgtaattaacagcaagcttgctgtgatattaaactgtaggaaacaccgacaccttgtggagatgagatgtcatttctcagctgatgttaaaataaactgggacagaaaatcaatttagtgaagaattcagtagatctacaaaaccccaaaagtctttaatttcagaattgcataaaatcacctgtaagcaattcaaatgctaaatgtagagtgtgcagagcrtgcatacatatgcagacacacaaatattatacatatgcacgtgaacacaaacatatgtttattaagaggmgaaacagtgcttataacattatttttctctgattttgtttgtgtgttttgaaacagctgttccttcarcttgtgacactgtttctggtttctttaagaaacacagtgagtgatgactgattctcaatagggctaaatctaatctaatctaacataaatctatttttttttttaatctgaatgggaagaaatgactctttctcctcagacagtattattattattaacaat

SEQ ID NO: 84387 - DNA, 600 bp, Chicken  19866894381877_2
tcagatactgtaattaacagcaagcttgctgtgatattaaactgtaggaaacaccgacaccttgtggagatgagatgtcatttctcagctgatgttaaaataaactgggacagaaaatcaatttagtgaagaattcagtagatctacaaaaccccaaaagtctttaatttcagaattgcataaaatcacctgtaagcaattcaaatgctaaatgtagagtgtgcagagcrtgcatacatatgcagacacacaaatattatacatatgcacgtgaacacaaacatatgtttattaagaggmgaaacagtgcttataacattatttttctctgattttgtttgtgtgttttgaaacagctgttccttcarcttgtgacactgtttctggtttctttaagaaacacagtgagtgatgactgattctcaatagggctaaatctaatctaatctaacataaatctatttttttttttaatctgaatgggaagaaatgactctttctcctcagacagtattattattattaacaataataataataataaaagtatacatagcacagagcaaagtagaggactgaaggagtgtgtctgctgaacgt

SEQ ID NO: 84388 - DNA, 600 bp, Chicken  19866894381877_3
gatgagatgtcatttctcagctgatgttaaaataaactgggacagaaaatcaatttagtgaagaattcagtagatctacaaaaccccaaaagtctttaatttcagaattgcataaaatcacctgtaagcaattcaaatgctaaatgtagagtgtgcagagcrtgcatacatatgcagacacacaaatattatacatatgcacgtgaacacaaacatatgtttattaagaggmgaaacagtgcttataacattatttttctctgattttgtttgtgtgttttgaaacagctgttccttcarcttgtgacactgtttctggtttctttaagaaacacagtgagtgatgactgattctcaatagggctaaatctaatctaatctaacataaatctatttttttttttaatctgaatgggaagaaatgactctttctcctcagacagtattattattattaacaataataataataataaaagtatacatagcacagagcaaagtagaggactgaaggagtgtgtctgctgaacgtggagattaaatgcactaaatagtgaaagataccattacaaatgtggtggacatttgacatttttattt

SEQ ID NO: 84389 - DNA, 599 bp, Chicken  19866894381886_1
  misc_feature (1)..(133): n is any nucleotide
nnnnnnnnnnnnnnnnnnnnnnnnnnnnnnnnnnnnnnnnnnnnnnnnnnnnnnnnnnnnnnnnnnnnnnnnnnnnnnnnnnnnnnnnnnnnnnnnnnnnnnnnnnnnnnnnnnnnnnnnnnnnnnnnnnnnnttgggtgaggcggggcgaggcggggggaggcggggcaaggtggggtgaggcgaggtgaggtggggcgaggcgaggcgaggggaagcgagtcagggtgaggcgaagcgagtcagggcggggcgagatgaggtgaggttgggcgaggcgtggcctggcggggcaaggcrgggcgaaacagggcaaggcgcggtgaggcgaggtgaggcagggcgacacgtggcggggtgaggcgaggcgaggcgaggcgtggcaggcgaggaggggcggggcagggcggggcgaggctaagagtaacgaggtgaaacggggcgaggtgaggagaggcgagaagaggcggggcgaagtgaggcgggatggggcggggcggggtgaggttaggcgaggctagacggggcgaggcgaggcgaggcacggcgagacggggcgaggttggatgaggcgaggcggggcgagaggaagcgaggcg

SEQ ID NO: 84390 - DNA, 600 bp, Chicken  19866894381889_1
aatcaagagaaagaaaatctgaagtagtgtgtatttatgtttatacatttttttttatcttcacatgttttcactccccattcagtgtgatgggcatgtgtttcagtagcaaagcccttgcttggaattcctgtccctgaatctttttctgctaaaaagtggtgattgcttgcagctctgtattatttcgtttatttatttttgctgctaaacataaaacaaatgtacagttcatgtattgcatagttgtggatcttgtcatcaaggaaatgctgtctacataaagttgtcatcttactygtttcagtagaaaacaactgaagtcagtaaatgtgtcaaacaaaacaatgaaaaaaacaactctccccacccctctccaaataacaacagcagcaatcaatttacctataatgtaataccaatattgaaaaattcatgttcacctcttatgtgaacatcccagagttcttttctggtaaggcaaggggagyacatgttaacaacttggctttttggctccctatcacaatatctttatttcatcttttgtaccttgccacctagaaaggctgagcttgtttttgttctggtttgtaccac

SEQ ID NO: 84391 - DNA, 600 bp, Chicken  19866894381889_2
ttatttatttttgctgctaaacataaaacaaatgtacagttcatgtattgcatagttgtggatcttgtcatcaaggaaatgctgtctacataaagttgtcatcttactygtttcagtagaaaacaactgaagtcagtaaatgtgtcaaacaaaacaatgaaaaaaacaactctccccacccctctccaaataacaacagcagcaatcaatttacctataatgtaataccaatattgaaaaattcatgttcacctcttatgtgaacatcccagagttcttttctggtaaggcaaggggagyacatgttaacaacttggctttttggctccctatcacaatatctttatttcatcttttgtaccttgccacctagaaaggctgagcttgtttttgttctggtttgtaccacagtagtgccccaatgcaarggtctctagatgatttgcagtgtaaataatgcagagcagctggtcacctggtgagagagaagcagaggaagcagaacccagcccatagggcacatttctctggccactagaccgtgctgcctccctgttgttggtttttatcattaatactgtatgcacttccaacaaaaat

SEQ ID NO: 84392 - DNA, 600 bp, Chicken  19866894381889_3
gaagtcagtaaatgtgtcaaacaaaacaatgaaaaaaacaactctccccacccctctccaaataacaacagcagcaatcaatttacctataatgtaataccaatattgaaaaattcatgttcacctcttatgtgaacatcccagagttcttttctggtaaggcaaggggagyacatgttaacaacttggctttttggctccctatcacaatatctttatttcatcttttgtaccttgccacctagaaaggctgagcttgtttttgttctggtttgtaccacagtagtgccccaatgcaarggtctctagatgatttgcagtgtaaataatgcagagcagctggtcacctggtgagagagaagcagaggaagcagaacccagcccatagggcacatttctctggccactagaccgtgctgcctccctgttgttggtttttatcattaatactgtatgcacttccaacaaaaatgcaataaagaagtaggcatgcattgtctgaaacatgggaccagcatataataatgtttaatttagaggcactgtatgtgcgtatctaacccaagaaagcatttggttatctatggtcagtcacgggct

SEQ ID NO: 84393 - DNA, 437 bp, Chicken  19866894381896_1
cgagaacgcctaaacgcgcatagggtgaaagagattaacaggaatagctttttttcctacgctttgcttttgtttggtatatttgactccctcgtgttttcatgagtatttcacctcatggggcaagaacatactaggtagaaatagagaaacaagctagagggccggggaagtgtaatgcttggcattgtttgttattcctttctcctaatggcttggatttctaattaatatcaccttaaaaaaaaaaaatacgcacgcagtgcttttaaaacttcaatttttcttttctctttttcrttgaaggtggagattaactgcagtaacaaagcgagatacctccggatactaatttggctgttgaattaatttcaaacccataaattgccttgctggaagcaaatcctttgtctttaccagcatggctctagctgtta

SEQ ID NO: 84394 - DNA, 600 bp, Chicken  19866894381901_1
atgtcaaaactctggaaaaagttaaatacacatgcatcatttcgctgcaaaaattgttggaatttacccacttcacagcccgttacaaaacaaactggctaactcagatcctgttgtgaaatccctcaacctccactagaatacacaagtataccgcctgctttattgcaggctggttttttaattgtcaaaacattgcagactatggatgacaagtatggcagtatcaaagtgcatcttgtgctgtaacatcgattagaaaatctcagcatataacgtgcacaccacaaaaaaaaaaawttctttgaggatttttccagacagaaaaagcattcttatgtgaggagggggaacaaactcagacactgaaatctcccatttactggtttgctttaaacaggtactttcagatcacaagatggtacccacaatattcgttgaaaaacatgaaattcaaaataaattgtaatttctaggaagtgcattcaatttttgacctaaatgcaaatgacaaatgtaagtttgcttttccactctgcaaactgcatttcacatttatattgataccatttagcagtaagtaaaacaatccagtcatat

SEQ ID NO: 84395 - DNA, 600 bp, Chicken  19866894381901_2
ggcagtatcaaagtgcatcttgtgctgtaacatcgattagaaaatctcagcatataacgtgcacaccacaaaaaaaaaaawttctttgaggatttttccagacagaaaaagcattcttatgtgaggagggggaacaaactcagacactgaaatctcccatttactggtttgctttaaacaggtactttcagatcacaagatggtacccacaatattcgttgaaaaacatgaaattcaaaataaattgtaatttctaggaagtgcattcaatttttgacctaaatgcaaatgacaaatgtwagtttgcttttccactctgcaaactgcatttcacatttatattgataccatttagcagtaagtaaaacaatccagtcatatacacccaaactttacagatctttcacatcgtaactgtaattacattttccataaatactttaaataactatagcacaagcctaatattcttacagtgcaagcatatgatgacaactcctcctagtggaggcacgtctgatacagcaaaattcagaaaaatgtagttttcctacatgtaataccaggtttctgctggtactggttagctcttcgtttttg

SEQ ID NO: 84396 - DNA, 600 bp, Chicken  19866894381901_3
gcagtatcaaagtgcatcttgtgctgtaacatcgattagaaaatctcagcatataacgtgcacaccacaaaaaaaaaaawttctttgaggatttttccagacagaaaaagcattcttatgtgaggagggggaacaaactcagacactgaaatctcccatttactggtttgctttaaacaggtactttcagatcacaagatggtacccacaatattcgttgaaaaacatgaaattcaaaataaattgtaatttctaggaagtgcattcaatttttgacctaaatgcaaatgacaaatgtawgtttgcttttccactctgcaaactgcatttcacatttatattgataccatttagcagtaagtaaaacaatccagtcatatacacccaaactttacagatctttcacatcgtaactgtaattacattttccataaatactttaaataactatagcacaagcctaatattcttacagtgcaagcatatgatgacaactcctcctagtggaggcacgtctgatacagcaaaattcagaaaaatgtagttttcctacatgtaataccaggtttctgctggtactggttagctcttcgtttttgt

SEQ ID NO: 84397 - DNA, 599 bp, Chicken  19866894381904_1
  misc_feature (1)..(26): n is any nucleotide
nnnnnnnnnnnnnnnnnnnnnnnnnnttatttagaaggaagaaaataggaactacagctttttatttcagcaattaacttttataagttgacagtaaaatagaaaatgagttacatccatataatatctgaaaaaaaatgtgttaattctttaaatgttgtatttcagagctatttttattcctgtgtatatattcatactgaaggaaagcagtggaattctagcttcaaactttaagacctcttcccggtttaattttctttatattccagaaataactggcctctgggtcactagttytgaatgaatttcctctttatttacacagccatccttaaatttggttttctatttcagtgatggaacaaatctttcttattgtttgaaagagttcaacagatgcttcaaaccagaaatctgggcttaactggcaaccaacctgacctgtggcttaggtaccagagattatattgcctcagcctctagcctttttggtcacaaactgcatactgtgcartattcttgctgttacttgtggaatattgtttatttttatttttgcaaatcaaatacaaaccaggtggtgaaaggctaaatag

SEQ ID NO: 84398 - DNA, 600 bp, Chicken  19866894381904_2
attctagcttcaaactttaagacctcttcccggtttaattttctttatattccagaaataactggcctctgggtcactagttytgaatgaatttcctctttatttacacagccatccttaaatttggttttctatttcagtgatggaacaaatctttcttattgtttgaaagagttcaacagatgcttcaaaccagaaatctgggcttaactggcaaccaacctgacctgtggcttaggtaccagagattatattgcctcagcctctagcctttttggtcacaaactgcatactgtgcartattcttgctgttacttgtggaatattgtttatttttatttttgcaaatcaaatacaaaccaggtggtgaaaggctaaatagctaagctacagtcaggaagtggttagcaacaaagcaacagtagcctgttgattctcagctggatgacccgatcgagggacctggtcccagtgtcagtatttttaaattgtgaagcctctgtctttagtaatgttaccttctgcatagcagctgacaagaatggccttagggctagagtctttggtaaaagatgacatagaagtggatataactgtgtt

SEQ ID NO: 84399 - DNA, 599 bp, Chicken  19866894381913_1
  misc_feature (1)..(49): n is any nucleotide
nnnnnnnnnnnnnnnnnnnnnnnnnnnnnnnnnnnnnnnnnnnnnnnnnctggcccgggccgctccgcctgcagcgcagtggtggcctttgccctttgctccaggtcctcgcggtgcttgctctccagcgaggcacgctcagcttgcagctgctggcacaggtgtttcagcggcaccacctctccggccaacgcctgggcgctgcccagctcctgctgcagggaggagaggagctgctccttctggaagaacttgtcctggcagaccttcacctcctgccgcagctcctcctcgcgctcrctctggcagtgccggtccctcttcagtgcctcgatggtcatccgttgcttctccatctcctcctggcaccgttgcacctccaccttcatcagcgagcagcgttcggccgcccgcgatgcggccgtggccatctcggtctgcagcacccgcagcctctcctccagcttcttgctcttctccgactcggccatgatcaggcgtttcagctccttgctctcgccctccttctcggtgagctgccggtgcaggatggacacctcatgctccaggctgcccagcaggctgttcttcctctccag

SEQ ID NO: 84400 - DNA, 600 bp, Chicken  19866894381918_1
agtggtagggcagccacgtgccaggcgtttccttgggctgtggtagtagcatctcaccccactgcctgcactgtggatgctgcacggcactgtccttgcaccttctccagatgtcagcagcgatggtgggcattttgccaaaaagcaggaagaataatgtgctagaggatgggaactccagtgtgttaaatcagaacaatggactaatgcacttgtgaagacaagagcggtctgagcgtgcatggagctctggctgcaggcggggtgagagaagcctttgtttctcatgactgccatagyttctgcaaacacagtattcattgcaggctagatggctggctccgtgtgccagggagctgctgctacatcttctctaggccaatttataaaaacggtgtgtgtatgtacttccataagaacataatggttcctctgttaggagaatgtgcgtgagtgccatggagaagaacaaaccttcatatcctgagatgtggggaggggaaactccaggctaatcagcaacagtattcttaaagagaaattgcttcaacctcatttttctttactgtatttgcaaacatgggaggccctcctgtagtc

SEQ ID NO: 84401 - DNA, 600 bp, Chicken  19866894381919_1
atgcattcatgctttcatatgtgaccagagcagttgttcttttatgaagatttcaagcactgaaatctgagttcagcttaaagtgttgttttttttttttccttgcttttcaaatggtgctcacccaaacagtatcctaacacagtttctgctagtaccgttctttcactgctgggaggctggtttgactctgacatgaatggatagtaactcaaagccttccctttccaatgactaatcaaactaatgactactgtgcgagtggctgctcttttaaatggcactgatgctagcagcaawggccacatttagaaatcctgtatgttcagatttgttttctgcctcctgaaaggataaactgcaaacaaaaagactgcagcttcagtgatgctccagaagaaggcatgtttgggtcgctgtgaaagcttgtattggcagcaagctgtgataccagcagctggagtgtgggtcccggtgtggaggaggtatgaggctctttgtgacacctggcagcagctccacacagcccagcaaagctctaagctgctctcacctctgtgatctatgagatgctgctctctcacctgacacttcaggttc

SEQ ID NO: 84402 - DNA, 600 bp, Chicken  19866894381934_1
ctcagatgtctgcaggtaatctagagccaaaggaacaaactttccttcaggcccaagtctactaaagacggccctctgtgaagtggttcaggagcttctggatgcacactggtggggagtggctgacaactcaactgccttgacagagatagcacaggtcaccaccttcacatcctatcaccatcaccagctccattaccatgtaggctggaaatacaaatacaagggggtgcactggttacttctaaaagctgagcagggaaaggtgaaagaactctacattacaaagctgaaggtgcrtgaacattactgcgctccactctgtaacttctctttgatagctgaggtctggcattttgtaggcttacagaactcttctgcctgacccagctgctgctgagaaatgactgatttctgatcatagtgccatgagagaaataaccaattgccatgcttcaaagaaaggagtccacacgggctcctgtaactgagtggctcacagggcagtcctgcttccccagagaatggatatttggggttaatttacagttggagataatgttgaaataatattaggtgtcacatataaagacaaataac

SEQ ID NO: 84403 - DNA, 600 bp, Chicken  19866894381938_1
cctcccattctctccaaaaactgaccatggcattttgtattaaaagtagttgttctgtgattgctagtcattcagtggtccagctggaatgattcacttgcctgaagcatagtgggaataagatagagcttagcgtgtgatgtaagctcaaccagtggatgttattatacaaaatggcagctatctgaaaactttctcaactgcattctcctgtcttcagagtaaaggttgggtgacgtagcttgcagtttgaacattaacatttctcagtagagctatggaaatcgtaagctttttgtsaagactgttatgtgcctctctgccttcattgttgctcaggactcacgtgagtatttcaatgttgccctgtcattctcatttaatcattctgccctgtggtaatgtttcagctttctgcccacagcttgtcctttacaacacagagtgaccagcactctctaattgagccacatgtcaaaagtaggagtacagaamgtctccccatccatccctaatctcccttgctcctctatctccacattcacaaatccctggctggtttttatatttttttctgtctgtatttcctgctctcttacc

SEQ ID NO: 84404 - DNA, 600 bp, Chicken  19866894381938_2
ctcaactgcattctcctgtcttcagagtaaaggttgggtgacgtagcttgcagtttgaacattaacatttctcagtagagctatggaaatcgtaagctttttgtsaagactgttatgtgcctctctgccttcattgttgctcaggactcacgtgagtatttcaatgttgccctgtcattctcatttaatcattctgccctgtggtaatgtttcagctttctgcccacagcttgtcctttacaacacagagtgaccagcactctctaattgagccacatgtcaaaagtaggagtacagaamgtctccccatccatccctaatctcccttgctcctctatctccacattcacaaatccctggctggtttttatatttttttctgtctgtatttcctgctctcttaccctcattcactgttaccctgagcaaattcacctctgagtacacatggaagaggacagagctgtggagtgtgtcattgacacaatggtatttacttagcctggtagatgcacgtgtatgattgaccagaggctggccacccagctataagcattttcattccacggtggtccctaggtgacacagtcacttagggtc

SEQ ID NO: 84405 - DNA, 600 bp, Chicken  19866894381942_1
gggttttaatagcatttgtgacttcaagtaaagggtacccctgccctgctttatcgttttaactgacctgaacagtcctgggacttctagtccagatgtaaaggttgtaggttgcactaaaagagattaaggaaagagatgccaagggtataagtgagttctttcttctgtgacaatctgaaattagatgaagaggatggctgcttgttggatgtcttcagataaatggcttagggctgttcttgcagcaggctgagaaaagaaataagaaggaagtccctgggaaagtcacaaatttaygrgaagatgacttggttcacaagaggccttctagacagttagagaggaaactgaggtgaactccacatctattggtgataggagaatctgccagygttcaacaagaacaaggttgcccctttcgttttgctattagragagcaagacagtaggcagcatgtgggcatgcctgtcttctatcatagctaagcccatgccatgaaaatagagaatcttgggcctttgttgtggtgggaaagattttttttctggcgtaaaactgatactttctgtgttggtagcgatttaggccaggtaatg

SEQ ID NO: 84406 - DNA, 600 bp, Chicken  19866894381942_2
gttttaatagcatttgtgacttcaagtaaagggtacccctgccctgctttatcgttttaactgacctgaacagtcctgggacttctagtccagatgtaaaggttgtaggttgcactaaaagagattaaggaaagagatgccaagggtataagtgagttctttcttctgtgacaatctgaaattagatgaagaggatggctgcttgttggatgtcttcagataaatggcttagggctgttcttgcagcaggctgagaaaagaaataagaaggaagtccctgggaaagtcacaaatttaygrgaagatgacttggttcacaagaggccttctagacagttagagaggaaactgaggtgaactccacatctattggtgataggagaatctgccagygttcaacaagaacaaggttgcccctttcgttttgctattagragagcaagacagtaggcagcatgtgggcatgcctgtcttctatcatagctaagcccatgccatgaaaatagagaatcttgggcctttgttgtggtgggaaagattttttttctggcgtaaaactgatactttctgtgttggtagcgatttaggccaggtaatgcc

SEQ ID NO: 84407 - DNA, 600 bp, Chicken  19866894381942_3
atgtaaaggttgtaggttgcactaaaagagattaaggaaagagatgccaagggtataagtgagttctttcttctgtgacaatctgaaattagatgaagaggatggctgcttgttggatgtcttcagataaatggcttagggctgttcttgcagcaggctgagaaaagaaataagaaggaagtccctgggaaagtcacaaatttaygrgaagatgacttggttcacaagaggccttctagacagttagagaggaaactgaggtgaactccacatctattggtgataggagaatctgccagygttcaacaagaacaaggttgcccctttcgttttgctattagragagcaagacagtaggcagcatgtgggcatgcctgtcttctatcatagctaagcccatgccatgaaaatagagaatcttgggcctttgttgtggtgggaaagattttttttctggcgtaaaactgatactttctgtgttggtagcgatttaggccaggtaatgcccagctcagtccttgccagctagctgtgtgtctgttgctgcagatgggtacatagggtacgcgtctcttgccatttaaaaatatgttatccaga

SEQ ID NO: 84408 - DNA, 600 bp, Chicken  19866894381942_4
gatgccaagggtataagtgagttctttcttctgtgacaatctgaaattagatgaagaggatggctgcttgttggatgtcttcagataaatggcttagggctgttcttgcagcaggctgagaaaagaaataagaaggaagtccctgggaaagtcacaaatttaygrgaagatgacttggttcacaagaggccttctagacagttagagaggaaactgaggtgaactccacatctattggtgataggagaatctgccagygttcaacaagaacaaggttgcccctttcgttttgctattagragagcaagacagtaggcagcatgtgggcatgcctgtcttctatcatagctaagcccatgccatgaaaatagagaatcttgggcctttgttgtggtgggaaagattttttttctggcgtaaaactgatactttctgtgttggtagcgatttaggccaggtaatgcccagctcagtccttgccagctagctgtgtgtctgttgctgcagatgggtacatagggtacgcgtctcttgccatttaaaaatatgttatccagagaagccaaaatataactaacaagaaaaaaatgctctgcacaa

SEQ ID NO: 84409 - DNA, 600 bp, Chicken  19866894381944_1
gaatttttgctcatcatcaaagccatgggtcattgaaagaccaccgttgctcaggtgtcctcaagtatgggcttgacttgctgggtccgtggtaggaaggctaaagcaaggggaaccaaagggactttctcagaagtggtttcagaacctctggttttcccagggcaacaaaatttcccttttagaattcaaaacttgtcaccctcagctccttgacgtgtgttacaggttgcatgtcaacgatagcagctttgtaaagatgtcttaaaatgttcctcctttcccaatatgggtattgcrtgcagggcagccgtgtgygtagtgccagaaattgtccatgtgcgtgtatcatttctaaaacaaaaacatacacatcacatttaggatctgattgctcacattggtgaacccttgcttgtgtaatgagacacataaataaacacacatagcacagaataaaaaccgagatgtgctattcgtgtatgcgtttatatgtacgtattcatagcccactttgcagagatcgtaatggaagaccattatagcagccatcattcagaatatagtgatgtctgyacagcgagtgtttaaaaaaaaaaa

SEQ ID NO: 84410 - DNA, 600 bp, Chicken  19866894381944_2
aaagccatgggtcattgaaagaccaccgttgctcaggtgtcctcaagtatgggcttgacttgctgggtccgtggtaggaaggctaaagcaaggggaaccaaagggactttctcagaagtggtttcagaacctctggttttcccagggcaacaaaatttcccttttagaattcaaaacttgtcaccctcagctccttgacgtgtgttacaggttgcatgtcaacgatagcagctttgtaaagatgtcttaaaatgttcctcctttcccaatatgggtattgcrtgcagggcagccgtgtgygtagtgccagaaattgtccatgtgcgtgtatcatttctaaaacaaaaacatacacatcacatttaggatctgattgctcacattggtgaacccttgcttgtgtaatgagacacataaataaacacacatagcacagaataaaaaccgagatgtgctattcgtgtatgcgtttatatgtacgtattcatagcccactttgcagagatcgtaatggaagaccattatagcagccatcattcagaatatagtgatgtctgyacagcgagtgtttaaaaaaaaaaaaaaatcctgcaaaaatct

SEQ ID NO: 84411 - DNA, 431 bp, Chicken  19866894381944_3
tcctttcccaatatgggtattgcrtgcagggcagccgtgtgygtagtgccagaaattgtccatgtgcgtgtatcatttctaaaacaaaaacatacacatcacatttaggatctgattgctcacattggtgaacccttgcttgtgtaatgagacacataaataaacacacatagcacagaataaaaaccgagatgtgctattcgtgtatgcgtttatatgtacgtattcatagcccactttgcagagatcgtaatggaagaccattatagcagccatcattcagaatatagtgatgtctgyacagcgagtgtttaaaaaaaaaaaaaaatcctgcaaaaatctgtctcaaaggcattttcactgctgatacactccctctcctaacgcctatgggcctcagtgtaaggtcaccaaactccatccagaagaat

SEQ ID NO: 84412 - DNA, 600 bp, Chicken  19866894381950_1
gtgctaccataatggttgagacaagaagccaagctagtgaaaataggggtgatctcttttattcagatcatggtgagctgaacccaaactgccttctggctgtttttgctttaaaccagcccaagaaagaaatgcctctcggtgagcaggaggaacgtgccgtgaggtttgaaatgcagggacaggggttggtaggattaacacgccctggctggcccaggcaggctttccatttcattagctgtgattcattgactgtctgcagaagatgctgcctgccagagtgtggacacggccccsgggagcgctggcacgcctgggagtgaggaggaagcagaagacgacgttgtgacctcgagctattttggtggcaatgcaaaccaaagaaggaagaggaaaaggctgccaaactccggagaatccaagaggaaaaagacaagcagtggtggcagccagcagttttattccaaagggtatgttggctgtggtcagctggagctttttgtccagggtaacatggtgatgatcccagaactgcactgttagtgtagtacgttttcttcgtaattgtttgggtttatgtgcaggttagttcatcca

SEQ ID NO: 84413 - DNA, 600 bp, Chicken  19866894381959_1
ttgggtggcagttgtgcttggcgggtcctgtggatgaacgagaacgcgtggaagaaaccatataatagtacgttccttggtatgggaatccaccacatcctccctcccaccctgctgacaagccagtgacacggggtgacatcttttccttagtggttttatggagtctgtgagataaatcgctgcccagtgaggaaaacgagctcagcacagcttgtcacagcgcggggtcttgtgaaatcataacgtggtgacctccgggtaggaacagaggcaaatccacactgccacggcaccacrtcctgtccccttgggaaatggactcagtaaatcccatcgtttgcatctctgacagttctgagcctgtgctatcttcaaagggcagttattacccctcacagcatgttcctttggtgctcgtttctctgtggtctgctacgcccatgtatctaaataatgaaaaaatcagaagctgcgatgccaccatccccaccatcatcataattggtcagacccactgytagctgtgcrttgctcacgctgtctttcttccataaccatggcaataagatattcctgggcgcagagagcaggcagtgc

SEQ ID NO: 84414 - DNA, 600 bp, Chicken  19866894381959_2
agcgcggggtcttgtgaaatcataacgtggtgacctccgggtaggaacagaggcaaatccacactgccacggcaccacrtcctgtccccttgggaaatggactcagtaaatcccatcgtttgcatctctgacagttctgagcctgtgctatcttcaaagggcagttattacccctcacagcatgttcctttggtgctcgtttctctgtggtctgctacgcccatgtatctaaataatgaaaaaatcagaagctgcgatgccaccatccccaccatcatcataattggtcagacccactgytagctgtgcrttgctcacgctgtctttcttccataaccatggcaataagatattcctgggcgcagagagcaggcagtgccggttgggcacggcactgtgattgtggtggcccaggagagccctctcccaggctctgtgctgctgcaaactcccactgtgcccaccctgggggctgacacgtctctgtgcagtcccaggcagggatgtgtgaggcggtgcagcctgcaggctccaggcagagggatccccttgggaacaaaggagaacttgcaggttcagcccaaccctgctcttggagca

SEQ ID NO: 84415 - DNA, 600 bp, Chicken  19866894381959_3
cttgtgaaatcataacgtggtgacctccgggtaggaacagaggcaaatccacactgccacggcaccacrtcctgtccccttgggaaatggactcagtaaatcccatcgtttgcatctctgacagttctgagcctgtgctatcttcaaagggcagttattacccctcacagcatgttcctttggtgctcgtttctctgtggtctgctacgcccatgtatctaaataatgaaaaaatcagaagctgcgatgccaccatccccaccatcatcataattggtcagacccactgytagctgtgcrttgctcacgctgtctttcttccataaccatggcaataagatattcctgggcgcagagagcaggcagtgccggttgggcacggcactgtgattgtggtggcccaggagagccctctcccaggctctgtgctgctgcaaactcccactgtgcccaccctgggggctgacacgtctctgtgcagtcccaggcagggatgtgtgaggcggtgcagcctgcaggctccaggcagagggatccccttgggaacaaaggagaacttgcaggttcagcccaaccctgctcttggagcacagttctccc

SEQ ID NO: 84416 - DNA, 600 bp, Chicken  19866894381960_1
actacaacctttgcaagaccggagatatttacccttgagtgaaagggacaaggaaaaacacttccttacatttagtgcatgtgaaaacatgtaaactgacagtgacgtgatgcagtaattgccttgcaaagtcacaccctcattatttcatggtagctcatttgtgtcatcaaagccaaagctacaaattgaagtttacacctcctgaaattaatgcctcctatgttatgatgttggcccacgatgccagaggcagatgttggcagtatggcagcagaggtcgagccttcccagcaataytccattccatgctgttgctgtgtgacagatggcagcagaggggcagtctgacagaatggtgtctgacgtggaattgtgtatggagcaaaggggtgtcgctgaatccctttacacagaaaaaaaaagaaatgcacccactgacattcactgacacctctgaatgttcatggagactgaacagtggatgttggcacagtgaggcagagtggcgtgttacagctgatggtagcaatttttggaatatcagaaaattcacaccagattaacacatatgcatgaacttcaggaagaacactgtat

SEQ ID NO: 84417 - DNA, 600 bp, Chicken  19866894381963_1
agagacagaagacaccctgacccatgctaccactgtcctacacagccaatctgtgttcataaagttcctcattcaggcacaaccatgcccacctgcaccacccaacaagatcaggctgtggctagctgtggagctcgctatatgtgtgtggtcaggcttgcaaatacaatactgcagtaagactataaaagacatcttgaactcagtttttccagggctgatgtaactgggtgggggcactaccaggcttgtgataagctgaatataatgatggttgaaatgaaacatttgcatataaamtttaactcctagagtttactagcagcagggagataatggtgtaacaagctgatgaagagtcattatgagatcatattcatattaatctgaagcatgtaggcattgtttcttggaggaagtactcactgtgtgtagtacagtaaaaactgtgttttaaaacaaagagatgaaatagttgctttgacacagcaacagcactgtcattgtaaatctgccgtgccacgtattttattgcattttcatagcagaagagggaatttacgatccgatgctacaagtccagccagccttgttctgtca

SEQ ID NO: 84418 - DNA, 600 bp, Chicken  19866894381967_1
aaattgagagaacaaatcatgtgtttgctttttttcctcccaaataaatgaacttcctggtgtacaaagtagaaaagccatgcgggttctcagtgttcgttgctgacagaattccttccatgaaacaatctggttcttacaggaagcctcttgtcttctaaaaatcacaaccagtttcttagagataacacaatataaactgaacaaagcactgctagctattacattagtgcaaagaaaaacctaatttctgaccttagaaattctgctgtctcctgaagcctggcaaggaggtggggrgagaacactaaaagaaaattacactggcagtagccaacctacaattgtgttattattagtagtaattattattattaacatcactgtagttgcatgaggtcttgagcttagaagagcagaatggaaaaactcctcagttctgtcatggcttaattgattattctttygaccttgagcaagctgttgtaattctgtgcgtaatttttcccacctttagatgatgtgcatgctttttttcaacaggatattatcagacttgactaccacttgtaaagctcttcaggcttcttggatgaaagg

SEQ ID NO: 84419 - DNA, 600 bp, Chicken  19866894381967_2
caaccagtttcttagagataacacaatataaactgaacaaagcactgctagctattacattagtgcaaagaaaaacctaatttctgaccttagaaattctgctgtctcctgaagcctggcaaggaggtggggrgagaacactaaaagaaaattacactggcagtagccaacctacaattgtgttattattagtagtaattattattattaacatcactgtagttgcatgaggtcttgagcttagaagagcagaatggaaaaactcctcagttctgtcatggcttaattgattattctttygaccttgagcaagctgttgtaattctgtgcgtaatttttcccacctttagatgatgtgcatgctttttttcaacaggatattatcagacttgactaccacttgtaaagctcttcaggcttcttggatgaaaggtattgctgtgagacagtgacaaacttgttagaaatctacttgataagcaaaagagcaagtcattcacaataagtataattattcaaagatttaagcttcttaatctacttccacagtcttggcaagcagatcatgatttcttccattttatataatgagaagagtat

SEQ ID NO: 84420 - DNA, 600 bp, Chicken  19866894381967_3
gcaagctgttgtaattctgtgcgtaatttttcccacctttagatgatgtgcatgctttttttcaacaggatattatcagacttgactaccacttgtaaagctcttcaggcttcttggatgaaaggtattgctgtgagacagtgacaaacttgttagaaatctacttgataagcaaaagagcaagtcattcacaataagtataattattcaaagatttaagcttcttaatctacttccacagtcttggcaagcagatcatgatttcttccattttatataatgagaagagtattttttttycctttttactctatagattgattgcaaatattcagaattcaagctgtgttgctcatttgcaatcagttgaatgagtaacgttatttctactcatgattggatgaatgcccaaggacttgtgtgtgcaaatcataaagtttgttttctcaagatactcatctgtatgacattgaaatttgttgcctctgaagagcaacgccagtaaaattcaattcatcaaagaccactgaaatttctgagcacagaagcaagacaaaggggtgctgacattttttaacgggtcttcatggattaaacttt

SEQ ID NO: 84421 - DNA, 600 bp, Chicken  19866894381979_1
gtgacaagcactgacttttgcttttggactcatcttcctcccagatccagaaacatcccagcagtgttttccagccctttttaaactctcttctttctcatgcaaatacaaactagcttctctgcatcagtggacacagtccaagagaccaacatagctctacctcgcgctaatttccaacgcaagtgtcctggcacttcttttacatttcagccagaaataaagaacatctctttggatgagatagatgctgcttgcagcctcggtttctctgatacacaggtaagaactaagtggacragataaatgaagaatgacctatgtcctcccacaacataactaacttgactgctgctggagatgtggtcctgcaccaaatcacactgctatctaccttacagttaagagctggcatcattaggatccgttaattccattctgtactatttgaggtctcttccaaattaatgggaagcactggacaccaaagggaatttagatcaatatacagcagtacagtactaagtacagcagcaagaattttaggaaaaacttgcccaacgttataatcttgatgcctgtaaacatgctttcatcaga

SEQ ID NO: 84422 - DNA, 600 bp, Chicken  19866894381979_2
tacagttaagagctggcatcattaggatccgttaattccattctgtactatttgaggtctcttccaaattaatgggaagcactggacaccaaagggaatttagatcaatatacagcagtacagtactaagtacagcagcaagaattttaggaaaaacttgcccaacgttataatcttgatgcctgtaaacatgctttcatcagaatttgggataaagtctgaagttaaagtttctattttggaagttttccttgtttaaattttcctgcctctatattgcactgtggagcacttctcacwaagagccaacaatatatgagaggtcctggcacacagacatcaagtggggcttcagcttcagtgataataaaaggatttaaagtgaagactcaaaactcctggaaaaaaaatattaagaaaatagtcagaattctgaataatattagataatgaactttccagcacataacagcctcttcacactaatcacgtcctttatccagacagatcagagactgaaaaccagggcctttcctctgccaagagcctttcataatctcgagaccctcccccttcatctgtgcatacttaataatatta

SEQ ID NO: 84423 - DNA, 600 bp, Chicken  19866894381984_1
tccagcttctcacgagcagcatctttggatttctgagccagttatctgctccacccctatgctgctatcactgaactgtatgatcatttgtatgacctgttttttttcccccccactaggaaacaataaacacaggcccttttgtaatgcgatctacgtgccgaagatgtggaggtcgtgcttccatcataacaacaccatgtgtggtatgtcgaggaacagggcaaaccaaacagaagaagacagtgatagttcctgtgccagctggttagtgttgtatttgtgtgctgctatctgttrtggtgaccatagttatttctactaggctagcagcaaggcacttgcctgtaaagtgtggatttctctgccagctatgggtgtcaaagcaatgtaaagatgttttgctttggagaagttatcttaagaacaaagcaggctgatagcttggccattgaaagtgtgtatgaggagaaactttctgaccatgtgtttgtacgtggtagataaaaacgttttcccctttttgagctgaagttctggttctcctatggatcctactagacaagttttgaagagtgaaacttccagaagattttgtca

SEQ ID NO: 84424 - DNA, 600 bp, Chicken  19866894381990_1
tgacttcacagttgcacaaagagtatgcttgttatcatgtgcacaagttttgttacgtaagctggccttcagtttttgcagtctgtgctgtaagatgctttatgttctaccacattccagtggtgctgggctggaagtttgtagccaggtaggtttttccccctattttatatatatattttttccccaggtgaagttttctttaaaaaaaattgggtctactgcttgcattcctgcacttttgggagctgcttaattcattagtgatgattactgattggttggacaaagcaagaagcraygtctctggagctctgttacagtgaagtattttaggggagaattcagcagaagtgacacggggttacttatagctcgcagccctttgtcacctttgtgcaatcctacgcctttcaaaagatgtcctacttttgggaagcgtgatgtggagcagcccagcttttatgctgtctkttctcaggcgcttgcctgtttttgtgctatggaaatgctttgttttaagggttgccgagtagggttgggaaaggattttaatgtcatttcacctctctaacgtgtagtttgttgcattgcatgtgg

SEQ ID NO: 84425 - DNA, 600 bp, Chicken  19866894381990_2
acttcacagttgcacaaagagtatgcttgttatcatgtgcacaagttttgttacgtaagctggccttcagtttttgcagtctgtgctgtaagatgctttatgttctaccacattccagtggtgctgggctggaagtttgtagccaggtaggtttttccccctattttatatatatattttttccccaggtgaagttttctttaaaaaaaattgggtctactgcttgcattcctgcacttttgggagctgcttaattcattagtgatgattactgattggttggacaaagcaagaagcraygtctctggagctctgttacagtgaagtattttaggggagaattcagcagaagtgacacggggttacttatagctcgcagccctttgtcacctttgtgcaatcctacgcctttcaaaagatgtcctacttttgggaagcgtgatgtggagcagcccagcttttatgctgtctkttctcaggcgcttgcctgtttttgtgctatggaaatgctttgttttaagggttgccgagtagggttgggaaaggattttaatgtcatttcacctctctaacgtgtagtttgttgcattgcatgtggcc

SEQ ID NO: 84426 - DNA, 600 bp, Chicken  19866894381990_3
tatattttttccccaggtgaagttttctttaaaaaaaattgggtctactgcttgcattcctgcacttttgggagctgcttaattcattagtgatgattactgattggttggacaaagcaagaagcraygtctctggagctctgttacagtgaagtattttaggggagaattcagcagaagtgacacggggttacttatagctcgcagccctttgtcacctttgtgcaatcctacgcctttcaaaagatgtcctacttttgggaagcgtgatgtggagcagcccagcttttatgctgtctkttctcaggcgcttgcctgtttttgtgctatggaaatgctttgttttaagggttgccgagtagggttgggaaaggattttaatgtcatttcacctctctaacgtgtagtttgttgcattgcatgtggccttgagggcatggcagtgtcacctattgccactggcgctgtccttggtagccaaagtcaggctctgtaggtgcagctctgaagggtgcagcacagcacggccttccaggggcatacgggttccaggggagcccagcttgctggcaaggagcaggtttgtgctttccacccaca

SEQ ID NO: 84427 - DNA, 600 bp, Chicken  19866894381990_4
gacacgacgcctttgcacacaagatgccaccatctgaacggagggagcaaagtcatcagtgccctccattttagcagagccactattaatatctgtgatttaatagcagcgttttggtcttgtttctgcagcccttgcctcctggagctccccatggcctgtgctttttaattagtttctcctcacattgctccatggggaagctgagctccctgacccctcctggtttccccattcctctgtgcctctgcgtccacacgctccttacagaagactccattttccctttaccaagatgcrctcacacccatttcagcagcatgagattgccctttccctccccatttaaatataattgatcaccactctttctttttttaacacactctctgtatctagggcacaagatggtaggtacctggtgcataatttttctgcggcttcttgtagcaagggtatggtttgtgagaggtgaaacaaagcagcttggggtgtttgtgtttattccagaggcaatgtataggaaatgtgggtacgaaatgaaaccctgtctgattttccctgccaacaaattaacagctttttttttttggagcatct

SEQ ID NO: 84428 - DNA, 600 bp, Chicken  19866894382002_1
gccccttagcttcccagcccttaaatgggatcagggaggggaggagcccatctcagccccaccccacagccaaattgccatcagctgtgctcgcagggctgcacctccccaggtgaatggaagatgctgagtcatggcctgaaccactgattgatcagctgaggcagaaatgaaatcacaggtggaaacaatccagagtgagaatggaaggtggagactggctgcagctccccaagatagcatttaaaagctgaatacccccaggaaaggttaaatgggggattcccgaagagaaaacaygtgatttttgcttacatgggggattttaaaaaagaaaacgygtgaattttgcataatgggggattgtcaaagagaaaatgcatgattttcgcttaaaagagggattctcgaagagtaaacgcgtratatttgggttcaatgagggatttctgaagagaaaacacaagattttcacttaaatgggggattattaaagagaaaacgtaagattttgggataaacgggggatttccaaagagaaaaygcgtgattgctgggttatgtgggaatttccaaagagaaaatgcatgatttttgctt

SEQ ID NO: 84429 - DNA, 600 bp, Chicken  19866894382002_2
aggagcccatctcagccccaccccacagccaaattgccatcagctgtgctcgcagggctgcacctccccaggtgaatggaagatgctgagtcatggcctgaaccactgattgatcagctgaggcagaaatgaaatcacaggtggaaacaatccagagtgagaatggaaggtggagactggctgcagctccccaagatagcatttaaaagctgaatacccccaggaaaggttaaatgggggattcccgaagagaaaacaygtgatttttgcttacatgggggattttaaaaaagaaaacgygtgaattttgcataatgggggattgtcaaagagaaaatgcatgattttcgcttaaaagagggattctcgaagagtaaacgcgtratatttgggttcaatgagggatttctgaagagaaaacacaagattttcacttaaatgggggattattaaagagaaaacgtaagattttgggataaacgggggatttccaaagagaaaaygcgtgattgctgggttatgtgggaatttccaaagagaaaatgcatgatttttgcttaaatggggaattcttgaagagaaagcatgtgatttttgctt

SEQ ID NO: 84430 - DNA, 600 bp, Chicken  19866894382002_3
gctgagtcatggcctgaaccactgattgatcagctgaggcagaaatgaaatcacaggtggaaacaatccagagtgagaatggaaggtggagactggctgcagctccccaagatagcatttaaaagctgaatacccccaggaaaggttaaatgggggattcccgaagagaaaacaygtgatttttgcttacatgggggattttaaaaaagaaaacgygtgaattttgcataatgggggattgtcaaagagaaaatgcatgattttcgcttaaaagagggattctcgaagagtaaacgcgtratatttgggttcaatgagggatttctgaagagaaaacacaagattttcacttaaatgggggattattaaagagaaaacgtaagattttgggataaacgggggatttccaaagagaaaaygcgtgattgctgggttatgtgggaatttccaaagagaaaatgcatgatttttgcttaaatggggaattcttgaagagaaagcatgtgatttttgcttaaatcggggatgttagaagaaaaaacgtatgatttttgcttaagtgggggattcttgaacagaaagcacgtgattttcgcttat

SEQ ID NO: 84431 - DNA, 590 bp, Chicken  19866894382002_4
taaaagctgaatacccccaggaaaggttaaatgggggattcccgaagagaaaacaygtgatttttgcttacatgggggattttaaaaaagaaaacgygtgaattttgcataatgggggattgtcaaagagaaaatgcatgattttcgcttaaaagagggattctcgaagagtaaacgcgtratatttgggttcaatgagggatttctgaagagaaaacacaagattttcacttaaatgggggattattaaagagaaaacgtaagattttgggataaacgggggatttccaaagagaaaaygcgtgattgctgggttatgtgggaatttccaaagagaaaatgcatgatttttgcttaaatggggaattcttgaagagaaagcatgtgatttttgcttaaatcggggatgttagaagaaaaaacgtatgatttttgcttaagtgggggattcttgaacagaaagcacgtgattttcgcttatgtgggggattctcgaagagaaaacacgtgttttttgggtaaaatgggggattattgaagacaaaacacatgattttcgcgttaaatgggggattctcgaagagaaaaca

SEQ ID NO: 84432 - DNA, 533 bp, Chicken  19866894382009_1
gggagaggctcaatgtaggtcacagggagtttttagcaaggcagcctcaaaaaaaaaaaaaaaaagtaataatccaaaaaatagctggtgatgcaggagagagggaggtgtggcagcagtgtgctccgtgctgctctgtgcgtggtagcccagggggggtgcagtgtgcctgtccctgcagcacgtcctccggccctggctgcgtgcctcagggtcctgaggtaatgccgtcactgtgacttatccctgtgacaataacagcaggcatcttgctggctttcagaaccctaacaccagggstaactgcccgtttgcagatccagatccctcctgatgaagggcagcccccaaggctgcagcctccccttgtgtcccctcagctgtggttgcrtctaggccaagctgccatcagagccccaggggtcttaagcttctatgactggtaccgcctcttctacctccattgctgctgagtggcagtggggatatccatggcttttcagaaacaggaatggaggcagaagggcacacag

SEQ ID NO: 84433 - DNA, 442 bp, Chicken  19866894382009_2
tgcaggagagagggaggtgtggcagcagtgtgctccgtgctgctctgtgcgtggtagcccagggggggtgcagtgtgcctgtccctgcagcacgtcctccggccctggctgcgtgcctcagggtcctgaggtaatgccgtcactgtgacttatccctgtgacaataacagcaggcatcttgctggctttcagaaccctaacaccagggstaactgcccgtttgcagatccagatccctcctgatgaagggcagcccccaaggctgcagcctccccttgtgtcccctcagctgtggttgcrtctaggccaagctgccatcagagccccaggggtcttaagcttctatgactggtaccgcctcttctacctccattgctgctgagtggcagtggggatatccatggcttttcagaaacaggaatggaggcagaagggcacacag

SEQ ID NO: 84434 - DNA, 600 bp, Chicken  19866894382013_1
gtcatattcaggaatcagaatatctccctaataattctgaaacttcaaattgaataccagcaaatttgagcagacttatttaacacgtaatttaacaacgggcatacaattgaaaaatggctatttataagttttatataagaaaagagtgataaagaacaagccagccagtgtggttacaattgatgtgtactagaactctgccaaataaagaaaataattgtaaatgtaactgtgagtgcactgaaaactgatcacgctaaatgaaactaatatctgtcaaaagtttttgggaaaatrtgggaaatagaatatatattttttatttagattccaaactttaattaaatgttacacgggaaatttgctaaggtagagtatgaaatacgatggaagcattttgaaaaagctaaagaaactaaaaaagattttctgatcatcaaagaatctagcagcagaatttcccaagaaataacatggattaaataaaaatgttcactgatactgatatcatgattataatcataccattatcattaatattgccagtgactgtgattctattattgaataatttacagatagaaaagtaggtcaaaa

SEQ ID NO: 84435 - DNA, 599 bp, Chicken  19866894382015_1
  misc_feature (1)..(7): n is any nucleotide
nnnnnnnacaaaatgataataaggcagatctggaattaaacccattgaaacagtgggttgccttctactctactctttggcctgcaaatcaagcccttgggaagacatcatggaattccagcatgggaaatccccaaaggatttcagcctgaggagagagttctccttcttgcagtgctgcctcaattcacatcatatctttgacacagctttacatgctgtacctccacagtccctagggaggtgacttaaattgacaaccatctctcactgcaagaagggtgaatagaataccctgarttggaagggacccatgagggtcgtagagtctcacccctgggattatggacatgcagataacctcacagagtctgcacagtgtcagagtttgctttcagcacagggagttttgcacaacagcttgacagrctgctgccattccttgctgtgatggatggaacaccagggctgatttatgagcacccatgtcacacagacacttgcccttgtccctgagctatgaaaggctgtaagaataaaggagataaatggcaaagtactgcagctgtagaaataattgacttcaagaaatgtaaaaa

SEQ ID NO: 84436 - DNA, 600 bp, Chicken  19866894382015_2
atccccaaaggatttcagcctgaggagagagttctccttcttgcagtgctgcctcaattcacatcatatctttgacacagctttacatgctgtacctccacagtccctagggaggtgacttaaattgacaaccatctctcactgcaagaagggtgaatagaataccctgarttggaagggacccatgagggtcgtagagtctcacccctgggattatggacatgcagataacctcacagagtctgcacagtgtcagagtttgctttcagcacagggagttttgcacaacagcttgacagrctgctgccattccttgctgtgatggatggaacaccagggctgatttatgagcacccatgtcacacagacacttgcccttgtccctgagctatgaaaggctgtaagaataaaggagataaatggcaaagtactgcagctgtagaaataattgacttcaagaaatgtaaaaacaaaccattttttcccctatccctttcaaatttgcttcgttagcactggataagtgcaagaagacgttggcttttcatgatgtcattcacagaaatggcagaccaartggagcaggctgaaggaaatctg

SEQ ID NO: 84437 - DNA, 600 bp, Chicken  19866894382015_3
gttttgcacaacagcttgacagrctgctgccattccttgctgtgatggatggaacaccagggctgatttatgagcacccatgtcacacagacacttgcccttgtccctgagctatgaaaggctgtaagaataaaggagataaatggcaaagtactgcagctgtagaaataattgacttcaagaaatgtaaaaacaaaccattttttcccctatccctttcaaatttgcttcgttagcactggataagtgcaagaagacgttggcttttcatgatgtcattcacagaaatggcagaccaartggagcaggctgaaggaaatctgcttccagttaaggaatgcagatgattttggctcaggtcttgactttgagcttaggtgacattttatttaccagtacaaatttagccaacagtacaaagttatgatggccatccttcaaattgtctctcttccaccattcatgtgtcattttttttttcttttcttaaggccatcatgatgtatgttttaagcaaggaaggatctctgtgccacccttataaagacgtaacccaggcaaattggtacattctcagccttgctctaaactagtcaactt

SEQ ID NO: 84438 - DNA, 600 bp, Chicken  19866894382015_4
acagtgatgacatttggctgaccgtagattctgttatcaggcttgcagctggtggcagtgggaatgcagggagctggtggggctggccatgcacagctcaaccccaagccctcttttatgagtcaaagcctggtagcagcacaggtagttttggtgcccaggtgtgcaccccatagagtagtgcccatacatgttttcctgacaggaacagagggaaataaatgggactgaatggaggaccactggtgagaaggaggcattttaggatgggaagtccaccttagagttctcttccttctyctctgtctgaaactcagtggaaaacttgttcacatccttaaggaagcatcctcaggacagagttttggattcttgactctgggttatggatggatggagatgtctcctcagcagtcctttcttgggcttcaggaaagctgcagagatgtgtgtgtacccccctaaatcatagaatcacagaaggcttggtttggaagggacctcaaagcccatgcaaataccagcttggtgctccttgatccaagacatcctgaagcatgtcccagtttaggggtgggcttacaataagatgtcatatca

SEQ ID NO: 84439 - DNA, 600 bp, Chicken  19866894382019_1
tgccacttggtttaattaatttgaagagagcttttggaggctagtggtgtaccagaataggaacaccttctatgttcatgacaaattctgattatcaaagctagtttgtggaaaaccgttatgaagcacttgggtactgagctgtcactgaattcaaaagatacacgagagcttaagaggtggaacaagacaatgatacaagcctcattaaaaaagacatcaaccatatacaagattttcttcctttctatcagaaaataactacagtacagtcaggacgaaggaattctgttttaagtrccattctgaagtaccctaaattaaagtataattttctctttcaaataaaatctatgctgttaattcatttctgttgatcccgttgttgcactttattctcattaattataaatctgtcaacctcttcttgtgatagaacccttaacaccagcagtttgagacaagtgcaattaaactgttcatttttatcatttaatttagaaaacaaatgagcaagaaatgatgagctgcatcacctaccactctgctgtaaatgtatgaamactgcaaaactgaaccagggcaattagttagtactga

SEQ ID NO: 84440 - DNA, 600 bp, Chicken  19866894382019_2
acagtacagtcaggacgaaggaattctgttttaagtrccattctgaagtaccctaaattaaagtataattttctctttcaaataaaatctatgctgttaattcatttctgttgatcccgttgttgcactttattctcattaattataaatctgtcaacctcttcttgtgatagaacccttaacaccagcagtttgagacaagtgcaattaaactgttcatttttatcatttaatttagaaaacaaatgagcaagaaatgatgagctgcatcacctaccactctgctgtaaatgtatgaamactgcaaaactgaaccagggcaattagttagtactgacttagcaagccactgtgacagtggagaatctgtagttcactgctgatttccaggaccatttccaccaagttctggccacagtaatctcattctttcaaaacaaccttattatctgacagtcacttccagtccttgtagtttgctatgtacagctattgtagttggatgattaataggaatacttctgatagtcgtactcttctgtacatcagcccaggtttttataaatccagatcttttggaaaagtctacttgctaaatag

SEQ ID NO: 84441 - DNA, 600 bp, Chicken  19866894382028_1
aggcaagaagctcccaactgtactgacaacagaagcttctccttgctcactcaactcctgggaaagcagggctgtgattctcagaacgtgatttctgtgcttagcacctggaggccttatcattcctggcaagccgttagctctgctctcctcccaccgcatgctggtgaaggcatctatctgaaccagagccgacctccctgctgcagctcttgagaaactgcagctcagtcctgtcctgcacagcagtgtgttctcctgcttttccccagcctcacccaaattcacaacgtacattaygtacattcttagggcagaccatcagttttctagttagccaggagtggataaatgaattttctgaaacatatatatgaaacatacaggtatgacataaaaatagaaattccgtttactctttaattgaactttatacatggtcttgcttcacttgaaatgcctgggagctaggttatttttaggctggaaacaagcttttaaaaacctggccatattgcagaaaagcaattcccttccagctaggttgctctctaggctatatgaaggcaagaacctcaatgaaaacaaaaattaactatt

SEQ ID NO: 84442 - DNA, 600 bp, Chicken  19866894382028_2
catatatatgaaacatacaggtatgacataaaaatagaaattccgtttactctttaattgaactttatacatggtcttgcttcacttgaaatgcctgggagctaggttatttttaggctggaaacaagcttttaaaaacctggccatattgcagaaaagcaattcccttccagctaggttgctctctaggctatatgaaggcaagaacctcaatgaaaacaaaaattaactatttattatctttgaatttcatctaagttcaagggaatttccctacctcaaggctaaacacaacagtgmaacacaaacaaaaatattaaaactaagtttacaacaagcctgggaatcaaccactgctttcaccctgaactgtgagcaagagtttatgtgctatagagcatctaccatgtgcattggccagccagcagacccgggacccaacatccatcatcagttcagaggacaaatcatacagtttgttctctcytaggcacacctactccttaatcttcaagttgaattccttcctcatcttttacatatcaagcagatagaccaaaacaaaagccaaatggtagctgcatgaactttctcattccc

SEQ ID NO: 84443 - DNA, 600 bp, Chicken  19866894382028_3
aggctatatgaaggcaagaacctcaatgaaaacaaaaattaactatttattatctttgaatttcatctaagttcaagggaatttccctacctcaaggctaaacacaacagtgmaacacaaacaaaaatattaaaactaagtttacaacaagcctgggaatcaaccactgctttcaccctgaactgtgagcaagagtttatgtgctatagagcatctaccatgtgcattggccagccagcagacccgggacccaacatccatcatcagttcagaggacaaatcatacagtttgttctctcytaggcacacctactccttaatcttcaagttgaattccttcctcatcttttacatatcaagcagatagaccaaaacaaaagccaaatggtagctgcatgaactttctcattcccaaagtccaatttcaaagaagagaagcacagcaactgccacatattcaggacagcacaagtgtggatatcccactgatgaagaagtctgaagcctttacacagtacaagggtacaggtttcactgatgtgttcaacgcttccaacagctttgtccaaaaaacacctggcaatcagaagcttcctttta

SEQ ID NO: 84444 - DNA, 600 bp, Chicken  19866894382047_1
tggcttacacagtaatttctgacaataaggcagagtaaaaagtaaacacattgcaatgcttattgttcttctcctcttccttttcagaatccacgtgcaacagtgcaaatgaattcaaattctctaagttcattatactgtgggatgctttatctctcatgcctctgttttcagcaagtccaactgtgcttgtcagggtctgccttcagatagcagcatgcactgtcagggtagaggactttcttatgttacccctctattgtgacacaatacatacccctaaatctcatttatttctcytgtataagatttgcattttgtttatgacatttaatacgaaagaaatgatgtaatatcggagccatgacttccaaaggtatagctacacaaggatgaagacaaggtaaagaacactgtaaggatttcaggagacttagcaaataggcaatattcagtgaaagcaaatgcaaaattacaaacatgggaaattcagttgttcattcatatataaaagcatgagttctgagatgaacaataccacttaagaggcagactttctagttttaatagacagtcatgaaaacttgagctcggtgcttg

SEQ ID NO: 84445 - DNA, 599 bp, Chicken  19866894382048_1
  misc_feature (1)..(22): n is any nucleotide
nnnnnnnnnnnnnnnnnnnnnntcatgtaaatccaatcaggatttgggttttttttttttttttttagttaatacacccaattgtaaaattccctttccgggagacttttcagctttgttttaattcttccatgctagaatttaaagaaagtattcctatcgtttaatgcaaacttgaacaaattcaaattctggtcaaattctcctccaggaggtcatttacagaagcaacaaacccaacatgttggtttttttttttcaactccttgattggctttctgttggcactggtgcaaattrcctttcctacaaatgcctgttattaatggggcgtcagctgcagtttcttattacgccggagcagggttggttggaaatactccagcacgttttctctataggaaaatgcaggtttgttgagtgcaaaaygtagcataggaggaaggctataaatacatttcattttggggagaatgagggaggggaaataggagtactccaacagtgaaatatttacatttttctgcgagaagttaaatagggccataattacagcgaagtgttctgatggatgccaaaggcttatttttagaactttg

SEQ ID NO: 84446 - DNA, 600 bp, Chicken  19866894382048_2
ccatgctagaatttaaagaaagtattcctatcgtttaatgcaaacttgaacaaattcaaattctggtcaaattctcctccaggaggtcatttacagaagcaacaaacccaacatgttggtttttttttttcaactccttgattggctttctgttggcactggtgcaaattrcctttcctacaaatgcctgttattaatggggcgtcagctgcagtttcttattacgccggagcagggttggttggaaatactccagcacgttttctctataggaaaatgcaggtttgttgagtgcaaaaygtagcataggaggaaggctataaatacatttcattttggggagaatgagggaggggaaataggagtactccaacagtgaaatatttacatttttctgcgagaagttaaatagggccataattacagcgaagtgttctgatggatgccaaaggcttatttttagaactttgtttggcaggaaattaaaaacaagttgggaaaaatccctctttgtgtaacacataaatggtgtttttttgcatagagaatgattgctttccactcrgatccaacctcagctccggaccatgacgaggagct

SEQ ID NO: 84447 - DNA, 600 bp, Chicken  19866894382048_3
tctataggaaaatgcaggtttgttgagtgcaaaaygtagcataggaggaaggctataaatacatttcattttggggagaatgagggaggggaaataggagtactccaacagtgaaatatttacatttttctgcgagaagttaaatagggccataattacagcgaagtgttctgatggatgccaaaggcttatttttagaactttgtttggcaggaaattaaaaacaagttgggaaaaatccctctttgtgtaacacataaatggtgtttttttgcatagagaatgattgctttccactcrgatccaacctcagctccggaccatgacgaggagctggctgtgcaacgtgcaaatgaagactgttcttctgcttaattatccctgctggagatatttatcaagttgcttcttcggctaacagcactttgttttctgagagtctcgttgcttctagaggtttaattgggttcttttgcttaaatatcagggtgatgtggtgccacgggcacagcagtgatctcagcacagagaagagtggttttctgatggcacagccatgggaagtaatgggtgctctttgcgtggaatcattaaggtcgg

SEQ ID NO: 84448 - DNA, 412 bp, Chicken  19866894382060_1
agcgtctgtgaaatctttctccattcagagctaaatatagggagagagagagagagagagagagagaaagagagcgcaattcagctttcagtgctcatggataaataaacccccagcgctgctctgctgtgagctgctggcggtcggtcctgtgggatgtggggctgcctgggtgctgctgtagtgtggggctgcggaatgctcccatccttgtcccaccctgggcacagggttgcctccctcagctgcctgtaggctgctcacctatggcatgggcttcccacttgctgcagggggggsccagaaaaatcccagagccgctctgccacgttattgccaatagagctctcctagaccatctctgctgccaactgctctggcagcacggttgctttctaactgagcagccgct

SEQ ID NO: 84449 - DNA, 600 bp, Chicken  19866894382064_1
tgtgtttttaatcccatgtcaaactacactattggcttggcaactggacaaaaaacattgattaaacaatgagctgtgaagcgattgattccacacaggcagtgtgttttagtactgtcatatgatcccagccattacaaaagcacctatctgacctcagggaatagactaaggctacaagctgaaggcctgccaaggcagctggcagcaagagacattactcaaaaatgggctcttttaaaaggcataacacagttactaagacagttcactatacaggtactgtttcacatgtccccstaatgttatttgcttctcatgcctatcttaacacaaccaagtctttgtggaaattctcaccgtattcatttaaaytaccttattaaacagtcgacttgggtgaaatacaatgctactacaaggagtctgccagaaatattcattattgacttaactgaacgagaataacacttcagcaagctaacctcataacatgcaatatctggttttcactttacataccgaaaacacaatctaagcctaaaaacttgctgtgcttctcataatagccttgccacacaggccatggagtaagtcagg

SEQ ID NO: 84450 - DNA, 579 bp, Chicken  19866894382064_2
gtgaagcgattgattccacacaggcagtgtgttttagtactgtcatatgatcccagccattacaaaagcacctatctgacctcagggaatagactaaggctacaagctgaaggcctgccaaggcagctggcagcaagagacattactcaaaaatgggctcttttaaaaggcataacacagttactaagacagttcactatacaggtactgtttcacatgtccccstaatgttatttgcttctcatgcctatcttaacacaaccaagtctttgtggaaattctcaccgtattcatttaaaytaccttattaaacagtcgacttgggtgaaatacaatgctactacaaggagtctgccagaaatattcattattgacttaactgaacgagaataacacttcagcaagctaacctcataacatgcaatatctggttttcactttacataccgaaaacacaatctaagcctaaaaacttgctgtgcttctcataatagccttgccacacaggccatggagtaagtcagggctaccttaggcatgtgtgcactgccagactgggagcccttctcaaggcttttg

SEQ ID NO: 84451 - DNA, 599 bp, Chicken  19866894382065_1
  misc_feature (1)..(11): n is any nucleotide
nnnnnnnnnnngcaagaagacacttagtgtctggtctagactacactgatctattgagaatgagcataaaatgcaatgcttttagaaaaaatgtttaaaagggaaaataaaaagcttttaatattcaacctgactgactttcatgaatttatttcctttagactttatcttttccttcttattattttctctttccaatgagtgaactgaaatcaatggtgtacagagtttatatcttcttttcctgttttgttacatgatggaaagtaaataaagaatagaataaaacctgtctttttwtgatctcagaaatatataatttctgtatatgtaggatgaaaaatgaaataagtgaaaaatgatgagaaagattggttagacgttattgttcrtgagctctccagattttctcagctatattttatctccaggagaatttaagtgagatcaatccccaatctcaataattgtgtcatgtatacttagcaaatattatacaaatcagatgaaaaaaagaatacctttaaaggcatatggaaggcatatatctgtaaaagaacataaaagttactctgaagtggtatttttactgaacacgt

SEQ ID NO: 84452 - DNA, 600 bp, Chicken  19866894382065_2
gtttaaaagggaaaataaaaagcttttaatattcaacctgactgactttcatgaatttatttcctttagactttatcttttccttcttattattttctctttccaatgagtgaactgaaatcaatggtgtacagagtttatatcttcttttcctgttttgttacatgatggaaagtaaataaagaatagaataaaacctgtctttttwtgatctcagaaatatataatttctgtatatgtaggatgaaaaatgaaataagtgaaaaatgatgagaaagattggttagacgttattgttcrtgagctctccagattttctcagctatattttatctccaggagaatttaagtgagatcaatccccaatctcaataattgtgtcatgtatacttagcaaatattatacaaatcagatgaaaaaaagaatacctttaaaggcatatggaaggcatatatctgtaaaagaacataaaagttactctgaagtggtatttttactgaacacgttgagaatgcatgtagtgrggctacaaagcactgctacacattaactgaaatattcagggattttcattgccttctatccctgcaacccctgca

SEQ ID NO: 84453 - DNA, 600 bp, Chicken  19866894382065_3
aatttctgtatatgtaggatgaaaaatgaaataagtgaaaaatgatgagaaagattggttagacgttattgttcrtgagctctccagattttctcagctatattttatctccaggagaatttaagtgagatcaatccccaatctcaataattgtgtcatgtatacttagcaaatattatacaaatcagatgaaaaaaagaatacctttaaaggcatatggaaggcatatatctgtaaaagaacataaaagttactctgaagtggtatttttactgaacacgttgagaatgcatgtagtgrggctacaaagcactgctacacattaactgaaatattcagggattttcattgccttctatccctgcaacccctgcagatttcagttcatatttttctcctagatcctacgtttgtagttattcatgagcagtaggaaaacccttcttatctctatcttttcacagaccgtgagaatcagtcgatcctgatcacgtaagtacactccctgatcgggtccctgcggggctgccctgtgccaggggaccttctccctgacctcacgctctctgcttctctggttggttcgacagcggagaatcc

SEQ ID NO: 84454 - DNA, 599 bp, Chicken  19866894382075_1
  misc_feature (1)..(107): n is any nucleotide
nnnnnnnnnnnnnnnnnnnnnnnnnnnnnnnnnnnnnnnnnnnnnnnnnnnnnnnnnnnnnnnnnnnnnnnnnnnnnnnnnnnnnnnnnnnnnnnnnnnnnnnnnnngcacgaagaatggagaatttttaggtattcatattggattctgatgcaggtattgtaccttaatctgtgtagcatgtgtcgagaaatattaaagctttagaacctttctgaaaacacagagaaacaaaataagggtgtggattatttattatccatattagaacctaatgttaatgtatgctaagcaagtgayggaagtttcaacaaaaatttaatggagctataattgttctccattatgcaattccaaytctatttttgatagtaatggattgcttttatgcagttaagcttaaattacatttgtttttaaaaaggtgtgggttttctgtaagaaaaatacccccaggtcacttcagcaacagtgcaaaaatggatctacacaagaaaacaaatgcctggcagamattgcagctgatatttatcagctaaatttagacaaatatatttgtcaatggttaagctatttacactgctgctgtagtcagcaaa

SEQ ID NO: 84455 - DNA, 599 bp, Chicken  19866894382075_2
  misc_feature (1)..(49): n is any nucleotide
nnnnnnnnnnnnnnnnnnnnnnnnnnnnnnnnnnnnnnnnnnnnnnnnngcacgaagaatggagaatttttaggtattcatattggattctgatgcaggtattgtaccttaatctgtgtagcatgtgtcgagaaatattaaagctttagaacctttctgaaaacacagagaaacaaaataagggtgtggattatttattatccatattagaacctaatgttaatgtatgctaagcaagtgayggaagtttcaacaaaaatttaatggagctataattgttctccattatgcaattccaaytctatttttgatagtaatggattgcttttatgcagttaagcttaaattacatttgtttttaaaaaggtgtgggttttctgtaagaaaaatacccccaggtcacttcagcaacagtgcaaaaatggatctacacaagaaaacaaatgcctggcagamattgcagctgatatttatcagctaaatttagacaaatatatttgtcaatggttaagctatttacactgctgctgtagtcagcaaaaagagctaggatttgactcatatgacctgcctcagatgtcaacactatggcagtatga

SEQ ID NO: 84456 - DNA, 600 bp, Chicken  19866894382075_3
ctgaaaacacagagaaacaaaataagggtgtggattatttattatccatattagaacctaatgttaatgtatgctaagcaagtgayggaagtttcaacaaaaatttaatggagctataattgttctccattatgcaattccaaytctatttttgatagtaatggattgcttttatgcagttaagcttaaattacatttgtttttaaaaaggtgtgggttttctgtaagaaaaatacccccaggtcacttcagcaacagtgcaaaaatggatctacacaagaaaacaaatgcctggcagamattgcagctgatatttatcagctaaatttagacaaatatatttgtcaatggttaagctatttacactgctgctgtagtcagcaaaaagagctaggatttgactcatatgacctgcctcagatgtcaacactatggcagtatgatctgtgtcctgccctcctctgactatattgatttgagtataaagagttgcttgagtataaaaagaatcttgggtcattagctcagacatttatattatatcaggttaatcccataccatcactagttttctgaaaatgtggttatcatgcaataaga

SEQ ID NO: 84457 - DNA, 447 bp, Chicken  19866894382077_1
tccatgaagtaagaatgcaatgctgttaggaaattaaattaccacattaatttacaaggtcaagagagaaagaaaacagtgcaactgtactaactgtagggttactaaagagtgctactgttcaactgttttgagcactgtgaaagcctttatgggctctggatataagcttgtgctggccagtggccctgctgtgatacacagtgctgtggtcaaaaagccacaatggagtctgcatttctctcatatgagtaactacagttcttcctcctatttcttcagtaagtatcataagatatrgggcacaggcccggaaaaaaagagatataaaagggcgaagaggaaaaaaaaaggaagggtatcagcaatttgccgcacaatccggccggccttagcctcacagcagggcgcgccgcgggccgcgcgctccggggggagggagggggg

SEQ ID NO: 84458 - DNA, 600 bp, Chicken  19866894382078_1
agtgatgaaagggcagagctgctgcagcagacgtgccattgctctagctctgctgctgctgagtagcagctctggtaccaaacacaccacacattctttaagaaggggaagtaggaagaacattccaccaccattcctggtctgtactcaaagaagcaaatgaagaaggagagtaattgtttgctggttactacaggaaagatcatttgctgggtctttttaaaccagtacaacaggcttgtttgcttcaagctacttagatattaaagaaacaaaaatgatttcaatgttttcatctcrgggattgccagcatctctggaggtgcagcactctttcacctccttcagcacaaactttacccacatccctscagaagtcctctgccactggctttcttctcttgcctcaacagcatctcccatcgccagccctggcaaacaagagagccgcggttcagccacacaaagagagaaccccacgtgctgtgccggactcaaggccagcctcatccatcttctctgctctcagcttcttcagcgcttcagtaattagaattatcaggactgaaacactgtggacattattgctgcttagcgtga

SEQ ID NO: 84459 - DNA, 600 bp, Chicken  19866894382078_2
ctggtaccaaacacaccacacattctttaagaaggggaagtaggaagaacattccaccaccattcctggtctgtactcaaagaagcaaatgaagaaggagagtaattgtttgctggttactacaggaaagatcatttgctgggtctttttaaaccagtacaacaggcttgtttgcttcaagctacttagatattaaagaaacaaaaatgatttcaatgttttcatctcrgggattgccagcatctctggaggtgcagcactctttcacctccttcagcacaaactttacccacatccctscagaagtcctctgccactggctttcttctcttgcctcaacagcatctcccatcgccagccctggcaaacaagagagccgcggttcagccacacaaagagagaaccccacgtgctgtgccggactcaaggccagcctcatccatcttctctgctctcagcttcttcagcgcttcagtaattagaattatcaggactgaaacactgtggacattattgctgcttagcgtgaagttaacaagagagccagatttacacgttctggccagacagagaattaaaaaaagttacgaatgattgccc

SEQ ID NO: 84460 - DNA, 600 bp, Chicken  19866894382078_3
gccgcggttcagccacacaaagagagaaccccacgtgctgtgccggactcaaggccagcctcatccatcttctctgctctcagcttcttcagcgcttcagtaattagaattatcaggactgaaacactgtggacattattgctgcttagcgtgaagttaacaagagagccagatttacacgttctggccagacagagaattaaaaaaagttacgaatgattgcccagttccagggatacgtactccaggatcttattttgccagagactccacgtgaactttagcctctaggagaaatcygcctgcatttttctaattgacataccagtcagaccagtggcaggacacaaacgaacacgcatgaaaaattaaggttcaatgacccaaatcaattacgtgttaagggcactgctctggactcagtaggagatatttgaaacaggaaaaaaagaactaaatgggatcattcattgaactgacctggaaataagacagaaatttggtaaataagttcagtgcaagccagtttcatgtagtgatggtggtggataaaaaaacttgaaaagggggataggggagaaagaaaggaatttcttagac

SEQ ID NO: 84461 - DNA, 600 bp, Chicken  19866894382080_1
ctacggtaaagttcccacagctctgacagacgttaccaagctgttgctcaaacctgtttcctttgggctgtgataggagttgagcaaacttgctaggtctgtaaggagccatttaagcacagcagtgctttagtagagtagtgctggaaaccacctttttttttaaatccgtgacggtggcctttctctgttattggctaagtgaagcgggctctgccccggctccccacccctccagggtagcacctcgggcacacagatgcacgatgtcctacttgtgccggctttaagccgtgccarcagcacagcggtcccgggatcccctcgttccgctccgtcagagccgggaggaagggaggtctttgctccgcacgctcggcgcgaccaccaggaggtcacaatacatccgagaagcgaaatgagcgcatttcctttcagtccccggtgccctctgcacaaaaccgtctgggaagctgatttgggagccggcggggagctcagggagcaaagtgcggcgtgctggaggacggcgcggctcgtagggctggcggggctgccttgaacgagggggaggaagggaggaaaaaaaaaaaaaaaaag

SEQ ID NO: 84462 - DNA, 600 bp, Chicken  19866894382087_1
ccacattagaataggacagaagcactacaaacaccaggagaggtgatagccattgagatggcttcaggcagacttgctgtgcaaacgttcctaaatctgcaaccttctcaagtcccactgcacacccatgtacagaacgtgcaattcacctcctgtgtcccagtgacatcgagatacatctctagctgggcagaaagcccttcctaaactctcacccaaacacaaaaggcagccctcaaggagttcagtactgctttttgaggcaacagcgagacatgcagctgtttgcaggactgaacrttgttgcaaaaggctttttttcatgaattagtcccttaggaaagtgtttaccccaaagcaaactgctgtcagcatgagatggatgagaactgtaatattcagtgcacagcaatatgcagagagcaayggcgttagcacgctgcgctgaactgccctgtaattgtacggcaaaacttttcttttcaaacacagaagattttgtagactctgtgacaaacaaaatcaagcaagtgtttacataggaaaaccagcactcttgtagctgcacaaataaataatattcttttttctttgaagaaa

SEQ ID NO: 84463 - DNA, 600 bp, Chicken  19866894382087_2
atgtacagaacgtgcaattcacctcctgtgtcccagtgacatcgagatacatctctagctgggcagaaagcccttcctaaactctcacccaaacacaaaaggcagccctcaaggagttcagtactgctttttgaggcaacagcgagacatgcagctgtttgcaggactgaacrttgttgcaaaaggctttttttcatgaattagtcccttaggaaagtgtttaccccaaagcaaactgctgtcagcatgagatggatgagaactgtaatattcagtgcacagcaatatgcagagagcaayggcgttagcacgctgcgctgaactgccctgtaattgtacggcaaaacttttcttttcaaacacagaagattttgtagactctgtgacaaacaaaatcaagcaagtgtttacataggaaaaccagcactcttgtagctgcacaaataaataatattcttttttctttgaagaaagagcatatgctcaacactcctttgtcctgcatcacaatagaaaaaccctttgcactggaatatctgaatcacttcttggcaggctctcaaggtaaacaaagtaaattaaaaatgaatgtttatcata

SEQ ID NO: 84464 - DNA, 503 bp, Chicken  19866894382087_3
tatcaaacataagaagcgattgagtccatcactcattcaaacaagcaactgaaaagtggaaataatgggatgacaacatcagaaaacaacctcccagaaagagatgagtttccttgtagccatttgtcttgtctaattaatcccacatgtgggaccagactggagcattaaaaaaaaaattaggtacaaaatattactttcactgggaagcttcagaagtacaaaagaatcacaaatgctttatggttgcgctttactttcaaaccccgtttttcacgtcatcttcttcatttgggactytgcccctgagtctagatgagactgagataatggtagcwgtgtagacgaagaaaacagttggaaaagctggggaaaattatgtcattaccactaataaaacaagatgtcagttcctaagagattaaaaatcagtatattaggttgcagacgactcctgggtacctacggagcggtcatgcccacgagcacttcctctgctcaag

SEQ ID NO: 84465 - DNA, 465 bp, Chicken  19866894382087_4
aaacaagcaactgaaaagtggaaataatgggatgacaacatcagaaaacaacctcccagaaagagatgagtttccttgtagccatttgtcttgtctaattaatcccacatgtgggaccagactggagcattaaaaaaaaaattaggtacaaaatattactttcactgggaagcttcagaagtacaaaagaatcacaaatgctttatggttgcgctttactttcaaaccccgtttttcacgtcatcttcttcatttgggactytgcccctgagtctagatgagactgagataatggtagcwgtgtagacgaagaaaacagttggaaaagctggggaaaattatgtcattaccactaataaaacaagatgtcagttcctaagagattaaaaatcagtatattaggttgcagacgactcctgggtacctacggagcggtcatgcccacgagcacttcctctgctcaag

SEQ ID NO: 84466 - DNA, 600 bp, Chicken  19866894382092_1
agatttgtttgttgttatatattggttttaaaattacaggtctcacctaggttcatatgtattttttcactgtcactgatagtattacatgtgttcatgagtgcgctaaagtatttgcattgctgcaagaaaaaagaaataagcttattaagatataataaaaaaatcacgcccttatttaattcttctataataatcctttttaataggaaatgggacaacctgtaacgttgattttatagttctgatacactaatttactcttcatatattttcccccactttactgcatcacaatarttgtactgactgtgcaattgtgagtgaaaaagattaggatatgtaacattccaatgtttttgacaaccttatgtattgcaatttgaaatgtacaagtcctttcagtgttattcactcttactcattaaaactaagaacaaggtttatgaatgtggagctacttttcttgactgcttttaaggaagagctaaaataaactgcactggtgatgcagattccattcacatgtccatacatgtgaccaaagggctaattttctctttcagtttcattcttgttttcagtctcaaactgaaggaa

SEQ ID NO: 84467 - DNA, 600 bp, Chicken  19866894382096_1
cttttccaaaaatcttcatgtccccctaaaagcacagactcagacacactccagctctctgtaatacttctttctgtagatgtctccacttaatctttaaacgctctatgcaaatgtttgtcaagaacctttgtcaacataaatcaacagatgagtctgacgtgttctgcaaatactggagatctggcaaaagcactgcagcctgtctctgtagctttggtgctgctgcaaagagcttcaggagatgccccacctgagatcacagttccagggcactttcccattgatttggttggaaaytgtcagtgcartggtcaacaatttgttgctcaccttacttgaggatttaactagcctgatttttcctaacaaaaagagaggatgactcaggagggagaacatcatttcagcctcagactccttggcacgtatatctctgtgagagaggagaacaagaaatcccaaagcagaatggaggaaccatgcacagacagaggcctcagttcaccatactctgagaaatggttgagagggaaggcagagggctttgaaatttcttgctatggaggttattatttcccccaaattagtatcattcag

SEQ ID NO: 84468 - DNA, 600 bp, Chicken  19866894382096_2
atcttcatgtccccctaaaagcacagactcagacacactccagctctctgtaatacttctttctgtagatgtctccacttaatctttaaacgctctatgcaaatgtttgtcaagaacctttgtcaacataaatcaacagatgagtctgacgtgttctgcaaatactggagatctggcaaaagcactgcagcctgtctctgtagctttggtgctgctgcaaagagcttcaggagatgccccacctgagatcacagttccagggcactttcccattgatttggttggaaaytgtcagtgcartggtcaacaatttgttgctcaccttacttgaggatttaactagcctgatttttcctaacaaaaagagaggatgactcaggagggagaacatcatttcagcctcagactccttggcacgtatatctctgtgagagaggagaacaagaaatcccaaagcagaatggaggaaccatgcacagacagaggcctcagttcaccatactctgagaaatggttgagagggaaggcagagggctttgaaatttcttgctatggaggttattatttcccccaaattagtatcattcaggctagttcact

SEQ ID NO: 84469 - DNA, 600 bp, Chicken  19866894382098_1
attttatggaaataaggtaggtttttcctgcacaaccttaagggatatagccatctccgacagaaaacgtggtcttctcttactgtgaattggtatcaatcacagaagggtgacactagatagtttcttcgtggcctgtgatatgaagagtgagcagcaggatgagtcgccttgaatgtcagctgacttgttgatgtgaatgttggcattttaaaatgctctgttacagtgtgctagaaatattcctgtttatgaagtgcgtgttcttttcctctgctatttttggtaaccttcttttgrttgaaagaataacataaagcttattaacaggagcagacactcaggaccagtatcattctctctggaatgaatattctggagccatgccttcatgttattacaggaagataagcaatgtttttctgcagcatgtagcagaaacccttatttaggttacagtagtagagctaaagctccttgaaagttatttttagcagtagatatttaacagggttctctgtacgtaattgtgttcccaaayggtttggtattgacttaggaaatcatgaagtgaaaccagttattgtgttccattaggaa

SEQ ID NO: 84470 - DNA, 472 bp, Chicken  19866894382098_2
attcctgtttatgaagtgcgtgttcttttcctctgctatttttggtaaccttcttttgrttgaaagaataacataaagcttattaacaggagcagacactcaggaccagtatcattctctctggaatgaatattctggagccatgccttcatgttattacaggaagataagcaatgtttttctgcagcatgtagcagaaacccttatttaggttacagtagtagagctaaagctccttgaaagttatttttagcagtagatatttaacagggttctctgtacgtaattgtgttcccaaayggtttggtattgacttaggaaatcatgaagtgaaaccagttattgtgttccattaggaaaagaacaatgagccaattatgcccacacattcagagatgtaaaaattttttaaatccaggataggttatggctgtcagtctgacctctcatatggaggaactggaacaggctg

SEQ ID NO: 84471 - DNA, 600 bp, Chicken  19866894382099_1
gggagcgcatgtggggtgaaagcaatgatggccggacagagcaatgggcttcctctggcagtgttggtggacttggttcagctattcaatttgtgacaggaagagcagccaaaataactatgcaaaacaaacagctgagagcagatgaaaataaagctaataatatagtcattaggaagagagccaaagcacaaattgcagtgcctattgtgaaaggagaagtcagagaaggaaacgaatgtacgtaacgtaatgcacggcacgaggaacaccagtactgccctgggctgcgttgcattsgtgcatcagccttggtgcatggtgtaaggcagcaagacaacagagttggggaacagcagcaaagtggtgggggatgtctgactgcctcttgcttggctgctgtgaatctgagccacctgaggtcagggagcgcatttctttttaccctcaggtggaaacaaacratactgctgctccttgacttgcctctcccagcacctactgaagctgtgctcgtgcattctctcagagaaaagcctccaggtgacattttgtgctcctgacctacacctacttccaactggaaatgggaggaaagtc

SEQ ID NO: 84472 - DNA, 600 bp, Chicken  19866894382099_2
atagtcattaggaagagagccaaagcacaaattgcagtgcctattgtgaaaggagaagtcagagaaggaaacgaatgtacgtaacgtaatgcacggcacgaggaacaccagtactgccctgggctgcgttgcattsgtgcatcagccttggtgcatggtgtaaggcagcaagacaacagagttggggaacagcagcaaagtggtgggggatgtctgactgcctcttgcttggctgctgtgaatctgagccacctgaggtcagggagcgcatttctttttaccctcaggtggaaacaaacratactgctgctccttgacttgcctctcccagcacctactgaagctgtgctcgtgcattctctcagagaaaagcctccaggtgacattttgtgctcctgacctacacctacttccaactggaaatgggaggaaagtccttccagagagycagcatggggcagttcaatgtatacttatttgtataatagtctctttcccaaaacaatgagcataagagcatttctgctgaggtaaaaatgctgtagagcaaacaatgcaggcccatgcatcagaagtatcagagtggatgatttctcccca

SEQ ID NO: 84473 - DNA, 600 bp, Chicken  19866894382099_3
tggtgcatggtgtaaggcagcaagacaacagagttggggaacagcagcaaagtggtgggggatgtctgactgcctcttgcttggctgctgtgaatctgagccacctgaggtcagggagcgcatttctttttaccctcaggtggaaacaaacratactgctgctccttgacttgcctctcccagcacctactgaagctgtgctcgtgcattctctcagagaaaagcctccaggtgacattttgtgctcctgacctacacctacttccaactggaaatgggaggaaagtccttccagagagycagcatggggcagttcaatgtatacttatttgtataatagtctctttcccaaaacaatgagcataagagcatttctgctgaggtaaaaatgctgtagagcaaacaatgcaggcccatgcatcagaagtatcagagtggatgatttctccccactcctctggccttgatgtggtcctgtccagagcaaatcatccttaaaatgaaaaaaactatatgccttgatttcttaatcacatgttatggaatgattgcaatttccctcaatctccccgtgcctccagggaaatatagcgagggccg

SEQ ID NO: 84474 - DNA, 600 bp, Chicken  19866894382104_1
taatccctctgatggtgtaattttaccctagacacaggactgatggttttggagtcgctctgcccgcagtagagcagtgcaaggggtgcagaacagtctggggagaggcaagcagtgctgaatggtgctacggtttagaactcactctcatgcacacacatatatgcatctggcacagcttgcgagattccccttccaaaatgtttgatgagctattaaagcactcatccccagtgctgctgctcacagtgagccacaatatgagttcaccccagccctcccgccgtgctctgggcacarctcatcccccctcagtgccccatttcacacagctttgtggaaaacgcagcctgaaaaaaagtccctgaagaaatgctggcttcaaagccagcggaaatcagcacatgggctgccacaaggttccgtttgagtcttaaattgcaaaggaagagcactttgtctcagtggatgcggatgagaactcgtatgtcagcttccacctgagatttccctattcattcggaagccaaaaacccatcagagcagcttgagcagaaacacgctgcaatagttaccrgcgtaacatttctagtataaatg

SEQ ID NO: 84475 - DNA, 600 bp, Chicken  19866894382104_2
ctcccgccgtgctctgggcacarctcatcccccctcagtgccccatttcacacagctttgtggaaaacgcagcctgaaaaaaagtccctgaagaaatgctggcttcaaagccagcggaaatcagcacatgggctgccacaaggttccgtttgagtcttaaattgcaaaggaagagcactttgtctcagtggatgcggatgagaactcgtatgtcagcttccacctgagatttccctattcattcggaagccaaaaacccatcagagcagcttgagcagaaacacgctgcaatagttaccrgcgtaacatttctagtataaatgtgtttgatttttgaacgctgtgtgtctttaacccacgattaaagagcttcgcagttatttcatttgttcattatgctttagaggtgtcgccaccacctcaacgacaggcaaacctacaccggtcctcgctgctcgaaacagttctgttgaaaagaaacattcgtttctcaactccgggaagattccttcccgctgacactccgctccgtcccgggagctgttctggcgtccagaggacacccgcagcccgcacggccccgcagcgcccggtgcttcc

SEQ ID NO: 84476 - DNA, 600 bp, Chicken  19866894382106_1
cagcacgaagccatgctctgggtctgagcccaaccagcagagtcacccgaatccctgcagtggcgcagaccggaccaggagcagcgcagagccgggctcaacagagctgacatctgtaacagagtgagagctccgagccaagcattcgtggctttgaaatgcagatccagatccaaactgggagactttgggaaacagcagagcttggtgctggccagagatcagacgtgtttgtgatcatatttaatagcatcaccacttggggcttcctaagcactcccaagcagcccacgaatgtcycacaccaccacacttcaggagcagcaatcctttcsccagcaaagtcactcctgggctgcacagggagggggttggrgtggccgtggggcagccccacacrtggccgaataygagctgagggcatcaaggtggagaggggacactgctctccacaacagggcaggagatgggagcagacaccggagtgctgatgtgcatctctattggaaaatctgcccctgcagagctcaattgattttttttaaattaatctatttacagcagtttgagttgagctagctttaggtgctgtttaagctg

SEQ ID NO: 84477 - DNA, 600 bp, Chicken  19866894382106_2
agcagagtcacccgaatccctgcagtggcgcagaccggaccaggagcagcgcagagccgggctcaacagagctgacatctgtaacagagtgagagctccgagccaagcattcgtggctttgaaatgcagatccagatccaaactgggagactttgggaaacagcagagcttggtgctggccagagatcagacgtgtttgtgatcatatttaatagcatcaccacttggggcttcctaagcactcccaagcagcccacgaatgtcycacaccaccacacttcaggagcagcaatcctttcsccagcaaagtcactcctgggctgcacagggagggggttggrgtggccgtggggcagccccacacrtggccgaataygagctgagggcatcaaggtggagaggggacactgctctccacaacagggcaggagatgggagcagacaccggagtgctgatgtgcatctctattggaaaatctgcccctgcagagctcaattgattttttttaaattaatctatttacagcagtttgagttgagctagctttaggtgctgtttaagctgctttcccactgcctcacattcagcatttgcatggt

SEQ ID NO: 84478 - DNA, 600 bp, Chicken  19866894382106_3
aggagcagcgcagagccgggctcaacagagctgacatctgtaacagagtgagagctccgagccaagcattcgtggctttgaaatgcagatccagatccaaactgggagactttgggaaacagcagagcttggtgctggccagagatcagacgtgtttgtgatcatatttaatagcatcaccacttggggcttcctaagcactcccaagcagcccacgaatgtcycacaccaccacacttcaggagcagcaatcctttcsccagcaaagtcactcctgggctgcacagggagggggttggrgtggccgtggggcagccccacacrtggccgaataygagctgagggcatcaaggtggagaggggacactgctctccacaacagggcaggagatgggagcagacaccggagtgctgatgtgcatctctattggaaaatctgcccctgcagagctcaattgattttttttaaattaatctatttacagcagtttgagttgagctagctttaggtgctgtttaagctgctttcccactgcctcacattcagcatttgcatggtgggattaaggcaaatggggaactgaaaaagcaagaggagca

SEQ ID NO: 84479 - DNA, 600 bp, Chicken  19866894382106_4
acagagctgacatctgtaacagagtgagagctccgagccaagcattcgtggctttgaaatgcagatccagatccaaactgggagactttgggaaacagcagagcttggtgctggccagagatcagacgtgtttgtgatcatatttaatagcatcaccacttggggcttcctaagcactcccaagcagcccacgaatgtcycacaccaccacacttcaggagcagcaatcctttcsccagcaaagtcactcctgggctgcacagggagggggttggrgtggccgtggggcagccccacacrtggccgaataygagctgagggcatcaaggtggagaggggacactgctctccacaacagggcaggagatgggagcagacaccggagtgctgatgtgcatctctattggaaaatctgcccctgcagagctcaattgattttttttaaattaatctatttacagcagtttgagttgagctagctttaggtgctgtttaagctgctttcccactgcctcacattcagcatttgcatggtgggattaaggcaaatggggaactgaaaaagcaagaggagcacctctgggtgctgctggctcgtgg

SEQ ID NO: 84480 - DNA, 600 bp, Chicken  19866894382106_5
atctgtaacagagtgagagctccgagccaagcattcgtggctttgaaatgcagatccagatccaaactgggagactttgggaaacagcagagcttggtgctggccagagatcagacgtgtttgtgatcatatttaatagcatcaccacttggggcttcctaagcactcccaagcagcccacgaatgtcycacaccaccacacttcaggagcagcaatcctttcsccagcaaagtcactcctgggctgcacagggagggggttggrgtggccgtggggcagccccacacrtggccgaataygagctgagggcatcaaggtggagaggggacactgctctccacaacagggcaggagatgggagcagacaccggagtgctgatgtgcatctctattggaaaatctgcccctgcagagctcaattgattttttttaaattaatctatttacagcagtttgagttgagctagctttaggtgctgtttaagctgctttcccactgcctcacattcagcatttgcatggtgggattaaggcaaatggggaactgaaaaagcaagaggagcacctctgggtgctgctggctcgtggctacatgtcca

SEQ ID NO: 84481 - DNA, 600 bp, Chicken  19866894382112_1
tgcaagcaagagaaaaaaaaatgcatacgctatatgtacatagcttcaaagcaactgtgtagaaatgacagtttaagttttgagataaaaatgtacttcaaaaaggccacaaaaacgttaaattattcacctgtgtagcatttaactgttgttgcagaatatttcttttttgcttcagctgttgttctgtttgcttctgctttttatctagctcttgtactctctcattcaaataggagagcttctgtagggaatatccacaaagatgtgttattattcaaaacttattgtcttaccttycagakaaatcattttagctgtaaactacttaagttactattcttaagtttacttttgtttacctctacatactttttttcctctcaatacaggatgttcattcacatgttatgtactttatgctttgaaggaaaaaatgcacatataaaagaaagcatctttggtgcttcaaayagtgtttatcatcacacarcaaaatatcactgctcactcttctccccaggcttctttacattccttctgccaagaaagctacaaataaagttatctaaccaaaatgtgtatttgcaatagcttcca

SEQ ID NO: 84482 - DNA, 600 bp, Chicken  19866894382112_10
gaaacatcttaaaccttttatcaatgagaaagctctttggaattaccagtatctcacacatccttcacatacaaatctgcctgggcaaactctgtttccaggcttctacagcagaagcaaatacacagctwtggacaatgatacataacttatgccacacctccctaggtttccaggaaactaatgatgtgatctttgtcacattgtttctacttcgttttagctagggaagggctaacatyattagtcactgccattattatgctgttttgaaaatactattagctattagaggagggytttttttttcccccattttgacatattaaacctgaatcaaagataagctaccaaataattcattatctaaattcaaactattctacattctccagttttctccccaaagtgttgaagtattgcgatgtgcaggttatataaagaatagagtaacaataaacaaaatggagatgatgatctcctgtggcaaactacttactagtagccagataactgaaccataaacctgcagaacggttctgtaagaacttatggatgaggccacaggaactgggctgtgtctgggcttcaaccaaaaat

SEQ ID NO: 84483 - DNA, 600 bp, Chicken  19866894382112_2
gcaagagaaaaaaaaatgcatacgctatatgtacatagcttcaaagcaactgtgtagaaatgacagtttaagttttgagataaaaatgtacttcaaaaaggccacaaaaacgttaaattattcacctgtgtagcatttaactgttgttgcagaatatttcttttttgcttcagctgttgttctgtttgcttctgctttttatctagctcttgtactctctcattcaaataggagagcttctgtagggaatatccacaaagatgtgttattattcaaaacttattgtcttaccttycagakaaatcattttagctgtaaactacttaagttactattcttaagtttacttttgtttacctctacatactttttttcctctcaatacaggatgttcattcacatgttatgtactttatgctttgaaggaaaaaatgcacatataaaagaaagcatctttggtgcttcaaayagtgtttatcatcacacarcaaaatatcactgctcactcttctccccaggcttctttacattccttctgccaagaaagctacaaataaagttatctaaccaaaatgtgtatttgcaatagcttccayggaa

SEQ ID NO: 84484 - DNA, 600 bp, Chicken  19866894382112_3
tcagctgttgttctgtttgcttctgctttttatctagctcttgtactctctcattcaaataggagagcttctgtagggaatatccacaaagatgtgttattattcaaaacttattgtcttaccttycagakaaatcattttagctgtaaactacttaagttactattcttaagtttacttttgtttacctctacatactttttttcctctcaatacaggatgttcattcacatgttatgtactttatgctttgaaggaaaaaatgcacatataaaagaaagcatctttggtgcttcaaayagtgtttatcatcacacarcaaaatatcactgctcactcttctccccaggcttctttacattccttctgccaagaaagctacaaataaagttatctaaccaaaatgtgtatttgcaatagcttccayggaaggaatataaaggagaaatgtttactgtttgttatcactaactcrtgaaasatacagctatagggagctaggaagaagatggaaaatacaatattcagataattcattggtgtatttttcattcatccattccatcattaattagcacctcaaacaaaacagttcttctc

SEQ ID NO: 84485 - DNA, 600 bp, Chicken  19866894382112_4
cttctgctttttatctagctcttgtactctctcattcaaataggagagcttctgtagggaatatccacaaagatgtgttattattcaaaacttattgtcttaccttycagakaaatcattttagctgtaaactacttaagttactattcttaagtttacttttgtttacctctacatactttttttcctctcaatacaggatgttcattcacatgttatgtactttatgctttgaaggaaaaaatgcacatataaaagaaagcatctttggtgcttcaaayagtgtttatcatcacacarcaaaatatcactgctcactcttctccccaggcttctttacattccttctgccaagaaagctacaaataaagttatctaaccaaaatgtgtatttgcaatagcttccayggaaggaatataaaggagaaatgtttactgtttgttatcactaactcrtgaaasatacagctatagggagctaggaagaagatggaaaatacaatattcagataattcattggtgtatttttcattcatccattccatcattaattagcacctcaaacaaaacagttcttctcagttgtattaatttcattt

SEQ ID NO: 84486 - DNA, 600 bp, Chicken  19866894382112_5
agakaaatcattttagctgtaaactacttaagttactattcttaagtttacttttgtttacctctacatactttttttcctctcaatacaggatgttcattcacatgttatgtactttatgctttgaaggaaaaaatgcacatataaaagaaagcatctttggtgcttcaaayagtgtttatcatcacacarcaaaatatcactgctcactcttctccccaggcttctttacattccttctgccaagaaagctacaaataaagttatctaaccaaaatgtgtatttgcaatagcttccayggaaggaatataaaggagaaatgtttactgtttgttatcactaactcrtgaaasatacagctatagggagctaggaagaagatggaaaatacaatattcagataattcattggtgtatttttcattcatccattccatcattaattagcacctcaaacaaaacagttcttctcagttgtattaatttcatttgcatcattagtgtgagcaccagatactaaatgatataaaatattattaatacatgcaataaaaaaagttttacatcacaaaatctacttaaataattgcataacaaca

SEQ ID NO: 84487 - DNA, 600 bp, Chicken  19866894382112_6
tacttttgtttacctctacatactttttttcctctcaatacaggatgttcattcacatgttatgtactttatgctttgaaggaaaaaatgcacatataaaagaaagcatctttggtgcttcaaayagtgtttatcatcacacarcaaaatatcactgctcactcttctccccaggcttctttacattccttctgccaagaaagctacaaataaagttatctaaccaaaatgtgtatttgcaatagcttccayggaaggaatataaaggagaaatgtttactgtttgttatcactaactcrtgaaasatacagctatagggagctaggaagaagatggaaaatacaatattcagataattcattggtgtatttttcattcatccattccatcattaattagcacctcaaacaaaacagttcttctcagttgtattaatttcatttgcatcattagtgtgagcaccagatactaaatgatataaaatattattaatacatgcaataaaaaaagttttacatcacaaaatctacttaaataattgcataacaacactgttattcaagacttcaaattcaattcatcttatataacaaaaatta

SEQ ID NO: 84488 - DNA, 600 bp, Chicken  19866894382112_7
tgtttacctctacatactttttttcctctcaatacaggatgttcattcacatgttatgtactttatgctttgaaggaaaaaatgcacatataaaagaaagcatctttggtgcttcaaayagtgtttatcatcacacarcaaaatatcactgctcactcttctccccaggcttctttacattccttctgccaagaaagctacaaataaagttatctaaccaaaatgtgtatttgcaatagcttccayggaaggaatataaaggagaaatgtttactgtttgttatcactaactcrtgaaasatacagctatagggagctaggaagaagatggaaaatacaatattcagataattcattggtgtatttttcattcatccattccatcattaattagcacctcaaacaaaacagttcttctcagttgtattaatttcatttgcatcattagtgtgagcaccagatactaaatgatataaaatattattaatacatgcaataaaaaaagttttacatcacaaaatctacttaaataattgcataacaacactgttattcaagacttcaaattcaattcatcttatataacaaaaattaaaatca

SEQ ID NO: 84489 - DNA, 600 bp, Chicken  19866894382112_8
tgagcaccagatactaaatgatataaaatattattaatacatgcaataaaaaaagttttacatcacaaaatctacttaaataattgcataacaacactgttattcaagacttcaaattcaattcatcttatataacaaaaattaaaatcagtattaatatttccattctgaaacatcttaaaccttttatcaatgagaaagctctttggaattaccagtatctcacacatccttcacatacaaatctgcctgggcaaactctgtttccaggcttctacagcagaagcaaatacacagctwtggacaatgatacataacttatgccacacctccctaggtttccaggaaactaatgatgtgatctttgtcacattgtttctacttcgttttagctagggaagggctaacatyattagtcactgccattattatgctgttttgaaaatactattagctattagaggagggttttttttttcccccattttgacatattaaacctgaatcaaagataagctaccaaataattcattatctaaattcaaactattctacattctccagttttctccccaaagtgttgaagtattgcgatgtgca

SEQ ID NO: 84490 - DNA, 600 bp, Chicken  19866894382112_9
tcaaattcaattcatcttatataacaaaaattaaaatcagtattaatatttccattctgaaacatcttaaaccttttatcaatgagaaagctctttggaattaccagtatctcacacatccttcacatacaaatctgcctgggcaaactctgtttccaggcttctacagcagaagcaaatacacagctwtggacaatgatacataacttatgccacacctccctaggtttccaggaaactaatgatgtgatctttgtcacattgtttctacttcgttttagctagggaagggctaacatyattagtcactgccattattatgctgttttgaaaatactattagctattagaggagggttttttttttcccccattttgacatattaaacctgaatcaaagataagctaccaaataattcattatctaaattcaaactattctacattctccagttttctccccaaagtgttgaagtattgcgatgtgcaggttatataaagaatagagtaacaataaacaaaatggagatgatgatctcctgtggcaaactacttactagtagccagataactgaaccataaacctgcagaacggttctg

SEQ ID NO: 84491 - DNA, 600 bp, Chicken  19866894382118_1
ctgcttgatagcaaaaggtggtgccagtttaccacactccattgctaagtcttgtgcaattcagttctccagctcttccttacgagaaagtctccatgcttctgtgcagccacctgcgcctgtctgtattttagtagctgatatttctgttcctactcccccaggtcaaaatcatcataatttttagatgcttagaaaatgtttcagtaatatatttccatgtgggagaaaaggaaaggtgtacgtctttgacgatttgatgttttaaagtattgattgaagctaatgaagaggtttcgktttaaaaacatcaggaaattgcttatttgttttatcatgaagtccaggagtctgtttacctcctaaagagtgggaaatgctaggttataaagccagatatatgttacacatttaatttgtttgccctgtagttcatcaaattattctataattgcttacattcatgcgtctccttacatgctttgtttatatacaagcatactcaatatgaaacctgaaaataattatacattgaagagctttcatagtaactgtggtaattctaacctaagtattttgctatgcagatttttttacagc

SEQ ID NO: 84492 - DNA, 542 bp, Chicken  19866894382120_1
aggattgtttcctggcaacttaaggccatttggctttatgcttaacattcataatgtgtaaaaagactctacagcaattttaatttacattcttagcaaggaaagaaaacagtcttaaatacttgggctaaatcctgggagtagccagttctagaaatatgctatataatctcccaaaagtgggtgaactgtgtgtggaacacaacagtgtaaggaatattatcatttatttggacatcattccataccagaatttgtgatgtgttacatgaagagctcaaaccgcatggcacacacagytatttgtagaaaactttccacttcttcatgctctgagactaacggtgggctgaattctcatggatttcatgaggaagtgacagctgaccacgaatttggcacagagaaagatcaacgttgttcttacagcaggggccattattttctaaagggcaagtaaacagtttcacagtcatgaatagaagtggacagaagagtatctgggccatcattcaacactaacttatctcttaagtgagatg

SEQ ID NO: 84493 - DNA, 599 bp, Chicken  19866894382125_1
  misc_feature (1)..(6): n is any nucleotide
nnnnnncgctgctggccccgtcccgcacacaccggggtgtgcagagatatggggtgggcagagacagggggtgacgcttcggggtctgcccataggggacagcacagcccccccggagctgaaatccaggcctggagcacagggctgggggcagagccgtgctggaaggatgacggatgtccccctcaccctccagggacaaagccctggctgcaatggggctgagccttccggagcccctgaaaacacagcagcaggccaaagcctggggagaaaggaagaaaagcttgatgcaggagrgagcagtcctgcatgacttgtcctggctgggacacagcgacacagacagaaagcagtgctggggtgggggcacccagggctctgccccctctcccttctgccaaaaggatcagactgagctctgggtggaagtctgtattcgatgtttaccagggatccaaaaacatgtacaaaaataaaggrtaaaatccagacttgccccttttcmtggggaggtcggtaggaacggcrcccagcactgcacctgccccaaaggaaggcagagcacccacgggcagcattaccaaaagcagggagct

SEQ ID NO: 84494 - DNA, 600 bp, Chicken  19866894382125_2
cctcaccctccagggacaaagccctggctgcaatggggctgagccttccggagcccctgaaaacacagcagcaggccaaagcctggggagaaaggaagaaaagcttgatgcaggagrgagcagtcctgcatgacttgtcctggctgggacacagcgacacagacagaaagcagtgctggggtgggggcacccagggctctgccccctctcccttctgccaaaaggatcagactgagctctgggtggaagtctgtattcgatgtttaccagggatccaaaaacatgtacaaaaataaaggrtaaaatccagacttgccccttttcmtggggaggtcggtaggaacggcrcccagcactgcacctgccccaaaggaaggcagagcacccacgggcagcattaccaaaagcagggagctgatccagcaacctcacacccccagagtccaaacattcgactcaagctgatgcgttgcagcccagactacacctgtgtgcctgcagagagcggatctaaagggaaaacctcctcactgcacgcagagctctgataacacacaaagcattggtgccccgggctgtgctgtgtgcggggcgggcgct

SEQ ID NO: 84495 - DNA, 600 bp, Chicken  19866894382125_3
ggctgcaatggggctgagccttccggagcccctgaaaacacagcagcaggccaaagcctggggagaaaggaagaaaagcttgatgcaggagrgagcagtcctgcatgacttgtcctggctgggacacagcgacacagacagaaagcagtgctggggtgggggcacccagggctctgccccctctcccttctgccaaaaggatcagactgagctctgggtggaagtctgtattcgatgtttaccagggatccaaaaacatgtacaaaaataaaggrtaaaatccagacttgccccttttcmtggggaggtcggtaggaacggcrcccagcactgcacctgccccaaaggaaggcagagcacccacgggcagcattaccaaaagcagggagctgatccagcaacctcacacccccagagtccaaacattcgactcaagctgatgcgttgcagcccagactacacctgtgtgcctgcagagagcggatctaaagggaaaacctcctcactgcacgcagagctctgataacacacaaagcattggtgccccgggctgtgctgtgtgcggggcgggcgctgagcacgcggtgcacaaacacccca

SEQ ID NO: 84496 - DNA, 600 bp, Chicken  19866894382125_4
cggagcccctgaaaacacagcagcaggccaaagcctggggagaaaggaagaaaagcttgatgcaggagrgagcagtcctgcatgacttgtcctggctgggacacagcgacacagacagaaagcagtgctggggtgggggcacccagggctctgccccctctcccttctgccaaaaggatcagactgagctctgggtggaagtctgtattcgatgtttaccagggatccaaaaacatgtacaaaaataaaggrtaaaatccagacttgccccttttcmtggggaggtcggtaggaacggcrcccagcactgcacctgccccaaaggaaggcagagcacccacgggcagcattaccaaaagcagggagctgatccagcaacctcacacccccagagtccaaacattcgactcaagctgatgcgttgcagcccagactacacctgtgtgcctgcagagagcggatctaaagggaaaacctcctcactgcacgcagagctctgataacacacaaagcattggtgccccgggctgtgctgtgtgcggggcgggcgctgagcacgcggtgcacaaacaccccaagaggtttctccagccatacaag

SEQ ID NO: 84497 - DNA, 600 bp, Chicken  19866894382131_1
tagagtacctccttgagaatgaagttatcccagtgtctacacaaatattttctggccttcagctgttgctccagccatcaactgctcggtgatgggcacagcagatcttccttcatggatggatggaaaaagcaaaacccaaagtgatgttcactgaaatttttacagtgctgcaggaagcagtgaaaagagtgccgttgggttacaggcatggctatattacctcgtaactcaaggaataatgttgtctggggatgctggcagtgctgggatgtagcatgaatcataagggaaggcatygtaaggaagtaaggaggtaacataggtgcttcatgacgatggctgtgttgaccccagggcagggcatgggtctgcaggtyatagctttatgaatgagaacagccccacagaaacaaactgagagcacagggaggagcgtaggcagtaaggagaggatggagaggattcccccagcctgcagagactgagtggtggtgtgggacagttagtaaaatacttgtggctccattcaaatagagatttcttttttgtctttttctcattctactggttagattttcagcagcagcattctgtaga

SEQ ID NO: 84498 - DNA, 600 bp, Chicken  19866894382131_2
actgctcggtgatgggcacagcagatcttccttcatggatggatggaaaaagcaaaacccaaagtgatgttcactgaaatttttacagtgctgcaggaagcagtgaaaagagtgccgttgggttacaggcatggctatattacctcgtaactcaaggaataatgttgtctggggatgctggcagtgctgggatgtagcatgaatcataagggaaggcatygtaaggaagtaaggaggtaacataggtgcttcatgacgatggctgtgttgaccccagggcagggcatgggtctgcaggtyatagctttatgaatgagaacagccccacagaaacaaactgagagcacagggaggagcgtaggcagtaaggagaggatggagaggattcccccagcctgcagagactgagtggtggtgtgggacagttagtaaaatacttgtggctccattcaaatagagatttcttttttgtctttttctcattctactggttagattttcagcagcagcattctgtagaagcttcatgatggatcttgaccatagcagtaaaataatatgaatttcttaatatcgtttcatgtatatttctcaatacct

SEQ ID NO: 84499 - DNA, 599 bp, Chicken  19866894382139_1
  misc_feature (1)..(85): n is any nucleotide
nnnnnnnnnnnnnnnnnnnnnnnnnnnnnnnnnnnnnnnnnnnnnnnnnnnnnnnnnnnnnnnnnnnnnnnnnnnnnnnnnnnnntgagacattttggtaaacccactgtggacaggacttctccagcttgatacttccaccaagtaagcacgctgcttccatccacagggcgaaggaactgcatcggagagagcctcgccaagatggagctgtttgtcttctttgtagggctgctgcagacgttcactttccaacctcagccgggagtttcagaggccgacctggacctgaccgtcccygaaacgactttcacattaaggcctcggcctcaggcgacctgtgccatcctgcacgaatagccaaggcctgctgcggggcggccaagcagggacgctgccaaggcccatcttagctatgcwagggctcatcaccccatcccgacatgccacgctctgtcacatttccctcccactgtctccgtccactcccacccctacacttccccattaggtcactgacccgctctttgctcccatgctgtgggggggtgcagtcaatcaatgagaaagcacaatcctggtgaccctcccagagagag

SEQ ID NO: 84500 - DNA, 600 bp, Chicken  19866894382139_2
tctccagcttgatacttccaccaagtaagcacgctgcttccatccacagggcgaaggaactgcatcggagagagcctcgccaagatggagctgtttgtcttctttgtagggctgctgcagacgttcactttccaacctcagccgggagtttcagaggccgacctggacctgaccgtcccygaaacgactttcacattaaggcctcggcctcaggcgacctgtgccatcctgcacgaatagccaaggcctgctgcggggcggccaagcagggacgctgccaaggcccatcttagctatgcwagggctcatcaccccatcccgacatgccacgctctgtcacatttccctcccactgtctccgtccactcccacccctacacttccccattaggtcactgacccgctctttgctcccatgctgtgggggggtgcagtcaatcaatgagaaagcacaatcctggtgaccctcccagagagagacactgagcagctgaaggaccagggggtgtgtgtccgtgagatgtaggtgtgacatccacacttcaacaccaaagaagtgaggctcacaacactgcagaaatctgcctgaaattcccagcc

SEQ ID NO: 84501 - DNA, 600 bp, Chicken  19866894382151_1
caaagtgaaatgcttcatggccatccgagatcaataagtcaaacaactttgcatcattttgacaaatggagtcaacgtgtacttttattgaaattagggtcggagtgggaaatggagatatcacagctaatctgttgaaagatttctccttttcaagaaacatcagtctttccacagctcagcctgaggttcctccccgtccagacatgacctttcctaggcatcaagggcagtggtaggggatgtactagtgacaggtgatccatttaggagagtgttgtcacctgttgagaccatagygcttgactaacgtgctgtcatgcratgatctaagatggaaaggtgaataacttcattttttacactcctattttaaaatatattttattataatattttattgtgttttgcactgtttggggctcgtatagagtcagttttctttgtaatagaagctggtgtagcactgtgtttcagatttatgatgaaaacaatgataacacacraawgccttagttgttgctgagcagtgattactcagagtcaaggacttttttggttctcatgctgccctgccagtgagtagatgggatgggaaaa

SEQ ID NO: 84502 - DNA, 600 bp, Chicken  19866894382151_2
ccgagatcaataagtcaaacaactttgcatcattttgacaaatggagtcaacgtgtacttttattgaaattagggtcggagtgggaaatggagatatcacagctaatctgttgaaagatttctccttttcaagaaacatcagtctttccacagctcagcctgaggttcctccccgtccagacatgacctttcctaggcatcaagggcagtggtaggggatgtactagtgacaggtgatccatttaggagagtgttgtcacctgttgagaccatagygcttgactaacgtgctgtcatgcratgatctaagatggaaaggtgaataacttcattttttacactcctattttaaaatatattttattataatattttattgtgttttgcactgtttggggctcgtatagagtcagttttctttgtaatagaagctggtgtagcactgtgtttcagatttatgatgaaaacaatgataacacacraawgccttagttgttgctgagcagtgattactcagagtcaaggacttttttggttctcatgctgccctgccagtgagtagatgggatgggaaaagatctgggacaggtggcccacact

SEQ ID NO: 84503 - DNA, 585 bp, Chicken  19866894382151_3
atgacctttcctaggcatcaagggcagtggtaggggatgtactagtgacaggtgatccatttaggagagtgttgtcacctgttgagaccatagygcttgactaacgtgctgtcatgcratgatctaagatggaaaggtgaataacttcattttttacactcctattttaaaatatattttattataatattttattgtgttttgcactgtttggggctcgtatagagtcagttttctttgtaatagaagctggtgtagcactgtgtttcagatttatgatgaaaacaatgataacacacraawgccttagttgttgctgagcagtgattactcagagtcaaggacttttttggttctcatgctgccctgccagtgagtagatgggatgggaaaagatctgggacaggtggcccacactgaccataccatatgacattgtgctcagcaataaaagctgaaggaaagaataagcatttagagttacattcatatatgcattcagagtatacattcatatatattcaaataacattcagagttacggtgtttattttcctaagtaactattaaatgtgatgagctcta

SEQ ID NO: 84504 - DNA, 582 bp, Chicken  19866894382151_4
acctttcctaggcatcaagggcagtggtaggggatgtactagtgacaggtgatccatttaggagagtgttgtcacctgttgagaccatagygcttgactaacgtgctgtcatgcratgatctaagatggaaaggtgaataacttcattttttacactcctattttaaaatatattttattataatattttattgtgttttgcactgtttggggctcgtatagagtcagttttctttgtaatagaagctggtgtagcactgtgtttcagatttatgatgaaaacaatgataacacacraawgccttagttgttgctgagcagtgattactcagagtcaaggacttttttggttctcatgctgccctgccagtgagtagatgggatgggaaaagatctgggacaggtggcccacactgaccataccatatgacattgtgctcagcaataaaagctgaaggaaagaataagcatttagagttacattcatatatgcattcagagtatacattcatatatattcaaataacattcagagttacggtgtttattttcctaagtaactattaaatgtgatgagctcta

SEQ ID NO: 84505 - DNA, 599 bp, Chicken  19866894382152_1
  misc_feature (1)..(28): n is any nucleotide
nnnnnnnnnnnnnnnnnnnnnnnnnnnncactgcttgcagcgagcgcagaatgcttccacccccacattcattcctggtgaaatcccggctttgtgttttgtattacaattcatcacttacgccccaggaatcctcaatcacaggtaataggtatttaagcagtttccgccctgaatgcagaccaaaacatcagaaacattttcaatctgtcaacgttttccccatcctcttcttttctgaatatcgcggacaataagaaagagccgcggcggatcagaaacctgcaatcccattctgcraggcaatttgaggctttgcaaattgttttcactcggatgcaaaaggaaaccaaggggttgggaggctcacaggtgacgtgtgtctctcgggcccctcttttagggtagagccctcctgaaatctgtgccccctctgcctgctggatgacgccggcagcgccccgaccccaggttcagtctctattactccacaacaacagttccattttccttcagaagcaaagcaatttcaaagcctcgcaatgctcctcattacgcctgttgtttatgagtgttgcgtgatcactggagtatatgtg

SEQ ID NO: 84506 - DNA, 600 bp, Chicken  19866894382152_2
gggttgggaggctcacaggtgacgtgtgtctctcgggcccctcttttagggtagagccctcctgaaatctgtgccccctctgcctgctggatgacgccggcagcgccccgaccccaggttcagtctctattactccacaacaacagttccattttccttcagaagcaaagcaatttcaaagcctcgcaatgctcctcattacgcctgttgtttatgagtgttgcgtgatcactggagtatatgtgaagaatatttgccgtttctcggagtttttgagctccagccagaatgacatccatraaagcacaccgccaccactctccttacccagccctgcatttctctgaatgttgcctgagcctcattgtgcgaaactctgaaatgcagaatttctgcattgcgctctggctgtgattgaaaaaaagtctggtcaaaacatttcggccctgtctaatttattgtccaccgtaaatgcccatggagtgaactcatccttcttatttgccaaactactgacccaatcactttctgtgctgctggatcaattttaacttaaattgcttttgtctgcataaattacatcccttggtgagcaggagg

SEQ ID NO: 84507 - DNA, 552 bp, Chicken  19866894382152_3
attttaacttaaattgcttttgtctgcataaattacatcccttggtgagcaggagggctctgcccccatccatacacagcttgcagcatccgagaagttgatccttcggtttcgggaacctctgagtatttcagataacacttaaaggattgggggtttcttttgtgttgcactgactgtattgtgtgtgttattctctgcactgagatcagcagaaccattctcccaagcaaaaagtgtggcccagcatgaagccaggggttggactcgatgaccctttccaacttgggatctccttcratcccataacaatctgatgactgtctgcaggaccaggcacagacgtgccrtgcctctcatttgggtgcagcaggaattaagcgtggtactcacgggcagcattactggagatgtggctgcacaggagggctcagacccatccccgtcccggtggacggctgtcacagctctgagctccgcatccatccgaaatctcacactgacaatcagctgcaattaaccgcttccacagctgctttccaaagtccaaag

SEQ ID NO: 84508 - DNA, 502 bp, Chicken  19866894382152_4
aggagggctctgcccccatccatacacagcttgcagcatccgagaagttgatccttcggtttcgggaacctctgagtatttcagataacacttaaaggattgggggtttcttttgtgttgcactgactgtattgtgtgtgttattctctgcactgagatcagcagaaccattctcccaagcaaaaagtgtggcccagcatgaagccaggggttggactcgatgaccctttccaacttgggatctccttcratcccataacaatctgatgactgtctgcaggaccaggcacagacgtgccrtgcctctcatttgggtgcagcaggaattaagcgtggtactcacgggcagcattactggagatgtggctgcacaggagggctcagacccatccccgtcccggtggacggctgtcacagctctgagctccgcatccatccgaaatctcacactgacaatcagctgcaattaaccgcttccacagctgctttccaaagtccaaag

SEQ ID NO: 84509 - DNA, 600 bp, Chicken  19866894382154_1
ctacatttgctgaatgtgcattttccatctatttcttgttccaaaggaagactcctggtcagatctatttcatgtcatttggtcagacatttgcactacttctcttaagacactgaattcagcaaccgcagtgaagctctgtagatgtcatgagttgaagctgaccacacttcattatttatcatagatgtgtttaaatagcaaatattcacagacagtatgaagtagaagtatgcagagatccctttcacatctggaattctaagtgacaaagtagcaaactgctctttcagttctgcygtgctgctcttgtcttaagtacagttcatgcttggccaatattaaactagcagaaaagtcagaacagcacacagtatttgcttaggatrgttcagaaagaaaagaaaaggtcctaagttaaaatgagatagaaaggttgatgtttcataaagyttaaccaggtccggtatataaaagtgatgtgatgtgggtattaaaaaaaacacaacaccttttcattcatttagaaattcacactgcttctgacaatacagactaattgaactcgttattgaagaacagtcaggcattggatggtat

SEQ ID NO: 84510 - DNA, 600 bp, Chicken  19866894382154_2
tttgcactacttctcttaagacactgaattcagcaaccgcagtgaagctctgtagatgtcatgagttgaagctgaccacacttcattatttatcatagatgtgtttaaatagcaaatattcacagacagtatgaagtagaagtatgcagagatccctttcacatctggaattctaagtgacaaagtagcaaactgctctttcagttctgcygtgctgctcttgtcttaagtacagttcatgcttggccaatattaaactagcagaaaagtcagaacagcacacagtatttgcttaggatrgttcagaaagaaaagaaaaggtcctaagttaaaatgagatagaaaggttgatgtttcataaagyttaaccaggtccggtatataaaagtgatgtgatgtgggtattaaaaaaaacacaacaccttttcattcatttagaaattcacactgcttctgacaatacagactaattgaactcgttattgaagaacagtcaggcattggatggtattaagtacataatgaattctataaatcatttaaatggatgagattcactagatggttttcattgggaaaacagaaccttagggcatacat

SEQ ID NO: 84511 - DNA, 600 bp, Chicken  19866894382154_3
gttgaagctgaccacacttcattatttatcatagatgtgtttaaatagcaaatattcacagacagtatgaagtagaagtatgcagagatccctttcacatctggaattctaagtgacaaagtagcaaactgctctttcagttctgcygtgctgctcttgtcttaagtacagttcatgcttggccaatattaaactagcagaaaagtcagaacagcacacagtatttgcttaggatrgttcagaaagaaaagaaaaggtcctaagttaaaatgagatagaaaggttgatgtttcataaagyttaaccaggtccggtatataaaagtgatgtgatgtgggtattaaaaaaaacacaacaccttttcattcatttagaaattcacactgcttctgacaatacagactaattgaactcgttattgaagaacagtcaggcattggatggtattaagtacataatgaattctataaatcatttaaatggatgagattcactagatggttttcattgggaaaacagaaccttagggcatacatctgcattacctgcttgcagctaaaatcttctctattgctttcagttgtgatattctttttttct

SEQ ID NO: 84512 - DNA, 600 bp, Chicken  19866894382157_1
aaaggctgttattcagcctttgttggattgttttgggatatgaatctcactgtatctgtagttattgcagttcattcagcactgctattaaataccaggagatttgtcctgggtgtctggggcatccatttgtaaactgctgttcagtcaatggtcccaagttacaaaacataccatcttcctgctgttaatagggaaagctaattggctgtgcaccacagtgtgtttagaaaactgtcatcttttcaaaagtaattatataaattcttaggaaaaggggcagatctccgtgacaccaartgygttccaagaaaaacaaacaagactctgttaccaatttcctgccctaacaacactacagctttcatgtacatccttggctactcagtatatatacagagtctgtttttattccctaataatctgttctttggtggaaggtgattcatgctctgttacatctcacccttcttttaaaggacattatgcacataggatattacacaagctaaagtcttcttagagaatgcgacagttctgttagtcattatacagatggacaaggcagcagctgaagttccagctttaagcagcctcgtg

SEQ ID NO: 84513 - DNA, 600 bp, Chicken  19866894382157_2
ggctgttattcagcctttgttggattgttttgggatatgaatctcactgtatctgtagttattgcagttcattcagcactgctattaaataccaggagatttgtcctgggtgtctggggcatccatttgtaaactgctgttcagtcaatggtcccaagttacaaaacataccatcttcctgctgttaatagggaaagctaattggctgtgcaccacagtgtgtttagaaaactgtcatcttttcaaaagtaattatataaattcttaggaaaaggggcagatctccgtgacaccaartgygttccaagaaaaacaaacaagactctgttaccaatttcctgccctaacaacactacagctttcatgtacatccttggctactcagtatatatacagagtctgtttttattccctaataatctgttctttggtggaaggtgattcatgctctgttacatctcacccttcttttaaaggacattatgcacataggatattacacaagctaaagtcttcttagagaatgcgacagttctgttagtcattatacagatggacaaggcagcagctgaagttccagctttaagcagcctcgtgaat

SEQ ID NO: 84514 - DNA, 599 bp, Chicken  19866894382161_1
  misc_feature (1)..(19): n is any nucleotide
nnnnnnnnnnnnnnnnnnntgatgcgtgtttacagactttttattttctaattgtagaattattaaggttggagaagacctctaagatcatctagtccaaccatgcacctaccacccatatttcccactagatcatgttcctaagtactgcgtctgcccttctttaaacacctccacggacaatgactccactgcttcctcatgtttcagaaaacaaaatgcagcttttagtcaaaattgctgatcacttgctgagcatccgggtcagcagtcagtgacccagaataatagaatcatagmatcacagaatggcctgggttgcaaaggcccacagtgctcayccagttccaaccccctgctatgtgcagggtcgccaaccagcagcccaggctgcccagagccacatccagcctggccttgaatgcctgcagggatggggcatccacagcctccttgggcaacctgttcagtgcgtcaccaccctctgggggaaaagcttcctcctcatatccaacctaaacctcccccgtctcagtttaaaaccattcccccttgtcctatcaccatccaccctcgtaaacagctgttaagacggctga

SEQ ID NO: 84515 - DNA, 600 bp, Chicken  19866894382161_2
tattttctaattgtagaattattaaggttggagaagacctctaagatcatctagtccaaccatgcacctaccacccatatttcccactagatcatgttcctaagtactgcgtctgcccttctttaaacacctccacggacaatgactccactgcttcctcatgtttcagaaaacaaaatgcagcttttagtcaaaattgctgatcacttgctgagcatccgggtcagcagtcagtgacccagaataatagaatcatagmatcacagaatggcctgggttgcaaaggcccacagtgctcayccagttccaaccccctgctatgtgcagggtcgccaaccagcagcccaggctgcccagagccacatccagcctggccttgaatgcctgcagggatggggcatccacagcctccttgggcaacctgttcagtgcgtcaccaccctctgggggaaaagcttcctcctcatatccaacctaaacctcccccgtctcagtttaaaaccattcccccttgtcctatcaccatccaccctcgtaaacagctgttaagacggctgagtgtgaaatgcagtccagccattggagggcgtgtgacccaga

SEQ ID NO: 84516 - DNA, 600 bp, Chicken  19866894382162_1
cagggcctgctccagtgctggctgagcacaacaggctcagaattcaagtctataagcgacctttccagctaatggagtgttcctagagggaaagggaacacacgacagactttttgtctataaacacggttatagggatgggggaagaagaaggtaacaaattcttcttgaattgtcaaatttttctctacggccctaaagatgggaagtgtgtaaagaaggggccaagcaaccaaaatgcagctggcactccactaaatgctgcaagataccccatacttgggcctttcaccccaccaygaaaatgcktttaaaaaaatccccaaagcatttgtcttccttactgctgctgctctataagaaagaggacacttcttatttaacgccccatcgagcgctttgtgtcagtaagggatgtttccctggtagacctattgtcatctgccctgcacccacctcctgcactactagcaatataaccacctaaagagccaaagaatgactttaccccctcatgtgcacacaagttatccagcacatccaaaacatccatctctgtttcagagcagatccaggaacttctaagtggctgcagatggg

SEQ ID NO: 84517 - DNA, 600 bp, Chicken  19866894382162_2
ctccagtgctggctgagcacaacaggctcagaattcaagtctataagcgacctttccagctaatggagtgttcctagagggaaagggaacacacgacagactttttgtctataaacacggttatagggatgggggaagaagaaggtaacaaattcttcttgaattgtcaaatttttctctacggccctaaagatgggaagtgtgtaaagaaggggccaagcaaccaaaatgcagctggcactccactaaatgctgcaagataccccatacttgggcctttcaccccaccaygaaaatgcktttaaaaaaatccccaaagcatttgtcttccttactgctgctgctctataagaaagaggacacttcttatttaacgccccatcgagcgctttgtgtcagtaagggatgtttccctggtagacctattgtcatctgccctgcacccacctcctgcactactagcaatataaccacctaaagagccaaagaatgactttaccccctcatgtgcacacaagttatccagcacatccaaaacatccatctctgtttcagagcagatccaggaacttctaagtggctgcagatggggcatcttcc

SEQ ID NO: 84518 - DNA, 600 bp, Chicken  19866894382166_1
tgaatgcaaatgtcctcacccaggcagactgagctgtaggacggtgctttgtggactctcaaaagagcagagcagattgccctttcagcagcctccccaagtctgttatcagtaattttatctcttagggaattcaggaatttttcagtctcagtttattgcttttgatcttctgttcacatgatagaaccaaactgtgaattgccgtaatgtgcatcggtgtgccagcatttgagtgctccaacagcagggtgcactctggtggcagtgctctcctctcccttgtctggtgtcagatcyagtctggattttgcccgacgtgagcctggctcatccctgctctgcttaagctgctgtagtgggaatgttttggaaatcaaagcaaggtcggtgctaaatgctgaacagccagtgagcaaaaggctggtactaatctgagctaaattggagacataaagatcaaatgaatgtaagaccagctcccagcactgagagcaaattaacccagcgaggccaggcgggaggttctgatgaaccccgtgcacctgcaaatgatgctgtgcatttcttcgcacacagacgtgccaggccaaagcaaac

SEQ ID NO: 84519 - DNA, 600 bp, Chicken  19866894382172_1
tctcatatttatctcacagatgggaaagaatacatgtagtcagataactccctagagattgcacatgtggattttgaagagtttaacttattccagtgaaggctaacattaacttgcaatcaaaaatttccttcctgaaccacattctttctgatgaaattaaaatgatgtatttttattaagtcactactgatctaagtaggacaaactcccagggcaagtacagaaaattttgctaatctcatgaattttcccttaatgagtcatagcatcagttcaacacagacaaatgctgtcagyctcttccagaaaatacacctagttatcccatctatgtttttattagtgttaaaaaaagatttctaagcgtggtgttagaaaagcctattttttaacctaattcaaaactggaaatgaatcattttcttgcattcttttgtttcaatagatataggtgtggagctgctttaaggcagtgactgcttcctgtcataccagttatggcagtgctgttagcaaaagaggggggggggggggcgggttaaattctcttctagtgtttgaacaactaaaacttctactgaacaaatgaagcattct

SEQ ID NO: 84520 - DNA, 600 bp, Chicken  19866894382180_1
aattttaacaatgatgtgacagtttaatggaagaccatggagaccaactactttctatgctgttacgaggtgagataaccatgacaaaatgatttctgcatgtgtctatagggagcccattatgagtctatcatactggcattacagtgtgaaattatgatggggaaaaaatcattcaaatttgtactgcatgacaatgttgttccatcatgagttaatgacatataacaactgaaatgcaaggctttttttacctgtatcctgattagaaatctgtctaaacactaagttttgattcaytcgttgtgcaaaaaaacctgatgtagatgtaaattatcagaattgccttcagttaatcacatattcttctctaagcagaaaaattctgccttcaggctaaatggtgcttttttgcactttcacaatcatcagaaatttatcttgtacagataaactaagcaaacataaacacataactagatgtcaaccatctgtgttcctataatccaaagaaatagagtaaaaattatttctcagttgaatttccatttgatttctccaaggcaataattttcatgtatatatcaacttggaattttt

SEQ ID NO: 84521 - DNA, 600 bp, Chicken  19866894382182_1
ccagcacagggcagagggggggcccaattaatgctcatcactgcccaggcgcaggccaggccgatgtcagagcaaacagtgacggctctgacacgatacctggtgcttggggtgattggcagcctgcagccagtggtgccaaaagcacgaaccccccctgcaatcagcggcactgcagcgtgtcccccccatgggaggagatggcagcccctcgaccaggtgccgagcaccaggcaggttccatgcccagccagctccagctgaggggctctgcagagcctgtccagcagatcctgaccrccagcagcctcagagatcagcaatagtggcactggcttgtcacaggctgcactgtcctcaccctgcagctgctctgacagccccaagcaatgaggtacccaccatgtcccagtgcctcccacccaaaattgacaagggaaacagatgataaaggtcgaggccaaatccttcacagagagctgctggcttgagctggctcaggatgtccatttgttgttaccagtaaatagccatcccagcagagcactctgaacatcctcaatcataggggatgtgataggacaagggcgaatggtttta

SEQ ID NO: 84522 - DNA, 599 bp, Chicken  19866894382187_1
  misc_feature (1)..(32): n is any nucleotide
nnnnnnnnnnnnnnnnnnnnnnnnnnnnnnnntgaactccctataatgcatccacataacttgatttgagagtgtaaatcccattagcctgaatggcgatcttctctgcctctcatttacccatttgatcctgcaagcactaacagccgatctcgtctccctttgaaagcgataaatagtcatccgacttcctctaaatggctctcagccgccttccagatcgttccttccactgtcctgcatacagcaaggagcaaggcaatgtgcagaagacaggaaattgggtttgcaaactggggraaaaaaggtgaaaggctgcaagaaatatttccaccaaccctgcgcctgctagcaacaggagaaatatttgagcgcctcgctgaggatgtaagaaaatctttccactgcagtgaaggaggatctgggtgaagattaagggttgctattttttttctgttaatgacttgctttgtttccaactgaaagaagttggttagaggataagccaatggaccctrcactgtctgcctgcaatgtggggcttgaagccaattggaaatgactcttcagaaggtaccatcttggacacrgcaccagac

SEQ ID NO: 84523 - DNA, 600 bp, Chicken  19866894382187_10
aagaccttgtggcaatgtggacatgcaagagatagaaacataatgcaacaaattagtttcaacacacagaaatgaggtagtccaggctccatatacattcagcagtgctggtttttctctctcctttgkctctacttttgtctcttcttttgaaatgygttgcctgattttatgggaaaactttgcaagcagaacctattagaattcaaccagccacctacctggtttgggtacgcaagcatatgttctttgcatacatgcaggtaaaacagtgtttatgagaacgtgtgagagagggamragttaggggtgccatgcagatatgatcaaattcatccattctgcgtgattcgatgcaagctcgtggtgttatatcaagaagcaaattaggtttattatatgctgagaagatgctttggtttttagtgatggtattgtgaagtaggagaaatttgatctaatgtcatcacagaaaatgaagacctggagcaaaaaataatttgtctttaggtacttcggaaataatcaaacagttcatcattacagtttcaagtgatcccatcaactcttttccaaatagcagctaagtgaatttctatt

SEQ ID NO: 84524 - DNA, 600 bp, Chicken  19866894382187_11
agaccttgtggcaatgtggacatgcaagagatagaaacataatgcaacaaattagtttcaacacacagaaatgaggtagtccaggctccatatacattcagcagtgctggtttttctctctcctttgkctctacttttgtctcttcttttgaaatgygttgcctgattttatgggaaaactttgcaagcagaacctattagaattcaaccagccacctacctggtttgggtacgcaagcatatgttctttgcatacatgcaggtaaaacagtgtttatgagaacgtgtgagagagggamragttaggggtgccatgcagatatgatcaaattcatccattctgcgtgattcgatgcaagctcgtggtgttatatcaagaagcaaattaggtttattatatgctgagaagatgctttggtttttagtgatggtattgtgaagtaggagaaatttgatctaatgtcatcacagaaaatgaagacctggagcaaaaaataatttgtctttaggtacttcggaaataatcaaacagttcatcattacagtttcaagtgatcccatcaactcttttccaaatagcagctaagtgaatttctatta

SEQ ID NO: 84525 - DNA, 552 bp, Chicken  19866894382187_12
atttgtctttaggtacttcggaaataatcaaacagttcatcattacagtttcaagtgatcccatcaactcttttccaaatagcagctaagtgaatttctattataacctgaaacccaccattaatttgaaaaccatccgtgccgcgattcacgtctttccaatctgtgtgttttataacctgcccagaataacagtcgtgctcacctccattgagaggggaaaaaatatgtttagaaatgggagaactttattctttttagtgaagtatcccagtgagctgcgactttcttgtccttcawatgtaaaaattcatcaggctctctctgttttcacagagtaactataatctgtttgatgtccaccttccctcttcctaccagctgcttacccttttctgcagttgcatgcacattcgtattttgtcatgtctgaattcagacccacagtctggaaatgccatgtacgtgcctaaatgtacttatgtgagaagtggagttaagcatatggctacatgattttctatgttaaaaaaaaatgccattcagtaaatt

SEQ ID NO: 84526 - DNA, 599 bp, Chicken  19866894382187_2
  misc_feature (1)..(31): n is any nucleotide
nnnnnnnnnnnnnnnnnnnnnnnnnnnnnnntgaactccctataatgcatccacataacttgatttgagagtgtaaatcccattagcctgaatggcgatcttctctgcctctcatttacccatttgatcctgcaagcactaacagccgatctcgtctccctttgaaagcgataaatagtcatccgacttcctctaaatggctctcagccgccttccagatcgttccttccactgtcctgcatacagcaaggagcaaggcaatgtgcagaagacaggaaattgggtttgcaaactggggrwaaaaaggtgaaaggctgcaagaaatatttccaccaaccctgcgcctgctagcaacaggagaaatatttgagcgcctcgctgaggatgtaagaaaatctttccactgcagtgaaggaggatctgggtgaagattaagggttgctattttttttctgttaatgacttgctttgtttccaactgaaagaagttggttagaggataagccaatggaccctrcactgtctgcctgcaatgtggggcttgaagccaattggaaatgactcttcagaaggtaccatcttggacacrgcaccagaca

SEQ ID NO: 84527 - DNA, 600 bp, Chicken  19866894382187_3
gatcgttccttccactgtcctgcatacagcaaggagcaaggcaatgtgcagaagacaggaaattgggtttgcaaactggggraaaaaaggtgaaaggctgcaagaaatatttccaccaaccctgcgcctgctagcaacaggagaaatatttgagcgcctcgctgaggatgtaagaaaatctttccactgcagtgaaggaggatctgggtgaagattaagggttgctattttttttctgttaatgacttgctttgtttccaactgaaagaagttggttagaggataagccaatggaccctrcactgtctgcctgcaatgtggggcttgaagccaattggaaatgactcttcagaaggtaccatcttggacacrgcaccagacacctatccggtcggaatacactgccartgaaaggakgatttcttttcctgctctgcctcataagaggatattcttgcttctccacatgtgaagggaagatgggtccctcccatgsggaatgttactgctggccatcacttcctttctgaaagccccatttgaaaaggaggaaatagttggtggaggaagttcctgaaaaggaatctttcaaatccttat

SEQ ID NO: 84528 - DNA, 600 bp, Chicken  19866894382187_4
aaactggggraaaaaaggtgaaaggctgcaagaaatatttccaccaaccctgcgcctgctagcaacaggagaaatatttgagcgcctcgctgaggatgtaagaaaatctttccactgcagtgaaggaggatctgggtgaagattaagggttgctattttttttctgttaatgacttgctttgtttccaactgaaagaagttggttagaggataagccaatggaccctrcactgtctgcctgcaatgtggggcttgaagccaattggaaatgactcttcagaaggtaccatcttggacacrgcaccagacacctatccggtcggaatacactgccartgaaaggakgatttcttttcctgctctgcctcataagaggatattcttgcttctccacatgtgaagggaagatgggtccctcccatgsggaatgttactgctggccatcacttcctttctgaaagccccatttgaaaaggaggaaatagttggtggaggaagttcctgaaaaggaatctttcaaatccttatttttgtcagttttttttttttctttcaggggacacccaatacgatggaaataattggcgtggctgcctcaag

SEQ ID NO: 84529 - DNA, 600 bp, Chicken  19866894382187_5
atttccaccaaccctgcgcctgctagcaacaggagaaatatttgagcgcctcgctgaggatgtaagaaaatctttccactgcagtgaaggaggatctgggtgaagattaagggttgctattttttttctgttaatgacttgctttgtttccaactgaaagaagttggttagaggataagccaatggaccctrcactgtctgcctgcaatgtggggcttgaagccaattggaaatgactcttcagaaggtaccatcttggacacrgcaccagacacctatccggtcggaatacactgccartgaaaggakgatttcttttcctgctctgcctcataagaggatattcttgcttctccacatgtgaagggaagatgggtccctcccatgsggaatgttactgctggccatcacttcctttctgaaagccccatttgaaaaggaggaaatagttggtggaggaagttcctgaaaaggaatctttcaaatccttatttttgtcagttttttttttttctttcaggggacacccaatacgatggaaataattggcgtggctgcctcaagtgatggaaaaagtacagaaaactgcaaggggtgtga

SEQ ID NO: 84530 - DNA, 600 bp, Chicken  19866894382187_6
aaccctgcgcctgctagcaacaggagaaatatttgagcgcctcgctgaggatgtaagaaaatctttccactgcagtgaaggaggatctgggtgaagattaagggttgctattttttttctgttaatgacttgctttgtttccaactgaaagaagttggttagaggataagccaatggaccctrcactgtctgcctgcaatgtggggcttgaagccaattggaaatgactcttcagaaggtaccatcttggacacrgcaccagacacctatccggtcggaatacactgccartgaaaggakgatttcttttcctgctctgcctcataagaggatattcttgcttctccacatgtgaagggaagatgggtccctcccatgsggaatgttactgctggccatcacttcctttctgaaagccccatttgaaaaggaggaaatagttggtggaggaagttcctgaaaaggaatctttcaaatccttatttttgtcagttttttttttttctttcaggggacacccaatacgatggaaataattggcgtggctgcctcaagtgatggaaaaagtacagaaaactgcaaggggtgtgacagcaagaa

SEQ ID NO: 84531 - DNA, 600 bp, Chicken  19866894382187_7
ggaggatctgggtgaagattaagggttgctattttttttctgttaatgacttgctttgtttccaactgaaagaagttggttagaggataagccaatggaccctrcactgtctgcctgcaatgtggggcttgaagccaattggaaatgactcttcagaaggtaccatcttggacacrgcaccagacacctatccggtcggaatacactgccartgaaaggakgatttcttttcctgctctgcctcataagaggatattcttgcttctccacatgtgaagggaagatgggtccctcccatgsggaatgttactgctggccatcacttcctttctgaaagccccatttgaaaaggaggaaatagttggtggaggaagttcctgaaaaggaatctttcaaatccttatttttgtcagttttttttttttctttcaggggacacccaatacgatggaaataattggcgtggctgcctcaagtgatggaaaaagtacagaaaactgcaaggggtgtgacagcaagaaaaccagcttcttctccatttattgtacaatatttatcatcaacccgttttgtatattttgctttcttttgtgtaatctt

SEQ ID NO: 84532 - DNA, 600 bp, Chicken  19866894382187_8
ggggttgaaaacgatgtgatttttctcctttgagtagttgccaaaaaagcacttacgtcggagtattagtgtatcatttggctagcacatcacataatggtttttttacagcaagtatttaaccatgttttcatcctgtgggaaagaatgatgggtctgttttgtaaaaataagaccttgtggcaatgtggacatgcaagagatagaaacataatgcaacaaattagtttcaacacacagaaatgaggtagtccaggctccatatacattcagcagtgctggtttttctctctcctttgkctctacttttgtctcttcttttgaaatgygttgcctgattttatgggaaaactttgcaagcagaacctattagaattcaaccagccacctacctggtttgggtacgcaagcatatgttctttgcatacatgcaggtaaaacagtgtttatgagaacgtgtgagagagggamragttaggggtgccatgcagatatgatcaaattcatccattctgcgtgattcgatgcaagctcgtggtgttatatcaagaagcaaattaggtttattatatgctgagaagatgctttggtttttagtga

SEQ ID NO: 84533 - DNA, 600 bp, Chicken  19866894382187_9
ttgagtagttgccaaaaaagcacttacgtcggagtattagtgtatcatttggctagcacatcacataatggtttttttacagcaagtatttaaccatgttttcatcctgtgggaaagaatgatgggtctgttttgtaaaaataagaccttgtggcaatgtggacatgcaagagatagaaacataatgcaacaaattagtttcaacacacagaaatgaggtagtccaggctccatatacattcagcagtgctggtttttctctctcctttgkctctacttttgtctcttcttttgaaatgygttgcctgattttatgggaaaactttgcaagcagaacctattagaattcaaccagccacctacctggtttgggtacgcaagcatatgttctttgcatacatgcaggtaaaacagtgtttatgagaacgtgtgagagagggamragttaggggtgccatgcagatatgatcaaattcatccattctgcgtgattcgatgcaagctcgtggtgttatatcaagaagcaaattaggtttattatatgctgagaagatgctttggtttttagtgatggtattgtgaagtaggagaaatttgatc

SEQ ID NO: 84534 - DNA, 600 bp, Chicken  19866894382188_1
actggctaccttacggctgcttttagcatttccttcagcatcttctgtgccccactgcacacattgtgagctaagatggtaatgcccttgctttggtcaagcgtaactacagccttcagcatgcagcctgtgtttgttaatgcacgtattggccaagctcttggctcttaagtcagagcagaaataggtgaagctcagtgctgtcgctctggattaataatgatgtgaagtacaaggtgcccccgatgattactgatgctgttggtgtagaggtagcaccagaaggtccagccctggacrtgaggcagcaagaagagtcccagcacagcacagatgacagaagagtgcagttttgaggaagggagaatgccacaatatgaggtacaatgatttaatagctaattgtaaatgaagaacaatgtaagaattctacacgtatgaacacataccagctgaagtrtctgtctgcactgataacttttatacaatttgctgtacaagcacatgaaaaacattgttttgatcaatagtttttatggcaaaatccataaaacaaaacagtccttttatagaactcagaacaagtaatttagactacaa

SEQ ID NO: 84535 - DNA, 600 bp, Chicken  19866894382188_2
ttggctcttaagtcagagcagaaataggtgaagctcagtgctgtcgctctggattaataatgatgtgaagtacaaggtgcccccgatgattactgatgctgttggtgtagaggtagcaccagaaggtccagccctggacrtgaggcagcaagaagagtcccagcacagcacagatgacagaagagtgcagttttgaggaagggagaatgccacaatatgaggtacaatgatttaatagctaattgtaaatgaagaacaatgtaagaattctacacgtatgaacacataccagctgaagtrtctgtctgcactgataacttttatacaatttgctgtacaagcacatgaaaaacattgttttgatcaatagtttttatggcaaaatccataaaacaaaacagtccttttatagaactcagaacaagtaatttagactacaagtcctgacacaacttgtgctaagcctgtctggagggtgatgctctaacatgcaaagtggagttgtttctcattgacatttaaatataatcataggaggagatgcttgagagcccaaagtgaaatgagaaccacaagcgacagagaaagttgctggcagaa

SEQ ID NO: 84536 - DNA, 600 bp, Chicken  19866894382197_1
aactgcaaatgcacaggagagctgcatttcagaactcgtggtttaagctatgttactccgatggctgcaagatttagttcagtaattttatgcaattggcaagtaggcagatctagtataatttaacatttatgaatttacaatcctctcatataaatacagtaaggaatgctgcaattatcaaattatctaaataaagtaaattgcaatttgggatgcagtttatttgttaaaacgatttataaatgaatgtaaatacattgacttaaataggctaatctggtgactcaacagaaaacytactctgcctatcacaggtgtttttgtaattgtgataaattaggaaatgtcactctgtttaatggacctcaaactcaccctacctctgaaaaacaaactgttgagacctttgatggagaagtgtcaaggagccaactctggcctcacaagcaaaatacagtcatcgtcacatacatatctgtctgttataacctgtttggctggcttgtgtttggagttctgctgaagtccaccatctatatttagcatagcaaaattcaacaccctactatttgttatttgacctactcctatgtatta

SEQ ID NO: 84537 - DNA, 599 bp, Chicken  19866894382199_1
  misc_feature (1)..(152): n is any nucleotide
nnnnnnnnnnnnnnnnnnnnnnnnnnnnnnnnnnnnnnnnnnnnnnnnnnnnnnnnnnnnnnnnnnnnnnnnnnnnnnnnnnnnnnnnnnnnnnnnnnnnnnnnnnnnnnnnnnnnnnnnnnnnnnnnnnnnnnnnnnnnnnnnnnnnnnnncgaagctgcagcccctgccccaaggtcagctcttcgcactcattacccgaggagcacttggcaactcatgcaaactgagcactgcaaggaagattgttgcacttcttttcctggatcagaaattaattttcctacctagaaattgggyaaaaaaaaaaaaaaaaaagcctgacataaagcagacaggattgttacaatggaattctggaaggcaagggatttgcactctgttaagaagttgactgcaaaggacaaagaacagccatgaccaggttgagaacttgtgagtaaaatcagggactgtgccggtaaaggccttctggaggtcagggtctgctacaggctgccttgccaagggagctgcttactgcagctgccataagcattgtgctcactgactctcaccctgatgggggattccagtctccctgggaaaatggcatgact

SEQ ID NO: 84538 - DNA, 600 bp, Chicken  19866894382200_1
acaaacaagtgagagccacttatttcctctaggtggatttttttttaatgcatatttttgtcacttgtatttccctgtaaggttggaaaaccctttgtgggaaggatatttaacttctgatatttcttttcatggctaagttgggactagtttcaattagtttcttactcttagggcgtttgtgtattgaatgcaggaaaacctacaacagaattattaaatgaggtcagtcttggtttctgctgaaaacagtcaggcatctgatcaaattccagagagtttcgaaatactgagctaaarttcgtgtctttaggtgtactcttgagtagctagctctggttgtctggggtacctgagatagtagcccatggccagattgttatctacctgttgttggcagtcgtgttgcaattagcagttctagtaagcaatatggtcttgaaacctagatatagttcttaactgtggtcacagcagtactgcgagctagaatggagtttatttctctaataactttttgggcatcagtcatcttgcagtaaatattgagtagccaaatcaaactaccgatttaaataatagtttgtatttgttgtgctg

SEQ ID NO: 84539 - DNA, 599 bp, Chicken  19866894382204_1
  misc_feature (1)..(23): n is any nucleotide
nnnnnnnnnnnnnnnnnnnnnnnctgcagaagtgcaggaagcagcagctgcgtggggcagagctgtgctttccttgcactgtgacaacaccgaatctgctcttttccctttcaaagagcaaaatgtcacagtctctcagaggcagcaaagcagtaagcgcttctcttccttacactagctgtgggtgtcagaagccctgagaatgttttcgtgtgtctggacctctgaatagacgtttactgttctccagctggcttggcagccagtgttccgctggcacgtgagcctgggggctgtgcrcatggggctgtgcacatggggctgctcactctgagccataaagaaaaatattttaaggaacacttgattacagtgcagggtgctctgcttctaaaaatgcccaacagtattaatgtatgagaatgtgtgtatgggaaaaatcccttcctattgagggagcaggctgtgcctcacttcaaggggggaaacggcttttcagatgaggggtgtgggaggacgtttggagatggcatgattacagttgggacggcgggtggcttctttccttactatttttgtaagagcagaatgtgccctgt

SEQ ID NO: 84540 - DNA, 600 bp, Chicken  19866894382207_1
tgctcctcctctgttcttcaccaaaaaaaaaaatcaggtactttgtgaggtcttgctatttttcctagttggggacagtgctgttagagcaaggagaagtaagacattacttactaacattgtgaatgttcccacagaagctgcttgaggctggctgtgctcttggcttttaatccttttttctgcagaactacagctcaaacttgctgttggtgagggaaaaaaaaatgagcataagctgtttcatatacaagcaaagcctttaatatctcccagatttatggatgcatacctaagttyttgggagaatgagtgctcctgggaccaaattaaaagagttgtctgacttcctttatcccaagatgtagacatggcaggacaggatttctgatatttattgctattgaagatcaacttcttttttttttttttctttttcttggttgttaactatttctatcagtgataaaatctctgatcatcctctctccatccccaccaaagacctctgtgattttgtttccacatctaccaattatgagccgggagaatttcagtctctgaaataagccacaagttacctgtagttagtctggggaa

SEQ ID NO: 84541 - DNA, 600 bp, Chicken  19866894382207_2
gatttctgatatttattgctattgaagatcaacttcttttttttttttttctttttcttggttgttaactatttctatcagtgataaaatctctgatcatcctctctccatccccaccaaagacctctgtgattttgtttccacatctaccaattatgagccgggagaatttcagtctctgaaataagccacaagttacctgtagttagtctggggaaaagagacagggctgctttccaggagagaaaagcactacacaaacaaattcctaatgtacaattcagttctgtcaggcccagrcataagtattatcttttttttcttccagaccacttaaaagcagtaccraccaacagaattattggcagtgggttcattaaaaagtcagaaattgtgggattaatggatatcattttctgtcttgctgtcatttgttcctcctctgtgggatcaatatggagtaagcttttgttttttttatcgcttgtataagagaatcttaggaagaaagattgaagttactgatccatgacagtgatttcttgttttcataccatacacatgagaaagaacattttaataaaaacaaaaaggctgctt

SEQ ID NO: 84542 - DNA, 600 bp, Chicken  19866894382207_3
ttctttttcttggttgttaactatttctatcagtgataaaatctctgatcatcctctctccatccccaccaaagacctctgtgattttgtttccacatctaccaattatgagccgggagaatttcagtctctgaaataagccacaagttacctgtagttagtctggggaaaagagacagggctgctttccaggagagaaaagcactacacaaacaaattcctaatgtacaattcagttctgtcaggcccagrcataagtattatcttttttttcttccagaccacttaaaagcagtaccraccaacagaattattggcagtgggttcattaaaaagtcagaaattgtgggattaatggatatcattttctgtcttgctgtcatttgttcctcctctgtgggatcaatatggagtaagcttttgttttttttatcgcttgtataagagaatcttaggaagaaagattgaagttactgatccatgacagtgatttcttgttttcataccatacacatgagaaagaacattttaataaaaacaaaaaggctgctttgcagtgggattagcagttactacagaaattaattatttcatgaaata

SEQ ID NO: 84543 - DNA, 600 bp, Chicken  19866894382210_1
cagcccaaactcctgcaaactcctctcaaaatgtttttggttttttgggtgtttttacgcttcccttcagtgcagcctcagctgaaaaacgcctcggactgaaagttttgtttgactgcaaatagatttggtttgggattttttttttctttttggttcacagaaactccagatttgcctctcagccaaaccaaaacaacacgtctgtcaaaactgcagggaacaaaaagtcccgcgctgcccggggccgtgctcagagggtttccagccattcccagcggctgtgatgcagccgagccrtgaggttgcctggggaggagcagaggaggcagtcactgagctgtgggattctgcccacggccccacagaggttggctttggacaggggcttgaatcccaattctccagttcaaaccagggcagtcttgaattggacgcctcagcttgcaggccatcttttttgctttcagtgaagtgatatgaaagctgaatgctgctttcgcagggagggygggaggaggagcagagtgggctcgcagccatcagctgcagcggcacagggctgtgctctgccccacattgggtccccatgggatgcac

SEQ ID NO: 84544 - DNA, 600 bp, Chicken  19866894382210_2
actgcagggaacaaaaagtcccgcgctgcccggggccgtgctcagagggtttccagccattcccagcggctgtgatgcagccgagccrtgaggttgcctggggaggagcagaggaggcagtcactgagctgtgggattctgcccacggccccacagaggttggctttggacaggggcttgaatcccaattctccagttcaaaccagggcagtcttgaattggacgcctcagcttgcaggccatcttttttgctttcagtgaagtgatatgaaagctgaatgctgctttcgcagggagggygggaggaggagcagagtgggctcgcagccatcagctgcagcggcacagggctgtgctctgccccacattgggtccccatgggatgcactgcacagcttccccaggaatgaaggtgaagctgcacagtgatgcagccctctgtccatcagtaactttccgggcgctctttgtttctttttcttttcttctcctcccctccttttgtttccttttttgtaaaacccatttaatctcgttatgtgttcttgtgcaaatgaaacggtgcagtgaaagttcattttttatggctggaggaaaaaa

SEQ ID NO: 84545 - DNA, 600 bp, Chicken  19866894382224_1
tgtcaatattctacatttaagttcaggtgttcaacaaaaatttcttctagaaccaagcttatttaaggaaaatctttcaagtaggagtgaaaaatctttcaagtaggagtaggaaacttctccttaactatgtattccctacattttccataagaatatatagtgaggacacatatcactgaaaaactaatgtagtccttttgataacctccagaaaggttactacaaatgttatgaaatatggattcagatgaatgtgctattagcacagatctccaaaataaaagcaaggcctgaaaragtgcttgtgatattactgtcagcaaaagttccaaggtaacaaaatttgaatgattcatattttcaagagttaaaaaaaaacaacaaaacatcactacattatgtgttagctctgcatagtggaagtattttagaactacttgtcaaccgatcatattcttacatatgaaacccagactgcagccttctttaaaaactttaataaaatataactgaaatgtctagagtaataagtgtcagatatgaagacaaggcgtcatgggagctacttcctttcaacattgacctctgggtttggga

SEQ ID NO: 84546 - DNA, 600 bp, Chicken  19866894382232_1
tgatacaccccattgcaatgtggtcaaattcagctccagcatgatacagcatctaaaatccactgtcagacagctttttagtgtcagacagaatgtgcttctgttgagacagtatgtactaaagaagatcttgcttcttggaaatatttgttttaaggtacacacatcttcttttatcaaaagaagactgtggtaagtaaagaataaatgtgagtgcacaagagcatgcctggggaggcccacatttcactcttccatatagctgtctttcacaaatcatgtagggacaataaatgatasagacaaaaaccctcagcagtactatatgtcagtatgaytgtttaccttccttcggtctcttgctgaaaagtattttatgtaagaggtggtttttattttctttccaagtccaaaaacttcagctgtaatttgaagaaacgtgaaagaaactgacatctaaaaaaagttggatggcaaacgaagggtaactgctgctaccttacartattttaatttcctaggatctgtgtttcaattctgtaattggaactagttgtttcaggctgtttttcttacagacttgccagcttactttaatgt

SEQ ID NO: 84547 - DNA, 600 bp, Chicken  19866894382232_2
gcatgatacagcatctaaaatccactgtcagacagctttttagtgtcagacagaatgtgcttctgttgagacagtatgtactaaagaagatcttgcttcttggaaatatttgttttaaggtacacacatcttcttttatcaaaagaagactgtggtaagtaaagaataaatgtgagtgcacaagagcatgcctggggaggcccacatttcactcttccatatagctgtctttcacaaatcatgtagggacaataaatgatasagacaaaaaccctcagcagtactatatgtcagtatgaytgtttaccttccttcggtctcttgctgaaaagtattttatgtaagaggtggtttttattttctttccaagtccaaaaacttcagctgtaatttgaagaaacgtgaaagaaactgacatctaaaaaaagttggatggcaaacgaagggtaactgctgctaccttacartattttaatttcctaggatctgtgtttcaattctgtaattggaactagttgtttcaggctgtttttcttacagacttgccagcttactttaatgtatctgaccatgacagcaaatatttacatgacctttttg

SEQ ID NO: 84548 - DNA, 600 bp, Chicken  19866894382232_3
aaatgtgagtgcacaagagcatgcctggggaggcccacatttcactcttccatatagctgtctttcacaaatcatgtagggacaataaatgatasagacaaaaaccctcagcagtactatatgtcagtatgaytgtttaccttccttcggtctcttgctgaaaagtattttatgtaagaggtggtttttattttctttccaagtccaaaaacttcagctgtaatttgaagaaacgtgaaagaaactgacatctaaaaaaagttggatggcaaacgaagggtaactgctgctaccttacartattttaatttcctaggatctgtgtttcaattctgtaattggaactagttgtttcaggctgtttttcttacagacttgccagcttactttaatgtatctgaccatgacagcaaatatttacatgacctttttgcatgttggctgctttgcatacactgtaaaaagacaagatagggaaaatttctttaagatgactgaatacattaaagccatcctcagtcttaacttgaaatgcagttcccagggagcttttctcccatgaactaagctgaagctcccgctgacttcattaggcttcag

SEQ ID NO: 84549 - DNA, 600 bp, Chicken  19866894382241_1
tttataggttttggacaggcgtaggaatgtttcttttattcaacttgattctgttattttagatttattggatcctcacaggagtgtggtagttaagctccctttgctataaaggatgccacccatttcctgtattaaggtacacttctgaagtatttacagatggttttgtttcaaaagtaatatatctcagagttcattttcagaaatggaatgaataatatgcatactgtagggtaatactgtaagatagctccttgctgctggtatttccatagtagccttttatctccatccttkatgtgcaataggaaagagaaggtcagagtcaggaaatcagagctgcacgtttgcaagtgcatttgtatacttactttatggaaataattackttgaactagtttctttccttgtctctgtctgatttagtgtagcagcaacatctatatgtacatccattaaaaaaaaaaagtctcaaatgagatatccaagacaaaaataatttttcagtgattgctttttaactcatttggtggtagcccattcaaattatagaaggctatagctaacgctctcataagttgtagaatttggtgctct

SEQ ID NO: 84550 - DNA, 600 bp, Chicken  19866894382241_2
ttaagctccctttgctataaaggatgccacccatttcctgtattaaggtacacttctgaagtatttacagatggttttgtttcaaaagtaatatatctcagagttcattttcagaaatggaatgaataatatgcatactgtagggtaatactgtaagatagctccttgctgctggtatttccatagtagccttttatctccatccttkatgtgcaataggaaagagaaggtcagagtcaggaaatcagagctgcacgtttgcaagtgcatttgtatacttactttatggaaataattackttgaactagtttctttccttgtctctgtctgatttagtgtagcagcaacatctatatgtacatccattaaaaaaaaaaagtctcaaatgagatatccaagacaaaaataatttttcagtgattgctttttaactcatttggtggtagcccattcaaattatagaaggctatagctaacgctctcataagttgtagaatttggtgctctgattagaatggtgatcaaatacctgagggctgcatttgcttgtcttcagagtgatgtaatgaaaataaaatcacaaaaaagtcaaatgtata

SEQ ID NO: 84551 - DNA, 600 bp, Chicken  19866894382244_1
gttggactggacgctgcagctgatgtcaggaggaaggagatggtggaagatccctggtggtacagccaactgcttgttagccttgagctgtatatttttacttgctcccctataagccaactccattcacatcaggagaaattctcccactgagaatggtctttgcatggagagtgtctgttgctgtggtcccttgtgctggtgatcgtgacctgagctgcagaaacagcacagggatattaagggtcttacatggcacttggttgagcacctacaatgtttggcttcccttcatgcagytctggcacagctcacaagctcctcagtggtggttccctgtggcctgcaggagacagtctgcagaacttctcatgcagttgggtgtcccagtgcaaccagcttgctaggcttttggcatcagtagcctctcttgcrtatgcacttgttaaagatgatttatgctaaggttctaccacctccagatgggcctgcagggtcccaaaataatctcaaaggcagctgcagatggggaagataagccacatctgaagaactgagagagatcttgggttttattttcctagtttggcagatggtgga

SEQ ID NO: 84552 - DNA, 467 bp, Chicken  19866894382244_2
gagaaattctcccactgagaatggtctttgcatggagagtgtctgttgctgtggtcccttgtgctggtgatcgtgacctgagctgcagaaacagcacagggatattaagggtcttacatggcacttggttgagcacctacaatgtttggcttcccttcatgcagytctggcacagctcacaagctcctcagtggtggttccctgtggcctgcaggagacagtctgcagaacttctcatgcagttgggtgtcccagtgcaaccagcttgctaggcttttggcatcagtagcctctcttgcrtatgcacttgttaaagatgatttatgctaaggttctaccacctccagatgggcctgcagggtcccaaaataatctcaaaggcagctgcagatggggaagataagccacatctgaagaactgagagagatcttgggttttattttcctagtttggcagatggtggata

SEQ ID NO: 84553 - DNA, 600 bp, Chicken  19866894382245_1
tctgatagttaatatctcacgtacgttctatctgtgttttaaaaacagaccattccatgcattcacagcagttgctgctattattttaaactttattttctttctttgagtctgttaaaagcagttacattacaaaccaaatactgacagtagtcagaaaattcatgaaaacagaaaagacaaagcttttttcccctctttctgtatttagaatatatacagatatgtaatacatacataaaggaatgaagtacagcttcggattattttctgtattcggaacacacttttctagttccygaggctggaaaattgttaattttcttcacaggaggcacaagagaatggggatacttcatcctatgaataggaccataattggaaagtctacaaacaggtatgtttttatttttaatacctatatagccttaatggtaggctagcactttgatgaaggactatctgtctcagaaatgcaatggtcttaacactttgattaaggtgagagagattgtggtgaaacacactttcaagaaccgacagagtaacctcagagtttctaaggagatgaaggcaacaggraaatcgggaaaactacaa

SEQ ID NO: 84554 - DNA, 600 bp, Chicken  19866894382245_2
cacacttttctagttccygaggctggaaaattgttaattttcttcacaggaggcacaagagaatggggatacttcatcctatgaataggaccataattggaaagtctacaaacaggtatgtttttatttttaatacctatatagccttaatggtaggctagcactttgatgaaggactatctgtctcagaaatgcaatggtcttaacactttgattaaggtgagagagattgtggtgaaacacactttcaagaaccgacagagtaacctcagagtttctaaggagatgaaggcaacaggraaatcgggaaaactacaagtcattttaaggtatcacagaacagctggaaagaccacgtagctcagatcttcagggttacaaagggctggaggctagcactccataaaataaaagcaaaaaagaagaaaaaaaaaaagcagttttgagggcagcaaaagtaagttcaaatggattttgaagtgctggagacgatgaatgccaaatccctttgaattagatatatctggtctttgtgactaggtgatgtgactgggaccaggcatgcactgtccctgcattagcagagtgttactgagagcc

SEQ ID NO: 84555 - DNA, 600 bp, Chicken  19866894382254_1
tagtaaaatatagtgtactttacttatagtaaaattctaaacatatcagaaagataaaagcccaactccctcttatttcaatggaagaatgacaaagtgattgcaacaaagccaaatctaagcaatgtacttcaattaatcattagtgtaccaatgggtttttgtgtgtggtctggaaatcgtgaagaagaatccttttattatgtaaggcagatgtgaatgtattaccagagttgaagaccatggtgtgttgctgtgtcaaacagctgcagatgacaatgaaaagatatacattcacartgtggctaaatatataatacagctttttgccagtattactgaaatgacacttataatatgtatacacccattaagaatcatagtaaagattcatgcactggaccctgttctggttcctaattctcctatcctgccaaatataatccttccagctcctgaatctgtttgctgaaattgctgagctacgcaagaaataagtgagcgttcctacaaaacactttgggatcctatttacaactttactgatttggtaaataaggcttagaagcctttgttccactgaaacacaattaacttttt

SEQ ID NO: 84556 - DNA, 600 bp, Chicken  19866894382255_1
actaaattatatgactatttcagtttctttaaccagagtctaatatcttctatcagtatataataaaactccatagcaggcatttgtgtgtaaagctgagcagcagacgttgctgcatttcacttctttatctaaggtcaagcagtaacaccctgcatgccagaagatcatgagcacttcacacaggcgtgggaaacgtgcataaccctgtatctctaactgtccttgctcccaagtgagatctcagctgcagacatccagcagtctcctctgacctttggtcagctctgttcaggtaayataagctcctcagtgaaagagaaaagccaagagaggaataaaaataaaataataataattagaaaaataaaagcaaaaaaccccaaaactttctccaccagcctaaaggtttccttcaactcttccctaaccaacaagcttcatcactgtctccagttaggaagaaatttaaaaactgatacaaagtagctttttaagcattaaaattcttcttgttttttacaaatctagaatcacctagggggcaaccctaggttctaagaaaacataaagcaatgtagtttaagtttgaccccttac

SEQ ID NO: 84557 - DNA, 600 bp, Chicken  19866894382255_2
tgtctccagttaggaagaaatttaaaaactgatacaaagtagctttttaagcattaaaattcttcttgttttttacaaatctagaatcacctagggggcaaccctaggttctaagaaaacataaagcaatgtagtttaagtttgaccccttacgtcatctttctgctacagagctcagaggtttttcacgtaaaacacttgatcttactctctctgctggctccagatggtttactttcaacacagaccaagttaggaagtagtagaagggtttaagctgttcttttggaaaggaaaaawaacctttagagactctctgatgctgtacaatgggaatatctgtgtacaagcacaaaacacacaaccagcgacagcagactagggactgctgcttggatgagccagctgccctcattgaacgttaggacagatttaagaacacagactgcagcaacaattggtcctttgttcctgaaggataaacacagagggaagctggaggccactggatccaactccttcatacatagtctgttttgtcattacaaccattgcatccaattaaacataatgaaggtgcaagattaaggccttacacac

SEQ ID NO: 84558 - DNA, 599 bp, Chicken  19866894382265_1
  misc_feature (1)..(140): n is any nucleotide
nnnnnnnnnnnnnnnnnnnnnnnnnnnnnnnnnnnnnnnnnnnnnnnnnnnnnnnnnnnnnnnnnnnnnnnnnnnnnnnnnnnnnnnnnnnnnnnnnnnnnnnnnnnnnnnnnnnnnnnnnnnnnnnnnnnnnnnnnnnngatggccccacttcttctctgatcttctactcttcctatacacatcgttaaggtatttacttttactgtcaagggaaggtccatgataaagcgagcacagaagaaaggaaggagaggaagggagagagagaggttgtgatgggcaggaaggaagtccagstgtgcacagggcrggaaagctgggttaccacagcaccaaggagtgagaactggaaggaaaaacttcctcccatcagaatcaaacccaccaggtgagttcccctcatgttgggagacagtctgtcccaggatatcctgccctatgtcacccaatcagtagatggccagcmtgcttccgtaacaactgtgaggactgggtaagcagcaggacccttgctcccctgcarccccatgcaacactggggactgagctttgcaatggattagaatccagaacagctgcacatactttcccctctt

SEQ ID NO: 84559 - DNA, 599 bp, Chicken  19866894382265_2
  misc_feature (1)..(127): n is any nucleotide
nnnnnnnnnnnnnnnnnnnnnnnnnnnnnnnnnnnnnnnnnnnnnnnnnnnnnnnnnnnnnnnnnnnnnnnnnnnnnnnnnnnnnnnnnnnnnnnnnnnnnnnnnnnnnnnnnnnnnnnnnnnnnnngatggccccacttcttctctgatcttctactcttcctatacacatcgttaaggtatttacttttactgtcaagggaaggtccatgataaagcgagcacagaagaaaggaaggagaggaagggagagagagaggttgtgatgggcaggaaggaagtccagstgtgcacagggcrggaaagctgggttaccacagcaccaaggagtgagaactggaaggaaaaacttcctcccatcagaatcaaacccaccaggtgagttcccctcatgttgggagacagtctgtcccaggatatcctgccctatgtcacccaatcagtagatggccagcmtgcttccgtaacaactgtgaggactgggtaagcagcaggacccttgctcccctgcarccccatgcaacactggggactgagctttgcaatggattagaatccagaacagctgcacatactttcccctcttccacctgggaatg

SEQ ID NO: 84560 - DNA, 600 bp, Chicken  19866894382265_3
ctcttcctatacacatcgttaaggtatttacttttactgtcaagggaaggtccatgataaagcgagcacagaagaaaggaaggagaggaagggagagagagaggttgtgatgggcaggaaggaagtccagstgtgcacagggcrggaaagctgggttaccacagcaccaaggagtgagaactggaaggaaaaacttcctcccatcagaatcaaacccaccaggtgagttcccctcatgttgggagacagtctgtcccaggatatcctgccctatgtcacccaatcagtagatggccagcmtgcttccgtaacaactgtgaggactgggtaagcagcaggacccttgctcccctgcarccccatgcaacactggggactgagctttgcaatggattagaatccagaacagctgcacatactttcccctcttccacctgggaatgtcgctgcacacaccatgcagagatgctccaaactacaggcagggacggtgccaaaagtctgcaagcagaagcaggagttgctgcctatcttcagcacagcctggtttctgcaggactaatcctgcccttcccacagggaggttttaatcccttcctc

SEQ ID NO: 84561 - DNA, 600 bp, Chicken  19866894382265_4
taaagcgagcacagaagaaaggaaggagaggaagggagagagagaggttgtgatgggcaggaaggaagtccagstgtgcacagggcrggaaagctgggttaccacagcaccaaggagtgagaactggaaggaaaaacttcctcccatcagaatcaaacccaccaggtgagttcccctcatgttgggagacagtctgtcccaggatatcctgccctatgtcacccaatcagtagatggccagcmtgcttccgtaacaactgtgaggactgggtaagcagcaggacccttgctcccctgcarccccatgcaacactggggactgagctttgcaatggattagaatccagaacagctgcacatactttcccctcttccacctgggaatgtcgctgcacacaccatgcagagatgctccaaactacaggcagggacggtgccaaaagtctgcaagcagaagcaggagttgctgcctatcttcagcacagcctggtttctgcaggactaatcctgcccttcccacagggaggttttaatcccttcctcctgcaaaaccgcagtttaggagcagcccatgccaatatactgatgtcatgtgtaacc

SEQ ID NO: 84562 - DNA, 599 bp, Chicken  19866894382268_1
  misc_feature (1)..(95): n is any nucleotide
nnnnnnnnnnnnnnnnnnnnnnnnnnnnnnnnnnnnnnnnnnnnnnnnnnnnnnnnnnnnnnnnnnnnnnnnnnnnnnnnnnnnnnnnnnnnnnntcttgcagatttgttctcagtagcatccagcctagtatttccctgaatctcaacaaagtgaacagtgttcatgatcacaagataagatgtgctcctaattatgctggaaaaaggagaataccgattcaggctgactagagggaaaaagtaggtactgtgaaagtaggatgtgatattcagctgggaaggctaactacagccatcsccatggtcrggratcactgccacaccacataacaggagtcccattctgctacctggaatttctggacagatacasktgcaggccaattaaccttggcaggaagaggaaaggatgaaaaaacgtcacaccacaaatctaattcggctctgtactgaggatatcagccattgaaaattcatcaaatcatttttgcaattccttgttctattctgcacaagtccaccagctgcttgattcctgaccatagaaagaaggacatgccactgcacactttcccactttgtgccctactgcagcta

SEQ ID NO: 84563 - DNA, 599 bp, Chicken  19866894382268_2
  misc_feature (1)..(86): n is any nucleotide
nnnnnnnnnnnnnnnnnnnnnnnnnnnnnnnnnnnnnnnnnnnnnnnnnnnnnnnnnnnnnnnnnnnnnnnnnnnnnnnnnnnnnntcttgcagatttgttctcagtagcatccagcctagtatttccctgaatctcaacaaagtgaacagtgttcatgatcacaagataagatgtgctcctaattatgctggaaaaaggagaataccgattcaggctgactagagggaaaaagtaggtactgtgaaagtaggatgtgatattcagctgggaaggctaactacagccatcsccatggtcrggratcactgccacaccacataacaggagtcccattctgctacctggaatttctggacagatacasktgcaggccaattaaccttggcaggaagaggaaaggatgaaaaaacgtcacaccacaaatctaattcggctctgtactgaggatatcagccattgaaaattcatcaaatcatttttgcaattccttgttctattctgcacaagtccaccagctgcttgattcctgaccatagaaagaaggacatgccactgcacactttcccactttgtgccctactgcagctatattcactg

SEQ ID NO: 84564 - DNA, 599 bp, Chicken  19866894382268_3
  misc_feature (1)..(83): n is any nucleotide
nnnnnnnnnnnnnnnnnnnnnnnnnnnnnnnnnnnnnnnnnnnnnnnnnnnnnnnnnnnnnnnnnnnnnnnnnnnnnnnnnnntcttgcagatttgttctcagtagcatccagcctagtatttccctgaatctcaacaaagtgaacagtgttcatgatcacaagataagatgtgctcctaattatgctggaaaaaggagaataccgattcaggctgactagagggaaaaagtaggtactgtgaaagtaggatgtgatattcagctgggaaggctaactacagccatcsccatggtcrggratcactgccacaccacataacaggagtcccattctgctacctggaatttctggacagatacasktgcaggccaattaaccttggcaggaagaggaaaggatgaaaaaacgtcacaccacaaatctaattcggctctgtactgaggatatcagccattgaaaattcatcaaatcatttttgcaattccttgttctattctgcacaagtccaccagctgcttgattcctgaccatagaaagaaggacatgccactgcacactttcccactttgtgccctactgcagctatattcactgagg

SEQ ID NO: 84565 - DNA, 599 bp, Chicken  19866894382268_4
  misc_feature (1)..(20): n is any nucleotide
nnnnnnnnnnnnnnnnnnnntcttgcagatttgttctcagtagcatccagcctagtatttccctgaatctcaacaaagtgaacagtgttcatgatcacaagataagatgtgctcctaattatgctggaaaaaggagaataccgattcaggctgactagagggaaaaagtaggtactgtgaaagtaggatgtgatattcagctgggaaggctaactacagccatcsccatggtcrggratcactgccacaccacataacaggagtcccattctgctacctggaatttctggacagatacasktgcaggccaattaaccttggcaggaagaggaaaggatgaaaaaacgtcacaccacaaatctaattcggctctgtactgaggatatcagccattgaaaattcatcaaatcatttttgcaattccttgttctattctgcacaagtccaccagctgcttgattcctgaccatagaaagaaggacatgccactgcacactttcccactttgtgccctactgcagctatattcactgaggagcaatcaagaagtaaaatacaaaacttacaaagagagacacaaactttgcttgtcctcgcta

SEQ ID NO: 84566 - DNA, 599 bp, Chicken  19866894382268_5
  misc_feature (1)..(19): n is any nucleotide
nnnnnnnnnnnnnnnnnnntcttgcagatttgttctcagtagcatccagcctagtatttccctgaatctcaacaaagtgaacagtgttcatgatcacaagataagatgtgctcctaattatgctggaaaaaggagaataccgattcaggctgactagagggaaaaagtaggtactgtgaaagtaggatgtgatattcagctgggaaggctaactacagccatcsccatggtcrggratcactgccacaccacataacaggagtcccattctgctacctggaatttctggacagatacasktgcaggccaattaaccttggcaggaagaggaaaggatgaaaaaacgtcacaccacaaatctaattcggctctgtactgaggatatcagccattgaaaattcatcaaatcatttttgcaattccttgttctattctgcacaagtccaccagctgcttgattcctgaccatagaaagaaggacatgccactgcacactttcccactttgtgccctactgcagctatattcactgaggagcaatcaagaagtaaaatacaaaacttacaaagagagacacaaactttgcttgtcctcgctaa

SEQ ID NO: 84567 - DNA, 599 bp, Chicken  19866894382269_1
  misc_feature (1)..(56): n is any nucleotide
nnnnnnnnnnnnnnnnnnnnnnnnnnnnnnnnnnnnnnnnnnnnnnnnnnnnnnnngggatgcaagagttaaggaaatggtcagagacttgtaagtatgcacaaacgcttccttgaggagaaacagcaggtactgatgggattcctgaattcctccgggaggagcacgaggagctaatgaggagactgctaataaggagcacagctgccaggtagagctgtagacttccagtattctcaaaggctctggaaagccaaagtcagtgctggctgggagtggtgctggccatgcttagccccyctgcaggcttttccctggtacagctggtagctgccgttcccagcactcagcctgatgctggctgtctcatggatgccagctgatgctttgattgctgagcttggtttcccggtgggtttttcaccaggatgtgtcttcacggggcygttcagctctgggtgacactgcaaggatgagctgagttgtgatgtctgcacgggaacattcgccataactaagtccaggataagagtggatttaagtactttggtttataaataaacagcactcgtggccaaggtagatttaagcagagctgg

SEQ ID NO: 84568 - DNA, 600 bp, Chicken  19866894382269_2
gaattcctccgggaggagcacgaggagctaatgaggagactgctaataaggagcacagctgccaggtagagctgtagacttccagtattctcaaaggctctggaaagccaaagtcagtgctggctgggagtggtgctggccatgcttagccccyctgcaggcttttccctggtacagctggtagctgccgttcccagcactcagcctgatgctggctgtctcatggatgccagctgatgctttgattgctgagcttggtttcccggtgggtttttcaccaggatgtgtcttcacggggcygttcagctctgggtgacactgcaaggatgagctgagttgtgatgtctgcacgggaacattcgccataactaagtccaggataagagtggatttaagtactttggtttataaataaacagcactcgtggccaaggtagatttaagcagagctggcaacagtcctgcttgggaagggatctcatcaccacatggcctgctgttggacttcctgtcgcacgctaatcccttaagcctgctttagctctgttaatttttcttctttcctttttccccaatgggctgtctcagcggctcgtgaat

SEQ ID NO: 84569 - DNA, 599 bp, Chicken  19866894382279_1
  misc_feature (1)..(164): n is any nucleotide
nnnnnnnnnnnnnnnnnnnnnnnnnnnnnnnnnnnnnnnnnnnnnnnnnnnnnnnnnnnnnnnnnnnnnnnnnnnnnnnnnnnnnnnnnnnnnnnnnnnnnnnnnnnnnnnnnnnnnnnnnnnnnnnnnnnnnnnnnnnnnnnnnnnnnnnnnnnnnnnnnnnncatgctgtacacctattaaagcatgatttattgcatgcccagccccacatgcaacacgttgtttgcacaccgaacaatacgcattgcacatccagctgcagctgcacacgttttatgcaaccgaacgcgctcccarctgcagcacgctgcatgcgcgatttaaagcagcgtgcaatgcacgcctagctgyacgcgcgcttagagtgcgatttaacgccctcccagcygcacgctgcatgcacgatttgaagcacggcgcagtgcacgcrgcgcagcacgcaatgcaacccgcagcgccatacaccgcacgcgccgacgcgcgcccagcgcacacttaccgcgcggccgctcccgccccgcccggaagggggcgtggccacgtcgcgggcggtgacgtcaggaggcggggcgtcgctcggggtcggcgggcggcgg

SEQ ID NO: 84570 - DNA, 599 bp, Chicken  19866894382279_2
  misc_feature (1)..(110): n is any nucleotide
nnnnnnnnnnnnnnnnnnnnnnnnnnnnnnnnnnnnnnnnnnnnnnnnnnnnnnnnnnnnnnnnnnnnnnnnnnnnnnnnnnnnnnnnnnnnnnnnnnnnnnnnnnnnnncatgctgtacacctattaaagcatgatttattgcatgcccagccccacatgcaacacgttgtttgcacaccgaacaatacgcattgcacatccagctgcagctgcacacgttttatgcaaccgaacgcgctcccarctgcagcacgctgcatgcgcgatttaaagcagcgtgcaatgcacgcctagctgyacgcgcgcttagagtgcgatttaacgccctcccagcygcacgctgcatgcacgatttgaagcacggcgcagtgcacgcrgcgcagcacgcaatgcaacccgcagcgccatacaccgcacgcgccgacgcgcgcccagcgcacacttaccgcgcggccgctcccgccccgcccggaagggggcgtggccacgtcgcgggcggtgacgtcaggaggcggggcgtcgctcggggtcggcgggcggcggcggagccgggtggaggtcggggtcggtcggggctgagcggagtcgccgcgatga

SEQ ID NO: 84571 - DNA, 599 bp, Chicken  19866894382279_3
  misc_feature (1)..(73): n is any nucleotide
nnnnnnnnnnnnnnnnnnnnnnnnnnnnnnnnnnnnnnnnnnnnnnnnnnnnnnnnnnnnnnnnnnnnnnnnncatgctgtacacctattaaagcatgatttattgcatgcccagccccacatgcaacacgttgtttgcacaccgaacaatacgcattgcacatccagctgcagctgcacacgttttatgcaaccgaacgcgctcccarctgcagcacgctgcatgcgcgatttaaagcagcgtgcaatgcacgcctagctgyacgcgcgcttagagtgcgatttaacgccctcccagcygcacgctgcatgcacgatttgaagcacggcgcagtgcacgcrgcgcagcacgcaatgcaacccgcagcgccatacaccgcacgcgccgacgcgcgcccagcgcacacttaccgcgcggccgctcccgccccgcccggaagggggcgtggccacgtcgcgggcggtgacgtcaggaggcggggcgtcgctcggggtcggcgggcggcggcggagccgggtggaggtcggggtcggtcggggctgagcggagtcgccgcgatgatgaacgcggatctgcggagggagcgcgccgccgccac

SEQ ID NO: 84572 - DNA, 589 bp, Chicken  19866894382279_4
  misc_feature (1)..(31): n is any nucleotide
nnnnnnnnnnnnnnnnnnnnnnnnnnnnnnncatgctgtacacctattaaagcatgatttattgcatgcccagccccacatgcaacacgttgtttgcacaccgaacaatacgcattgcacatccagctgcagctgcacacgttttatgcaaccgaacgcgctcccarctgcagcacgctgcatgcgcgatttaaagcagcgtgcaatgcacgcctagctgyacgcgcgcttagagtgcgatttaacgccctcccagcygcacgctgcatgcacgatttgaagcacggcgcagtgcacgcrgcgcagcacgcaatgcaacccgcagcgccatacaccgcacgcgccgacgcgcgcccagcgcacacttaccgcgcggccgctcccgccccgcccggaagggggcgtggccacgtcgcgggcggtgacgtcaggaggcggggcgtcgctcggggtcggcgggcggcggcggagccgggtggaggtcggggtcggtcggggctgagcggagtcgccgcgatgatgaacgcggatctgcggagggagcgcgccgccgccaccttccagcccgagctgctcacgcacatcctgg

SEQ ID NO: 84573 - DNA, 599 bp, Chicken  19866894382288_1
  misc_feature (1)..(133): n is any nucleotide
nnnnnnnnnnnnnnnnnnnnnnnnnnnnnnnnnnnnnnnnnnnnnnnnnnnnnnnnnnnnnnnnnnnnnnnnnnnnnnnnnnnnnnnnnnnnnnnnnnnnnnnnnnnnnnnnnnnnnnnnnnnnnnnnnnnnncgaggagggtggagagtgtggttctcgggacgtatttgtactccagcaagcgaactccaagaatgacctgtattagaagaatagttttcagtataatagcttgcaggaggggaatgctacacagaaagcaaattacatattttataggaaattccatttaagggtcytagtatatggtatagctggagctcaaactttgcagtagtcatcgttgcctgcctgtagaagcacagcctgtagctttgagttataactgcctataaaatatgtaatcagtgtgatttctggtagtctgtcctgctcagctcctgtatacccttgcctttagggcaccctccttgctccatatgccttccttcctgctcagctcctacctgagctttctttcyctcctgttactgcataccagcaactcctcaccttggcaggtgaaacaatacccaggagttgcatacaaattttggca

SEQ ID NO: 84574 - DNA, 600 bp, Chicken  19866894382288_2
agtataatagcttgcaggaggggaatgctacacagaaagcaaattacatattttataggaaattccatttaagggtcytagtatatggtatagctggagctcaaactttgcagtagtcatcgttgcctgcctgtagaagcacagcctgtagctttgagttataactgcctataaaatatgtaatcagtgtgatttctggtagtctgtcctgctcagctcctgtatacccttgcctttagggcaccctccttgctccatatgccttccttcctgctcagctcctacctgagctttctttcyctcctgttactgcataccagcaactcctcaccttggcaggtgaaacaatacccaggagttgcatacaaattttggcacactttatatacagctgaatttgctacattcctctaaggcagactcacaaaagcgatccagacccaaaccagagccatgctgggctactccctggctttgcagggccactggccgtcctgggatggccagactgcagctctgcaggcagaaatctgggctctcctggacccagacccaggcttgaagcatgcatacagcagccccaagtgctgtgtctcagaa

SEQ ID NO: 84575 - DNA, 600 bp, Chicken  19866894382300_1
tacctgggaggaaaaatttgccactaactcaggctatcatatttcacacagaacaaagtgaagcaaaagagctgccagaaagtcgaggccacaagtgagagctgtcaagagaaaagcatccagatttaatcttcccaatcaggcagctgaacatcaccagacatattttccattaagatcaatgctttttactgcataactcagcagcggttggtagaaattagttacaaaactgtaaactgataagcagagtgctatgtcatactgaatgagaaagtgcagtaccgtttgaaatagagycactttagaagattttcayttttaaatcagcagttaagattctgtagaatttgctgctgtagaatttgaagttttggaagaattaaccccttcattttcttgcatcccctgtgcaactcatcccagttcaagtaaaatatcaaagccaagctctctgaacccaacgcctttcacattcactgtgtacaggtatacacagtatggtatgtcagtatgccaaatcctgcacgcttcatggactgctgacagaaagcactggtttcttcctacaaaatgttgtaacagaagatacaaggaagc

SEQ ID NO: 84576 - DNA, 600 bp, Chicken  19866894382300_2
gccactaactcaggctatcatatttcacacagaacaaagtgaagcaaaagagctgccagaaagtcgaggccacaagtgagagctgtcaagagaaaagcatccagatttaatcttcccaatcaggcagctgaacatcaccagacatattttccattaagatcaatgctttttactgcataactcagcagcggttggtagaaattagttacaaaactgtaaactgataagcagagtgctatgtcatactgaatgagaaagtgcagtaccgtttgaaatagagycactttagaagattttcayttttaaatcagcagttaagattctgtagaatttgctgctgtagaatttgaagttttggaagaattaaccccttcattttcttgcatcccctgtgcaactcatcccagttcaagtaaaatatcaaagccaagctctctgaacccaacgcctttcacattcactgtgtacaggtatacacagtatggtatgtcagtatgccaaatcctgcacgcttcatggactgctgacagaaagcactggtttcttcctacaaaatgttgtaacagaagatacaaggaagcagaaaaacatcaacatttg

SEQ ID NO: 84577 - DNA, 600 bp, Chicken  19866894382304_1
gtggctgtttcctgacagaaacccattccttctcaaaggggaagaagggcagcattttttttgtgcaaacgtggatgaaacgttaagtttagtttgcacaaagacagaactccacagagtttaaaacatttacaccttgaaggcagatgtggtctttggaatggtcaaaatgagctggattggaacacctatgttttataaaggagaatatcataaagcctcagaattgtttaggttcagttggaagccataaacccaatgactctgacacagtgcccatgtgctgcacacagagctggkgtgtccaaacagctgccttggtttgctgttacttgcagtgatggagagatctttttcaccaaactctttgcctttttgttcccaagggtctgcggcttccccaaagatgaagccgttccagcactatgcataaacaagyactccacatagctgtccctgcaccacagaattcccacccaggctgttcctctttcctccctgttcccatataaccctgttgctgctctctcccttyctccacctcggtggtggcacaggcccgcctgctcctctttctgctctgctggcccaggaatcaag

SEQ ID NO: 84578 - DNA, 600 bp, Chicken  19866894382304_2
aaggcagatgtggtctttggaatggtcaaaatgagctggattggaacacctatgttttataaaggagaatatcataaagcctcagaattgtttaggttcagttggaagccataaacccaatgactctgacacagtgcccatgtgctgcacacagagctggkgtgtccaaacagctgccttggtttgctgttacttgcagtgatggagagatctttttcaccaaactctttgcctttttgttcccaagggtctgcggcttccccaaagatgaagccgttccagcactatgcataaacaagyactccacatagctgtccctgcaccacagaattcccacccaggctgttcctctttcctccctgttcccatataaccctgttgctgctctctcccttyctccacctcggtggtggcacaggcccgcctgctcctctttctgctctgctggcccaggaatcaaggtgggatgtccttgtgggatctgaaattgattgaaggagattaatgtggctttaaatgagatttatagattatttttgcatatgatgaatgtgaggtcaccgcttgtgaatgagaagggggcgggaggttacatgtgaa

SEQ ID NO: 84579 - DNA, 600 bp, Chicken  19866894382304_3
ttcagttggaagccataaacccaatgactctgacacagtgcccatgtgctgcacacagagctggkgtgtccaaacagctgccttggtttgctgttacttgcagtgatggagagatctttttcaccaaactctttgcctttttgttcccaagggtctgcggcttccccaaagatgaagccgttccagcactatgcataaacaagyactccacatagctgtccctgcaccacagaattcccacccaggctgttcctctttcctccctgttcccatataaccctgttgctgctctctcccttyctccacctcggtggtggcacaggcccgcctgctcctctttctgctctgctggcccaggaatcaaggtgggatgtccttgtgggatctgaaattgattgaaggagattaatgtggctttaaatgagatttatagattatttttgcatatgatgaatgtgaggtcaccgcttgtgaatgagaagggggcgggaggttacatgtgaaatacttttagcagctattctagctccaagagggcttctgcaagaggggcagggctcttcatagcacgattgttacagaagtgaggaaccctggtgg

SEQ ID NO: 84580 - DNA, 600 bp, Chicken  19866894382308_1
tgctaccactgttgaaacaacagtgctttttctgggacaactgtagagttgtcatttgcttctgtgatataattaaatagaatagtttgaataacctagagccaagcctgcttactgctataaactgatcctcaggtgattccttccctcctctctccacccaaattttttgccctgaaacattttttcccagacattacaatcttctcatattgccagtattctgtatctatcttctcctatataggaagaagcctgcctctcttatgcttttatgttgcagggctaatgttgccttcygattcagtgattcataatggaaacatactactcttgcctgctgtatagcatacagaggaaacattaatatttattttatcttttatggaaaactttgcaaagtaacaaataaagatgaataattaattttgatggctcttgtaagtggaaaatccttaactacatcatattgtgacaacatagcacggaggaaacgtcagtaatataaaaacatagtcaaaaacacataggaatctctctcatattttagtttacaggacatttattgcagtgtcattaggcaaagagtacattatctgt

SEQ ID NO: 84581 - DNA, 600 bp, Chicken  19866894382309_1
tgtcagtaacagcagaattgggtgcaccagagctgtgtgagactgggaggaaggttttgtcttcccgcaggctgtgagtgatgctccttgtgggatggcagagaactgagcttatgtatgagcacaaaggaacaacgctgccgggtttggcagcagctgtgcaaggtgccgggtttaatttcatcagggcaggacaatgggcaggattttctcatctgcagttgcgctcagattactgctatctaccccaggagttatttcacatggctgctccgtgcagcattcaggcagcaccaggcrggagctggggttcrtgtgttgcggtgagcagcttggccagctctgcagtgacattctcagccctgctccttgtgatgcacggcacacgagggaataaaaagaaggataaattatatgccaagaagacagaggatgatgtaagccaagacttttaagccttttcatagcacagggcacatcttyggggagactgctttacattccatccatcccmagtccccgtggcaryaggagcaactctaygaatgagcaatgttaggaaaccaccgatgcactccagccactggcacaagtttggcc

SEQ ID NO: 84582 - DNA, 483 bp, Chicken  19866894382309_10
ttagagctgaagatgtaaaacccttacaccctatgccagcatcagcacgtgcacagtgatgggcccagcacttgagctgtgcattgcaaggcaatgcgtgaacaagtggaagcctttggtgggatttaaaataagatggcatatctatagaaatggaggaaagcgaarcaaagatttaccctgtagatttattcgacctcccagtgactttgaaccaaaagagggtttggactgaactgaaggagaaagcgctcatycaccgaatgccaaagggatgctctgcatgggcactcagaaacrggcagattgcagctgcatagtttggatcccacctaccattggtgtgctgaccaaaaacaccattgatgccactgtccagaatctccaggtgggacatcggctcggagggctgttttctcctgcaagtgcctaccaagcaaagcgcgctgtctgcggggcttaaggtgtgctacaaattggaga

SEQ ID NO: 84583 - DNA, 600 bp, Chicken  19866894382309_2
gaattgggtgcaccagagctgtgtgagactgggaggaaggttttgtcttcccgcaggctgtgagtgatgctccttgtgggatggcagagaactgagcttatgtatgagcacaaaggaacaacgctgccgggtttggcagcagctgtgcaaggtgccgggtttaatttcatcagggcaggacaatgggcaggattttctcatctgcagttgcgctcagattactgctatctaccccaggagttatttcacatggctgctccgtgcagcattcaggcagcaccaggcrggagctggggttcrtgtgttgcggtgagcagcttggccagctctgcagtgacattctcagccctgctccttgtgatgcacggcacacgagggaataaaaagaaggataaattatatgccaagaagacagaggatgatgtaagccaagacttttaagccttttcatagcacagggcacatcttyggggagactgctttacattccatccatcccmagtccccgtggcaryaggagcaactctaygaatgagcaatgttaggaaaccaccgatgcactccagccactggcacaagtttggccatggtgagagacac

SEQ ID NO: 84584 - DNA, 600 bp, Chicken  19866894382309_3
tcagggcaggacaatgggcaggattttctcatctgcagttgcgctcagattactgctatctaccccaggagttatttcacatggctgctccgtgcagcattcaggcagcaccaggcrggagctggggttcrtgtgttgcggtgagcagcttggccagctctgcagtgacattctcagccctgctccttgtgatgcacggcacacgagggaataaaaagaaggataaattatatgccaagaagacagaggatgatgtaagccaagacttttaagccttttcatagcacagggcacatcttyggggagactgctttacattccatccatcccmagtccccgtggcaryaggagcaactctaygaatgagcaatgttaggaaaccaccgatgcactccagccactggcacaagtttggccatggtgagagacactgacaagagaagaccaggcacaatgcattggcactgctgcgtgccccaggccccagaaatcccatccccattagagctgaagatgtaaaacccttacaccctatgccagcatcagcacgtgcacagtgatgggcccagcacttgagctgtgcattgcaaggcaatgcgt

SEQ ID NO: 84585 - DNA, 600 bp, Chicken  19866894382309_4
tctgcagttgcgctcagattactgctatctaccccaggagttatttcacatggctgctccgtgcagcattcaggcagcaccaggcrggagctggggttcrtgtgttgcggtgagcagcttggccagctctgcagtgacattctcagccctgctccttgtgatgcacggcacacgagggaataaaaagaaggataaattatatgccaagaagacagaggatgatgtaagccaagacttttaagccttttcatagcacagggcacatcttyggggagactgctttacattccatccatcccmagtccccgtggcaryaggagcaactctaygaatgagcaatgttaggaaaccaccgatgcactccagccactggcacaagtttggccatggtgagagacactgacaagagaagaccaggcacaatgcattggcactgctgcgtgccccaggccccagaaatcccatccccattagagctgaagatgtaaaacccttacaccctatgccagcatcagcacgtgcacagtgatgggcccagcacttgagctgtgcattgcaaggcaatgcgtgaacaagtggaagcctttggtgggatttaaa

SEQ ID NO: 84586 - DNA, 600 bp, Chicken  19866894382309_5
cagattactgctatctaccccaggagttatttcacatggctgctccgtgcagcattcaggcagcaccaggcrggagctggggttcrtgtgttgcggtgagcagcttggccagctctgcagtgacattctcagccctgctccttgtgatgcacggcacacgagggaataaaaagaaggataaattatatgccaagaagacagaggatgatgtaagccaagacttttaagccttttcatagcacagggcacatcttyggggagactgctttacattccatccatcccmagtccccgtggcaryaggagcaactctaygaatgagcaatgttaggaaaccaccgatgcactccagccactggcacaagtttggccatggtgagagacactgacaagagaagaccaggcacaatgcattggcactgctgcgtgccccaggccccagaaatcccatccccattagagctgaagatgtaaaacccttacaccctatgccagcatcagcacgtgcacagtgatgggcccagcacttgagctgtgcattgcaaggcaatgcgtgaacaagtggaagcctttggtgggatttaaaataagatggcatat

SEQ ID NO: 84587 - DNA, 600 bp, Chicken  19866894382309_6
agattactgctatctaccccaggagttatttcacatggctgctccgtgcagcattcaggcagcaccaggcrggagctggggttcrtgtgttgcggtgagcagcttggccagctctgcagtgacattctcagccctgctccttgtgatgcacggcacacgagggaataaaaagaaggataaattatatgccaagaagacagaggatgatgtaagccaagacttttaagccttttcatagcacagggcacatcttyggggagactgctttacattccatccatcccmagtccccgtggcaryaggagcaactctaygaatgagcaatgttaggaaaccaccgatgcactccagccactggcacaagtttggccatggtgagagacactgacaagagaagaccaggcacaatgcattggcactgctgcgtgccccaggccccagaaatcccatccccattagagctgaagatgtaaaacccttacaccctatgccagcatcagcacgtgcacagtgatgggcccagcacttgagctgtgcattgcaaggcaatgcgtgaacaagtggaagcctttggtgggatttaaaataagatggcatatc

SEQ ID NO: 84588 - DNA, 600 bp, Chicken  19866894382309_7
taccccaggagttatttcacatggctgctccgtgcagcattcaggcagcaccaggcrggagctggggttcrtgtgttgcggtgagcagcttggccagctctgcagtgacattctcagccctgctccttgtgatgcacggcacacgagggaataaaaagaaggataaattatatgccaagaagacagaggatgatgtaagccaagacttttaagccttttcatagcacagggcacatcttyggggagactgctttacattccatccatcccmagtccccgtggcaryaggagcaactctaygaatgagcaatgttaggaaaccaccgatgcactccagccactggcacaagtttggccatggtgagagacactgacaagagaagaccaggcacaatgcattggcactgctgcgtgccccaggccccagaaatcccatccccattagagctgaagatgtaaaacccttacaccctatgccagcatcagcacgtgcacagtgatgggcccagcacttgagctgtgcattgcaaggcaatgcgtgaacaagtggaagcctttggtgggatttaaaataagatggcatatctatagaaatggagg

SEQ ID NO: 84589 - DNA, 600 bp, Chicken  19866894382309_8
atgttaggaaaccaccgatgcactccagccactggcacaagtttggccatggtgagagacactgacaagagaagaccaggcacaatgcattggcactgctgcgtgccccaggccccagaaatcccatccccattagagctgaagatgtaaaacccttacaccctatgccagcatcagcacgtgcacagtgatgggcccagcacttgagctgtgcattgcaaggcaatgcgtgaacaagtggaagcctttggtgggatttaaaataagatggcatatctatagaaatggaggaaagcgaarcaaagatttaccctgtagatttattcgacctcccagtgactttgaaccaaaagagggtttggactgaactgaaggagaaagcgctcatycaccgaatgccaaagggatgctctgcatgggcactcagaaacrggcagattgcagctgcatagtttggatcccacctaccattggtgtgctgaccaaaaacaccattgatgccactgtccagaatctccaggtgggacatcggctcggagggctgttttctcctgcaagtgcctaccaagcaaagcgcgctgtctgcggggcttaaggtgt

SEQ ID NO: 84590 - DNA, 526 bp, Chicken  19866894382309_9
ttggcactgctgcgtgccccaggccccagaaatcccatccccattagagctgaagatgtaaaacccttacaccctatgccagcatcagcacgtgcacagtgatgggcccagcacttgagctgtgcattgcaaggcaatgcgtgaacaagtggaagcctttggtgggatttaaaataagatggcatatctatagaaatggaggaaagcgaarcaaagatttaccctgtagatttattcgacctcccagtgactttgaaccaaaagagggtttggactgaactgaaggagaaagcgctcatycaccgaatgccaaagggatgctctgcatgggcactcagaaacrggcagattgcagctgcatagtttggatcccacctaccattggtgtgctgaccaaaaacaccattgatgccactgtccagaatctccaggtgggacatcggctcggagggctgttttctcctgcaagtgcctaccaagcaaagcgcgctgtctgcggggcttaaggtgtgctacaaattggaga

SEQ ID NO: 84591 - DNA, 600 bp, Chicken  19866894382311_1
gttctcaaacagtgatcatctcttatgatgcattctgagtcagtatgggtactactagattttaaacatgtttattaaaaacaaacaaacaaacaaacaaacaaacacccaagcagtttctctttcagcaattttcctctaccttgtcaaatgaccatcccaagctaaaattttacgaaaccttccatggctgtcttatctttactgagttgttgaaactacctattcttataagaatttatttagaataattcaaactgcaatctggattaattacagtcataaaatgagcacacacamaaaaaaatctgatatttttgactgtataaaamccgttaatggtactactgttttccctcaggctctatttcacaaagtctgcttcaatatttcaaatgaaatattgaaagctcctttgaatataagtaccaaagtgactttatataaatcctaatgkaacaagaatttatcctgcatgctgtatatttctgtaacacttattaaagttattcaaataatagttgtttaaatctaccttcttctttctttggcaagcaactgcagagatattccctgaaaacgaaagaaaagtaaggagct

SEQ ID NO: 84592 - DNA, 600 bp, Chicken  19866894382311_2
ttctgagtcagtatgggtactactagattttaaacatgtttattaaaaacaaacaaacaaacaaacaaacaaacacccaagcagtttctctttcagcaattttcctctaccttgtcaaatgaccatcccaagctaaaattttacgaaaccttccatggctgtcttatctttactgagttgttgaaactacctattcttataagaatttatttagaataattcaaactgcaatctggattaattacagtcataaaatgagcacacacamaaaaaaatctgatatttttgactgtataaaamccgttaatggtactactgttttccctcaggctctatttcacaaagtctgcttcaatatttcaaatgaaatattgaaagctcctttgaatataagtaccaaagtgactttatataaatcctaatgkaacaagaatttatcctgcatgctgtatatttctgtaacacttattaaagttattcaaataatagttgtttaaatctaccttcttctttctttggcaagcaactgcagagatattccctgaaaacgaaagaaaagtaaggagcttcaaaaaaacattttttactgacagaatggcc

SEQ ID NO: 84593 - DNA, 600 bp, Chicken  19866894382311_3
tcccaagctaaaattttacgaaaccttccatggctgtcttatctttactgagttgttgaaactacctattcttataagaatttatttagaataattcaaactgcaatctggattaattacagtcataaaatgagcacacacamaaaaaaatctgatatttttgactgtataaaamccgttaatggtactactgttttccctcaggctctatttcacaaagtctgcttcaatatttcaaatgaaatattgaaagctcctttgaatataagtaccaaagtgactttatataaatcctaatgkaacaagaatttatcctgcatgctgtatatttctgtaacacttattaaagttattcaaataatagttgtttaaatctaccttcttctttctttggcaagcaactgcagagatattccctgaaaacgaaagaaaagtaaggagcttcaaaaaaacattttttactgacagaatggccaaagtatgaggtatatctgaaagatcccttagctccacattcaaatggtactacctcagatgacctgaaaaactaaacatgtatgttcaatgctgtaaggattttcatcaacatgagagaaaaaa

SEQ ID NO: 84594 - DNA, 555 bp, Chicken  19866894382314_1
ggtacctctactgtgctggacacttgcactcattcaggcaggaaaatcaagctgctgctaagggcaggaggaactgtggcctctctctcccctggcaactttgccttgaacagcagggaggaggatgggaaggagcaatgcctctgggaagaggatcctagaggggaaagaactgaaggagagggatgaattgtgagattttcttccctgctccactaggacagaatatatctgatctcacatcagcatctcttggagatggagaactggaccaaggctgcaagcatattttgtgatcayctctcaccatacactcactgactctagagagtgccgtcagggccctccaggtggtgggaggtcagagagacgcagatcctcgctgtgaactacttggctgcagtatgtgtttgaggtgtaaatcacacgtgtgaaaagggacagtaacagattttcaacagaaataagaaaaatgtcctgttgcaaacaatcgggcacaccaagattacctgctctgtaaagactttcacttgcattattaactcataaatatcg

SEQ ID NO: 84595 - DNA, 600 bp, Chicken  19866894382316_1
gccctcagatttaactcgagactgctcagaatgccaactgcctttatggggatgtctccctgaacgcagacacgtgcctgttgctctaattacacgtgttcagcctctttttctgaggggaaaagatctattaaaagtaatatttcatgtttacagcaggagagtaaaacgcagcagaatgcccacctctgcttggatgcaatcaaagacattggtggaatgttagattcaaataggaacacgaccctcacttactgtcctttccttctggctctaatgaaacagaccctgaagggcaaygtgccattctgtgctcgctgtactatataaaacatctctgcatgcccctccagtgccaagcaatggccactttgtgttttaggcacaataagggtggatttgaatatcagactgtaagaaccaatgctgatttggctttttttggcaatttagaaactgctggaaaacaatcaggccttgttttgaatacctcctcctacccagatggaacacatctgcctggctttgaacaaagcatccaggtttcattccaagatttactctcttttttcttctttagaaacagatcccaacctaaca

SEQ ID NO: 84596 - DNA, 600 bp, Chicken  19866894382316_2
atatcagactgtaagaaccaatgctgatttggctttttttggcaatttagaaactgctggaaaacaatcaggccttgttttgaatacctcctcctacccagatggaacacatctgcctggctttgaacaaagcatccaggtttcattccaagatttactctcttttttcttctttagaaacagatcccaacctaacagttctggcattttcaacccatcccatatatccatttgctggttctataggtgtatctccagctattccagaatatctcctaatgttttgctttctctacctgwtgaaataggcgggtttgatacacactttatgagcagtctggtgtctttaagcctgaattttgcagtagaaaaagctttgtgagaaaatgtcacctccctctggtaacaattcaatcaaataaagagctagaaaacagccatctagtgggtgtgtgtgctgcatatatgagtctgtacgtgcaggacatcgtgggggtgttttcatagccagagaagtgcagggatgcttctaggaaatcaagacacagaccatatgaaacgctgctgtgaaagcagagtgaaaacgaagggctgcactgc

SEQ ID NO: 84597 - DNA, 600 bp, Chicken  19866894382326_1
agtatctgtgcatggattgatcatggtacattcttatgcacgtgagtcataaggcattatgaatgacctacctcctggccattgggaagcttcaacattccttcctattagaaagaaagattgtccatctggaccactttcttataagctgccagcaatcccagcacacgtctactttaattcctaagccttctagttagaccagtaacattcatgatgttactgaggaataatagttaaaaatttcctaatctaaaataaaattggaattttccagtaataataattattctaaacttytaaaaatgtggcatcactgtggcatttacaattacattttaccaaagcaacagcttcaaagtagctctatttttttgtaaaacattgctggttttaatacggtaatagattgtcaatttattaagactggagccgatctgttagttaaatagatagtcaggacaggggcattcattttctttttaagagataaatatttctgtttgggaagatatttttgtttagaaagcatgtacaattaaaaattgtctttcatggagctaccaaccaggattctcacataccttggcacatgcatta

SEQ ID NO: 84598 - DNA, 600 bp, Chicken  19866894382328_1
tcagtgactttctacacgctataaagttaacaacaaaaaagtagttccatgtaggagaaggtccaagtttattagggtatcatatggctgtctctggttgtacattaactaaggttttgttttcattttttttcactaactcttacctaatgctataatcacgttgctcttcaaactggagaacttgtgctgctggaccatgctggctgaaggccacatcagtgtgaatcttaactcaatttcctggacaagcataagattagcttgctcacacctatttgctaaacagcttttagttgsatagtgatatcttcttgtcaatttcaacttgaatttaactattcctgattctattcacatccctgcaccataacctgtcgttagcttctcagctgtgcagacaccgtcagtgtgagctatgctgtttgtatagatgaattcaaagttctactgttgcagttgtgttgtttttaacaatgaatggatcctaagctgtcagaataaaatgattgtcctggtatgaccaatctaaaaaatgtttcagtatcagtgactccaatattacagaagcatagaattattttactggatactctccta

SEQ ID NO: 84599 - DNA, 599 bp, Chicken  19866894382329_1
  misc_feature (1)..(68): n is any nucleotide
nnnnnnnnnnnnnnnnnnnnnnnnnnnnnnnnnnnnnnnnnnnnnnnnnnnnnnnnnnnnnnnnnnnnccctgtgctgcaggcccaggggtggctgtgccgccctttcaggccaggggtacctgtggcccagtaggcctggaggagtcacagcctcgagcagtggtgaaagtggagtgcccgtcctgcttcagagggaattaacgaagggcagcgtggtttctgcctgtaaccgctgtcatgcagctctgctgatgcattaggcaataggttcagcttgggtttccttcagggtcttgcrgyttaggtggctgcgttgcatctaaacttttatatgggcctctcctcacaatagctgcgtccggtggttggaaggctgakcaggatctgtgctgccccmcaggcactctgtgcatgtgtgggactgagagtgagcagcacttttatttgttccactgtaagtacagcaaatactgttctaacaagactaccgctgcagatactgcgcaccccaaagttacgagctctcagaggtacacccgcctggaagatagttgctctctgtacacacctgtgcagtacrtattaatttggtgataa

SEQ ID NO: 84600 - DNA, 599 bp, Chicken  19866894382329_2
  misc_feature (1)..(66): n is any nucleotide
nnnnnnnnnnnnnnnnnnnnnnnnnnnnnnnnnnnnnnnnnnnnnnnnnnnnnnnnnnnnnnnnnnccctgtgctgcaggcccaggggtggctgtgccgccctttcaggccaggggtacctgtggcccagtaggcctggaggagtcacagcctcgagcagtggtgaaagtggagtgcccgtcctgcttcagagggaattaacgaagggcagcgtggtttctgcctgtaaccgctgtcatgcagctctgctgatgcattaggcaataggttcagcttgggtttccttcagggtcttgcrgyttaggtggctgcgttgcatctaaacttttatatgggcctctcctcacaatagctgcgtccggtggttggaaggctgakcaggatctgtgctgccccmcaggcactctgtgcatgtgtgggactgagagtgagcagcacttttatttgttccactgtaagtacagcaaatactgttctaacaagactaccgctgcagatactgcgcaccccaaagttacgagctctcagaggtacacccgcctggaagatagttgctctctgtacacacctgtgcagtacrtattaatttggtgataatg

SEQ ID NO: 84601 - DNA, 600 bp, Chicken  19866894382329_3
ggcccaggggtggctgtgccgccctttcaggccaggggtacctgtggcccagtaggcctggaggagtcacagcctcgagcagtggtgaaagtggagtgcccgtcctgcttcagagggaattaacgaagggcagcgtggtttctgcctgtaaccgctgtcatgcagctctgctgatgcattaggcaataggttcagcttgggtttccttcagggtcttgcrgyttaggtggctgcgttgcatctaaacttttatatgggcctctcctcacaatagctgcgtccggtggttggaaggctgakcaggatctgtgctgccccmcaggcactctgtgcatgtgtgggactgagagtgagcagcacttttatttgttccactgtaagtacagcaaatactgttctaacaagactaccgctgcagatactgcgcaccccaaagttacgagctctcagaggtacacccgcctggaagatagttgctctctgtacacacctgtgcagtacrtattaatttggtgataatggactattgtctgcgttaggcgcttaagacaccaaacacacaggacaaacctgtccagggacgagtagaggctgtaaagc

SEQ ID NO: 84602 - DNA, 600 bp, Chicken  19866894382329_4
cgccctttcaggccaggggtacctgtggcccagtaggcctggaggagtcacagcctcgagcagtggtgaaagtggagtgcccgtcctgcttcagagggaattaacgaagggcagcgtggtttctgcctgtaaccgctgtcatgcagctctgctgatgcattaggcaataggttcagcttgggtttccttcagggtcttgcrgyttaggtggctgcgttgcatctaaacttttatatgggcctctcctcacaatagctgcgtccggtggttggaaggctgakcaggatctgtgctgccccmcaggcactctgtgcatgtgtgggactgagagtgagcagcacttttatttgttccactgtaagtacagcaaatactgttctaacaagactaccgctgcagatactgcgcaccccaaagttacgagctctcagaggtacacccgcctggaagatagttgctctctgtacacacctgtgcagtacrtattaatttggtgataatggactattgtctgcgttaggcgcttaagacaccaaacacacaggacaaacctgtccagggacgagtagaggctgtaaagcagcctgctgcccgctggcc

SEQ ID NO: 84603 - DNA, 534 bp, Chicken  19866894382329_5
ttccttcagggtcttgcrgyttaggtggctgcgttgcatctaaacttttatatgggcctctcctcacaatagctgcgtccggtggttggaaggctgakcaggatctgtgctgccccmcaggcactctgtgcatgtgtgggactgagagtgagcagcacttttatttgttccactgtaagtacagcaaatactgttctaacaagactaccgctgcagatactgcgcaccccaaagttacgagctctcagaggtacacccgcctggaagatagttgctctctgtacacacctgtgcagtacrtattaatttggtgataatggactattgtctgcgttaggcgcttaagacaccaaacacacaggacaaacctgtccagggacgagtagaggctgtaaagcagcctgctgcccgctggcctcctgccctgtcccttactgctggaaaaagatatgctagcgactgcagcctgcattcctggaggcagaaacggtagctgtgcttaggtaccatccttgaaaaccttccacagcaccg

SEQ ID NO: 84604 - DNA, 599 bp, Chicken  19866894382330_1
  misc_feature (1)..(110): n is any nucleotide
nnnnnnnnnnnnnnnnnnnnnnnnnnnnnnnnnnnnnnnnnnnnnnnnnnnnnnnnnnnnnnnnnnnnnnnnnnnnnnnnnnnnnnnnnnnnnnnnnnnnnnnnnnnnnncagaggttggcagactgcagtcgttggagcattactggtttgccacagctttaactgaacttcagagaggtctgctgctcacctcaccaaacaaaaccaccgcagtacacagctttgctgctaagagtgctaacagaagaaatagttaaggtaaatacacacattcagctgtatgaaaggaattgcaggrgagaggaagaatgtgacaataagtaaagctgctaaagccacagaatctcccaggaacacggagcacaatccttaagaaaacagacattctcttcatttcaaaatgaggttgcagagactgctcaagaaaacacccctggggacaccgtggcattagcagagctgcagtgctgacactcagtgacctctgcatccctttctgttacacctgatgtgagcagatccctcctagctgtgcccacacctcatgcagccctgggctgggggtacccacgtggtgtcagggcagctctgcagccc

SEQ ID NO: 84605 - DNA, 600 bp, Chicken  19866894382330_2
aggaacacggagcacaatccttaagaaaacagacattctcttcatttcaaaatgaggttgcagagactgctcaagaaaacacccctggggacaccgtggcattagcagagctgcagtgctgacactcagtgacctctgcatccctttctgttacacctgatgtgagcagatccctcctagctgtgcccacacctcatgcagccctgggctgggggtacccacgtggtgtcagggcagctctgcagcccccgcagggtgagagtgggaccacgggaactctgtgcccatcaggattcctgyactgcagcctgcctgcataagcaatggggatgtgaacgccacaaagcaaactgagtgcaaatgatcagagggaggggatggaaacccaggtcaagaaaaaaaggagagaaaaagagagaaagaaaattacaataatatcttacctttactgccaggattttcccactagggacgtggtacgccctgcatgagggaaaaaattaaataacttaagatgacatacaattatctccatacgtatgtgcaacatgtacatgctaatttcacagaaaaaaagacttggagccaatacttgtcact

SEQ ID NO: 84606 - DNA, 599 bp, Chicken  19866894382336_1
  misc_feature (1)..(36): n is any nucleotide
nnnnnnnnnnnnnnnnnnnnnnnnnnnnnnnnnnnnctaattaaaatatactaattgctaagccagtgaagactgctttttggcctgtctgttatggaagacatgctgagcagaacaactgtaggggacaggctaactgtgggggtctcgattcatttgtcgctgtttctgattaaggagaaaatcatcgctaagaagtgcatcttgtccaccttatatgctagctacatctcttctatttaagatgagacacagataccatataactgtttcacatattgtcagtcctcacatggaagwggagaagagagggagacagaaaaccatctaaatcttaatgcttgtggaaaaaaaaaaattacaaatgtgaaatctaaacgcaaaatcatttcctcaacccttgagagaatgaattgccctcattcatctccactgactttctgttcttaagcctaattatgatgtataacacccaggctttaaaataattatgtttgcaactgtgggccatcttgtgcactcccagcaattgtgcaagtgccaatcaagtgactttatgcactacttgccaaacaaagggcaaaaatagccacagatct

SEQ ID NO: 84607 - DNA, 600 bp, Chicken  19866894382336_2
cgagtggcaataaaattaagccttaaatgctaataccttcagcttgcaggataaatacattgacagagaacagtccagtgtatatgaaataagagatcaacatttgtaaataacctatagaagttggttaacactttctgttactgcacatagcatagaatacaattaaggcctagtgtatttcagacattggggaaaaataacagagttcaagagcaaaactctgtatcatttagccgctcattcctttatttcttaatgtttctatttcttatagttaattctcttgactgtttttargttagcagtttcttttgttcagaaaaagtccaaaacctttggatcatacctgcacaaatagctcttgaaagaatggctccaaaaaggaaactgtttcccttcctacagacatcagtaaacagaaagcagttccgactcagcgtgattcttagattccccttccacatgatgaagagagttgctcgctcagcacggtcacaatttgctatttatcacgctgtacttctcctcaaatctttttctaagttctcttcttctgtctttcctccaaatcaggatcagttctccaggactgagtgc

SEQ ID NO: 84608 - DNA, 575 bp, Chicken  19866894382344_1
tcaaaacccaccctggagcttcctgagctggaagttgatttgcacatgggtttttgaacagcagctgggggaagtgggagcaaaagcccctctggcagccagtctgaggatagttcaaagcacccagaatttatggcagagtctctgtaacaaactgcagccaccagatctttctctctggctatgtttgttaaagccttttatcctccataatagagtgatagcatcctgtttgccactcggagattgtcctgagaccaactatacttagggcatatccagtgacatagacgatggcaytgagtgmatcctcagcaagtttgcagatgacaccaagctcagtggtgcagtcagtacactggaaggaaaggaagccatccagagggacctggacaggctggagaagtgggcccatgaaaacctaatgaggttcaataaggtcaattgcagggtgctgcacttgggttggtgcaaagaaggactttggaggtcctgggggacgaaaagttgggcatgagccagcagtgtgcgcctggagcccggaaggccaactgtgttcagggctgcattaaaag

SEQ ID NO: 84609 - DNA, 568 bp, Chicken  19866894382344_2
ccaccctggagcttcctgagctggaagttgatttgcacatgggtttttgaacagcagctgggggaagtgggagcaaaagcccctctggcagccagtctgaggatagttcaaagcacccagaatttatggcagagtctctgtaacaaactgcagccaccagatctttctctctggctatgtttgttaaagccttttatcctccataatagagtgatagcatcctgtttgccactcggagattgtcctgagaccaactatacttagggcatatccagtgacatagacgatggcaytgagtgmatcctcagcaagtttgcagatgacaccaagctcagtggtgcagtcagtacactggaaggaaaggaagccatccagagggacctggacaggctggagaagtgggcccatgaaaacctaatgaggttcaataaggtcaattgcagggtgctgcacttgggttggtgcaaagaaggactttggaggtcctgggggacgaaaagttgggcatgagccagcagtgtgcgcctggagcccggaaggccaactgtgttcagggctgcattaaaag

SEQ ID NO: 84610 - DNA, 600 bp, Chicken  19866894382355_1
ctctgtgtggcacgggcttctctcccagttgtatttccagacgaggagagtgagacattaaaagaaaggaagttaaaaacactgccaaacaacagagtgttaaatacatcgtgaactgaaagccttctgctgaagcgaagtgcatgctttcaaaaaaaaaagaaaaacagcctcatcaaacacatttatttaagtcaattaaaaatagggtattaattcaattgcaggatgactatgtcattaactcggtattttcagatgtggaataatttttacgttcaggagataaaatctggcagygtggcccagtggatatggaactggattaggaattaatccgttaattggctgggcaattgggcaaagcacataatccctccgcatgcctcatttttcttcgtctttaatacagagtttttatgcttttgactttcacaaagtgctttgatacgcacagataaaaggcttatattagttattatagatgaatactgaaacgccataaaagcattgcttaatgaaatattgatttaaaaaatatcaagtgggactggctccctgcctcagatatggaggcattttgaggaaacgcctatgaac

SEQ ID NO: 84611 - DNA, 599 bp, Chicken  19866894382356_1
  misc_feature (1)..(142): n is any nucleotide
nnnnnnnnnnnnnnnnnnnnnnnnnnnnnnnnnnnnnnnnnnnnnnnnnnnnnnnnnnnnnnnnnnnnnnnnnnnnnnnnnnnnnnnnnnnnnnnnnnnnnnnnnnnnnnnnnnnnnnnnnnnnnnnnnnnnnnnnnnnnnngagagaagcatctgtgccttcttccccactcctcacaccctgctatgtccatagagcagtttccaggctccctgtgaggcctccctgcacaccacaaggacacggccactcctcgcccccctgacacagcgctgagctctctgcaggccgccattccyttgggctgcccgtgacaccacgccagtgggagatgaggaggcaaagccactgccagcctcaggcctgcttacactggaactactcaggggaatcacgtatttacatttctaaagggtgtaccaaaggataaggtccagaatgtttcttaaaggcaaagctgtgtggccggcgatgggaggagcaggcggcattgtgtgccagggcttcagcacatgaagagcggtggaggaggctgggagccatgcagctctaaagctgctcacaggctctgagcagcagaaagtaatttgaagcagaa

SEQ ID NO: 84612 - DNA, 600 bp, Chicken  19866894382356_2
aggaggcaaagccactgccagcctcaggcctgcttacactggaactactcaggggaatcacgtatttacatttctaaagggtgtaccaaaggataaggtccagaatgtttcttaaaggcaaagctgtgtggccggcgatgggaggagcaggcggcattgtgtgccagggcttcagcacatgaagagcggtggaggaggctgggagccatgcagctctaaagctgctcacaggctctgagcagcagaaagtaatttgaagcagaaaggtcctgagcatcttgctgagcctctgcctgcgtytggattgaaatatcctccagttttgctcaccaagcacagcctgaggtggactgagagctgcaaagagatgctgatcagagaaaaagttacagccttgtttttcttaatattgcccttgtccagagtgacagatgtgcaagaattggtcatctccgtggtgaaaagcacatttggtttgtaaagctctttggctttgcttaaattaattggctaataagaacccaggaagggattttaatgttttcctaacctcatggaaacagcttttgaattttttttttttaataaaaaagaataata

SEQ ID NO: 84613 - DNA, 600 bp, Chicken  19866894382357_1
aaaatttgcaaactcaaaattaacctggcttttttttccagtgatttaaactacaaaggcatgttggtgatgtatcataacaaactatgaaacaagttcatacaacttgatgctaacaatgcattttgaaaaagaaaatgggagggggagataaaagattcttttttggaatctcaattaaaatgataccagtagatgaaggtagctgggacagtgaaatatgtgtagattccaactaccatctgtctgtaatttactatccaactgcaggttatcattgttcgtctgttatcattaaamacttcttatttaccctgttacaccacttctgcatttaacgttgagaccttcacagatttgartgctgttgtctccagtgactgataatttatgtaagtcctttttgtgtccttacttctgttcaccaggcatctaaaagtgaatactgctctcagcttagattgctgagtaattaatttctaccttctctattcctgtgttgaagccttgggttatgagtttcaagtaataattcactgttgcatatggtttgtcaagttaaattctgcaaacttctgataaagtccaatttccatgcta

SEQ ID NO: 84614 - DNA, 600 bp, Chicken  19866894382357_2
gttggtgatgtatcataacaaactatgaaacaagttcatacaacttgatgctaacaatgcattttgaaaaagaaaatgggagggggagataaaagattcttttttggaatctcaattaaaatgataccagtagatgaaggtagctgggacagtgaaatatgtgtagattccaactaccatctgtctgtaatttactatccaactgcaggttatcattgttcgtctgttatcattaaamacttcttatttaccctgttacaccacttctgcatttaacgttgagaccttcacagatttgartgctgttgtctccagtgactgataatttatgtaagtcctttttgtgtccttacttctgttcaccaggcatctaaaagtgaatactgctctcagcttagattgctgagtaattaatttctaccttctctattcctgtgttgaagccttgggttatgagtttcaagtaataattcactgttgcatatggtttgtcaagttaaattctgcaaacttctgataaagtccaatttccatgctacgtttaatagctggtcccttagaaattaatcctcccctatttgtgatatgttttttcttctg

SEQ ID NO: 84615 - DNA, 600 bp, Chicken  19866894382358_1
atcattagagcggagtcttaaatatatatctatatatcttgtattataaagctgatgcctgagaaggggagctgtttgtactaagtggagttttgttgtagggcaacgagggccatagtttccttctcatggagaagatgctttccacgatgaaagcttgaggatgtgtaatgataagaaaggtaaacttaagctggaaaagcataattcctattttagtatacatatacatacacagatacatgtacacgttttagccttcaagtcttagaacaaggccagaaagcgtatctcttaggrtataccttagtacttcatattytgtgagcatcctccctckccagaaagaaaagggatttcctgcagcactcactgagcattacatttcagccatccagttcttctgtcagaacttttgtgtccttgtctcttgattaatactatcaccttcacttttaagcaattacaatactagataaaataacgtatacagcttgcaataattctctatcacataggtacgtgtttacaatttgcaatccatctttaggaacattcagatcttctcatcttcctgattttctctctcagaagaaaatg

SEQ ID NO: 84616 - DNA, 600 bp, Chicken  19866894382358_2
tatatatctatatatcttgtattataaagctgatgcctgagaaggggagctgtttgtactaagtggagttttgttgtagggcaacgagggccatagtttccttctcatggagaagatgctttccacgatgaaagcttgaggatgtgtaatgataagaaaggtaaacttaagctggaaaagcataattcctattttagtatacatatacatacacagatacatgtacacgttttagccttcaagtcttagaacaaggccagaaagcgtatctcttaggrtataccttagtacttcatattytgtgagcatcctccctckccagaaagaaaagggatttcctgcagcactcactgagcattacatttcagccatccagttcttctgtcagaacttttgtgtccttgtctcttgattaatactatcaccttcacttttaagcaattacaatactagataaaataacgtatacagcttgcaataattctctatcacataggtacgtgtttacaatttgcaatccatctttaggaacattcagatcttctcatcttcctgattttctctctcagaagaaaatgaatgatgtttcatttcacacgt

SEQ ID NO: 84617 - DNA, 600 bp, Chicken  19866894382358_3
gtattataaagctgatgcctgagaaggggagctgtttgtactaagtggagttttgttgtagggcaacgagggccatagtttccttctcatggagaagatgctttccacgatgaaagcttgaggatgtgtaatgataagaaaggtaaacttaagctggaaaagcataattcctattttagtatacatatacatacacagatacatgtacacgttttagccttcaagtcttagaacaaggccagaaagcgtatctcttaggrtataccttagtacttcatattytgtgagcatcctccctckccagaaagaaaagggatttcctgcagcactcactgagcattacatttcagccatccagttcttctgtcagaacttttgtgtccttgtctcttgattaatactatcaccttcacttttaagcaattacaatactagataaaataacgtatacagcttgcaataattctctatcacataggtacgtgtttacaatttgcaatccatctttaggaacattcagatcttctcatcttcctgattttctctctcagaagaaaatgaatgatgtttcatttcacacgtgaaagagactgacacagt

SEQ ID NO: 84618 - DNA, 599 bp, Chicken  19866894382361_1
  misc_feature (1)..(74): n is any nucleotide
nnnnnnnnnnnnnnnnnnnnnnnnnnnnnnnnnnnnnnnnnnnnnnnnnnnnnnnnnnnnnnnnnnnnnnnnnnagttgtaggggaagacccgactgatgccaaaaaagatagacaattcaaagcatgaaaaaatcaacagccagtttcagattcttcttaaaaaaagacataaaggtaaacttgattctgttatttcctaacagagaactcactgaaaaggtaactttcaggaaatgaaatggctaagcaatattaaattgtgtttatctcgcataatcttcctcaaagctagctatasgtgctgatggacagcatacttcctctcctctgtagtacaggaaatttcctctatgcttactcttctgagaagatttgtcaacatcttacctttcctcaattgctcttcaaagtcttaaaaatactgcagtaaarctctccaatgagtcctacctaaatccaggtctcttatgctctgggaagaattcatactggcatgggaaacctgaaatatatggatattttattcctgtcaaaacaaatcggagaaagtacaattgtgtctttttataactagattgcaaaagttttgatatattc

SEQ ID NO: 84619 - DNA, 600 bp, Chicken  19866894382361_2
tcaacagccagtttcagattcttcttaaaaaaagacataaaggtaaacttgattctgttatttcctaacagagaactcactgaaaaggtaactttcaggaaatgaaatggctaagcaatattaaattgtgtttatctcgcataatcttcctcaaagctagctatasgtgctgatggacagcatacttcctctcctctgtagtacaggaaatttcctctatgcttactcttctgagaagatttgtcaacatcttacctttcctcaattgctcttcaaagtcttaaaaatactgcagtaaarctctccaatgagtcctacctaaatccaggtctcttatgctctgggaagaattcatactggcatgggaaacctgaaatatatggatattttattcctgtcaaaacaaatcggagaaagtacaattgtgtctttttataactagattgcaaaagttttgatatattcagaattcactgatttcagcagcagtgcaactgtcactacagtcaatacattttgctagagtatcacgacagattaagaagcaaaaattatctactgcaagtgtaaaaacatttttttttcacattttaaaataag

SEQ ID NO: 84620 - DNA, 599 bp, Chicken  19866894382365_1
  misc_feature (1)..(70): n is any nucleotide
nnnnnnnnnnnnnnnnnnnnnnnnnnnnnnnnnnnnnnnnnnnnnnnnnnnnnnnnnnnnnnnnnnnnnncattataaagaaaaaaataaaagacctccagataacaatccctccttgtgggtttgaccccatacctctgaaagcaacgcactcaggccaggttcacagcagtgccaaactgccaggctttcatgcaactacaggggatgcactttacagcttgcatacctgtctgcactttcaccattaagcctacttgtaagtctccctgttcaagtgctcctcatcccctccccatytacaggagatctcctgctacaaatgtcttggctttatcatgcaagatttgccaaataaacctttcccccaaggcttctgaagtatatattaagatgaaaggaaaaaaaaaaaaaaggcttaacgtgtataacaacagataattaagcacttcagaaacattcacacttgctcacagcctcccccacaagatcaggtacaagtcagaaagtgtttcccacggtgaagtcagaggaaaccgaagagaagagaagcgaaggctgaggcaggacagagccctgcttcccctgagcacgttaca

SEQ ID NO: 84621 - DNA, 599 bp, Chicken  19866894382367_1
  misc_feature (1)..(94): n is any nucleotide
nnnnnnnnnnnnnnnnnnnnnnnnnnnnnnnnnnnnnnnnnnnnnnnnnnnnnnnnnnnnnnnnnnnnnnnnnnnnnnnnnnnnnnnnnnnnnnccatttaaaatgaatttaaagggaaagatttaaaaatatgtatttctatttaaaatatattgcaatttaatcagtgtattcagagattttgatgacttattttgtctatacaaattactttagtctgaatctgttaagcttactttttattctatcttcaaagtagaattatcaaaactcttaaaacagctattacatgctggagkgcttttcacctttctttgctgcttggttttaaactggcttcttgcctaataacctcctcttgtaaattagctccactgttgaaggagaagctttgccatcctcaacaagaagtatcctggtgtactaagtagatttgaagaagcagcttttcgctgggctcagctattcaatcctcagaagcatggtctctctcctgcttatytgagaatttggagggagcacagatagtttactttgtcttacacagaggtaagtrtggccaggaggaagaatgcataattaagatagttcaccactg

SEQ ID NO: 84622 - DNA, 600 bp, Chicken  19866894382367_2
acaaattactttagtctgaatctgttaagcttactttttattctatcttcaaagtagaattatcaaaactcttaaaacagctattacatgctggagkgcttttcacctttctttgctgcttggttttaaactggcttcttgcctaataacctcctcttgtaaattagctccactgttgaaggagaagctttgccatcctcaacaagaagtatcctggtgtactaagtagatttgaagaagcagcttttcgctgggctcagctattcaatcctcagaagcatggtctctctcctgcttatytgagaatttggagggagcacagatagtttactttgtcttacacagaggtaagtrtggccaggaggaagaatgcataattaagatagttcaccactgctttgaggatcttaagttctgtttactccactgtcaaagagtctgtgtgacatttagtatgtcgtttaacagaaaggcaataattaattgtatatttttcatttagtggctgctcagtttggaggaattgattactgcaacagaaattcctgcattttaaatacatgaagraacaaaatataaagcattctggaaagcaagatt

SEQ ID NO: 84623 - DNA, 600 bp, Chicken  19866894382367_3
tagaattatcaaaactcttaaaacagctattacatgctggagkgcttttcacctttctttgctgcttggttttaaactggcttcttgcctaataacctcctcttgtaaattagctccactgttgaaggagaagctttgccatcctcaacaagaagtatcctggtgtactaagtagatttgaagaagcagcttttcgctgggctcagctattcaatcctcagaagcatggtctctctcctgcttatytgagaatttggagggagcacagatagtttactttgtcttacacagaggtaagtrtggccaggaggaagaatgcataattaagatagttcaccactgctttgaggatcttaagttctgtttactccactgtcaaagagtctgtgtgacatttagtatgtcgtttaacagaaaggcaataattaattgtatatttttcatttagtggctgctcagtttggaggaattgattactgcaacagaaattcctgcattttaaatacatgaagraacaaaatataaagcattctggaaagcaagattctatatctcttacaataaccatgtaaatataggaagttctttgattttatagtc

SEQ ID NO: 84624 - DNA, 552 bp, Chicken  19866894382367_4
atcctcagaagcatggtctctctcctgcttatytgagaatttggagggagcacagatagtttactttgtcttacacagaggtaagtrtggccaggaggaagaatgcataattaagatagttcaccactgctttgaggatcttaagttctgtttactccactgtcaaagagtctgtgtgacatttagtatgtcgtttaacagaaaggcaataattaattgtatatttttcatttagtggctgctcagtttggaggaattgattactgcaacagaaattcctgcattttaaatacatgaagraacaaaatataaagcattctggaaagcaagattctatatctcttacaataaccatgtaaatataggaagttctttgattttatagtctctgtctcctatttgtataatcacagtaatactttactcacaattaccaatggtgtagcaaatttaaatttattaaatacaattctgttgtgtttatgaccctcatagaaaagttggtgaagctaataattctgtgtttagagcagggcttttatgccacacaat

SEQ ID NO: 84625 - DNA, 600 bp, Chicken  19866894382373_1
atgtatgtccagtgataacagtagcatattaattctaactattgtctgttacaggtcagcttatcaccagccaacctcttacagaccgagattactgctaactggagagaggggttcgggtcagacttcacaccttgctccagcactattgcacactcttgaaaagttctctgtacacaggctagatctgccagcactttattcagtcagtgccaaaacacctgaagaatcgtgtgcacaggtgacatttaaaattctcttgcaataagtaactgatgtaattctggaacagatgagtarcatctaaataacrgcagatgagtgyagtgttaggtaaaagccaggttttcataggctccttgtattttgatattttaaaaataggtctctctggatggatattcacatctcyctgttgactaaaaagagtaatcatgtttttaatgtgacctctcaggcagataccttatctcaagtaaactgaatctgggtttttggttccaaattttcatttttgttggtttatgtgtaaattgttgtgttatggttttatgctcagttacttactgtaaatgcttaagtgtgcggtggattttatgg

SEQ ID NO: 84626 - DNA, 600 bp, Chicken  19866894382373_2
gataacagtagcatattaattctaactattgtctgttacaggtcagcttatcaccagccaacctcttacagaccgagattactgctaactggagagaggggttcgggtcagacttcacaccttgctccagcactattgcacactcttgaaaagttctctgtacacaggctagatctgccagcactttattcagtcagtgccaaaacacctgaagaatcgtgtgcacaggtgacatttaaaattctcttgcaataagtaactgatgtaattctggaacagatgagtarcatctaaataacrgcagatgagtgyagtgttaggtaaaagccaggttttcataggctccttgtattttgatattttaaaaataggtctctctggatggatattcacatctcyctgttgactaaaaagagtaatcatgtttttaatgtgacctctcaggcagataccttatctcaagtaaactgaatctgggtttttggttccaaattttcatttttgttggtttatgtgtaaattgttgtgttatggttttatgctcagttacttactgtaaatgcttaagtgtgcggtggattttatggtgtgtaaggatag

SEQ ID NO: 84627 - DNA, 600 bp, Chicken  19866894382373_3
atattaattctaactattgtctgttacaggtcagcttatcaccagccaacctcttacagaccgagattactgctaactggagagaggggttcgggtcagacttcacaccttgctccagcactattgcacactcttgaaaagttctctgtacacaggctagatctgccagcactttattcagtcagtgccaaaacacctgaagaatcgtgtgcacaggtgacatttaaaattctcttgcaataagtaactgatgtaattctggaacagatgagtarcatctaaataacrgcagatgagtgyagtgttaggtaaaagccaggttttcataggctccttgtattttgatattttaaaaataggtctctctggatggatattcacatctcyctgttgactaaaaagagtaatcatgtttttaatgtgacctctcaggcagataccttatctcaagtaaactgaatctgggtttttggttccaaattttcatttttgttggtttatgtgtaaattgttgtgttatggttttatgctcagttacttactgtaaatgcttaagtgtgcggtggattttatggtgtgtaaggatagcaagccagttta

SEQ ID NO: 84628 - DNA, 600 bp, Chicken  19866894382373_4
ggttcgggtcagacttcacaccttgctccagcactattgcacactcttgaaaagttctctgtacacaggctagatctgccagcactttattcagtcagtgccaaaacacctgaagaatcgtgtgcacaggtgacatttaaaattctcttgcaataagtaactgatgtaattctggaacagatgagtarcatctaaataacrgcagatgagtgyagtgttaggtaaaagccaggttttcataggctccttgtattttgatattttaaaaataggtctctctggatggatattcacatctcyctgttgactaaaaagagtaatcatgtttttaatgtgacctctcaggcagataccttatctcaagtaaactgaatctgggtttttggttccaaattttcatttttgttggtttatgtgtaaattgttgtgttatggttttatgctcagttacttactgtaaatgcttaagtgtgcggtggattttatggtgtgtaaggatagcaagccagtttaattttcatattgatagttcaatcttgacaggcttttaacacatacatgacaagcagtatttttgtaggccctaccacattgatgtaa

SEQ ID NO: 84629 - DNA, 600 bp, Chicken  19866894382374_1
aatgattcagccgggctccttctagcaactcccatctctcttcttacttcttcaccaagttgaattgtagttctgatcatgtttcagtgtccatgaaattgccacgaaatattgttaagctgtctgaagttgagttttattttgctttcagagggtaggttggaatatttttctttattttatctttgtcagtctttgtaagtagttgaatgacagctgtacctgtttcctgtgatgccttgcaatgtgacatgcaccccgtgaagtgcttttctcagaactattatcctgcatggtacrtatcacacagtttgctcccagcaccacctcctactcatgccgtcttctcttaatgctagcaggtcagactgtgtgctgggcattataccttgtctgttgtgttctttccatatgaggtatctgctctcatctctgattctaggacctcaggtccttcattctcccctgttcctgatgttctttcagaaatgcagccatttctatgtttcttgcagcttgcagccactctccaaatgctgggcaacaatatccgtcacccattcaattgctgttctcaggaagtaatcatgcatttctggc

SEQ ID NO: 84630 - DNA, 600 bp, Chicken  19866894382378_1
acctcctgccaagtcggcatcctctgctcatgcaaatatctgttgcagggggatgtttgatttagaacatcacaggcaacaaaagctctcggctgcttgcattgctcttggctgcttgcactataattttttgttggggtttcacttcagacacactatattcataaggactttaaccaagatgaggtgtgcccaggtcactggacagactggctgacaccaacagaaggattattttaatctacattagatcctgtgcagctccgctttgccaggcagggcaggagccagcaagcaacygtaaaatgccagaggcatccaggacgtgcagtcagaagctgtgtttcctggggctggctccttgcctcagcaggagctggtagattacagtctctgcagacttcaggtgatgctgaggaggttgtgggactggggctgcgagaaaacagcatctcccagctcctgctaagttgttattaaccatacagtacaaacacaggcagacactaactagctgctgacctctgagatagggagtatggttttttcacgttcctgatcatgcgttcaagtgtggcacagcactcagaaaatggggtc

SEQ ID NO: 84631 - DNA, 600 bp, Chicken  19866894382379_1
gtgagggaaacaggcaattcacaacaggaatttcttctaatgtagtaagtttagttagaaaccaaaagagcaatccaggccattggaaacaattcaggagtacaatttcccttctgagaagacaactgctttccttagccctatcactgtaggcacagcaagaacatgggagaaaaaccctatttctcaacatagcgcatgtggctcacacaggatctttgctcaccttcactgggggaaaatggagttaattaacttgctgtggcagtaaaatgggcctttgctgccttctaacaacawctccaggcagagtggaaagtacctgcaatcttcacagtcatgaaggggaagagtggctttcaagtcatttctgtgctggctgagtcttccggggagacgggcactgaggaacctgcaagctgttccattcagcagttcagcgtaggcaaggttcaccagccatgactcaggcatctgaaacagtgtttagctctctaccaatcaccttcagctccatttgtacttgaggaagaaaagtcggcagagaaaattaacttatccaaatccaggagactcaagggataccctgatggtgcctct

SEQ ID NO: 84632 - DNA, 599 bp, Chicken  19866894382388_1
  misc_feature (1)..(64): n is any nucleotide
nnnnnnnnnnnnnnnnnnnnnnnnnnnnnnnnnnnnnnnnnnnnnnnnnnnnnnnnnnnnnnnntcctcattactcagcacatgatggccaagtatatttttgtcttccatgaaagagactggctctactatctgaactggagcagcctcatccataggatcaatcagagtctgagaagctggatctccacagagattaagctgaggctgtagtttacaccctctgctctcaccttcccgaatgtggagattgatgacataacagcagttagggtcaggttctcgtaggtgcagctggtrtttcacaattccacctggttcacttagtaaygaatccacctggctctctctgtttagggactgcaactcttcttcattatccaggctgatgctttcagcctcaaaccagtctgggtgctctgtctgccagtttctgaacttctgaatggcctctttcaacttccttccactaggggtatcaatgtagttttcagctgtgatttcctggattcgatggatgcgaccgggctcraacttctccaagtcctgaatccgaaaataaatatcctcaaacttgtccatcagttggtacctggatg

SEQ ID NO: 84633 - DNA, 599 bp, Chicken  19866894382388_2
  misc_feature (1)..(33): n is any nucleotide
nnnnnnnnnnnnnnnnnnnnnnnnnnnnnnnnntcctcattactcagcacatgatggccaagtatatttttgtcttccatgaaagagactggctctactatctgaactggagcagcctcatccataggatcaatcagagtctgagaagctggatctccacagagattaagctgaggctgtagtttacaccctctgctctcaccttcccgaatgtggagattgatgacataacagcagttagggtcaggttctcgtaggtgcagctggtrtttcacaattccacctggttcacttagtaaygaatccacctggctctctctgtttagggactgcaactcttcttcattatccaggctgatgctttcagcctcaaaccagtctgggtgctctgtctgccagtttctgaacttctgaatggcctctttcaacttccttccactaggggtatcaatgtagttttcagctgtgatttcctggattcgatggatgcgaccgggctcraacttctccaagtcctgaatccgaaaataaatatcctcaaacttgtccatcagttggtacctggatgtgacattgaacagatcaggaatatctttctc

SEQ ID NO: 84634 - DNA, 600 bp, Chicken  19866894382388_3
ccttcccgaatgtggagattgatgacataacagcagttagggtcaggttctcgtaggtgcagctggtrtttcacaattccacctggttcacttagtaaygaatccacctggctctctctgtttagggactgcaactcttcttcattatccaggctgatgctttcagcctcaaaccagtctgggtgctctgtctgccagtttctgaacttctgaatggcctctttcaacttccttccactaggggtatcaatgtagttttcagctgtgatttcctggattcgatggatgcgaccgggctcraacttctccaagtcctgaatccgaaaataaatatcctcaaacttgtccatcagttggtacctggatgtgacattgaacagatcaggaatatctttctcactgcttatcccatcraaatagcagactatatacattccaaaacaggctggcttcttgaaatctggcaggatcaaattcaaggctggggtgaacaggtctccagttggcttttgctgatcttgcttgagacacacaggtgcgctcccaagcattgcttgccatttggcctgggtgcctcgtgagcataagattatgatcttt

SEQ ID NO: 84635 - DNA, 600 bp, Chicken  19866894382388_4
tctctgtttagggactgcaactcttcttcattatccaggctgatgctttcagcctcaaaccagtctgggtgctctgtctgccagtttctgaacttctgaatggcctctttcaacttccttccactaggggtatcaatgtagttttcagctgtgatttcctggattcgatggatgcgaccgggctcraacttctccaagtcctgaatccgaaaataaatatcctcaaacttgtccatcagttggtacctggatgtgacattgaacagatcaggaatatctttctcactgcttatcccatcraaatagcagactatatacattccaaaacaggctggcttcttgaaatctggcaggatcaaattcaaggctggggtgaacaggtctccagttggcttttgctgatcttgcttgagacacacaggtgcgctcccaagcattgcttgccatttggcctgggtgcctcgtgagcataagattatgatctttgaagacagttcttccatttccttcttctgtcgagtgagccagggtaatggtccaaactctgagatctgatgatcttctagcagatctagggctacagcagtgccacagacagtc

SEQ ID NO: 84636 - DNA, 599 bp, Chicken  19866894382395_1
  misc_feature (1)..(48): n is any nucleotide
nnnnnnnnnnnnnnnnnnnnnnnnnnnnnnnnnnnnnnnnnnnnnnnnttctgtgctggatcctatgctccctccgattgtcactgacataagatttattctgaacaggccttaggttctgcaaaagaccacctgcaggaagtgaagctccctgcctcccctcaggttcctttctgtcagcttccatgatgttcacagctgaaagatcactgacattactgaagctatcatcaaacaacaagccatcacttgtattcaggcttgtttccatgacaggatggtgttcgtcttctacaaagygctccctatcaagagggcaggttgctttattgggactgttagaagcactctcccctttcactgaattttgggtatgataatactgtagaaaactgtttagctgagaatcggtcactgagtagtcacttcctttaaggacaggtatagatgctatttcttttgctacaggctgtacactaaggtctccagactctaaaactttgttactgcagtgatgatctgtgtttttcataacattatttgttgtgataatactcgataagcctagtttccttactgttgcatctagcctttcccca

SEQ ID NO: 84637 - DNA, 587 bp, Chicken  19866894382395_2
ttttgggtatgataatactgtagaaaactgtttagctgagaatcggtcactgagtagtcacttcctttaaggacaggtatagatgctatttcttttgctacaggctgtacactaaggtctccagactctaaaactttgttactgcagtgatgatctgtgtttttcataacattatttgttgtgataatactcgataagcctagtttccttactgttgcatctagcctttccccagtagcattcccagcctgcaaagtgcttgtattcatggagatttcctgctgaggtgccactgacagwtctggatcctgtattccctgctgtcgtgtgatttcagctgctgcctcctgttttattatccyctcagtttgagtatccaactggaagctatcttcaaagtccatagagacacaaatcaaacgagaggacggaccattctgaatatcatctgcatcacatatagatttggattttactagagagtctttcagaaaatccttaagatgactgttgcctttttgtagtgcttcatcttgtaacaattttccattggggatttttttcccatttataccaccattctggat

SEQ ID NO: 84638 - DNA, 525 bp, Chicken  19866894382395_3
tcctttaaggacaggtatagatgctatttcttttgctacaggctgtacactaaggtctccagactctaaaactttgttactgcagtgatgatctgtgtttttcataacattatttgttgtgataatactcgataagcctagtttccttactgttgcatctagcctttccccagtagcattcccagcctgcaaagtgcttgtattcatggagatttcctgctgaggtgccactgacagwtctggatcctgtattccctgctgtcgtgtgatttcagctgctgcctcctgttttattatccyctcagtttgagtatccaactggaagctatcttcaaagtccatagagacacaaatcaaacgagaggacggaccattctgaatatcatctgcatcacatatagatttggattttactagagagtctttcagaaaatccttaagatgactgttgcctttttgtagtgcttcatcttgtaacaattttccattggggatttttttcccatttataccaccattctggat

SEQ ID NO: 84639 - DNA, 599 bp, Chicken  19866894382400_1
  misc_feature (1)..(120): n is any nucleotide
nnnnnnnnnnnnnnnnnnnnnnnnnnnnnnnnnnnnnnnnnnnnnnnnnnnnnnnnnnnnnnnnnnnnnnnnnnnnnnnnnnnnnnnnnnnnnnnnnnnnnnnnnnnnnnnnnnnnnnnnaactactgccatagtagttaagcctttgtgttttttgagtgtacaatagcagtcttttaaatatgttatttgtactggatgcaattgcacatgagaatttcacctcagaaggtggcaagtggacatgaagaaggatcacagtgatctcttaggagtcttctagaccatggttagtcattytctctgggcttagttaattttaaggacagaattttgactactttatgctgatagaatgtgtgcagggaaaccacgtattgcagtgcaactaagtcataaaatacatttaatgttacatggatgtaataatttgtcaaatataaaatttttgttgtacaaaatctgatgtatgtcctttatgcagtgcatctgtggcacagttttgagaaggtaatatttatggcttaatatgatggaaggtgrctgtgaggcttctttgccaacttcatgtttcttattctagttcaaaagttaaaata

SEQ ID NO: 84640 - DNA, 600 bp, Chicken  19866894382400_2
catgaagaaggatcacagtgatctcttaggagtcttctagaccatggttagtcattytctctgggcttagttaattttaaggacagaattttgactactttatgctgatagaatgtgtgcagggaaaccacgtattgcagtgcaactaagtcataaaatacatttaatgttacatggatgtaataatttgtcaaatataaaatttttgttgtacaaaatctgatgtatgtcctttatgcagtgcatctgtggcacagttttgagaaggtaatatttatggcttaatatgatggaaggtgrctgtgaggcttctttgccaacttcatgtttcttattctagttcaaaagttaaaataacaaatgctctccccctgatttggagttcagtatcctctttagggttgctttagctcattcctaagccactgtgtatagttcagccgcaggcttgtggttacttgagatgtttaatcaatactgaattccttgagtaaatccactgcatgagtaagataccaaaaagcaggcagaccagttaaaatttgaggatgtaaaatcaaaatgatttggcttaaatgtatttggcttgtcataactttt

SEQ ID NO: 84641 - DNA, 600 bp, Chicken  19866894382415_1
ttgaatataaaattaaataagaatgcatgcaaaggataacagaatgccagtcattccgctcccagcaagtcacggcagttacaaaaacagagtcaatcagtgctgcaaatccagttaggaaagcgggaaaaaatccttcatttatggtttgaccatctgagaattaaaggtggctttttcagtacgcctaaacaacagcaaggcagagcagcagataaaatcacggggtttcttgaatccttttctcatatctgtaacccaaccactacagtgttcaacctgacaggtcgaccattgccrttatttcattacttctaaagtataagtttctgctcaagtaaaggagccccaatataacaagccaatggcctaccagtgaaatgactggtattactgccagggatgtactcaaatccaaacagctgctatgacaagttggcaagtgcacacattaatgaatcaatccccacccaactcacctccttccctttctggtttaaattagtttagtgaacagaaatttagagaagaactactgctgatttttaacaactacacccctagccctggctccagctctgggacagaggctttgttggt

SEQ ID NO: 84642 - DNA, 599 bp, Chicken  19866894382417_1
  misc_feature (1)..(48): n is any nucleotide
nnnnnnnnnnnnnnnnnnnnnnnnnnnnnnnnnnnnnnnnnnnnnnnngttgttaactcccaagagtctctcctctctttcttcatgatagctgttttgttaaagccatcatggaatcatttgaaaagcttcctggaaattaaacatctacccttctctcagctccatcccagaggttttcacttgcctgtatttaattcctttaaaaatcctctaagaaatccatgaactgaaatccaattacatagctcaccttggcttttcacaacagagcttacagatcaaatttatccatatttytactttatattttgcacaggttctgcctcctayaaaggtcagactcacttctgtttagccattcaatgctcacaaatggtatttccctttctaggagggggagtccttcagtgctattttaactcatgttccatttttgatccttaagtacaacatttttaaaggaaactgctgcctaaccatgttctccatcctatatttgggtagatgcttgctgcccccatctaaggctgttggctgcttcctcctagtttggaaatgacaagacaaggagcaaatttagctgaaataacttcttc

SEQ ID NO: 84643 - DNA, 599 bp, Chicken  19866894382417_2
  misc_feature (1)..(15): n is any nucleotide
nnnnnnnnnnnnnnngttgttaactcccaagagtctctcctctctttcttcatgatagctgttttgttaaagccatcatggaatcatttgaaaagcttcctggaaattaaacatctacccttctctcagctccatcccagaggttttcacttgcctgtatttaattcctttaaaaatcctctaagaaatccatgaactgaaatccaattacatagctcaccttggcttttcacaacagagcttacagatcaaatttatccatatttytactttatattttgcacaggttctgcctcctayaaaggtcagactcacttctgtttagccattcaatgctcacaaatggtatttccctttctaggagggggagtccttcagtgctattttaactcatgttccatttttgatccttaagtacaacatttttaaaggaaactgctgcctaaccatgttctccatcctatatttgggtagatgcttgctgcccccatctaaggctgttggctgcttcctcctagtttggaaatgacaagacaaggagcaaatttagctgaaataacttcttccagaagggaccctttcacccacccagtgccttc

SEQ ID NO: 84644 - DNA, 600 bp, Chicken  19866894382419_1
caggtgtctgatcagcggaatgaatccaagtatgagtacatcttggacttattggcttgggtgggatggctctcattaatatgtcatggagaactgatgtagtatttctcatatcgtggataagactgatattcttgcagagtcctgtagataataaatattattagtgtgtgcagtgtgatcaggcggagtcagggtatttttctgctatttgtagttcttataaaaaaaaatgtgccttgttgcttttacttgtaattccacagattttacttgtggtattttgcccgttcctgcttytgacatctaaaacagtaaaaggttttaaattggaggctttgcatttgacatacccacagcccaattacacttctagtgagagctcctttaatttatgatttataaaggtatacgatttcttcatggaccattaargccactacttagccaaaatcttcatcctgttcatctgatgagcatctggcttttaaaagtcgctttatctttggttaccaaggtcagaagagtattttgttccccggtttagttttcactctatcagtgcaatatctgtggaatacactttctcagcctttctgc

SEQ ID NO: 84645 - DNA, 600 bp, Chicken  19866894382419_2
tgcagagtcctgtagataataaatattattagtgtgtgcagtgtgatcaggcggagtcagggtatttttctgctatttgtagttcttataaaaaaaaatgtgccttgttgcttttacttgtaattccacagattttacttgtggtattttgcccgttcctgcttytgacatctaaaacagtaaaaggttttaaattggaggctttgcatttgacatacccacagcccaattacacttctagtgagagctcctttaatttatgatttataaaggtatacgatttcttcatggaccattaargccactacttagccaaaatcttcatcctgttcatctgatgagcatctggcttttaaaagtcgctttatctttggttaccaaggtcagaagagtattttgttccccggtttagttttcactctatcagtgcaatatctgtggaatacactttctcagcctttctgcctgaaaacagcctaatcaaagaatacttctgtgaaacacatgggtgcatttccaacaatttcagcaagagcgacgcggatacaaaataaataggtcactcatattcactgttgtatttgtattatttttttaata

SEQ ID NO: 84646 - DNA, 600 bp, Chicken  19866894382428_1
atatgaagggtcccttgcatcctccattgcagcctcagccacagcctcagcctcagcagcaccatcaccagcagcagcagcatcaccaccagcaacaacaacagcaacaccatcatcatctccaagggccaccacagcccttgatgcccatgaaccaaccacagttcaggcctcacatgcaggcctctccacagcagccaaataacaacagaatgcagtgtcagcagcggcagggtccaatgaagccaaggcatgtaagtaccacttatggtgttatctcacttagttttgcatggacartaaaacttaccatgtagttttttaatctcatttactccttttctgctctgtccctttcttttacttttttttttttttgctcccttctctaccttggtcattttacaacctacttccacaaatagcatgtctatcttgtacctttttttttttatttcagtttccagtgttttcttgatttggctccaataagagattataaaaatgttccaagaactgtcagtgaaaggttttggaggataagtttgcattatatttaaaactgcagatagttagtgactgtgtgggagcccagttctc

SEQ ID NO: 84647 - DNA, 600 bp, Chicken  19866894382431_1
tttgtatgccgggcatccctttgtacagtggaatttgaggggtgtactgaggctgtgctgaaacaagaagcagcattccccacctctcagctgtcagcctccattcctacaggctgcctgagcaactgagtgcagctgagtggtgcagcctccaaatgcatttcatgtaatggaacaggcagaggctgcatcctggcagggcaagaacactgctgctggtggtccctaaagggctgcccactgctcagcccctagctttaacctgcagggacaaaccagagggtaggtaaggcttgcctrtgtttctgaatcagaactcatcttttagtagttacatttcctcttccctacccagtggtatcattaccagaactcagcctgctcccaaatcccccttcccaccaactcccacaactttggaacagtttagtggtcactctgcattttgctgcatagccctaattactactcagcactataattgatacgttaaagcctattaaaatgtggagctgagccactgcctaacagtgcacttctaatgccaaaaatcactcacaatttgtttctgtacttcgtttcagctacttttaaatcaat

SEQ ID NO: 84648 - DNA, 600 bp, Chicken  19866894382439_1
ggaaacaatgagaacaagcgagtggtgagcaggctccatctcttgggtgtccacctggaagaggagaacagtggaacatctctctttgcaaggctctgtgccacagctgaacttcaaaataagctttcttgtctttcagaaagacaataccgatggattaattacatgggaataaatggcatagctgtgttttaggggtaaagtgttgaaatctaccaaacactaaagagctgtcatccctccccagctccggagagcaggagccattctaatgacaagttttgctaacgaagcagtcgwgaaaaatatttactgccagagttccttcaactgacatttgcatcttctgtaatttgccaaactctctgtgcaactggagctgttttcatgggactataatttacaagaagggtttttcctcgcttctcagtgtctgcttaaaaaacaacaaaaaaaacagccaaaagcatctttggttctgagattcacacttaattttttattttgttttggccagaggaggagggagcgacaaagggaaatggatatcctaggagacagagcagagatggaggagtgtgagataggagggctgctcag

SEQ ID NO: 84649 - DNA, 600 bp, Chicken  19866894382439_2
ttttgttttggccagaggaggagggagcgacaaagggaaatggatatcctaggagacagagcagagatggaggagtgtgagataggagggctgctcagtgcagtgagtcatggtcgctcgcaggagagccaagaagtgtcagagcacagcggggtcctccccggttcagccaagcaggagccagctgagaatggacgcagttcccccgtccccaggggagaaaataaagatggatttgaggcaggatcagcatttggatccaagaggaaatggttaaaaccaccggatgtcattggtctyctcygtggtggtgagagggaccacgatgccaatgtgccctgcaaaccaccccgttgggttttttttttttagagcaccaaatattcgtgtgttgggctattgggaaaacctgaggaacagtgacagcaacaggtgaatgcaggtgggatcatgaaaacttacaacgtgtttcctgactcgagatgttgtgccaaaaccgggcatggacagatgcgtttccatcatcgttttgtgcttcattgagaacagctgccacccgctttcccaccgtctttgtactcccctgcacgtttgcagcac

SEQ ID NO: 84650 - DNA, 600 bp, Chicken  19866894382439_3
gttttggccagaggaggagggagcgacaaagggaaatggatatcctaggagacagagcagagatggaggagtgtgagataggagggctgctcagtgcagtgagtcatggtcgctcgcaggagagccaagaagtgtcagagcacagcggggtcctccccggttcagccaagcaggagccagctgagaatggacgcagttcccccgtccccaggggagaaaataaagatggatttgaggcaggatcagcatttggatccaagaggaaatggttaaaaccaccggatgtcattggtctyctcygtggtggtgagagggaccacgatgccaatgtgccctgcaaaccaccccgttgggttttttttttttagagcaccaaatattcgtgtgttgggctattgggaaaacctgaggaacagtgacagcaacaggtgaatgcaggtgggatcatgaaaacttacaacgtgtttcctgactcgagatgttgtgccaaaaccgggcatggacagatgcgtttccatcatcgttttgtgcttcattgagaacagctgccacccgctttcccaccgtctttgtactcccctgcacgtttgcagcaccttg

SEQ ID NO: 84651 - DNA, 600 bp, Chicken  19866894382440_1
tgttctctaaattgaaaatactacttaaaaacatttctgaagattctggatggctgtctttgcaatataaatcggtgtagttttgtctttgtgcatgtgaagatgacctgaaacaaaatgctgggaatgtggatttatgtgctttatttttcatttgggcattgaatgaagaccgctgccaaggataactgtaaattgatgcgaggaaactaatacgaagacaaagtcaaggagaaattagaagtaggggagaggagagtagatatgagtaggtgatgatagagaatgaaatgaaagaaraggacgtagtaagatttttttcctactaaatacatttttgctccaaacctgttgtgctctttgcagggtctggaacaaactggcagcccagtgagctgtgtgccatggttacaggtgaagggtttattttcctcagaactgggaaatagtcccatactgctgcttgccatcaggtcttgtgagatgcgtgacacgtggatcgcccagttgatgtgcatctgtgagtgcacatttcagtctaacccattttgactaacccatttcagttgaaaggagctctgttatatcaagcagtattat

SEQ ID NO: 84652 - DNA, 570 bp, Chicken  19866894382440_2
tgcagcctggccgggagctgtccatctttgtccgacaaatacttgagcgaaataatgagtaatgcaggtgtgaagggatgcgaaccctgaatgacacagctggtgatgcactagttataggtgtagctgttatgaaaaaaacattttttggttgtatttcttttatttctgaaaatgagataaacagttcagcatagagtgcttttgtatttattgataaatgggctgttttaggcatactgaaggtggttggttggtttttttttttgcattgtttcttcttctcttagtaagaggctyctctagcaggagatggatgaaaatgctgagtgatgtggtcatttcagaatagcacttggattgttgtatccttcagtacagagttttggaaggaaaaattaagctaacttgtcaggagtgcccttctccgcagcatatttctgtatgtagatacagtgggtgccttttggattgactttagaatcatattcccttcaaattttatcatgtattgtgagtaatagcatctgcattttaactgaaattaaatataaggagaaaaatatgcaa

SEQ ID NO: 84653 - DNA, 583 bp, Chicken  19866894382442_1
atgtatgtggaggatctcagattgttttcaagctatttatagtgtagggggggagtccttccgaaggaagtggatgttaaagttcagtaaggagtgctccagatgcacaactagaaatgaacatccacatgagggaccatcacaggcacaagagttggttggtttgtcgggagcatgtttgcatggatggctgcaggtgactccaggaaggcaggaaaaggtcagcagctccaggcagagggaacgtgtgtgagtcagggaaccgttctgcagagatgtccctgcagagctgggactccrgggttatctctcaggaggttttcctaacagggtctgctggctatcatctgggagggccttcctgggctgctgataaggtgggaatgggaagctgtggacttcctcctttgtcctgaggtaaatgtatgcacttgggcttactcaggttcaaaggaagcagagctgggctgaggttgttggtgggaatccaaaacagggtgttctgggcaacaggagagctgctgcactgacggtgttgttcaggatggctttacaaaaatatcccagattagatctcctccca

SEQ ID NO: 84654 - DNA, 600 bp, Chicken  19866894382446_1
tgctcagttatttttaatgctaaggattttaaaaaagtcaaaaggaagagttttcctactagttgaaccttccattgagctgaagagctggcttcatttctcagaagtggcatgtattcaattatgatttaagtacttttcaaatgaggatgtggcacagctgatgttagcagtattttgaaagaaaagggatggatatttttgcttatcactggatattgtatggactgtaggattaggaggatagctgttctttttattcatagtattagtcaggatatttttaggactgggacaagrttgatgctgggttagtatttcagaagaggtggagtttgtttcttgctgccttttgctggtcaaaaaaatgatgctaatttatcccagcagaaattaattgagaaacataacctctcctgtcactcactttatattttccaaagaaagggtgacgtccaccagtgattaacatgtccatgtttctttcaagggcaaaacgaactgggcgcccggtcctaaagtaaacataggtcatctttaattacagtttatctatgaagattaaaaggacattatattcatacggagaacctcctagtg

SEQ ID NO: 84655 - DNA, 600 bp, Chicken  19866894382449_1
gtgcggtgcccagcatttcccttcaggtgtgacaggggacatctctcctcctccagccacctccattatgcatccaggcagaaccaagcagctgctgtatgttccctgcatgaagacctgtcaaaggccctcaagccctaggaccacatcttaataaagggcttgcaactcttgcttgcaccttgcaggttcgtggctccagtagctaaggctgcagagggatagcagcattcacatggcttgcttgagaatggcacatctcagaccttgtagaaaggcattaaatatcccttttcctcycttttcctgcttgtttttcctaactcgtctaacttgatccaactcttttcccagtgcagccagtcccagtaatgcttgggatatggcatgtgtatttttccatagccaacagacakcacaaagaattttgtcccttgtccttggttctgctaaaggatcacagacatgctcagaatttctccccttacataaggactaggtaagaagactttgtgtacaggatatggactgtactactggccagggtgcccaccagccagggagggagcagttccttgggtcctgtctgcatgttgctgt

SEQ ID NO: 84656 - DNA, 600 bp, Chicken  19866894382449_2
cctgtcaaaggccctcaagccctaggaccacatcttaataaagggcttgcaactcttgcttgcaccttgcaggttcgtggctccagtagctaaggctgcagagggatagcagcattcacatggcttgcttgagaatggcacatctcagaccttgtagaaaggcattaaatatcccttttcctcycttttcctgcttgtttttcctaactcgtctaacttgatccaactcttttcccagtgcagccagtcccagtaatgcttgggatatggcatgtgtatttttccatagccaacagacakcacaaagaattttgtcccttgtccttggttctgctaaaggatcacagacatgctcagaatttctccccttacataaggactaggtaagaagactttgtgtacaggatatggactgtactactggccagggtgcccaccagccagggagggagcagttccttgggtcctgtctgcatgttgctgtatagatctggtgctgatgatgtcatgattggacagatccctctcactctgccacaaacctgtcatctcaacctcacatctctactgagcactctctgattccrataatttcatgta

SEQ ID NO: 84657 - DNA, 600 bp, Chicken  19866894382449_3
agccaacagacakcacaaagaattttgtcccttgtccttggttctgctaaaggatcacagacatgctcagaatttctccccttacataaggactaggtaagaagactttgtgtacaggatatggactgtactactggccagggtgcccaccagccagggagggagcagttccttgggtcctgtctgcatgttgctgtatagatctggtgctgatgatgtcatgattggacagatccctctcactctgccacaaacctgtcatctcaacctcacatctctactgagcactctctgattccrataatttcatgtaaaacctccaagaccttctagactcaccgtgatggtccaaatacaatggcacattgtggtgagctacaccagcccttgaagtgtgtgtcctcatatttctaagttatgcaccgtaggtttccagttaaggccttctgcacagccattccacatggtgcaatgcaggatagcaatgagatgctgagcaccctgttgggagatactttggtcattaggattggtcttgatgctggggagcagaactcatatcttggatattaggaaaaaattctactctgaaaggatggt

SEQ ID NO: 84658 - DNA, 600 bp, Chicken  19866894382451_1
cacagttgaagagcctaaaatacaagcaaatctttcctggcatgtcagccatggaggctaatcacttgttttacctatttgttcccaattcccattaaaaagaaatatctgtaaacttacaggtggaccagggtaaccatctccttttggcccatagggtccggggagtcctggaagacctctgtcaccctgatgaaagcaggaaaaacagatgagatgactgccaatgcaactgctagcaagaaatattccatgagcatgaaatttctttgtccgagatactgtaagttaatttttatmtatgcgtatatattactgtaaatgattattgtaggttatcaggactagacaataccagattaaaactggaatatttaatagctctgtggatatatgagacctttcacttctaagtcagtaatatgaatctttttttagagctctgtctgctgttatggtttacgtttaagaaggaatggtttcagttgcattattttcttatcataattactattattctagttttgaatgcacaaacccatcctgacagacagccaaaagctgctccgagttgcacctgaatggatgatatgagtggat

SEQ ID NO: 84659 - DNA, 600 bp, Chicken  19866894382463_1
ttcttcccaaactaaaagccatatctgcatacatgaagctcacagaacagccaggcaaattaaaaaataccaaatattgtgcaaggtagcatcatgaaaactgtttccactggaacaacttttcaccaagaagtggatgcagtttggcagttggtgaaatgatctcctgacgtctgtcactgccatagcagatgagatattaaaataataagtgccaaattttggctttggaacataaacatctcaaaaaatgacatcactggggaacagatcatcctctgaaagcagaatgagtccacrttataatgaactctcttgaagtttcatacatgtctcaagtagtatttgaatgacaaagctttacaattattaactatattgttatcagtcacataataatataaaaaatatatatatttttttcacagaacagttaaagcttcctacaaatatatttgcataaaatatttttctgaaatatccagcttggtattgagtattgttttgatttccctttctctttttctttttcttctttaaaacaaacattaatactctgttgatggtgatattcctacttaccactgttgaatgagaact

SEQ ID NO: 84660 - DNA, 599 bp, Chicken  19866894382468_1
  misc_feature (1)..(36): n is any nucleotide
nnnnnnnnnnnnnnnnnnnnnnnnnnnnnnnnnnnnttttacagttattaccatttttatgagaatacagaaactttatagaaaaatcttttcaaccccactaaatagctataaagtttaaaactgagtataatggtaacaacttagagagactaagctgagtgcattttttatgggaaggcattcccaattgctaagtttaggctaattctggtagtcttgtgttcagtggataggcacatccttttacaagatgacctgctctgagttatctaccaaaaaaggtttctctcttcattygttaggtgagaagcctaagaagactgaatttgtgaatatgaggtcagtcattatgaaacaatttctacttcaagacattagaggattccgaacttatctgtgcaacctaaagctgtctaacaccagtagacacatgtccacacctttctgccatttacctttctacttactatgccacatcctgtgtgaaatgaattccaaaacagaacatttctgagagaaaacaggtctggatcatcaagaacaccgaatacgtttgtctcccaaaattgctctgagatacagtaataaagtgtcgt

SEQ ID NO: 84661 - DNA, 600 bp, Chicken  19866894382475_1
tttccttcatctctttccttgcccactggggaaagtcccccttgtagtcaggcagctgtgacaccccaggccaggttgcttcggtgggagtgcccagggtgcgaaagatccggaagagctgatcgatctcagagtccccttgaaacagggccttcctggtcacctgcagcaacaacaacaaaaaagcagccagctcccacctttccattagctctgtgtcctacttctttctgcaaacaaacctttgttccagcagatgcaaaaaagtgctcaagccaaggcagttctgtcaggcagtgrctggaaaactaaagggtgtatgctygtccccwgctcctcccatggactggtgctcccctaagrctgtcccaccttcaatcagtcctttaaccctctytggcgcaagcttcctaccaccttctcttatagaccagttacttgcctaggttctgctcatcagcagctcaggggctttgggagctagggacagtgctgcagtgctgcaggcatactgcgctcttcaaactgggctacggtccctaggagacccaaacagaacaatgctctgacatgttttgaagtgctagytctctgcaacct

SEQ ID NO: 84662 - DNA, 600 bp, Chicken  19866894382475_2
ctggggaaagtcccccttgtagtcaggcagctgtgacaccccaggccaggttgcttcggtgggagtgcccagggtgcgaaagatccggaagagctgatcgatctcagagtccccttgaaacagggccttcctggtcacctgcagcaacaacaacaaaaaagcagccagctcccacctttccattagctctgtgtcctacttctttctgcaaacaaacctttgttccagcagatgcaaaaaagtgctcaagccaaggcagttctgtcaggcagtgrctggaaaactaaagggtgtatgctygtccccwgctcctcccatggactggtgctcccctaagrctgtcccaccttcaatcagtcctttaaccctctytggcgcaagcttcctaccaccttctcttatagaccagttacttgcctaggttctgctcatcagcagctcaggggctttgggagctagggacagtgctgcagtgctgcaggcatactgcgctcttcaaactgggctacggtccctaggagacccaaacagaacaatgctctgacatgttttgaagtgctagytctctgcaacctgctgggagacatctgcaagagagtc

SEQ ID NO: 84663 - DNA, 600 bp, Chicken  19866894382475_3
aagtcccccttgtagtcaggcagctgtgacaccccaggccaggttgcttcggtgggagtgcccagggtgcgaaagatccggaagagctgatcgatctcagagtccccttgaaacagggccttcctggtcacctgcagcaacaacaacaaaaaagcagccagctcccacctttccattagctctgtgtcctacttctttctgcaaacaaacctttgttccagcagatgcaaaaaagtgctcaagccaaggcagttctgtcaggcagtgrctggaaaactaaagggtgtatgctygtccccwgctcctcccatggactggtgctcccctaagrctgtcccaccttcaatcagtcctttaaccctctytggcgcaagcttcctaccaccttctcttatagaccagttacttgcctaggttctgctcatcagcagctcaggggctttgggagctagggacagtgctgcagtgctgcaggcatactgcgctcttcaaactgggctacggtccctaggagacccaaacagaacaatgctctgacatgttttgaagtgctagytctctgcaacctgctgggagacatctgcaagagagtctgctcct

SEQ ID NO: 84664 - DNA, 600 bp, Chicken  19866894382475_4
ccccaggccaggttgcttcggtgggagtgcccagggtgcgaaagatccggaagagctgatcgatctcagagtccccttgaaacagggccttcctggtcacctgcagcaacaacaacaaaaaagcagccagctcccacctttccattagctctgtgtcctacttctttctgcaaacaaacctttgttccagcagatgcaaaaaagtgctcaagccaaggcagttctgtcaggcagtgrctggaaaactaaagggtgtatgctygtccccwgctcctcccatggactggtgctcccctaagrctgtcccaccttcaatcagtcctttaaccctctytggcgcaagcttcctaccaccttctcttatagaccagttacttgcctaggttctgctcatcagcagctcaggggctttgggagctagggacagtgctgcagtgctgcaggcatactgcgctcttcaaactgggctacggtccctaggagacccaaacagaacaatgctctgacatgttttgaagtgctagytctctgcaacctgctgggagacatctgcaagagagtctgctcctcccaggatcaaaatgctgctgcagtaagact

SEQ ID NO: 84665 - DNA, 600 bp, Chicken  19866894382475_5
ggtgcgaaagatccggaagagctgatcgatctcagagtccccttgaaacagggccttcctggtcacctgcagcaacaacaacaaaaaagcagccagctcccacctttccattagctctgtgtcctacttctttctgcaaacaaacctttgttccagcagatgcaaaaaagtgctcaagccaaggcagttctgtcaggcagtgrctggaaaactaaagggtgtatgctygtccccwgctcctcccatggactggtgctcccctaagrctgtcccaccttcaatcagtcctttaaccctctytggcgcaagcttcctaccaccttctcttatagaccagttacttgcctaggttctgctcatcagcagctcaggggctttgggagctagggacagtgctgcagtgctgcaggcatactgcgctcttcaaactgggctacggtccctaggagacccaaacagaacaatgctctgacatgttttgaagtgctagytctctgcaacctgctgggagacatctgcaagagagtctgctcctcccaggatcaaaatgctgctgcagtaagactgaagtatgacactgtcacatactgacactgcagc

SEQ ID NO: 84666 - DNA, 422 bp, Chicken  19866894382475_6
gtcaggcagtgrctggaaaactaaagggtgtatgctygtccccwgctcctcccatggactggtgctcccctaagrctgtcccaccttcaatcagtcctttaaccctctytggcgcaagcttcctaccaccttctcttatagaccagttacttgcctaggttctgctcatcagcagctcaggggctttgggagctagggacagtgctgcagtgctgcaggcatactgcgctcttcaaactgggctacggtccctaggagacccaaacagaacaatgctctgacatgttttgaagtgctagytctctgcaacctgctgggagacatctgcaagagagtctgctcctcccaggatcaaaatgctgctgcagtaagactgaagtatgacactgtcacatactgacactgcagccacaccacagaga

SEQ ID NO: 84667 - DNA, 600 bp, Chicken  19866894382487_1
gtctttaaaaatgtgccagctataaacattaaaagaaggtttataaaattataccgaagctcaaaattcagacacctcagaagcaatttcaagtatcagaaaagcattaagctggtatgtatgattggatgcatgattgataatgctgtcttgcaaattccagccactcaattgtgcatttatttcttatgacatttaaacactgcttggactgtgtaagaattggctggacagtgacctctaaaatttttaaaatagaagagcaatcttttcctttttcttgttactgttttagtttgrtttagttccctcctcccaataaagtggctgtttttctacatttgtcttagaaaaatatcttacactgaaaaaaaaaaagagagaattgatagaatgaattataagctactacatgatgaatataatgtattttcttcctcttctctagtctaactcctgtttcagctcctcacagggtaataaccattgtcaattaaatatgaatgtttagattaaaaaaaaataaactgaattgcaatatgcttttaaaattatgtaccctttagattaaaatttaagttaaagttcgcagggctcatc

SEQ ID NO: 84668 - DNA, 600 bp, Chicken  19866894382495_1
aactcacccctgtggaggcaccacacggggccagcgccagtccctggtcgttatttctgaagcctttgccatttctcttctgcggttgtcccaaagagagatttttcagagcacgtgcccaaacacctgcagggtaagtggttttttttaagtaacttacatactggaaacatgaaaaggatgaatgcaacggtgaaacgtttgatctctgatcaaataactgtatcaaaagctcttctcaacgccttttgttgagacttataaaagtcgagaactcccaggctgctagccaaacacatytgagtacatggcccgggccatcacccagcataagacaatgtccacctactcatctcaggggctatggggtgacttctaccatgtctgggtcctgcctccgggtattagagaggagcttctgtgagctgtgcagtctgcaaagaaatgagacaaatgaacgggctgggaaccaccaaggagccacaaggccagggagaagggagcacacggggtgcacagagttgggtgtccagcacggcctagttcctggcagctgtgtgcctgcaacaggacagctgcacagctcccggggttcatggg

SEQ ID NO: 84669 - DNA, 600 bp, Chicken  19866894382496_1
tgtcccactctacactgcactgttgcagccttactttgagcacttcatgcaggtttgggttacacaacataaggacatactattagagagcatccaaaggagggcgtacaaaaatggtgaagtgtctggaggacaagacatatgaggagtggctgaggccccttggtgtgctcagcccagagcagacaaagctgaggggagcttcctggagctgtgtcaggggaggggcagctgggcgttagggaaagggtctgcacctgagggcagtgggcatggaacaggctgcccagggctatgggsacggcccccagtgctggacttcaggaagcaatactctcagagagagaattggaattttgagtggtcctgtgtggagccagaagttggactcaatccttgagcatcccttccaattcaggacagtttatagttccatgattctataaagttacttaagatgagcttcatgctcatgtttataacaagtggaaaggatggaagatttamattttggcagtaaggctatattggagaggatgattcaagaggaaatgatacataacttcagcacggttggagagaagaagggcaggcagtgct

SEQ ID NO: 84670 - DNA, 600 bp, Chicken  19866894382496_2
ggagctgtgtcaggggaggggcagctgggcgttagggaaagggtctgcacctgagggcagtgggcatggaacaggctgcccagggctatgggsacggcccccagtgctggacttcaggaagcaatactctcagagagagaattggaattttgagtggtcctgtgtggagccagaagttggactcaatccttgagcatcccttccaattcaggacagtttatagttccatgattctataaagttacttaagatgagcttcatgctcatgtttataacaagtggaaaggatggaagatttamattttggcagtaaggctatattggagaggatgattcaagaggaaatgatacataacttcagcacggttggagagaagaagggcaggcagtgcttttttaaaaagagaaagaatggacagaggagcatcatgccaccacacttagcaccaagatgggtaatgtgaagcaaggagaggacttatacagagaaaatgttaggcaaaggggtctgggtctttaagtatcaaaagtgaaacaaactactaagattttttagatggctgtacaattttcaagtggtatggacagcaaaggagaagg

SEQ ID NO: 84671 - DNA, 600 bp, Chicken  19866894382498_1
tctctagtgaacagaaacctcctgtggcttcccaagagaccatctctgcacaaagacagtggttgtcaaaagtggtcacagaaaccacattttttttctgaaagataaccacagtttcttggagaagttaagagagctttgaaagtacggacaagcaataggatgaggttcaagtggtttctgtgtaatggacatgctatttcccagcatcttaatgctggactatcagcctatgccaaaataaacacctggctgcctaaaaggacaactgactgcaattctgatagcattctctaagtsgaaaaggaatgtagatttgagaaaatcctgagaccatctcagtggagagataacaagctgccaccatttgctgcttccactcctgttaagactgagtcaaattcttggaaacgcttgaagggaaaactccaacacagcaagatgggctgtgagcagcagaaccacaacaaggacctccctgtctgctacgcgttcacacccagcactgctctctgctggggtgagctgccagctaagtcagagctaagtcagaaacgacaaggagcaattactcagtaccagttactcaggtggaaaaaa

SEQ ID NO: 84672 - DNA, 563 bp, Chicken  19866894382498_2
cttggaaacgcttgaagggaaaactccaacacagcaagatgggctgtgagcagcagaaccacaacaaggacctccctgtctgctacgcgttcacacccagcactgctctctgctggggtgagctgccagctaagtcagagctaagtcagaaacgacaaggagcaattactcagtaccagttactcaggtggaaaaaatctaggcatacagtacagtaccacccacatatttgcaggactttcagcatcagtgccacacctttctctggtttcaagtgaggaatgtagctcagcttgacastcagcaatgcttcactccactcctctcaacagttcctgttgactgtgacaatggcaacagccttcttgcctttgctgtattctccatagctgaaggctgggcctccagcatcctcacagctgacttaaagtgtcttttgtttccccaagccatgatacagcctcaaaaaacacatcacatcaggaagctgctgggagaggtggcctcaaagtcacctttcaaggggttgctgggggcaggaggactctcatccaaaacatcta

SEQ ID NO: 84673 - DNA, 599 bp, Chicken  19866894382505_1
  misc_feature (1)..(198): n is any nucleotide
nnnnnnnnnnnnnnnnnnnnnnnnnnnnnnnnnnnnnnnnnnnnnnnnnnnnnnnnnnnnnnnnnnnnnnnnnnnnnnnnnnnnnnnnnnnnnnnnnnnnnnnnnnnnnnnnnnnnnnnnnnnnnnnnnnnnnnnnnnnnnnnnnnnnnnnnnnnnnnnnnnnnnnnnnnnnnnnnnnnnnnnnnnnnnnnnnnnnnncccctctgatgtggcatcatggtgtatgtgtctatactggggaagcaaccaattattcccagcttcagaatatctgccaaaagccctctctaattacagatwttgatagctcctaccctgaattcttataaagyatcctacatccaattccacacaatgattcagagctctgtaaagggattcagaggtcatatggatgctgaatgaaacgatycctcrtcatcagayratgctcaccagtayacatcatattaaagttgtttgatcaagcacagaatgtcccacggacagagagtaaatgcctgcatagccaacagaagttcctgccatccccaagtgacagcaaatatcacaggcaaagcacagtgacgtatttgacagttggcatcatggttaagcag

SEQ ID NO: 84674 - DNA, 599 bp, Chicken  19866894382505_2
  misc_feature (1)..(166): n is any nucleotide
nnnnnnnnnnnnnnnnnnnnnnnnnnnnnnnnnnnnnnnnnnnnnnnnnnnnnnnnnnnnnnnnnnnnnnnnnnnnnnnnnnnnnnnnnnnnnnnnnnnnnnnnnnnnnnnnnnnnnnnnnnnnnnnnnnnnnnnnnnnnnnnnnnnnnnnnnnnnnnnnnnnnnncccctctgatgtggcatcatggtgtatgtgtctatactggggaagcaaccaattattcccagcttcagaatatctgccaaaagccctctctaattacagatwttgatagctcctaccctgaattcttataaagyatcctacatccaattccacacaatgattcagagctctgtaaagggattcagaggtcatatggatgctgaatgaaacgatycctcrtcatcagayratgctcaccagtayacatcatattaaagttgtttgatcaagcacagaatgtcccacggacagagagtaaatgcctgcatagccaacagaagttcctgccatccccaagtgacagcaaatatcacaggcaaagcacagtgacgtatttgacagttggcatcatggttaagcagcttgaatatttttccaagcctttgaaagaagg

SEQ ID NO: 84675 - DNA, 599 bp, Chicken  19866894382505_3
  misc_feature (1)..(86): n is any nucleotide
nnnnnnnnnnnnnnnnnnnnnnnnnnnnnnnnnnnnnnnnnnnnnnnnnnnnnnnnnnnnnnnnnnnnnnnnnnnnnnnnnnnnnncccctctgatgtggcatcatggtgtatgtgtctatactggggaagcaaccaattattcccagcttcagaatatctgccaaaagccctctctaattacagatwttgatagctcctaccctgaattcttataaagyatcctacatccaattccacacaatgattcagagctctgtaaagggattcagaggtcatatggatgctgaatgaaacgatycctcrtcatcagayratgctcaccagtayacatcatattaaagttgtttgatcaagcacagaatgtcccacggacagagagtaaatgcctgcatagccaacagaagttcctgccatccccaagtgacagcaaatatcacaggcaaagcacagtgacgtatttgacagttggcatcatggttaagcagcttgaatatttttccaagcctttgaaagaaggttgcagagtagaggtcatggtttataagattcactgacagcagtaatttgtccaaaaaaaaaaaaamcaacttaattcac

SEQ ID NO: 84676 - DNA, 599 bp, Chicken  19866894382505_4
  misc_feature (1)..(81): n is any nucleotide
nnnnnnnnnnnnnnnnnnnnnnnnnnnnnnnnnnnnnnnnnnnnnnnnnnnnnnnnnnnnnnnnnnnnnnnnnnnnnnnnncccctctgatgtggcatcatggtgtatgtgtctatactggggaagcaaccaattattcccagcttcagaatatctgccaaaagccctctctaattacagatwttgatagctcctaccctgaattcttataaagyatcctacatccaattccacacaatgattcagagctctgtaaagggattcagaggtcatatggatgctgaatgaaacgatycctcrtcatcagayratgctcaccagtayacatcatattaaagttgtttgatcaagcacagaatgtcccacggacagagagtaaatgcctgcatagccaacagaagttcctgccatccccaagtgacagcaaatatcacaggcaaagcacagtgacgtatttgacagttggcatcatggttaagcagcttgaatatttttccaagcctttgaaagaaggttgcagagtagaggtcatggtttataagattcactgacagcagtaatttgtccaaaaaaaaaaaaamcaacttaattcacatgca

SEQ ID NO: 84677 - DNA, 599 bp, Chicken  19866894382505_5
  misc_feature (1)..(72): n is any nucleotide
nnnnnnnnnnnnnnnnnnnnnnnnnnnnnnnnnnnnnnnnnnnnnnnnnnnnnnnnnnnnnnnnnnnnnnnncccctctgatgtggcatcatggtgtatgtgtctatactggggaagcaaccaattattcccagcttcagaatatctgccaaaagccctctctaattacagatwttgatagctcctaccctgaattcttataaagyatcctacatccaattccacacaatgattcagagctctgtaaagggattcagaggtcatatggatgctgaatgaaacgatycctcrtcatcagayratgctcaccagtayacatcatattaaagttgtttgatcaagcacagaatgtcccacggacagagagtaaatgcctgcatagccaacagaagttcctgccatccccaagtgacagcaaatatcacaggcaaagcacagtgacgtatttgacagttggcatcatggttaagcagcttgaatatttttccaagcctttgaaagaaggttgcagagtagaggtcatggtttataagattcactgacagcagtaatttgtccaaaaaaaaaaaaamcaacttaattcacatgcaattaaatca

SEQ ID NO: 84678 - DNA, 599 bp, Chicken  19866894382505_6
  misc_feature (1)..(71): n is any nucleotide
nnnnnnnnnnnnnnnnnnnnnnnnnnnnnnnnnnnnnnnnnnnnnnnnnnnnnnnnnnnnnnnnnnnnnnncccctctgatgtggcatcatggtgtatgtgtctatactggggaagcaaccaattattcccagcttcagaatatctgccaaaagccctctctaattacagatwttgatagctcctaccctgaattcttataaagyatcctacatccaattccacacaatgattcagagctctgtaaagggattcagaggtcatatggatgctgaatgaaacgatycctcrtcatcagayratgctcaccagtayacatcatattaaagttgtttgatcaagcacagaatgtcccacggacagagagtaaatgcctgcatagccaacagaagttcctgccatccccaagtgacagcaaatatcacaggcaaagcacagtgacgtatttgacagttggcatcatggttaagcagcttgaatatttttccaagcctttgaaagaaggttgcagagtagaggtcatggtttataagattcactgacagcagtaatttgtccaaaaaaaaaaaaamcaacttaattcacatgcaattaaatcat

SEQ ID NO: 84679 - DNA, 599 bp, Chicken  19866894382505_7
  misc_feature (1)..(57): n is any nucleotide
nnnnnnnnnnnnnnnnnnnnnnnnnnnnnnnnnnnnnnnnnnnnnnnnnnnnnnnnncccctctgatgtggcatcatggtgtatgtgtctatactggggaagcaaccaattattcccagcttcagaatatctgccaaaagccctctctaattacagatwttgatagctcctaccctgaattcttataaagyatcctacatccaattccacacaatgattcagagctctgtaaagggattcagaggtcatatggatgctgaatgaaacgatycctcrtcatcagayratgctcaccagtayacatcatattaaagttgtttgatcaagcacagaatgtcccacggacagagagtaaatgcctgcatagccaacagaagttcctgccatccccaagtgacagcaaatatcacaggcaaagcacagtgacgtatttgacagttggcatcatggttaagcagcttgaatatttttccaagcctttgaaagaaggttgcagagtagaggtcatggtttataagattcactgacagcagtaatttgtccaaaaaaaaaaaaamcaacttaattcacatgcaattaaatcattatttaaatggaaa

SEQ ID NO: 84680 - DNA, 557 bp, Chicken  19866894382505_8
tgaatgaaacgatycctcrtcatcagayratgctcaccagtayacatcatattaaagttgtttgatcaagcacagaatgtcccacggacagagagtaaatgcctgcatagccaacagaagttcctgccatccccaagtgacagcaaatatcacaggcaaagcacagtgacgtatttgacagttggcatcatggttaagcagcttgaatatttttccaagcctttgaaagaaggttgcagagtagaggtcatggtttataagattcactgacagcagtaatttgtccaaaaaaaaaaaaamcaacttaattcacatgcaattaaatcattatttaaatggaaaatggcagaactgtgctctttcagcaaatgctgctgtaatccactgctgggaccaaacacacccatccttcccctttcctggtgcccatcaggacgactgataaccacaagaggcaggatctgggtcccaaaccccaaagatcccttgcagagccgctctccttccaggaggaggcagctgccacagcctccaaccattcatctgctcacttccag

SEQ ID NO: 84681 - DNA, 599 bp, Chicken  19866894382506_1
  misc_feature (1)..(3): n is any nucleotide
nnnctgcaaggcaccagcctttcacatcacagagggcaagctgtacagagaagtccattgcattgcaccatacgtacctgtatctcaccagacacgactgtgcccttccttactgctgttatcccaagctgtttgcgccctcctgcaaccgagcctggcaaagtttagagaacacctctttctttttgtcaaacacacagcaaagccagtgggatggagacgtctcaaagtcaggcagagaatatcccaaccatgggaaattcactgcagcaaggccaggtggaaacagcaaaccttacrttgcctaagtggagctgaaggggagacaacaacaacaaaaaaaaaaagccaataaagcaacaagttatctctggccttcaaatcaccacacacctcctccagtgctccccagcacttcctaaagctccccaggtaccccccagtactgccaagagcccttcagtttcccagtactgtctagagctccatatgtacaggttttctaaggaagtcatgcaagcctttaacagcagacaccaaggactgtgctcagtgcccaccagtgctgtttggagtctcctggcatactccyggagcct

SEQ ID NO: 84682 - DNA, 600 bp, Chicken  19866894382506_2
accttacrttgcctaagtggagctgaaggggagacaacaacaacaaaaaaaaaaagccaataaagcaacaagttatctctggccttcaaatcaccacacacctcctccagtgctccccagcacttcctaaagctccccaggtaccccccagtactgccaagagcccttcagtttcccagtactgtctagagctccatatgtacaggttttctaaggaagtcatgcaagcctttaacagcagacaccaaggactgtgctcagtgcccaccagtgctgtttggagtctcctggcatactccyggagcctctcaataaacttcctgggcagcccagagccccccagcactctccaaatgtgtcccaatactctctagagccttctaacacatttccaacaccatcttcgccccccctcccctgagatgctcctactacattcccagtgccctccagggctgtctggaaatgcccaggaggcactggagatctccagactgcaccacaggggcactggcagtacacgtggtgtctctagacagtcctgcaggtcactgggagcttattgagctctagatagcgctgaagtgtactaggaagatc

SEQ ID NO: 84683 - DNA, 599 bp, Chicken  19866894382511_1
  misc_feature (1)..(175): n is any nucleotide
nnnnnnnnnnnnnnnnnnnnnnnnnnnnnnnnnnnnnnnnnnnnnnnnnnnnnnnnnnnnnnnnnnnnnnnnnnnnnnnnnnnnnnnnnnnnnnnnnnnnnnnnnnnnnnnnnnnnnnnnnnnnnnnnnnnnnnnnnnnnnnnnnnnnnnnnnnnnnnnnnnnnnnnnnnnnnnncaagctctgctccctgtggttgctgcagatctcatagaatcatagggaccttaaggattatctagttctgccccctgccatgagctctggattgtgctgcccagggcccatccatggccttgggyacctccagggatggggcacccacagctctggcagcagtgctggggtctcaccactctctgaggaaagaatttcttcctaactgctaacctaartctcccttcttctagtttaaagccattttcccttgtcctatcastatcagactgtgtaaaaagtcacttcccttcctgtttataagctgccttcgagcactggaaggaatctccacaggagctagcccagcgtcatgcacactgacccttcaccaatcatttcacatctgacagcataccctgaaaggaagaagcaggagatgccc

SEQ ID NO: 84684 - DNA, 599 bp, Chicken  19866894382511_2
  misc_feature (1)..(82): n is any nucleotide
nnnnnnnnnnnnnnnnnnnnnnnnnnnnnnnnnnnnnnnnnnnnnnnnnnnnnnnnnnnnnnnnnnnnnnnnnnnnnnnnnncaagctctgctccctgtggttgctgcagatctcatagaatcatagggaccttaaggattatctagttctgccccctgccatgagctctggattgtgctgcccagggcccatccatggccttgggyacctccagggatggggcacccacagctctggcagcagtgctggggtctcaccactctctgaggaaagaatttcttcctaactgctaacctaartctcccttcttctagtttaaagccattttcccttgtcctatcastatcagactgtgtaaaaagtcacttcccttcctgtttataagctgccttcgagcactggaaggaatctccacaggagctagcccagcgtcatgcacactgacccttcaccaatcatttcacatctgacagcataccctgaaaggaagaagcaggagatgcccaggaaaaaattacttwtaaatctgctttggtgcattttccatgtacaactctccctgcacgcttccaaggtgctcaggtgtcactgagggctc

SEQ ID NO: 84685 - DNA, 599 bp, Chicken  19866894382511_3
  misc_feature (1)..(38): n is any nucleotide
nnnnnnnnnnnnnnnnnnnnnnnnnnnnnnnnnnnnnncaagctctgctccctgtggttgctgcagatctcatagaatcatagggaccttaaggattatctagttctgccccctgccatgagctctggattgtgctgcccagggcccatccatggccttgggyacctccagggatggggcacccacagctctggcagcagtgctggggtctcaccactctctgaggaaagaatttcttcctaactgctaacctaartctcccttcttctagtttaaagccattttcccttgtcctatcastatcagactgtgtaaaaagtcacttcccttcctgtttataagctgccttcgagcactggaaggaatctccacaggagctagcccagcgtcatgcacactgacccttcaccaatcatttcacatctgacagcataccctgaaaggaagaagcaggagatgcccaggaaaaaattacttwtaaatctgctttggtgcattttccatgtacaactctccctgcacgcttccaaggtgctcaggtgtcactgagggctcaaaggtgtaagaggataaggtaaaactgtggtgaaattgcagga

SEQ ID NO: 84686 - DNA, 600 bp, Chicken  19866894382511_4
gcacccacagctctggcagcagtgctggggtctcaccactctctgaggaaagaatttcttcctaactgctaacctaartctcccttcttctagtttaaagccattttcccttgtcctatcastatcagactgtgtaaaaagtcacttcccttcctgtttataagctgccttcgagcactggaaggaatctccacaggagctagcccagcgtcatgcacactgacccttcaccaatcatttcacatctgacagcataccctgaaaggaagaagcaggagatgcccaggaaaaaattacttwtaaatctgctttggtgcattttccatgtacaactctccctgcacgcttccaaggtgctcaggtgtcactgagggctcaaaggtgtaagaggataaggtaaaactgtggtgaaattgcaggatgtggatagtgttaacctcaaggtaatcataggatcattaaggttggaaaaggcctccaagatcaccaggctcaaccccaacacaagtgtatgtgcattgagcacatgcacacagctcagatccacaaaaatgagggagctctgtatacccaccagtgcacacatccacatacaaatgc

SEQ ID NO: 84687 - DNA, 600 bp, Chicken  19866894382527_1
tttgagattggtggaaaaactggagatcttggtggccttgggtgccctgtacctgagttttacagtaacactttggtattgcactgtaggtttgtgagcattataaagctacttaattttattaacacaaaaaacagaggaatgcacttagtgtgtgagcagttatttctattctgctctttgtctctgcagctgattgtgtttgttgagttatgagtgtgaaaatctttgttttttaaactaaaaaccttaaaatgaaatgtgaaacagtagggggatccttgcaggatcaggaccttraagcgcagcactgaaggctctctccagttaggacaaggttagatttgctcttgctaccaaatagttttgattaaataatgttggtgagactgcgtgcagtataaggagaaagattgtgatgaacatcatggcatttgtcttttatgtaatccactgtgggcccatataatttaaaacgcacctatattgtgcattagtaagacttctattgtatgcaattaaatgctatttgatgctgaaaagcagatatactagtcatgtgcaataaaatctaacgtggtagcagagcctcactagaga

SEQ ID NO: 84688 - DNA, 467 bp, Chicken  19866894382530_1
cctgatgtacatcaattcattggcttcagagaatctgcttgtctaggtgaccaacttgcctcactgctgagaacggtttcaggaaatagcttcattttcagactgtaggctgcagatgactgtttcacaaataaggatgacccttgcagaagcagtgctgtggtacaaatttaaaagtgttagagaaagaaaacacctgtaaaaaaacttgaactcaaatcacatttgctttgctatcaaacctattatagcactgaggctttaaggataaaattgcagatccagttaaaacacagaagyaatacatctatctgtcctgactatctgtattgaagcagccatactttttgggatccaaagtaaatgcatccagtcttctggactgatgggaaggagttcaacatagtcaagaagaggttcatataagagtgtaagaaaggaaaatgacatcaaaagagttaaaagtc

SEQ ID NO: 84689 - DNA, 600 bp, Chicken  19866894382534_1
tttcccaacctagctatccttgccagtccaacattagcctacacccacgtcttactatgttctatctttgcatcaccatgagaacactttaagcataaagtgtttgcacttcaaaattgcaagggcaatttgcacctcaagcatcaaatccaaatgctctcctgcaccaacatccatgagataaagtacagaatgaagaagcccttaagaagcctcccctgtctcaggatcttctgccttctatccaaaagcagacagctcctgattactgtaggtaaactacataacacagcagagatygattctgcttcagcagcagatgaaatacttctactgctaaagcaccgccctgctgcacggcttagaggaaaacacctctgtcttctcctttaagggagattttgattgatggattttaaaaatctcagtgccaaattaacacggggatataaatgatctcttacaaatgcctatgaaattaatttgtgcgacacgcattcatacctccataatttgtccccaaaactgctacagagggaaatgtattaatcttgctcgccgtatgtcacattatttagtactactgtgtattacagtcac

SEQ ID NO: 84690 - DNA, 600 bp, Chicken  19866894382558_1
cagaagcacactgatttttaaatactacccctagcctaacagctgtgtagatgaccacaaagaacagcaatctgacaagtgagaaattgagcaagctcacagggtgggaacgcgtgctgccagaacagtaaaactgctcaggaagcctgagctggagcaagagcacttggggagacgttccggctggcagcgtgtcaagagagctgtatgtggaaccaaagggctgtgacagaagggtgggtgaaattctgccctgtctgcctctcctctttcctaactgccattctgtctgaagggagygaagtctgatccgggagtgagccaaagctctcagtagagcagtctgaaacgggagagcatcttaccaagtgattcgtgcaggattggcacccgtaagcttccttttgacatagctgactttttgcaaggggtaccagtttacttcagcggtgtttatttccttaatccacgtgcctccttttttcagctgcctttgttcaaagttctaaagagagaacagttttgctctatttatcatacataaaaagacctttaagctgccacatcacaccgagtcacggcagcagctcctcgctgcag

SEQ ID NO: 84691 - DNA, 600 bp, Chicken  19866894382561_1
ttatactgacaaaggagtgaagcgtactgttctgtactgcaagttcatactgccacttgcagaagcaattccaccctgtcctgaagctggcattagggcgtgcctgccacaatcagatgggtcaggaacatgaactgagagaagcagcaagcctcccaaatccgtctgcacagggccacagcccaggctgggctgcactcatgatgatgcccagcaggaggacacacatgggtgatcctcccatggaagcatcctatgtcctcagtttccagcagacccttgggggatttcctgagctgyactgtaacmtttaaatgtgatggatcaatgcagttggatctttgtgcggcacaacactactaactgcaatggtaatttgggttttgaaaaggcagctcatagtaaaaataaacattaagtattgttttggtatgctgttattycagtgacctttagttctaagtttatcagcaactggtgaatgcacactttttattaaccctgcaatttactaacacagagaagcacagacagaatttaaagaccaccatgcactctccaaacaagtaaccctttacgtgggaaattaatgtaacaatg

SEQ ID NO: 84692 - DNA, 600 bp, Chicken  19866894382561_2
caaaggagtgaagcgtactgttctgtactgcaagttcatactgccacttgcagaagcaattccaccctgtcctgaagctggcattagggcgtgcctgccacaatcagatgggtcaggaacatgaactgagagaagcagcaagcctcccaaatccgtctgcacagggccacagcccaggctgggctgcactcatgatgatgcccagcaggaggacacacatgggtgatcctcccatggaagcatcctatgtcctcagtttccagcagacccttgggggatttcctgagctgyactgtaacmtttaaatgtgatggatcaatgcagttggatctttgtgcggcacaacactactaactgcaatggtaatttgggttttgaaaaggcagctcatagtaaaaataaacattaagtattgttttggtatgctgttattycagtgacctttagttctaagtttatcagcaactggtgaatgcacactttttattaaccctgcaatttactaacacagagaagcacagacagaatttaaagaccaccatgcactctccaaacaagtaaccctttacgtgggaaattaatgtaacaatgaatgtgaca

SEQ ID NO: 84693 - DNA, 600 bp, Chicken  19866894382561_3
gcagcaagcctcccaaatccgtctgcacagggccacagcccaggctgggctgcactcatgatgatgcccagcaggaggacacacatgggtgatcctcccatggaagcatcctatgtcctcagtttccagcagacccttgggggatttcctgagctgyactgtaacmtttaaatgtgatggatcaatgcagttggatctttgtgcggcacaacactactaactgcaatggtaatttgggttttgaaaaggcagctcatagtaaaaataaacattaagtattgttttggtatgctgttattycagtgacctttagttctaagtttatcagcaactggtgaatgcacactttttattaaccctgcaatttactaacacagagaagcacagacagaatttaaagaccaccatgcactctccaaacaagtaaccctttacgtgggaaattaatgtaacaatgaatgtgacagtgctcctggcaagctcagctgcacttctttcatgatacaactgatgatctatgagtatttaactttgcaggcacccactcttatttaccagctaatgttgtacatcacagtgcttccattaaaacatatatac

SEQ ID NO: 84694 - DNA, 600 bp, Chicken  19866894382568_1
ctggaagggccttgggactttatctccagcagtggcaccccaggttgagatctcccctgctcagccctatactgtcatgttgtagggcaaaggtgtgtcccagtggcacctgaagtcatatgatcttcccttcttcaggttgtgctgtaggtgctgacagccaaaagcacacctgtgcatgcttggcctgaaatacctattaaagacttggaggatggtgtcaagggctgtgagccatccggatgtgctgcactgccctgggagggcatgaagaggcgaaggactaaggtggatgatctstctccttaaataccacggtcttttttctgtttacagatcattggcagggactttggtgaggaaggagcctgaacaaagactagatttgctggcaatttgtagggtcctctggtttaaatacatgacagggcacatggaaagaaggggaacagacagaggacaggtcatgagaaggaggcaaccagcaatgtagtccctggagggacatgatgttggaagaggaggtggaactggatgtgttgggacctgggacaggagctaaattcatttctgctgtggttgcgcagacccatctgttct

SEQ ID NO: 84695 - DNA, 600 bp, Chicken  19866894382569_1
atgaggcactgatcagcttcatatttaaaaataatcagattattacttttctttattttatcaattcaactatttgtgtgttatagatctctgtgctgtatgactattttcttcagaggatacaaaaactcttgttattccaaatggtctcctatacttacagaaaaatcaagtactttaccctccatactcaaagctgaagtttttgtgagatgcatttaaatagctccaaatataacaaatgtaagttgctccttgttgttcaaaatgctatgagaaaaagcaatgacttgacattamacgaggctgttctgtctaaaacatttttctgtgctgaacagcacaaaagtaatagaatcactaggattttckccgtggcatacacacttcaattctgaagcgaatgcaagcatatgaatagcccaccttggcaattttatttaggttacagtcagactgaaatttttctgggtaatttccaaatgtagagraagacattcactctgccaaataaagttgagaagtctagagtgtttattttattacaaatataacactgtgattcatatatacattttgcagacagtgggttaacacatt

SEQ ID NO: 84696 - DNA, 576 bp, Chicken  19866894382569_2
tttgtgtgttatagatctctgtgctgtatgactattttcttcagaggatacaaaaactcttgttattccaaatggtctcctatacttacagaaaaatcaagtactttaccctccatactcaaagctgaagtttttgtgagatgcatttaaatagctccaaatataacaaatgtaagttgctccttgttgttcaaaatgctatgagaaaaagcaatgacttgacattamacgaggctgttctgtctaaaacatttttctgtgctgaacagcacaaaagtaatagaatcactaggattttckccgtggcatacacacttcaattctgaagcgaatgcaagcatatgaatagcccaccttggcaattttatttaggttacagtcagactgaaatttttctgggtaatttccaaatgtagagraagacattcactctgccaaataaagttgagaagtctagagtgtttattttattacaaatataacactgtgattcatatatacattttgcagacagtgggttaacacatttgcagagtgctgttgacatccagagtgactccggttatgtgaatgatt

SEQ ID NO: 84697 - DNA, 457 bp, Chicken  19866894382569_3
caaagctgaagtttttgtgagatgcatttaaatagctccaaatataacaaatgtaagttgctccttgttgttcaaaatgctatgagaaaaagcaatgacttgacattamacgaggctgttctgtctaaaacatttttctgtgctgaacagcacaaaagtaatagaatcactaggattttckccgtggcatacacacttcaattctgaagcgaatgcaagcatatgaatagcccaccttggcaattttatttaggttacagtcagactgaaatttttctgggtaatttccaaatgtagagraagacattcactctgccaaataaagttgagaagtctagagtgtttattttattacaaatataacactgtgattcatatatacattttgcagacagtgggttaacacatttgcagagtgctgttgacatccagagtgactccggttatgtgaatgatt

SEQ ID NO: 84698 - DNA, 600 bp, Chicken  19866894382572_1
tggtgatgggtggatggctggactgggtgatcctgtgggtcttttccaaccgtggtgattctatgattctcagctaccttggcactgacctcagccaatgtgagctcttgctctcttgacatcggaaaagatgtcaccagtagacagggcacccatagctgaaaccgtgaggggggagtgtccccattgctctgatgacttgtcccagtttgttgaatgcaattcttagttggatgtttcaacctgaaaccttgaaaggagctctgtataattctgccatttttaaagtgaaattgcatygaataccctcaatagcaggtgatttgtttaaatccaggaatccctgagcatactratggataggaaattttcaagtattcatttaacaagggagtgtttatgggctacaaagaaacatgaagcattttgcttgttgtattttacactgctagcaaacacatctcactagttaaagtgataaaatggctttaatgatgtccatttatgsttggaygttatcagattacaaattaactgtctagtgcacagcaggttcaaaactctcagtcacgtagttgaggggaaagtcgtttccataca

SEQ ID NO: 84699 - DNA, 600 bp, Chicken  19866894382572_2
tgattctatgattctcagctaccttggcactgacctcagccaatgtgagctcttgctctcttgacatcggaaaagatgtcaccagtagacagggcacccatagctgaaaccgtgaggggggagtgtccccattgctctgatgacttgtcccagtttgttgaatgcaattcttagttggatgtttcaacctgaaaccttgaaaggagctctgtataattctgccatttttaaagtgaaattgcatygaataccctcaatagcaggtgatttgtttaaatccaggaatccctgagcatactratggataggaaattttcaagtattcatttaacaagggagtgtttatgggctacaaagaaacatgaagcattttgcttgttgtattttacactgctagcaaacacatctcactagttaaagtgataaaatggctttaatgatgtccatttatgsttggaygttatcagattacaaattaactgtctagtgcacagcaggttcaaaactctcagtcacgtagttgaggggaaagtcgtttccatacatggaacttaatcagagatgttctgcagtaactttgtaatcactctcagactgcaa

SEQ ID NO: 84700 - DNA, 458 bp, Chicken  19866894382572_3
tttgttgaatgcaattcttagttggatgtttcaacctgaaaccttgaaaggagctctgtataattctgccatttttaaagtgaaattgcatygaataccctcaatagcaggtgatttgtttaaatccaggaatccctgagcatactratggataggaaattttcaagtattcatttaacaagggagtgtttatgggctacaaagaaacatgaagcattttgcttgttgtattttacactgctagcaaacacatctcactagttaaagtgataaaatggctttaatgatgtccatttatgsttggaygttatcagattacaaattaactgtctagtgcacagcaggttcaaaactctcagtcacgtagttgaggggaaagtcgtttccatacatggaacttaatcagagatgttctgcagtaactttgtaatcactctcagactgcaatagggaatttg

SEQ ID NO: 84701 - DNA, 452 bp, Chicken  19866894382572_4
gaatgcaattcttagttggatgtttcaacctgaaaccttgaaaggagctctgtataattctgccatttttaaagtgaaattgcatygaataccctcaatagcaggtgatttgtttaaatccaggaatccctgagcatactratggataggaaattttcaagtattcatttaacaagggagtgtttatgggctacaaagaaacatgaagcattttgcttgttgtattttacactgctagcaaacacatctcactagttaaagtgataaaatggctttaatgatgtccatttatgsttggaygttatcagattacaaattaactgtctagtgcacagcaggttcaaaactctcagtcacgtagttgaggggaaagtcgtttccatacatggaacttaatcagagatgttctgcagtaactttgtaatcactctcagactgcaatagggaatttg

SEQ ID NO: 84702 - DNA, 600 bp, Chicken  19866894382573_1
aagcgatatctcaaataacataggaacaaagatccttgcctgcaaattaactctgcttctattaaaagttttaacactgatagtgcatcagtttgttgctaggctatccgtacatgacattttgtttctttattaaggtctgtagatcactcttttttagagatgtaaaattcttgaatgctgtcatttcttacatactttttacttagggttatttctcatactatagcacctctaactccaagcagtgtctcaactgttgcagcagaactgtcatacttttgcttttatcaccatttwaaaatcttctttttcttgcctccgtccaccttatacctcacaggtagttaatgctggcaatttgagttgttgttgaacctttttccttgtcagggatttttccccacatgctgagctgaattactttacaacttcaaattactttattttttttcttctacccctccatggcgtctggtactattgtagcgaagctgaaatttacaggggaaggtttcagtcctgaagtgctaatttaatgaaattgtagtacttcataggaattactgatgtattcactccttcragaagctatcagaa

SEQ ID NO: 84703 - DNA, 515 bp, Chicken  19866894382573_2
tttatcaccatttwaaaatcttctttttcttgcctccgtccaccttatacctcacaggtagttaatgctggcaatttgagttgttgttgaacctttttccttgtcagggatttttccccacatgctgagctgaattactttacaacttcaaattactttattttttttcttctacccctccatggcgtctggtactattgtagcgaagctgaaatttacaggggaaggtttcagtcctgaagtgctaatttaatgaaattgtagtacttcataggaattactgatgtattcactccttcragaagctatcagaatattttgttagctagaagtactgttttggaaggaatgtgctttggggctcttttttaagggagaatcttaaatgtgcttgcatatcatgttttgccgtattagaaaagcaaatatatttcctgttcaaaagtcttataagtcactttttttttttatgctttagcttaaagcaaaccaaaactgagaaatctactttcaca

SEQ ID NO: 84704 - DNA, 599 bp, Chicken  19866894382585_1
  misc_feature (1)..(32): n is any nucleotide
nnnnnnnnnnnnnnnnnnnnnnnnnnnnnnnnctacacagccacgtagccccactggacctggtctcccagagaagcctcttcccttgtaactcagtgaggctctgaagaggacatgaacaaatacatttcttaggattttatggctggggctctcccagagaaatttttagaaatttttccttcttgggtgaaaactatgattcacattttagataggaaataactaattggtggtttttgagctgaaatttctctctgaataatctgtcatcaggataaagtccagaactaggaggayagcatgagcagtattttaaattctgcactytcttaaacttgtygttcatcttcatttccaaaatgaaccrtatgctctttgctggttttcccattatactgaagatgtgtggcttatatggaaaaatgarcattttgcctgggtgataacatttaccctcagtcttaaaaacagtcacctactcagttctgagcccagtagagaatggaaatctgtgaacagtgaaaaatactgctttttgataaaatcaagacttcaagaatagaggtcacttttctacatggttccttgataatgtg

SEQ ID NO: 84705 - DNA, 599 bp, Chicken  19866894382585_2
  misc_feature (1)..(2): n is any nucleotide
nnctacacagccacgtagccccactggacctggtctcccagagaagcctcttcccttgtaactcagtgaggctctgaagaggacatgaacaaatacatttcttaggattttatggctggggctctcccagagaaatttttagaaatttttccttcttgggtgaaaactatgattcacattttagataggaaataactaattggtggtttttgagctgaaatttctctctgaataatctgtcatcaggataaagtccagaactaggaggayagcatgagcagtattttaaattctgcactytcttaaacttgtygttcatcttcatttccaaaatgaaccrtatgctctttgctggttttcccattatactgaagatgtgtggcttatatggaaaaatgarcattttgcctgggtgataacatttaccctcagtcttaaaaacagtcacctactcagttctgagcccagtagagaatggaaatctgtgaacagtgaaaaatactgctttttgataaaatcaagacttcaagaatagaggtcacttttctacatggttccttgataatgtggtgaaagattttgtcttctgtcactcagag

SEQ ID NO: 84706 - DNA, 600 bp, Chicken  19866894382585_3
cgtagccccactggacctggtctcccagagaagcctcttcccttgtaactcagtgaggctctgaagaggacatgaacaaatacatttcttaggattttatggctggggctctcccagagaaatttttagaaatttttccttcttgggtgaaaactatgattcacattttagataggaaataactaattggtggtttttgagctgaaatttctctctgaataatctgtcatcaggataaagtccagaactaggaggayagcatgagcagtattttaaattctgcactytcttaaacttgtygttcatcttcatttccaaaatgaaccrtatgctctttgctggttttcccattatactgaagatgtgtggcttatatggaaaaatgarcattttgcctgggtgataacatttaccctcagtcttaaaaacagtcacctactcagttctgagcccagtagagaatggaaatctgtgaacagtgaaaaatactgctttttgataaaatcaagacttcaagaatagaggtcacttttctacatggttccttgataatgtggtgaaagattttgtcttctgtcactcagagggatttcctccctt

SEQ ID NO: 84707 - DNA, 600 bp, Chicken  19866894382585_4
gagaagcctcttcccttgtaactcagtgaggctctgaagaggacatgaacaaatacatttcttaggattttatggctggggctctcccagagaaatttttagaaatttttccttcttgggtgaaaactatgattcacattttagataggaaataactaattggtggtttttgagctgaaatttctctctgaataatctgtcatcaggataaagtccagaactaggaggayagcatgagcagtattttaaattctgcactytcttaaacttgtygttcatcttcatttccaaaatgaaccrtatgctctttgctggttttcccattatactgaagatgtgtggcttatatggaaaaatgarcattttgcctgggtgataacatttaccctcagtcttaaaaacagtcacctactcagttctgagcccagtagagaatggaaatctgtgaacagtgaaaaatactgctttttgataaaatcaagacttcaagaatagaggtcacttttctacatggttccttgataatgtggtgaaagattttgtcttctgtcactcagagggatttcctcccttcccaaatcaagatggcattttgagtag

SEQ ID NO: 84708 - DNA, 600 bp, Chicken  19866894382585_5
cttaggattttatggctggggctctcccagagaaatttttagaaatttttccttcttgggtgaaaactatgattcacattttagataggaaataactaattggtggtttttgagctgaaatttctctctgaataatctgtcatcaggataaagtccagaactaggaggayagcatgagcagtattttaaattctgcactytcttaaacttgtygttcatcttcatttccaaaatgaaccrtatgctctttgctggttttcccattatactgaagatgtgtggcttatatggaaaaatgarcattttgcctgggtgataacatttaccctcagtcttaaaaacagtcacctactcagttctgagcccagtagagaatggaaatctgtgaacagtgaaaaatactgctttttgataaaatcaagacttcaagaatagaggtcacttttctacatggttccttgataatgtggtgaaagattttgtcttctgtcactcagagggatttcctcccttcccaaatcaagatggcattttgagtagcttgaatggctgctcaattttgagttagaccatctttcyacccctatacttaagggcaaa

SEQ ID NO: 84709 - DNA, 600 bp, Chicken  19866894382585_6
tggcttatatggaaaaatgarcattttgcctgggtgataacatttaccctcagtcttaaaaacagtcacctactcagttctgagcccagtagagaatggaaatctgtgaacagtgaaaaatactgctttttgataaaatcaagacttcaagaatagaggtcacttttctacatggttccttgataatgtggtgaaagattttgtcttctgtcactcagagggatttcctcccttcccaaatcaagatggcattttgagtagcttgaatggctgctcaattttgagttagaccatctttcyacccctatacttaagggcaaatctttttccttccttatgcagaaataggaatgactcaaggccaaggaatgagaagtgatgaaattcaggatgctacagatagaaagataaaatctattgtgcgtggggggagatagctggattgagaacaaaacaggacaggtcaaagagaaatggggaggaacattcacagacacatatcactgtgcagaaatctcagatgtgaggctggaagaggaggttatagatatagtgtggttgggaagcaagcacagtggagaagagagaagcactccaaat

SEQ ID NO: 84710 - DNA, 599 bp, Chicken  19866894382589_1
  misc_feature (1)..(12): n is any nucleotide
nnnnnnnnnnnncttgctgcatctagactgtgctctttgatatcctgtaactgctttcctttcatatatctgctcctccagggcagaagatctcaattctttcatccagggagaacaatgaggcacatctcagttcctgatattcagtacaaagtacttctaccccaagtcgttaactatggtacaaactctttgattgattcactgaatagccaaatggttaaaacctccatttatatggagcacaactatagcatactgttctttgctcacaactatttaatgttgggttttgctggrtttttctcaagcttttagtgaacctcaagcagactggtgggagccgtcaactctgggagcccttcagggagcacaaaggggaataagtactgcaaatctggccaccatccaaaattcaatgcatttacactacagtagataatttctgaatggcttcctgtaaagattttgtcacagtattgtttgctgcagtcaaaagcttatccaaatagatcatctacacaattcacgaggggatgctggatgagtctgtgacagtagatattagactgtactcaaaggttttttccctttcagag

SEQ ID NO: 84711 - DNA, 600 bp, Chicken  19866894382595_1
tctaaggtaaaataagaacacaaaaggagcattatgtttatttgcttctaaaggggcaaacagtaaacacgatttgagtattcaaggaactgcaagggaaaaagtgtgctctcatttacagttctcaaaaaacggcaatattatccttttcatttttgtaaaaatctctgttactgcaagagatttatgtagtgccattgtgctagtctgtcatgagaaggaggtatcagaattatcattcttggtacttgacctttttagcacacagttgtgtttagtttcactgtcacttccacctaktcttcacaggttacaaagtctgtaagcaaagaaaaatgcraatagccagcaagtcaaattacagaacattaataaggtcaaaggagtacagtttattatcatctttcacagagtacatgaaacagcagcactgygttacttcatcctcatgacaataattgtaaagagaccttyctgcgcaacttattctcattacaacttcaaaattaygttatgatttgttatcttctagatctcttacaatttgtctctctttaaatatcttgattgttttaaaatgtggtgagctgcacacgaaat

SEQ ID NO: 84712 - DNA, 600 bp, Chicken  19866894382595_2
tttgcttctaaaggggcaaacagtaaacacgatttgagtattcaaggaactgcaagggaaaaagtgtgctctcatttacagttctcaaaaaacggcaatattatccttttcatttttgtaaaaatctctgttactgcaagagatttatgtagtgccattgtgctagtctgtcatgagaaggaggtatcagaattatcattcttggtacttgacctttttagcacacagttgtgtttagtttcactgtcacttccacctaktcttcacaggttacaaagtctgtaagcaaagaaaaatgcraatagccagcaagtcaaattacagaacattaataaggtcaaaggagtacagtttattatcatctttcacagagtacatgaaacagcagcactgygttacttcatcctcatgacaataattgtaaagagaccttyctgcgcaacttattctcattacaacttcaaaattaygttatgatttgttatcttctagatctcttacaatttgtctctctttaaatatcttgattgttttaaaatgtggtgagctgcacacgaaatatttcttggtaacttgcctcatttatacacttcagaattt

SEQ ID NO: 84713 - DNA, 600 bp, Chicken  19866894382595_3
gcaatattatccttttcatttttgtaaaaatctctgttactgcaagagatttatgtagtgccattgtgctagtctgtcatgagaaggaggtatcagaattatcattcttggtacttgacctttttagcacacagttgtgtttagtttcactgtcacttccacctaktcttcacaggttacaaagtctgtaagcaaagaaaaatgcraatagccagcaagtcaaattacagaacattaataaggtcaaaggagtacagtttattatcatctttcacagagtacatgaaacagcagcactgygttacttcatcctcatgacaataattgtaaagagaccttyctgcgcaacttattctcattacaacttcaaaattaygttatgatttgttatcttctagatctcttacaatttgtctctctttaaatatcttgattgttttaaaatgtggtgagctgcacacgaaatatttcttggtaacttgcctcatttatacacttcagaattttattggaaccaaagaaaaacagatcaaaggatgctggaaggaagactacaagacaggatgccattttgtatgcaaatgcatgaacacagtgcac

SEQ ID NO: 84714 - DNA, 600 bp, Chicken  19866894382595_4
tgcaagagatttatgtagtgccattgtgctagtctgtcatgagaaggaggtatcagaattatcattcttggtacttgacctttttagcacacagttgtgtttagtttcactgtcacttccacctaktcttcacaggttacaaagtctgtaagcaaagaaaaatgcraatagccagcaagtcaaattacagaacattaataaggtcaaaggagtacagtttattatcatctttcacagagtacatgaaacagcagcactgygttacttcatcctcatgacaataattgtaaagagaccttyctgcgcaacttattctcattacaacttcaaaattaygttatgatttgttatcttctagatctcttacaatttgtctctctttaaatatcttgattgttttaaaatgtggtgagctgcacacgaaatatttcttggtaacttgcctcatttatacacttcagaattttattggaaccaaagaaaaacagatcaaaggatgctggaaggaagactacaagacaggatgccattttgtatgcaaatgcatgaacacagtgcacagatcttggggtgaatggcagcatatcctattggctaata

SEQ ID NO: 84715 - DNA, 600 bp, Chicken  19866894382595_5
tcatgagaaggaggtatcagaattatcattcttggtacttgacctttttagcacacagttgtgtttagtttcactgtcacttccacctaktcttcacaggttacaaagtctgtaagcaaagaaaaatgcraatagccagcaagtcaaattacagaacattaataaggtcaaaggagtacagtttattatcatctttcacagagtacatgaaacagcagcactgygttacttcatcctcatgacaataattgtaaagagaccttyctgcgcaacttattctcattacaacttcaaaattaygttatgatttgttatcttctagatctcttacaatttgtctctctttaaatatcttgattgttttaaaatgtggtgagctgcacacgaaatatttcttggtaacttgcctcatttatacacttcagaattttattggaaccaaagaaaaacagatcaaaggatgctggaaggaagactacaagacaggatgccattttgtatgcaaatgcatgaacacagtgcacagatcttggggtgaatggcagcatatcctattggctaatactgagaaggtacttatcatgcaactgagtgactaag

SEQ ID NO: 84716 - DNA, 599 bp, Chicken  19866894382599_1
  misc_feature (1)..(114): n is any nucleotide
nnnnnnnnnnnnnnnnnnnnnnnnnnnnnnnnnnnnnnnnnnnnnnnnnnnnnnnnnnnnnnnnnnnnnnnnnnnnnnnnnnnnnnnnnnnnnnnnnnnnnnnnnnnnnnnnnncgtacccattatagctgtaaaaagctagaggacgtgctacattgcttctgacccccagcctttctgcaggcaggctgtgtcacaggcagcgtaaaagaagccttctgcagcacataatcggcctgctggagctctcactgtgccaaaggacagctcaaggtctccacctccacagatcagcccgcrcttcaagcacgccctcaccaccrtggactcagactgacccacaaccctgacacagcgagctctgatctatcagtcagtcaaacaaacacagagaacayaagtagcacagaacaacttagctgcatgaaagccctttcagttttgccattcattatataaaaattgccaaatacgttaagcatggctctgctctgaagagattttggacgcctacctgaagagcacctcaattcacagtgacgcacctccgaacagctgccttactgacaaaggcctaggcagttctgtagtgtgctgct

SEQ ID NO: 84717 - DNA, 599 bp, Chicken  19866894382599_2
  misc_feature (1)..(91): n is any nucleotide
nnnnnnnnnnnnnnnnnnnnnnnnnnnnnnnnnnnnnnnnnnnnnnnnnnnnnnnnnnnnnnnnnnnnnnnnnnnnnnnnnnnnnnnnnnncgtacccattatagctgtaaaaagctagaggacgtgctacattgcttctgacccccagcctttctgcaggcaggctgtgtcacaggcagcgtaaaagaagccttctgcagcacataatcggcctgctggagctctcactgtgccaaaggacagctcaaggtctccacctccacagatcagcccgcrcttcaagcacgccctcaccaccrtggactcagactgacccacaaccctgacacagcgagctctgatctatcagtcagtcaaacaaacacagagaacayaagtagcacagaacaacttagctgcatgaaagccctttcagttttgccattcattatataaaaattgccaaatacgttaagcatggctctgctctgaagagattttggacgcctacctgaagagcacctcaattcacagtgacgcacctccgaacagctgccttactgacaaaggcctaggcagttctgtagtgtgctgctacatcctattccttgccacctga

SEQ ID NO: 84718 - DNA, 599 bp, Chicken  19866894382599_3
  misc_feature (1)..(16): n is any nucleotide
nnnnnnnnnnnnnnnncgtacccattatagctgtaaaaagctagaggacgtgctacattgcttctgacccccagcctttctgcaggcaggctgtgtcacaggcagcgtaaaagaagccttctgcagcacataatcggcctgctggagctctcactgtgccaaaggacagctcaaggtctccacctccacagatcagcccgcrcttcaagcacgccctcaccaccrtggactcagactgacccacaaccctgacacagcgagctctgatctatcagtcagtcaaacaaacacagagaacayaagtagcacagaacaacttagctgcatgaaagccctttcagttttgccattcattatataaaaattgccaaatacgttaagcatggctctgctctgaagagattttggacgcctacctgaagagcacctcaattcacagtgacgcacctccgaacagctgccttactgacaaaggcctaggcagttctgtagtgtgctgctacatcctattccttgccacctgactttcaaggcactaattactttcttaagccttgcttaaggaaggcgagctcacaagaaacagaagatcccgtggg

SEQ ID NO: 84719 - DNA, 600 bp, Chicken  19866894382599_4
caccttttgctttaattgtacaccgcaaggctagacttaatggctgccttctcaacacaagcatttccaaccccaaaacaaatctccctgctacacaaatcacacaaccactcatttataaccttcacacatcttttaaaaggacacctgaggaagaggtgaaaacaaaaactgcaagataccagaagcagaaatgcattgtttcggttctgtgacctctgtcagagccaagcctgaaatgccagtcgccatttattgttatcaccagctaacttcagggggcaggcctgcatgtttgtsgcctgcagagccttcaaggagaagcatcttgagctttcttttcacagctcgataagcagccatttctctgccactctctcaggctttgttagaacagaccgagacctttaactaatcctctgagaaggccgtttagagcagcttaccacaactaaagggggcccagcttctcacaagcgcttttactggcccaacgcactctgctgcggtttcagtccagaactgtgcacacccatccatttccaactgaagaagttgttttcctaaggattttagatcagcacagctgaacaatggaag

SEQ ID NO: 84720 - DNA, 403 bp, Chicken  19866894382600_1
ataaaatagtaggatgcagtctcagagctgaaaatattttttttctatgatgaaattatttttttggactgccaaatgtaaggatcaagtaaaaaatgaaaaggagagacaaaaaaatgtattctttctgcagaagggcaaatcagctcatctgatgtggaagaatttgacccaaaacagctctctgaaatggttgcatggtcactagcaacagagtctgtaatgcagatggaagccaagtcagctaacaagctagatgttgctgtttggaaaatatgtattgcatagtttttatctagytgccaggtagctagatgtgatttctctcactgaataaatagtgaagagggagaggccaccaaaatgggaggcatctctaaccaaaatgcatccaggtattata

SEQ ID NO: 84721 - DNA, 600 bp, Chicken  19866894382604_1
gcttgttaatacacagcaaaatgatatgcacacatccagctccgaaagcgaccgcggggagggaaggaacacaaaggagccatttattgcctgagaactgtctctgaacaaacccattgtgttaaagtaatacaaattcacaacaccttcctgcctccgtctccatctggggctgcattggtttggggagcggatgcggccatgcagcatccctgggaggtcaccgcgcagggccagatgccatactgatagcacagaggtgagggagaggggagagcgtggccaggagcctctcaaaartccatcacctcccttctggcccagctgcrggtttatctggagaggcaatttaaatcyaagagccagaaggaggtatcttttgatgtaacattttgttcttttttttttttttcctcctgaatacaaagttattccaggcaatgcagttggcctgaaatagttatcagttacaaaaccagggctgctcctatctcctctccttgtgcaatgctaagaagatcctcccgctgagctccaaagtaggggaaaagctattaattaaaaataattctccacgttaaggcttgccgcctaaagctc

SEQ ID NO: 84722 - DNA, 600 bp, Chicken  19866894382604_2
acacatccagctccgaaagcgaccgcggggagggaaggaacacaaaggagccatttattgcctgagaactgtctctgaacaaacccattgtgttaaagtaatacaaattcacaacaccttcctgcctccgtctccatctggggctgcattggtttggggagcggatgcggccatgcagcatccctgggaggtcaccgcgcagggccagatgccatactgatagcacagaggtgagggagaggggagagcgtggccaggagcctctcaaaartccatcacctcccttctggcccagctgcrggtttatctggagaggcaatttaaatcyaagagccagaaggaggtatcttttgatgtaacattttgttcttttttttttttttcctcctgaatacaaagttattccaggcaatgcagttggcctgaaatagttatcagttacaaaaccagggctgctcctatctcctctccttgtgcaatgctaagaagatcctcccgctgagctccaaagtaggggaaaagctattaattaaaaataattctccacgttaaggcttgccgcctaaagctccattaatatgaaggaaattccagccgttc

SEQ ID NO: 84723 - DNA, 600 bp, Chicken  19866894382604_3
ggagggaaggaacacaaaggagccatttattgcctgagaactgtctctgaacaaacccattgtgttaaagtaatacaaattcacaacaccttcctgcctccgtctccatctggggctgcattggtttggggagcggatgcggccatgcagcatccctgggaggtcaccgcgcagggccagatgccatactgatagcacagaggtgagggagaggggagagcgtggccaggagcctctcaaaartccatcacctcccttctggcccagctgcrggtttatctggagaggcaatttaaatcyaagagccagaaggaggtatcttttgatgtaacattttgttcttttttttttttttcctcctgaatacaaagttattccaggcaatgcagttggcctgaaatagttatcagttacaaaaccagggctgctcctatctcctctccttgtgcaatgctaagaagatcctcccgctgagctccaaagtaggggaaaagctattaattaaaaataattctccacgttaaggcttgccgcctaaagctccattaatatgaaggaaattccagccgttcactccctgctgctggagccttttctttc

SEQ ID NO: 84724 - DNA, 600 bp, Chicken  19866894382605_1
aagttcatctcttttcttcattgagagatgtttccagtcaacaaaaaaagaaaaagaaagtaaaagtagtattttgcctcttcacaaaataccgacagcttaatttagctctaaaaatgctgtattatttaccgcaaactcagtgattatgagagaagacttactgtgctagatttaaaattactgaaatgtcacactataaagaagctatatttaaagacatattaagacctggtgtgtgagtaatgtaaccttttaagagtttggataaatgtaattctgtacactataatttcctcyagcattttaagatgaagtcagagaaaataaccaaatgcaatgattaatgtgtccaggagtgcatgtatttctgtaacaaggttctaagctattcatttagcatgaatttaagaatacaatacaatttcttcctctgtctgcaattcagcaattccacatcatggtgagaggattactcatctgaaaatacaggtgttacatcaagctatactgacagcaaaaaaaaaagggggggggggggggaaatatggactactgttccagcatataaaatcaggaacattttgggtgttttcgtgt

SEQ ID NO: 84725 - DNA, 600 bp, Chicken  19866894382624_1
tgtgttgggggttccagagctgaatacagatgaggtctcacaagagcagaacacctggggataatcacctcccctgacctcctggccacatttctttatctgcagcctatatgtaggttttccttcttaaagacattcaaaagccacctggtcctgggacacctcttctacgtagctctgcttgaccagaggtctggaccagatgacctcaagaggtccctttccacctctgccattctctgattttttgattcatgagacattttctagcaattcaaatgtatactgcatttttttttycccattgctttttttcgtcgttgaacctttgtagactgcctgtgccaatggggtggttaaaataaacttaagatctgtgaagggaacattattcagataggttatttcatccaagtatataaagaaatgtccttactaattgccagaaccactcagtttttggaacaaaacaaaataaatcaaaataaaacaatcctaccatcattttacataagctctacttttgtaaaagagaagcccaaatgattgctgccttcttttaatgtgcaaattgctggagctaatttatacccatatgag

SEQ ID NO: 84726 - DNA, 600 bp, Chicken  19866894382626_1
atttccttcgtgaattacaaggaattttctggtcagacgcaggggagaaaagtgttctttcattctatactgtcagaaatcgtatttggtacaaggagctgcctgtagccggatggtaattaacgttgttgactttttagtctaagtggagccgttcctgagcacgcagtgactccaggtgtgactcatccctttccaaaagagcagagcaaacaatggcaaccacctaaacaaaaaccagagcacgtttctttcttccaacgcgagcagctctattcttttaaggaaatcagatctgtrggagtttattcttctgcgagcctcgtaggcgagcgaggcagccgagatcagaaacgaggtcttagatatgaggggttatttttatttgtttttaacctctcacactgttctgcaaccaaccacgtgcatccagaatagcggctcatgactatttattgctgaaaagcttcccaggtggcaaactcgaagaaaagagagaacagctccgtctctcccagggcagccaggctgctgctggagtaaagttttatctccgaataattgccacggagtgcttggctgctgcccaatagatcagac

SEQ ID NO: 84727 - DNA, 599 bp, Chicken  19866894382636_1
  misc_feature (1)..(192): n is any nucleotide
nnnnnnnnnnnnnnnnnnnnnnnnnnnnnnnnnnnnnnnnnnnnnnnnnnnnnnnnnnnnnnnnnnnnnnnnnnnnnnnnnnnnnnnnnnnnnnnnnnnnnnnnnnnnnnnnnnnnnnnnnnnnnnnnnnnnnnnnnnnnnnnnnnnnnnnnnnnnnnnnnnnnnnnnnnnnnnnnnnnnnnnnnnnnnnnnagcccatctccacacttgatcctctttggagttcttatgtctttaatatatgtacctagaaatttgcactgtattatactctggtattttcttacttttattggatgyatctccctcaagactgaatcttccccttaatggatcccaatgccatgggtaggtcatgataagcttctctttcttttcctcctttcatgatttccaggtgtcggtttggttgyacttatgtcattcatctttataaaacatatccactgtttatgtaaatctcagaagttattaaaaagaaaggacatctcccaagactgatccttgagaaaaaccactacatatctttttccagctgtggcaggactctctgctggcatggtttagtgatttactcagttcagaacaaaagaatgtag

SEQ ID NO: 84728 - DNA, 599 bp, Chicken  19866894382636_2
  misc_feature (1)..(79): n is any nucleotide
nnnnnnnnnnnnnnnnnnnnnnnnnnnnnnnnnnnnnnnnnnnnnnnnnnnnnnnnnnnnnnnnnnnnnnnnnnnnnnnagcccatctccacacttgatcctctttggagttcttatgtctttaatatatgtacctagaaatttgcactgtattatactctggtattttcttacttttattggatgyatctccctcaagactgaatcttccccttaatggatcccaatgccatgggtaggtcatgataagcttctctttcttttcctcctttcatgatttccaggtgtcggtttggttgyacttatgtcattcatctttataaaacatatccactgtttatgtaaatctcagaagttattaaaaagaaaggacatctcccaagactgatccttgagaaaaaccactacatatctttttccagctgtggcaggactctctgctggcatggtttagtgatttactcagttcagaacaaaagaatgtaggctaccaggtgcacccactcagaacatgcgctgcccagttcctcttgatgggacaggttttcactgtcccactcaaatcaggcacaacgacctgaaacaatacgcgttcccag

SEQ ID NO: 84729 - DNA, 526 bp, Chicken  19866894382636_3
tatccactgtttatgtaaatctcagaagttattaaaaagaaaggacatctcccaagactgatccttgagaaaaaccactacatatctttttccagctgtggcaggactctctgctggcatggtttagtgatttactcagttcagaacaaaagaatgtaggctaccaggtgcacccactcagaacatgcgctgcccagttcctcttgatgggacaggttttcactgtcccactcaaatcaggcacaacgacctgaaacaatacgcgttcccagtgacctgaaatacagcacattcctaaargcaacatacctagttttcagagacaaaaataatcaggtgacaaaattcaccaatgcatgaaaaaggtcttccagtcttgctgtatggtaaacatacagtttgtgatactgctatttgttgttctttggcattgcaccagaagggctgcccaaagaaggagatgtccaacacatggaaatgcaagtccagcgtgcagcacagatccaactgttgatctctttgggat

SEQ ID NO: 84730 - DNA, 600 bp, Chicken  19866894382640_1
cacattttctgttttcaaacctgtctgagctggaagtctgaaatctccttgagctactcttaccctgagattgtatacaattcaatatctgtagcaaattatttctgttcttagtgacgttgtaacttgaccacaaggtgacaaatcccttaaatgaggctctgtagaagaggactccataaacaatatgagacagttaggtttgatgtttaactatacaagtataatgtgaaggcaacattattttgtgacttccagatagcaatgctgtactgaacattaaaacctaaggagctatgyactgtgctgtctgaaggggttgggtgggggggaatatttactgttgaaggagtgtttcctccattcactctttttctgtctctcaccaggtttctgcatgtttgtcttgagcctggtgaagaagcactatcgcctccagttctacatggtatggttaaacaggggctggctgcctccagttggaggcagaatgatgaatagtataggctgcttggaaatgttatgtagataaatacatgcttctgtgctggctgtgtgctgtaatgctgccccaaaggaaagttactgtgagcagactgt

SEQ ID NO: 84731 - DNA, 599 bp, Chicken  19866894382645_1
  misc_feature (1)..(10): n is any nucleotide
nnnnnnnnnncgtttgtaaatgtgtggaattcttataaggcatgccttccataatgagggagcagcaactctggaccaaaaagcttccaaaatcatacaatccatctgcattagatgaaaatgggctttgcaggcattattaaaataaaataggaaataaaatagtgggttttgactgatgtgccttggtatatgtcactgtaggagtttaagtgttcccaactttctttccagtctcactggcagagattaccagtcctctactgcagcctgcaaggaaactcatacctttgtcattgmagtttcaaggcaagattcagtattttatcttaaaccactgaatgtgtcctgagataccaggctcctagctggattgtttctgcttactttactgctgtagctttcaccagaagggctgggcaggcagctgggagtaatgacaccttaaatattcacagcaaggttttgcagagctcagctgtcaaagctgcagcgtctttttatgttccttatacacatcaatagcttctgccaccaggaacaaaagaagaatatcaagaaaggtaaaaaacaaaaaaacaaggttaaacagttgcaga

SEQ ID NO: 84732 - DNA, 600 bp, Chicken  19866894382647_1
aattctgccaactttcatgaaatgaatgtgaccaacaccagcattcagctcagtttggggaacctttatcgtttaacacaagcactctttcctccagaacctaaggtaactcactgccttcatgtatttttagtaaaacatttttccatataaaagctgtgcttttgcagaaagctccaggaatcccagcactttatctgatcatataaagctttctcatgacgcttcccatttgcattattcatagtctgtgttagtgggggcttttttattgttttttagtctctctgacttaaattrgtattgtctttctctgtttctttaggaattaccacaggattctatcacaaaatccctgctggtgaattaataactgtcagtttagagtcccttcacgtttacctgctaaccaggttcttcagaactttgcagaagttctagactgtttacatcagatataagtcttgctaagctaaacttgcaaagcatttaattgcagatttgatgagggaaaccactagagttgcagttgctgaagctgtaaaaagttgaaaacagactgccagttgatttgggatacactacagaggagaagtaatg

SEQ ID NO: 84733 - DNA, 600 bp, Chicken  19866894382649_1
tgtagaaaacaattttcatgcatttttctgacctttgcatgtattttcttcacctctgaagccagaaactggttcatcctctgtttgaaggctcctatcttaagtctgttaacgattttctgtttgttttggcttcaggcagaaagtttcctcagttcagctgtattctaaagccaagaccagaatagaaagaatatttcagcattttaaccccaagaaatcctcttctgtcctttcaaaactgcaaatattagtcttgtctagaatttcccacattagatgaaaaagtccttcatgtargtctatttcacacagagaatatacttatttaaagagaaaaggtcacagaaactgcaaagcgtctcattagaactgttttgccattccaagtgtgtctgagtgtcacacatacggatgctgcttagtatctaattgaaacccttgtcttcctcgagtcaagggaaaatgtgtgatctgaagccaaatcaacaaatcttcacagaaatgtttcacggctgcacttccatgaactctcacactaatctgtccagctctgtatggacactgagcaggaacactgttagctttcataaagtgata

SEQ ID NO: 84734 - DNA, 347 bp, Chicken  19866894382651_1
acgaaaaagtctgctagaacaggattattgtcaaattacatctgccttggcggcaggaaatcaatcaagagtgagctgatttacacctgccagagccaacacatcatgaacttcatcatctttcccagtgatgtttttatctttgcactgacacagtcagtgagaggaaaatattttcccatttaaaatcaaaacattcaaggtagtgtttggcaaagcactggagcctggggttcctgctgattctgacaacagtgctggtatcttttgctaatgaccaaagagcaatataatgagttrtcttgggcttctgctctattcagcatgcagtgttttaataggctgtt

SEQ ID NO: 84735 - DNA, 600 bp, Chicken  19866894382654_1
cgactgaaagcagcggattaaaggcgcttacagccgtaagccataaattaggttaaagcggcccgctaagccaaggcctgaaaagcaagagctgctgttggagccttcctcaggtggcgttaattccaaggccgctcagagcagagatggggaatgtgcagatatggggaatggggacagcccacgcagggatgcacccacagccccccgctgccccattggtcctccagcagaggatggagcccaaagccttctgcccccccagcaccgacgcagagaagcagccaagtgctgctgtgyccrggctgaacccgcagggctgcgatagctccgagaggagcaatcagggctgcattacagcactgtgaggtccggaatgccgccgccccaaagcggaacatcgcaaaccaacctccccttctgcagctgcagaactttgtccttcagagactcatccaactggtccaggaacggcgtgatgtccacgggttcctccacgatggtctctttgatgggatgaaacctgaactccctcttcttccctgcaacgaaggatgcatccctgcgatcgcctgcagccctggggccgtccccatcgcg

SEQ ID NO: 84736 - DNA, 600 bp, Chicken  19866894382654_2
ctgaaagcagcggattaaaggcgcttacagccgtaagccataaattaggttaaagcggcccgctaagccaaggcctgaaaagcaagagctgctgttggagccttcctcaggtggcgttaattccaaggccgctcagagcagagatggggaatgtgcagatatggggaatggggacagcccacgcagggatgcacccacagccccccgctgccccattggtcctccagcagaggatggagcccaaagccttctgcccccccagcaccgacgcagagaagcagccaagtgctgctgtgyccrggctgaacccgcagggctgcgatagctccgagaggagcaatcagggctgcattacagcactgtgaggtccggaatgccgccgccccaaagcggaacatcgcaaaccaacctccccttctgcagctgcagaactttgtccttcagagactcatccaactggtccaggaacggcgtgatgtccacgggttcctccacgatggtctctttgatgggatgaaacctgaactccctcttcttccctgcaacgaaggatgcatccctgcgatcgcctgcagccctggggccgtccccatcgcggtg

SEQ ID NO: 84737 - DNA, 600 bp, Chicken  19866894382654_3
gagaggagcaatcagggctgcattacagcactgtgaggtccggaatgccgccgccccaaagcggaacatcgcaaaccaacctccccttctgcagctgcagaactttgtccttcagagactcatccaactggtccaggaacggcgtgatgtccacgggttcctccacgatggtctctttgatgggatgaaacctgaactccctcttcttccctgcaacgaaggatgcatccctgcgatcgcctgcagccctggggccgtccccatcgcggtgtggggccgtgcagggctgcggggtgggaygtgaggggtgtcccagtgcagggtgcagctccctgcctcacccctgcgaggtggctgtgctcggggggcaggaaggcagcaggggatgcaggcagaggggtgcacagagctgtgcttgcattcagcccagctcccacaggtgggtgctgtgcccatccccatgtgcacgcacacacatacgggttgctcactacccccattcaggactgacaccccctgtgggttccccacgccctcacccatccatctcattctgggccatagaaaccaactgcagcacagcccaggggtgccagggac

SEQ ID NO: 84738 - DNA, 600 bp, Chicken  19866894382657_1
tccagtatgagtttttttttttgttggtgaatctgaatataacctcactcttaccatcagttggtgcctggaatccagcattcagtgtccaatggcagggaccatagccagatgcctttacatcactgcaataccacatcaggcagcagctccaaatggcactgcccagcttctctgcattgatgcaggatgatgcaaatgttcagactcaagcaacagcaggtttctagggacaaatgtaaaaacatgggtagttaatttgttggtcatggataaacaacatctcaagccaccatcccrgccctacctacctaccttttgctgttccagaaggcagaggtctaccatcccagagaagaaatgaaaagatgccctaaaagtgagtccttattagaggtgaggacagtatggactgtgacacaactgggcagttctgactccatccattcatactaccaaattcataagggtatttgaagagtagctgaaatcaatcattagtgctacttcccacagactcccaccatttgctcccacgacaaaaaaatttagaagaaaatgatgtggcagatatagcctgtctgaaatttgatggcactt

SEQ ID NO: 84739 - DNA, 600 bp, Chicken  19866894382669_1
tagccaggaaactcatttttaagtctttactttctcttttctggttacggaaatcttttcagagattggttgctgttagctctcttgaattcctttcttggtatatgaatgttaattgaatatttttcattccattctgtactgaattgaaatactgaagtcagattcactgagcagctgcaagtatcccgaccagagaaaacagctgaacttgctaaccaggtagcgctaacactgaactcgccaatttgcaatcactacaaccattcccaccagtgtcaaaggaaagatgctttaaawagagtcttaattttattttcatccattcttccccagtgaattagcttggggactgagaataacgtttatgctaacaaccagaagccagatgtgctaagtgattaaaagtactttataatgtggttagcttctacgcaaatttactaagtagtctacattggactccatagcaacttgagaatgtgatctgacattgaatttcatcaacagtcaaatttcaaagaattactgtatcattcttacaactcacgtctcctgaaaaacttcgctgaaaactctgatcccgcaaagcatatatct

SEQ ID NO: 84740 - DNA, 600 bp, Chicken  19866894382671_1
aggatgcaagtcagatcagcaatggctcagcatatcttttattaaacttctgcaagaggaaaaagtagagatagtccagcactaattccttttcctattagaagtcagtgcagaccatatgtgctccaactctctggactcgagacagccacctggcaccaaagcactgcacccaattagcgtgatggattgatttctctaagaggccaaattaatgcaaagcattagtgttatccagtttgtatcagcatctcacagtacgcaggagcaggtgacaccggcccagcactctgaagctgyagggaaaagctgtgtccccagaactggcccagtacacagccagggtttggggaagcctggtgcggctgctgggcaacctctgctcaggtaggaaaccactctgccacggatgtctggaactagctactcattcactagtttccttgcccaggaaatcccatgccatgcatagagcatctcagcagcttgcctcttgcccatctcttagcttcccccgtttacacgcaaacaccaccttccctcccagcagcattacactcagccttgaaggtctcatgctgtgttcacgtgggactgctt

SEQ ID NO: 84741 - DNA, 599 bp, Chicken  19866894382672_1
  misc_feature (1)..(76): n is any nucleotide
nnnnnnnnnnnnnnnnnnnnnnnnnnnnnnnnnnnnnnnnnnnnnnnnnnnnnnnnnnnnnnnnnnnnnnnnnnnnttccccgccctggtaggaggctccactgattaaggctgtactgggacaagagtaactggtgaagcacacagttgttgagagccatccgttacctcaaccctacactcccatggctgctatcacctgtcctctctcctacttctgcagcttctgcttctaagatttgtgcttgctgttttgcatcttctagccacacacatgatccacaggtctgcccacatctyrtctaaactttgaatgacaaactgaatggtaattcagtgggaggaccttatgcactcaaggacctgcttatccagtgggctgtrtgaatgtgctcaccttcctgccttcaggttacctacttcaggaagasaagcacccataaataatagaatcattaagactgaaaagaccactaagatcatccagtccaatcatcaacctcaacgcccactgtaccatgtccctcagtgtcacatctacatgtttcctgagcacctccagggatggtgactccaccacccccctggacarcttgttt

SEQ ID NO: 84742 - DNA, 599 bp, Chicken  19866894382672_2
  misc_feature (1)..(75): n is any nucleotide
nnnnnnnnnnnnnnnnnnnnnnnnnnnnnnnnnnnnnnnnnnnnnnnnnnnnnnnnnnnnnnnnnnnnnnnnnnnttccccgccctggtaggaggctccactgattaaggctgtactgggacaagagtaactggtgaagcacacagttgttgagagccatccgttacctcaaccctacactcccatggctgctatcacctgtcctctctcctacttctgcagcttctgcttctaagatttgtgcttgctgttttgcatcttctagccacacacatgatccacaggtctgcccacatctyrtctaaactttgaatgacaaactgaatggtaattcagtgggaggaccttatgcactcaaggacctgcttatccagtgggctgtrtgaatgtgctcaccttcctgccttcaggttacctacttcaggaagasaagcacccataaataatagaatcattaagactgaaaagaccactaagatcatccagtccaatcatcaacctcaacgcccactgtaccatgtccctcagtgtcacatctacatgtttcctgagcacctccagggatggtgactccaccacccccctggacarcttgtttc

SEQ ID NO: 84743 - DNA, 600 bp, Chicken  19866894382672_3
cctggtaggaggctccactgattaaggctgtactgggacaagagtaactggtgaagcacacagttgttgagagccatccgttacctcaaccctacactcccatggctgctatcacctgtcctctctcctacttctgcagcttctgcttctaagatttgtgcttgctgttttgcatcttctagccacacacatgatccacaggtctgcccacatctyrtctaaactttgaatgacaaactgaatggtaattcagtgggaggaccttatgcactcaaggacctgcttatccagtgggctgtrtgaatgtgctcaccttcctgccttcaggttacctacttcaggaagasaagcacccataaataatagaatcattaagactgaaaagaccactaagatcatccagtccaatcatcaacctcaacgcccactgtaccatgtccctcagtgtcacatctacatgtttcctgagcacctccagggatggtgactccaccacccccctggacarcttgtttcaacrcattaccactctttctgagaggaaatatccaacctgaacctccyctggcccaagctgatgtcattacgtcccatcctata

SEQ ID NO: 84744 - DNA, 600 bp, Chicken  19866894382672_4
ctggtgaagcacacagttgttgagagccatccgttacctcaaccctacactcccatggctgctatcacctgtcctctctcctacttctgcagcttctgcttctaagatttgtgcttgctgttttgcatcttctagccacacacatgatccacaggtctgcccacatctyrtctaaactttgaatgacaaactgaatggtaattcagtgggaggaccttatgcactcaaggacctgcttatccagtgggctgtrtgaatgtgctcaccttcctgccttcaggttacctacttcaggaagasaagcacccataaataatagaatcattaagactgaaaagaccactaagatcatccagtccaatcatcaacctcaacgcccactgtaccatgtccctcagtgtcacatctacatgtttcctgagcacctccagggatggtgactccaccacccccctggacarcttgtttcaacrcattaccactctttctgagaggaaatatccaacctgaacctccyctggcccaagctgatgtcattacgtcccatcctatacgtgcaaagctgaacactgtagcagcaaaacagaagtctgtttcacc

SEQ ID NO: 84745 - DNA, 600 bp, Chicken  19866894382672_5
cacatctyrtctaaactttgaatgacaaactgaatggtaattcagtgggaggaccttatgcactcaaggacctgcttatccagtgggctgtrtgaatgtgctcaccttcctgccttcaggttacctacttcaggaagasaagcacccataaataatagaatcattaagactgaaaagaccactaagatcatccagtccaatcatcaacctcaacgcccactgtaccatgtccctcagtgtcacatctacatgtttcctgagcacctccagggatggtgactccaccacccccctggacarcttgtttcaacrcattaccactctttctgagaggaaatatccaacctgaacctccyctggcccaagctgatgtcattacgtcccatcctatacgtgcaaagctgaacactgtagcagcaaaacagaagtctgtttcaccaaacacgcacattttccatcaatgcccaatacacattggacaaaaggaggcacagtgaagaagaacattcacagctcttcatatcacttgcacaggaatgtatctttacctatgccatgagatcctcatgatccatccacatccagcaagaaacccacaag

SEQ ID NO: 84746 - DNA, 600 bp, Chicken  19866894382672_6
aaactttgaatgacaaactgaatggtaattcagtgggaggaccttatgcactcaaggacctgcttatccagtgggctgtrtgaatgtgctcaccttcctgccttcaggttacctacttcaggaagasaagcacccataaataatagaatcattaagactgaaaagaccactaagatcatccagtccaatcatcaacctcaacgcccactgtaccatgtccctcagtgtcacatctacatgtttcctgagcacctccagggatggtgactccaccacccccctggacarcttgtttcaacrcattaccactctttctgagaggaaatatccaacctgaacctccyctggcccaagctgatgtcattacgtcccatcctatacgtgcaaagctgaacactgtagcagcaaaacagaagtctgtttcaccaaacacgcacattttccatcaatgcccaatacacattggacaaaaggaggcacagtgaagaagaacattcacagctcttcatatcacttgcacaggaatgtatctttacctatgccatgagatcctcatgatccatccacatccagcaagaaacccacaaggtatgtttgcct

SEQ ID NO: 84747 - DNA, 600 bp, Chicken  19866894382672_7
tatgcactcaaggacctgcttatccagtgggctgtrtgaatgtgctcaccttcctgccttcaggttacctacttcaggaagasaagcacccataaataatagaatcattaagactgaaaagaccactaagatcatccagtccaatcatcaacctcaacgcccactgtaccatgtccctcagtgtcacatctacatgtttcctgagcacctccagggatggtgactccaccacccccctggacarcttgtttcaacrcattaccactctttctgagaggaaatatccaacctgaacctccyctggcccaagctgatgtcattacgtcccatcctatacgtgcaaagctgaacactgtagcagcaaaacagaagtctgtttcaccaaacacgcacattttccatcaatgcccaatacacattggacaaaaggaggcacagtgaagaagaacattcacagctcttcatatcacttgcacaggaatgtatctttacctatgccatgagatcctcatgatccatccacatccagcaagaaacccacaaggtatgtttgcctttacatgatccaaggtctgaaataacaactacaacttccatata

SEQ ID NO: 84748 - DNA, 600 bp, Chicken  19866894382674_1
aatgaacacatttggactcgaaaaacacgatttggtttctgaagttctgaatgttctctataggttatggagtccttctttggagatattccacatcttcctggacacttccttgtgcaacctgctttaggggacctgctttagcaggggggtggactcagtgttatcttcactcttccaacccctattgttctttgattgctgtgctcgtctcaatttttctttaaaaagattttcacttagattgaatttgaataactaagaacctttttatcaggaccctaggaatgtttatttccyatgagtggcattgaggaactaacagtatagratgtctgtactgttagaagtacagaaatacrtacttgaaaataacatagaattctacataaaacaaaataatattggcactataaacttgatgaaagtgagaggtagaacacttcaagaaacagcgacagttggactatttgtggagaactcaaattgttaacagcaagsaaaaacwccactgaagtgagatggtaatagcaatattaataggacagcatattaaaccacttttgcttttaaatagttaatcggtagtttgcacagagg

SEQ ID NO: 84749 - DNA, 600 bp, Chicken  19866894382674_2
ttggtttctgaagttctgaatgttctctataggttatggagtccttctttggagatattccacatcttcctggacacttccttgtgcaacctgctttaggggacctgctttagcaggggggtggactcagtgttatcttcactcttccaacccctattgttctttgattgctgtgctcgtctcaatttttctttaaaaagattttcacttagattgaatttgaataactaagaacctttttatcaggaccctaggaatgtttatttccyatgagtggcattgaggaactaacagtatagratgtctgtactgttagaagtacagaaatacrtacttgaaaataacatagaattctacataaaacaaaataatattggcactataaacttgatgaaagtgagaggtagaacacttcaagaaacagcgacagttggactatttgtggagaactcaaattgttaacagcaagsaaaaacwccactgaagtgagatggtaatagcaatattaataggacagcatattaaaccacttttgcttttaaatagttaatcggtagtttgcacagaggtgactcaaggaaaaaatataagcaaacacag

SEQ ID NO: 84750 - DNA, 600 bp, Chicken  19866894382674_3
ggttatggagtccttctttggagatattccacatcttcctggacacttccttgtgcaacctgctttaggggacctgctttagcaggggggtggactcagtgttatcttcactcttccaacccctattgttctttgattgctgtgctcgtctcaatttttctttaaaaagattttcacttagattgaatttgaataactaagaacctttttatcaggaccctaggaatgtttatttccyatgagtggcattgaggaactaacagtatagratgtctgtactgttagaagtacagaaatacrtacttgaaaataacatagaattctacataaaacaaaataatattggcactataaacttgatgaaagtgagaggtagaacacttcaagaaacagcgacagttggactatttgtggagaactcaaattgttaacagcaagsaaaaacwccactgaagtgagatggtaatagcaatattaataggacagcatattaaaccacttttgcttttaaatagttaatcggtagtttgcacagaggtgactcaaggaaaaaatataagcaaacacagagtgtaataaaaaaaaatatctgggggatgt

SEQ ID NO: 84751 - DNA, 600 bp, Chicken  19866894382674_4
ctgtgctcgtctcaatttttctttaaaaagattttcacttagattgaatttgaataactaagaacctttttatcaggaccctaggaatgtttatttccyatgagtggcattgaggaactaacagtatagratgtctgtactgttagaagtacagaaatacrtacttgaaaataacatagaattctacataaaacaaaataatattggcactataaacttgatgaaagtgagaggtagaacacttcaagaaacagcgacagttggactatttgtggagaactcaaattgttaacagcaagsaaaaacwccactgaagtgagatggtaatagcaatattaataggacagcatattaaaccacttttgcttttaaatagttaatcggtagtttgcacagaggtgactcaaggaaaaaatataagcaaacacagagtgtaataaaaaaaaatatctgggggatgtctgtgactaaaatgctgcaatgacattttatctaacgtgaaacaaaaaggggcatactaaaacaaacaggaattaaaaaagcccccaaaatagaaaatcaaggggctgtgatccatacagctctctctgtacttttcaa

SEQ ID NO: 84752 - DNA, 593 bp, Chicken  19866894382674_5
cgtctcaatttttctttaaaaagattttcacttagattgaatttgaataactaagaacctttttatcaggaccctaggaatgtttatttccyatgagtggcattgaggaactaacagtatagratgtctgtactgttagaagtacagaaatacrtacttgaaaataacatagaattctacataaaacaaaataatattggcactataaacttgatgaaagtgagaggtagaacacttcaagaaacagcgacagttggactatttgtggagaactcaaattgttaacagcaagsaaaaacwccactgaagtgagatggtaatagcaatattaataggacagcatattaaaccacttttgcttttaaatagttaatcggtagtttgcacagaggtgactcaaggaaaaaatataagcaaacacagagtgtaataaaaaaaaatatctgggggatgtctgtgactaaaatgctgcaatgacattttatctaacgtgaaacaaaaaggggcatactaaaacaaacaggaattaaaaaagcccccaaaatagaaaatcaaggggctgtgatccatacagctctctctgtacttttcaa

SEQ ID NO: 84753 - DNA, 599 bp, Chicken  19866894382686_1
  misc_feature (1)..(3): n is any nucleotide
nnngactgtgttgtcagtgtatcaaatgcatacaattatttgccataatttaagttagcgctgcactgcgtacttcccatgccctgctttcagcccagatagggttagtagcccaccagtgtttggttggtgctgagtcacagttgcacacccagaatgggctgggcactctggcaggctgcgtggcccagcacagctcacagtgcaacctgccctctgccccatgccatcatggcaccaggcagcatagcgagctgcaccagactgcatgtgtcctaagggccacgggtaggatatgcmtgactttgattgtacagtgtcattgctgtctgtgtagtcctgaagtttattttcctgtgatgccatcatgtcccttcatacctgttttttataaatctgtgtgcatgtgtctgagaatgaaaaaagttaggaatgttcctcttagggtggtgcatgtgttgctatgtgtgcacatgttatagccaaggtagtttaacttagtctgctcgctttcagagtgtacctgaaaaacttggttttrttagcattgatttaactcactgtgtagctacactgcaaaaactaacattttaagaatc

SEQ ID NO: 84754 - DNA, 600 bp, Chicken  19866894382686_2
gcagcatagcgagctgcaccagactgcatgtgtcctaagggccacgggtaggatatgcmtgactttgattgtacagtgtcattgctgtctgtgtagtcctgaagtttattttcctgtgatgccatcatgtcccttcatacctgttttttataaatctgtgtgcatgtgtctgagaatgaaaaaagttaggaatgttcctcttagggtggtgcatgtgttgctatgtgtgcacatgttatagccaaggtagtttaacttagtctgctcgctttcagagtgtacctgaaaaacttggttttrttagcattgatttaactcactgtgtagctacactgcaaaaactaacattttaagaatcaaaaggaaaaagtatcctttctgcattatcttaaaaaacagatatagtcagttttcttctactacctctctcctacaattgataaagagtaagttctcctcttaattttaagcatgagatcaaactcgctagtgttttatctatcatcaacttctatagagccatgctagtattaataagcatcccatgttactgtttgcatttgtccttgagttaattgccttgaacccatagctgggggg

SEQ ID NO: 84755 - DNA, 599 bp, Chicken  19866894382688_1
  misc_feature (1)..(171): n is any nucleotide
nnnnnnnnnnnnnnnnnnnnnnnnnnnnnnnnnnnnnnnnnnnnnnnnnnnnnnnnnnnnnnnnnnnnnnnnnnnnnnnnnnnnnnnnnnnnnnnnnnnnnnnnnnnnnnnnnnnnnnnnnnnnnnnnnnnnnnnnnnnnnnnnnnnnnnnnnnnnnnnnnnnnnnnnnnntgggatattccatgattctatggttctaaatatatgtttttctgtttggttaaaaactgtcttcaggctttacatctaaacacgtacctagcagagcaccttcatgtgcttgagtatttaatggcttamagattaaaaatgaagagcaaacctgtggactctatcaggtgttctgctaataaaatagtttgggcgtatcaaatatgtaaatagggaagactcatatagttggaatcacatgcattcacataaaccacgagatcttggtttcagttcagactgttatcttttctgtcagtgggtaaagcatctcatgtagtgatggtataatatgtagcactgctttcatgagttgagtacttgctcaagaggrgcagcttcttgttgtgtatgtttgtgtatgctggcattctaatggcagccttgag

SEQ ID NO: 84756 - DNA, 600 bp, Chicken  19866894382688_2
atctaaacacgtacctagcagagcaccttcatgtgcttgagtatttaatggcttamagattaaaaatgaagagcaaacctgtggactctatcaggtgttctgctaataaaatagtttgggcgtatcaaatatgtaaatagggaagactcatatagttggaatcacatgcattcacataaaccacgagatcttggtttcagttcagactgttatcttttctgtcagtgggtaaagcatctcatgtagtgatggtataatatgtagcactgctttcatgagttgagtacttgctcaagaggrgcagcttcttgttgtgtatgtttgtgtatgctggcattctaatggcagccttgaggcaacactgtggtatttgaaactgctgccaggtctctggatggcaggtttaatgcaatgctgaggggctgatgccttcccttcagtcaggttgcaaagcaggcatgcttcaagctctgctatcttaggcagaagtgaaagttctgctctgaaatgttgtaggagcaaccaacagctcaaccaacttcctagtaagaacccagtaggcagctaaaaataaagctgcaagaaagaatgaggcaaaga

SEQ ID NO: 84757 - DNA, 600 bp, Chicken  19866894382695_1
atttcctttgcacactccatgggaaaccagcctctttcaccatcccgcagtcgttccccttcataccaacctgcaagcgtgaacaaagtgagaactcttctcaagtacttttaaagacacctggcagaacttttcagcaatgcacttgtgtagagacaaccctggtgcctgatgaaatgcccaagctctgtttttaggcaattcaatttcatgcctgtggatatttcacgtcaaaaccacccaagccgtaccatccccaactctttacctatgtacgctatgacaggcgctgagtaacaygtgttgctgaaatggaggctgtcctttggaaccctgaaccaaaacattcaggtttttcttggaagctaatgaggaaacaaactgagacctgcagtggtggcaggcggttaccaccaacactcaccgtcatttactttttgataaaccaaaacaacatcagcaacttgaagagacagctcgtctgactgctttgctgtgtaagttctgatgatctctacctgcgtcaaagctgtagaagaaaaaaagctgagttacacatttcctgcagccaatcttctatgaagatgtgcacgtccttaa

SEQ ID NO: 84758 - DNA, 599 bp, Chicken  19866894382697_1
  misc_feature (1)..(122): n is any nucleotide
nnnnnnnnnnnnnnnnnnnnnnnnnnnnnnnnnnnnnnnnnnnnnnnnnnnnnnnnnnnnnnnnnnnnnnnnnnnnnnnnnnnnnnnnnnnnnnnnnnnnnnnnnnnnnnnnnnnnnnnnnncagatgattacagcccagcagcctttcacacttcatgaaatttgagctggaaatgaatcctagagctaccgtgtccactgaacggtactggtgttgggaaaggtttgcttttgtctgaagggtacaatccgaatatgagagagagagagacgaagaaatcattacacagaaaaggctytttcagttccagtgtgattaggccagctctgaagccacttttctctctttcaccaaatataatcctaaacttcctcttcctcatactttttactatctgatttgctgaggaagaaggtggggagttgatattttctttcccccagtatttatttttacaaaactgtgaagagaaatggagaggaagcattgataataagagcatttgattgagcaagtgttaaarataatatgtaaacagytttcttaaaatttattctaaaatatctaccaagtcagctgtaagtggatcttagtgat

SEQ ID NO: 84759 - DNA, 600 bp, Chicken  19866894382697_2
tttgcttttgtctgaagggtacaatccgaatatgagagagagagagacgaagaaatcattacacagaaaaggctytttcagttccagtgtgattaggccagctctgaagccacttttctctctttcaccaaatataatcctaaacttcctcttcctcatactttttactatctgatttgctgaggaagaaggtggggagttgatattttctttcccccagtatttatttttacaaaactgtgaagagaaatggagaggaagcattgataataagagcatttgattgagcaagtgttaaarataatatgtaaacagytttcttaaaatttattctaaaatatctaccaagtcagctgtaagtggatcttagtgatttatctcagcaagaattagtgcttttgcaggttcttctgaaggatrcaaaatctttacataggcatttatctattaaacaaacgtgaacctttaaaggcctgtcaggtcctggcagaggttgtaagctccacgagccactccacgaggaaggtgttatactttctgccagatgatctccatgtcttgaaggagatgccatgacagcagcagtgtctgaggaaaaga

SEQ ID NO: 84760 - DNA, 589 bp, Chicken  19866894382697_3
gggtacaatccgaatatgagagagagagagacgaagaaatcattacacagaaaaggctytttcagttccagtgtgattaggccagctctgaagccacttttctctctttcaccaaatataatcctaaacttcctcttcctcatactttttactatctgatttgctgaggaagaaggtggggagttgatattttctttcccccagtatttatttttacaaaactgtgaagagaaatggagaggaagcattgataataagagcatttgattgagcaagtgttaaarataatatgtaaacagytttcttaaaatttattctaaaatatctaccaagtcagctgtaagtggatcttagtgatttatctcagcaagaattagtgcttttgcaggttcttctgaaggatrcaaaatctttacataggcatttatctattaaacaaacgtgaacctttaaaggcctgtcaggtcctggcagaggttgtaagctccacgagccactccacgaggaaggtgttatactttctgccagatgatctccatgtcttgaaggagatgccatgacagcagcagtgtctgaggaaaagatttag

SEQ ID NO: 84761 - DNA, 485 bp, Chicken  19866894382697_4
tctttcaccaaatataatcctaaacttcctcttcctcatactttttactatctgatttgctgaggaagaaggtggggagttgatattttctttcccccagtatttatttttacaaaactgtgaagagaaatggagaggaagcattgataataagagcatttgattgagcaagtgttaaarataatatgtaaacagytttcttaaaatttattctaaaatatctaccaagtcagctgtaagtggatcttagtgatttatctcagcaagaattagtgcttttgcaggttcttctgaaggatrcaaaatctttacataggcatttatctattaaacaaacgtgaacctttaaaggcctgtcaggtcctggcagaggttgtaagctccacgagccactccacgaggaaggtgttatactttctgccagatgatctccatgtcttgaaggagatgccatgacagcagcagtgtctgaggaaaagatttag

SEQ ID NO: 84762 - DNA, 600 bp, Chicken  19866894382705_1
ctttgtgaatactgacgtatgttttttaggaaatcttgatagccatctctgtcagagtaatttgcaaagtcagtgttttactgagctccagaaagttttaatctgtaaggtgttttaatatttgtgttaatagttgatgattttctggagttcacaaaagtgaatgaataccgcatgtcacaatattgcttttgagtctagaagtggaggctatcaccagtaatcatttttagtttgtctgtgctttagatctaggaaagaggagcttgtgttctctccccatcctcgggcagaggggcrgggagtgtttaaatacaggattcctgtcatcaccaaaggaagcatgggacgttaattgtgagcattttatttagttcagcagcttgcactagtctgaaggcttgtgataagtttaacagctggaaactgggaacaaatatttcaaaagactgttctgaccacattttgtggatgatgttattttaagagcatgctaatttatctggagatccagctttggcaatccactctgtgttgtaataatggctgatttcatttgactctttcataagaccaattgaaaaaaaaaagaaaaagtat

SEQ ID NO: 84763 - DNA, 600 bp, Chicken  19866894382716_1
gagctgcaatccctgctcccccgcctgcctctctggacatccgtacgtaccacctagaaacgtgagggcgaataccagtcctgggtaaaacctcaagtctgaaacaaccacctcgcctgagcgaagccgaagtgtttgcagcaaaaactggagataagtgaccaaggacaaaatcttcacagaaacaaagctttaagtttcgactctacaccattctgtcagtagctttcttatttaattgagccagtatacacccaacatcaaagatactaagctattttgtgctgaaaatattggaarcatgttaggaagaggtggcaaacagaaaggatctgtcaaaggtaacagatgtatcaagggcaccgagcactgtgaagaaggcgttaattatctatgctgaaaaagaaaaggtgtttgaaaaacagaaactgttttcaaaagattcaacacattcctattgtgctcaggagaaaaagcttccctgcaccttagacaacattattttgggtatgcgggttaaaaagatttttttagccgaggaggtaacacaacgtagggagcgctctgcttcagaaacagggctttaacttcaaaaccttc

SEQ ID NO: 84764 - DNA, 600 bp, Chicken  19866894382717_1
ctacttcttaagaactttaagtttccccctggtgaagcttggaaaatcacaagtaattttagcttgccaagtttatcagaaaatacactgcagacagaaactctcatttgtaattagtcacaacaatacgtctcttgaagatagctgattaactgacaaatgcaacaactgattacataaagaaataatgctaggaaaatatgtagcatattttttatgtcatctcttgtacatcactggcagctagagacaagagttagcgctagtgttggctttaactagctaatgacctaatacacrtttccaacctctctagaatttaatagcaatccaacatgcagcacagtaaatcatctctcaactggaattgaagtccattaaattgattttaacctaaatacattacttagttytgaaatacttgtagaacataatacatcactgctgttttaagtttatagacatataaatcacatgtgacaagcagtaaatcagaatacttagcagaacagtaacccaacaacacattcttcctacgagacagaactgtccaattaatgaggacagcagacgcttttcttccttttttttcactcctga

SEQ ID NO: 84765 - DNA, 587 bp, Chicken  19866894382717_2
ttagtcacaacaatacgtctcttgaagatagctgattaactgacaaatgcaacaactgattacataaagaaataatgctaggaaaatatgtagcatattttttatgtcatctcttgtacatcactggcagctagagacaagagttagcgctagtgttggctttaactagctaatgacctaatacacrtttccaacctctctagaatttaatagcaatccaacatgcagcacagtaaatcatctctcaactggaattgaagtccattaaattgattttaacctaaatacattacttagttytgaaatacttgtagaacataatacatcactgctgttttaagtttatagacatataaatcacatgtgacaagcagtaaatcagaatacttagcagaacagtaacccaacaacacattcttcctacgagacagaactgtccaattaatgaggacagcagacgcttttcttccttttttttcactcctgaacttacacttcctgcatctcaaaatgaaacaagtccyatttaatatccaatcactctgatcataccaagagaagaacgcacatatttaatatagcatcca

SEQ ID NO: 84766 - DNA, 363 bp, Chicken  19866894382717_3
gcagcacagtaaatcatctctcaactggaattgaagtccattaaattgattttaacctaaatacattacttagttytgaaatacttgtagaacataatacatcactgctgttttaagtttatagacatataaatcacatgtgacaagcagtaaatcagaatacttagcagaacagtaacccaacaacacattcttcctacgagacagaactgtccaattaatgaggacagcagacgcttttcttccttttttttcactcctgaacttacacttcctgcatctcaaaatgaaacaagtccyatttaatatccaatcactctgatcataccaagagaagaacgcacatatttaatatagcatcca

SEQ ID NO: 84767 - DNA, 600 bp, Chicken  19866894382719_1
gatatattgttttaatctacttgtattcctcttgtgcagcgatacccacaagggggaaactgctatttccaggagaagtaaacttaatatttattccttcatagctaatatacagaaattccaattcatttctgtgttcatattggctgctctgtatctgggttttcatcccacagaggatgtagctttatgcagctgcttaagtttaagcatgtcagtttttccattcaagtccatggagtgacttccacatttaaagtgcatgttggcaggatcaagggccctaggaaatattctgtragatagtgcatgtttcactaaattctgtgactcagcagggtataataaatgaataatgaccttgtgttttcatgtcacaatgtcaacattgctttaatttaagtcattgtatttattttctctggaagagagatatttaatagtgatcgtagaaaagaaaaaaatctttttttttctttcattcatttagtcatttgttcttttatgygcattcatcggttgtccatcctgaaagactctgtggtagctggagatacaatggaattataacatctcaagagaaaagaggctgaaatctga

SEQ ID NO: 84768 - DNA, 600 bp, Chicken  19866894382719_2
agcatgtcagtttttccattcaagtccatggagtgacttccacatttaaagtgcatgttggcaggatcaagggccctaggaaatattctgtragatagtgcatgtttcactaaattctgtgactcagcagggtataataaatgaataatgaccttgtgttttcatgtcacaatgtcaacattgctttaatttaagtcattgtatttattttctctggaagagagatatttaatagtgatcgtagaaaagaaaaaaatctttttttttctttcattcatttagtcatttgttcttttatgygcattcatcggttgtccatcctgaaagactctgtggtagctggagatacaatggaattataacatctcaagagaaaagaggctgaaatctgaacaaatgagagaagaaaggatttttagtcactgttacggctcttttcactcattttgactgacatctactgagcagcagtgtctctaaacatcacatgagaaaataggttttactttcttgatacagctagcactgaaaatagttgcttttttacacattttatttctcatcttttgaattaaaaaaaaataaaacacyctaaaacgt

SEQ ID NO: 84769 - DNA, 600 bp, Chicken  19866894382719_3
cttttatgygcattcatcggttgtccatcctgaaagactctgtggtagctggagatacaatggaattataacatctcaagagaaaagaggctgaaatctgaacaaatgagagaagaaaggatttttagtcactgttacggctcttttcactcattttgactgacatctactgagcagcagtgtctctaaacatcacatgagaaaataggttttactttcttgatacagctagcactgaaaatagttgcttttttacacattttatttctcatcttttgaattaaaaaaaaataaaacacyctaaaacgtttcactcatcctttaaatgctgcagtaaaggtctaatgctttaccttcatataaaggttattgcaataatctccttgaacattcccttcaaaaagctgacttttcaatgccctctatgtcttccttacagtccttctcctttgctcctgttcatcttcgttttattctctaacaccatttattggcgatgcctataaacaccctgctttggtccaaataactgcacattgtacctactgtctattagaatctattaattcattgaagattaaaaaagaaaaagaaaaaaaa

SEQ ID NO: 84770 - DNA, 600 bp, Chicken  19866894382721_1
ggtcaccatattgccctcagcatccaacaagggatggagattctccctagccctcttcttgctgttgatgtacttatagaaatatttattgtcctttaccttagtggccaagttcagttctagctggattttgtcttttctaattttctccctgcacagcttcactatgcacttgtaatcgtcatgagaagcttgcccactatccaaagatcatgaacttactttttgttcttgagatgtagccagaggtctctgttcagccagtccgacctccttgcccatcagctcatcttccatgamttggggatggtcagctcctgcacctttaaaataacttccttaaagtattcccagccttcctgggctcccatgccctccaaaaatacctcccaagggaccctcttaaccatgctcctaaagargctaaagtctgccctctggaggtccaaggtggcwgttctgatgactccccaccgtggttcaacaagggtagagaaatctagcatctcgtgatcactgtgccccagatggcctccaacttctacattccccacaagaccttctctgttaacaaacagcaggtccaggattctgcttccc

SEQ ID NO: 84771 - DNA, 600 bp, Chicken  19866894382721_2
gctggattttgtcttttctaattttctccctgcacagcttcactatgcacttgtaatcgtcatgagaagcttgcccactatccaaagatcatgaacttactttttgttcttgagatgtagccagaggtctctgttcagccagtccgacctccttgcccatcagctcatcttccatgamttggggatggtcagctcctgcacctttaaaataacttccttaaagtattcccagccttcctgggctcccatgccctccaaaaatacctcccaagggaccctcttaaccatgctcctaaagargctaaagtctgccctctggaggtccaaggtggcwgttctgatgactccccaccgtggttcaacaagggtagagaaatctagcatctcgtgatcactgtgccccagatggcctccaacttctacattccccacaagaccttctctgttaacaaacagcaggtccaggattctgcttccccttgttgtctccttcaccaactgtgtcaggaagttatctcccacacactctaggaacctcctggactattccctatgtaatgtattcataatatatgtaatgtatttgcaatatatgtaatc

SEQ ID NO: 84772 - DNA, 600 bp, Chicken  19866894382721_3
cagcttcactatgcacttgtaatcgtcatgagaagcttgcccactatccaaagatcatgaacttactttttgttcttgagatgtagccagaggtctctgttcagccagtccgacctccttgcccatcagctcatcttccatgamttggggatggtcagctcctgcacctttaaaataacttccttaaagtattcccagccttcctgggctcccatgccctccaaaaatacctcccaagggaccctcttaaccatgctcctaaagargctaaagtctgccctctggaggtccaaggtggcwgttctgatgactccccaccgtggttcaacaagggtagagaaatctagcatctcgtgatcactgtgccccagatggcctccaacttctacattccccacaagaccttctctgttaacaaacagcaggtccaggattctgcttccccttgttgtctccttcaccaactgtgtcaggaagttatctcccacacactctaggaacctcctggactattccctatgtaatgtattcataatatatgtaatgtatttgcaatatatgtaatccagcagataatgtctgagaagttgaagtccctca

SEQ ID NO: 84773 - DNA, 599 bp, Chicken  19866894382724_1
  misc_feature (1)..(97): n is any nucleotide
nnnnnnnnnnnnnnnnnnnnnnnnnnnnnnnnnnnnnnnnnnnnnnnnnnnnnnnnnnnnnnnnnnnnnnnnnnnnnnnnnnnnnnnnnnnnnnnnnagtactgctgtttctcttcacgctgtttaatggttggatcttctgtttgtttgctttacttttacccaggatagtggctcagagtggggaggtcctcaaatttacaattgcaagcatgacactgtagataaatcacaaatcagcattcctgtaggcttctgaggttgatatatccctgttttctttcatttaaatggagctgraaatacctccttttctaaacatctgtacaygaatagtgctaagctctcctaaacaccagacaaaaatgcagtcaaatgctaaatgtgaataggcaacattttgtgaacagtgagactgataacgcttcaaatttatgccttatcttccacaaacaacactatttacagtactccagcattcccaaacacacctttcttctatagtctgtgctaatctgctcctgcctgggaactttaagacttggcaagtcaaagagtgtatattgactgctcagctgaaagctggtgctttctctcag

SEQ ID NO: 84774 - DNA, 599 bp, Chicken  19866894382724_2
  misc_feature (1)..(67): n is any nucleotide
nnnnnnnnnnnnnnnnnnnnnnnnnnnnnnnnnnnnnnnnnnnnnnnnnnnnnnnnnnnnnnnnnnnagtactgctgtttctcttcacgctgtttaatggttggatcttctgtttgtttgctttacttttacccaggatagtggctcagagtggggaggtcctcaaatttacaattgcaagcatgacactgtagataaatcacaaatcagcattcctgtaggcttctgaggttgatatatccctgttttctttcatttaaatggagctgraaatacctccttttctaaacatctgtacaygaatagtgctaagctctcctaaacaccagacaaaaatgcagtcaaatgctaaatgtgaataggcaacattttgtgaacagtgagactgataacgcttcaaatttatgccttatcttccacaaacaacactatttacagtactccagcattcccaaacacacctttcttctatagtctgtgctaatctgctcctgcctgggaactttaagacttggcaagtcaaagagtgtatattgactgctcagctgaaagctggtgctttctctcagaacagataaggggcagtgttcttgcttttc

SEQ ID NO: 84775 - DNA, 600 bp, Chicken  19866894382724_3
tgtgttccttgaatctgtgaggtcccacaaagtagaatagtgtattgattcactgacccctgaaaggtcaagttggtaaagaggtatttgttggaggtcccatctaagtactggtacaacccacagccacttaccttgtgcagcttgatcgacttacagcacagaattagacaacttgcaaaccatatcagtgacttcagtgattctgtacccttatttatttgcttacttaagcactgctggaagggtaaagcacagtttaggtaagaatcccgagctcaaactgacaaattttactaracaacacatgctcagaaagcttacagattttatcattctgatctgaaaacattaatgagtgactgggactgagccattcaaaaacactgaaagtctcttgggtccagtttacgagtcccactcccaacctccacaggtcataaagtcatggaatcacaaattcattatggtgggaaaagacctttaaggtcatctagtccaaccgtcattactaaatatgaatgatgcttactgcaaacagaacctctgagaaatcactctcagccttccaaagcaatttttcatcctctgggttttagt

SEQ ID NO: 84776 - DNA, 599 bp, Chicken  19866894382725_1
  misc_feature (1)..(71): n is any nucleotide
nnnnnnnnnnnnnnnnnnnnnnnnnnnnnnnnnnnnnnnnnnnnnnnnnnnnnnnnnnnnnnnnnnnnnnnctgtgacacctgaggtgtggaggcagaaggtctgccccccagcacaagtccacacgaggatgagggcagctccatccctttctggatgagtcaagaagcaacaggaggacaacgggcttgtaggtgggtggcagcaggaggttggacagctgtcagcttcttcctgcaccttcctcttcatgcccagaatcaccaaagggtgcttgaataccccagctttaaccaagaygaactcagtccctggaaaggtctccagccaacagccacagccactcgcagggacagcacatacaccttccctgtgttacaaccaccgagctctctgccaggctgctggtttgcagggctggcagagacgcagaggttcagccttgctcacgcctgtaatagagtaagagtgtgacctcctattgtgattaatctgctgccaccaccatcgcggccaaaagggtcccaactcctccatccccagcargaggtcctggtgaactcctcctcctcctgcagccctyaccttggcccagagct

SEQ ID NO: 84777 - DNA, 600 bp, Chicken  19866894382725_2
cttcatgcccagaatcaccaaagggtgcttgaataccccagctttaaccaagaygaactcagtccctggaaaggtctccagccaacagccacagccactcgcagggacagcacatacaccttccctgtgttacaaccaccgagctctctgccaggctgctggtttgcagggctggcagagacgcagaggttcagccttgctcacgcctgtaatagagtaagagtgtgacctcctattgtgattaatctgctgccaccaccatcgcggccaaaagggtcccaactcctccatccccagcargaggtcctggtgaactcctcctcctcctgcagccctyaccttggcccagagctttggtgccccccagcctctttcatgagccgatttaattcattaacccagcagatgattaactcaggagaacacttgcgctgggttaattaattaaattagtacaaaaaatagggtctggcgggcaacggagccagtggatgaggcgcgtggagagggctggggggaagggggggcattgccatggcagcctgagaaacaaaagcaacacaggacaggagccaatgccaagaacggggatgaaaacaa

SEQ ID NO: 84778 - DNA, 600 bp, Chicken  19866894382725_3
ccagctttaaccaagaygaactcagtccctggaaaggtctccagccaacagccacagccactcgcagggacagcacatacaccttccctgtgttacaaccaccgagctctctgccaggctgctggtttgcagggctggcagagacgcagaggttcagccttgctcacgcctgtaatagagtaagagtgtgacctcctattgtgattaatctgctgccaccaccatcgcggccaaaagggtcccaactcctccatccccagcargaggtcctggtgaactcctcctcctcctgcagccctyaccttggcccagagctttggtgccccccagcctctttcatgagccgatttaattcattaacccagcagatgattaactcaggagaacacttgcgctgggttaattaattaaattagtacaaaaaatagggtctggcgggcaacggagccagtggatgaggcgcgtggagagggctggggggaagggggggcattgccatggcagcctgagaaacaaaagcaacacaggacaggagccaatgccaagaacggggatgaaaacaattttctctgcataaaagaaaccactctgtaaaatcat

SEQ ID NO: 84779 - DNA, 599 bp, Chicken  19866894382726_1
  misc_feature (1)..(40): n is any nucleotide
nnnnnnnnnnnnnnnnnnnnnnnnnnnnnnnnnnnnnnnnatttattgaatggctgaaattaattgatgtgaagcctattccatatttttttgtagttacagtaaaatagaaataccctaaagagggaacttaaataccgttgtaatctagagcataaatgttgtatgaataggagatttgtgattaccttctttgcatctcctctcggtgctgtagctttaggcctgaggttactgaaccagccccagaaatgggacagccaaaaagaagtgatcaagagacaagtaatggatggggaragggtggtggagaggctgttctcggtgtgcaatccactgcgaggatggctcagcatttgtttggacattttccttctcccctgcatagtcaaatcatgmactggaaacatgatcctttagaaggcaagtttkagttaaactaacattactgactccaggaagattgcctgtacattatgaacaacagtttctgaatgataaccaagactaaaagaatggaaataatctttaatagaactgttttatatccttcccatttgaatgaaaaaaataaaggaagccacagtatcaatcacaca

SEQ ID NO: 84780 - DNA, 600 bp, Chicken  19866894382726_2
cagtaaaatagaaataccctaaagagggaacttaaataccgttgtaatctagagcataaatgttgtatgaataggagatttgtgattaccttctttgcatctcctctcggtgctgtagctttaggcctgaggttactgaaccagccccagaaatgggacagccaaaaagaagtgatcaagagacaagtaatggatggggaragggtggtggagaggctgttctcggtgtgcaatccactgcgaggatggctcagcatttgtttggacattttccttctcccctgcatagtcaaatcatgmactggaaacatgatcctttagaaggcaagtttkagttaaactaacattactgactccaggaagattgcctgtacattatgaacaacagtttctgaatgataaccaagactaaaagaatggaaataatctttaatagaactgttttatatccttcccatttgaatgaaaaaaataaaggaagccacagtatcaatcacacaatcacattaagatcagaagtaggaggtgagtaaatggattacttggaacagatattagttggaagttagaaaaatcaggggagtgaaaacaactgctttt

SEQ ID NO: 84781 - DNA, 600 bp, Chicken  19866894382726_3
aaataccgttgtaatctagagcataaatgttgtatgaataggagatttgtgattaccttctttgcatctcctctcggtgctgtagctttaggcctgaggttactgaaccagccccagaaatgggacagccaaaaagaagtgatcaagagacaagtaatggatggggaragggtggtggagaggctgttctcggtgtgcaatccactgcgaggatggctcagcatttgtttggacattttccttctcccctgcatagtcaaatcatgmactggaaacatgatcctttagaaggcaagtttkagttaaactaacattactgactccaggaagattgcctgtacattatgaacaacagtttctgaatgataaccaagactaaaagaatggaaataatctttaatagaactgttttatatccttcccatttgaatgaaaaaaataaaggaagccacagtatcaatcacacaatcacattaagatcagaagtaggaggtgagtaaatggattacttggaacagatattagttggaagttagaaaaatcaggggagtgaaaacaactgcttttaccctcttcaactgcagatatagctgacgaggt

SEQ ID NO: 84782 - DNA, 600 bp, Chicken  19866894382726_4
actgactccaggaagattgcctgtacattatgaacaacagtttctgaatgataaccaagactaaaagaatggaaataatctttaatagaactgttttatatccttcccatttgaatgaaaaaaataaaggaagccacagtatcaatcacacaatcacattaagatcagaagtaggaggtgagtaaatggattacttggaacagatattagttggaagttagaaaaatcaggggagtgaaaacaactgcttttaccctcttcaactgcagatatagctgacgaggtggctgaggactaggstgctgctggccttgcaccaggtttctcaaatgctgtagtcccttcccaaaactgtggacctgatgtgccatatttgaagtaccaatacaggaacatggcttagttgtcatgatacttgctctgtgctgtcatcttatgcagagaacttggatccaatggccttggactgtaggtggcctgaactactcacgtctggaggtgcctcaggcagctgacaaagtttctttgtctttttttatttcctcatgaactttaatgggtgattttggtgtgtaaaatcatgcaattaaagattaggaa

SEQ ID NO: 84783 - DNA, 600 bp, Chicken  19866894382742_1
tgaaggcaaagatacggaaaagagagaatgaaaatatgcaagagcacatcttttaaactggctaccttgccttttttaaagtatctaaagagcatcaatatgtatcttgtgcattcttaactgaaagttagtgatggacctgcaacacttccctatgtgtaaatatctttgctcataaattcttcagatataaaaaatcaagtattcttactgactcatctttacaattattcttatatatctctgaaaaacaaggtggaaagctttacagacaaaaggtaactttataccatcaccacsacagtaacacataagtaacataaagtcttttctttaatagtgtaattataaacagatacaaccaactgtaaacctcccagatctagagaaattaaaggaaaattaagatattaaaatgcggcgtctacacaaacatgcagtgctggattgctatcatatgtaaaaatttgaaagtctcttaaaacaagaataaaagtggtaggcactgagaaataaaagaaacatctgaggaaaaagaatagagtaagaattgctccaaagggctgtggtgtttctttgtttgtttttgttttacagcag

SEQ ID NO: 84784 - DNA, 600 bp, Chicken  19866894382742_2
acataaagtcttttctttaatagtgtaattataaacagatacaaccaactgtaaacctcccagatctagagaaattaaaggaaaattaagatattaaaatgcggcgtctacacaaacatgcagtgctggattgctatcatatgtaaaaatttgaaagtctcttaaaacaagaataaaagtggtaggcactgagaaataaaagaaacatctgaggaaaaagaatagagtaagaattgctccaaagggctgtggtgtttctttgtttgtttttgttttacagcagaattcatatgatctctyttttttttttttttttttacttttgtcagtagtaccatgatatataaatcttaaacctgcatgtattgtaaaatctgctttgatagactatgtcactctcgagtattctcttgcaatatccaagaaaagttggcacttatgtttttatcagatgaaatgctaaatctctgcaacctcaatttctatttcagttagaaacaccctcagtaaaacttcattatacaaatactgtagccattacaaatatgtagaaagttttctatggaaggaaaactcaggtatgcttggtttggtggagaa

SEQ ID NO: 84785 - DNA, 600 bp, Chicken  19866894382743_1
gcagccaaaggctggatttttcaacacacactgcataaagagattactacatggagtcaataaaggactgtatgtaatggacaacttcttcagaagggaaaagcaacagctgcaagaagaaaaacaattactcagattaccaacattttattacttagtttatgttaaaccttaaggtttctgagagtttagaattatttcacacattatactagcctcacacatcagctttaccagtgcttcagtaatggaccaacattttttccatgtccaaatcatggtcttgtctcatcctttacycacmtattaagctggaatataaaattaagaaaaaataaattaaggccacatttttgaaggcttccayaattttcccctagcacacggatgggtatcttttcccatacatggctgtgacagctgaaaagaccattcycctttgccacctgtcactatctgcatgccagaaatcaycacctctcttatttgtgagccagcactatacaggaccacccttaaaatttggttttaggcaaaaccagcctgattaggtcacgtgtagcacatcagtcgggctgcagggaggaatcacttctttgg

SEQ ID NO: 84786 - DNA, 600 bp, Chicken  19866894382743_2
ccaaaggctggatttttcaacacacactgcataaagagattactacatggagtcaataaaggactgtatgtaatggacaacttcttcagaagggaaaagcaacagctgcaagaagaaaaacaattactcagattaccaacattttattacttagtttatgttaaaccttaaggtttctgagagtttagaattatttcacacattatactagcctcacacatcagctttaccagtgcttcagtaatggaccaacattttttccatgtccaaatcatggtcttgtctcatcctttacycacmtattaagctggaatataaaattaagaaaaaataaattaaggccacatttttgaaggcttccayaattttcccctagcacacggatgggtatcttttcccatacatggctgtgacagctgaaaagaccattcycctttgccacctgtcactatctgcatgccagaaatcaycacctctcttatttgtgagccagcactatacaggaccacccttaaaatttggttttaggcaaaaccagcctgattaggtcacgtgtagcacatcagtcgggctgcagggaggaatcacttctttggggtc

SEQ ID NO: 84787 - DNA, 600 bp, Chicken  19866894382743_3
ctgtatgtaatggacaacttcttcagaagggaaaagcaacagctgcaagaagaaaaacaattactcagattaccaacattttattacttagtttatgttaaaccttaaggtttctgagagtttagaattatttcacacattatactagcctcacacatcagctttaccagtgcttcagtaatggaccaacattttttccatgtccaaatcatggtcttgtctcatcctttacycacmtattaagctggaatataaaattaagaaaaaataaattaaggccacatttttgaaggcttccayaattttcccctagcacacggatgggtatcttttcccatacatggctgtgacagctgaaaagaccattcycctttgccacctgtcactatctgcatgccagaaatcaycacctctcttatttgtgagccagcactatacaggaccacccttaaaatttggttttaggcaaaaccagcctgattaggtcacgtgtagcacatcagtcgggctgcagggaggaatcacttctttggggtcagagggtaatgagcagctgtagatgacacccagagaggacgttcagccttatactggtgaggc

SEQ ID NO: 84788 - DNA, 600 bp, Chicken  19866894382743_4
ttaccaacattttattacttagtttatgttaaaccttaaggtttctgagagtttagaattatttcacacattatactagcctcacacatcagctttaccagtgcttcagtaatggaccaacattttttccatgtccaaatcatggtcttgtctcatcctttacycacmtattaagctggaatataaaattaagaaaaaataaattaaggccacatttttgaaggcttccayaattttcccctagcacacggatgggtatcttttcccatacatggctgtgacagctgaaaagaccattcycctttgccacctgtcactatctgcatgccagaaatcaycacctctcttatttgtgagccagcactatacaggaccacccttaaaatttggttttaggcaaaaccagcctgattaggtcacgtgtagcacatcagtcgggctgcagggaggaatcacttctttggggtcagagggtaatgagcagctgtagatgacacccagagaggacgttcagccttatactggtgaggctaaacatccagcgtctttgagttcagctgggacgtctcacagaactgctgcctagacaaacaaagcaca

SEQ ID NO: 84789 - DNA, 600 bp, Chicken  19866894382743_5
aggtttctgagagtttagaattatttcacacattatactagcctcacacatcagctttaccagtgcttcagtaatggaccaacattttttccatgtccaaatcatggtcttgtctcatcctttacycacmtattaagctggaatataaaattaagaaaaaataaattaaggccacatttttgaaggcttccayaattttcccctagcacacggatgggtatcttttcccatacatggctgtgacagctgaaaagaccattcycctttgccacctgtcactatctgcatgccagaaatcaycacctctcttatttgtgagccagcactatacaggaccacccttaaaatttggttttaggcaaaaccagcctgattaggtcacgtgtagcacatcagtcgggctgcagggaggaatcacttctttggggtcagagggtaatgagcagctgtagatgacacccagagaggacgttcagccttatactggtgaggctaaacatccagcgtctttgagttcagctgggacgtctcacagaactgctgcctagacaaacaaagcacacaggatctctgcttaaatgactgtacatcttagtgtga

SEQ ID NO: 84790 - DNA, 600 bp, Chicken  19866894382747_1
ctctaaattgtaggctgctgtttcttcatgagaagctttacttgtcacaacccatttgtttgttaggtctattctgctcatttcctttgaagtgcaagacatgggcacacgtgggaaaggcaggaggaaattctagtcataatccatagatagaaatgtaaacatcataaattttattttcatgctgtacactagaaacatggttgaggaatgagtgatctgttgcaaaacaaatatttaggaagcattctcagctttgattattccttaaataaaagcttccttcacagatgaaataaractataaatctatgtcagagagaaatctatacctgctccaagacagaccagcaagacgagccagaaagaatcccaaagaatagccagctgctggaaatatggtaccaatgatccataacttaggtgtgataacccacgagcctttatagagtattcccccaaccacagcagtaatgacaatgagaattgctcctgctatggaaccaacctgtgagaaaaaagaggaaagactgtgtgaataagagacttcagtgaaattttgtgacaacaaacacagtgtcaaacatacctttgaatgtc

SEQ ID NO: 84791 - DNA, 599 bp, Chicken  19866894382751_1
  misc_feature (1)..(215): n is any nucleotide
nnnnnnnnnnnnnnnnnnnnnnnnnnnnnnnnnnnnnnnnnnnnnnnnnnnnnnnnnnnnnnnnnnnnnnnnnnnnnnnnnnnnnnnnnnnnnnnnnnnnnnnnnnnnnnnnnnnnnnnnnnnnnnnnnnnnnnnnnnnnnnnnnnnnnnnnnnnnnnnnnnnnnnnnnnnnnnnnnnnnnnnnnnnnnnnnnnnnnnnnnnnnnnnnnnnnnnntgtgcatttgactgtctcttgtagatacttatctacattaaggataatgaaagataccacctcactctctcagaagacaaggtgmaggttccttgccattcagcaaacgttactgcttctccacactgcttagatgcagttattcccctctagygcccatcagacagctgggagagaggctgaggcacagccttatctcctactttctctccaacagcacagtagaaagtggacagtgagaagaaaaagaagcttctactactgggtttaagcatttccatgccttgagacagttccttgagacactgcaaggtatcctaaacaaatctcaaagctctcctcttggtatgaaagacagaaaaggccaagattcactgatagtga

SEQ ID NO: 84792 - DNA, 599 bp, Chicken  19866894382751_2
  misc_feature (1)..(146): n is any nucleotide
nnnnnnnnnnnnnnnnnnnnnnnnnnnnnnnnnnnnnnnnnnnnnnnnnnnnnnnnnnnnnnnnnnnnnnnnnnnnnnnnnnnnnnnnnnnnnnnnnnnnnnnnnnnnnnnnnnnnnnnnnnnnnnnnnnnnnnnnnnnnnnnnnntgtgcatttgactgtctcttgtagatacttatctacattaaggataatgaaagataccacctcactctctcagaagacaaggtgmaggttccttgccattcagcaaacgttactgcttctccacactgcttagatgcagttattcccctctagygcccatcagacagctgggagagaggctgaggcacagccttatctcctactttctctccaacagcacagtagaaagtggacagtgagaagaaaaagaagcttctactactgggtttaagcatttccatgccttgagacagttccttgagacactgcaaggtatcctaaacaaatctcaaagctctcctcttggtatgaaagacagaaaaggccaagattcactgatagtgattgaactccaggaaaacaagccttatagaattaaaaaaaatcaccataaaactggtggagttggcaaga

SEQ ID NO: 84793 - DNA, 588 bp, Chicken  19866894382751_3
cagctgggagagaggctgaggcacagccttatctcctactttctctccaacagcacagtagaaagtggacagtgagaagaaaaagaagcttctactactgggtttaagcatttccatgccttgagacagttccttgagacactgcaaggtatcctaaacaaatctcaaagctctcctcttggtatgaaagacagaaaaggccaagattcactgatagtgattgaactccaggaaaacaagccttatagaattaaaaaaaatcaccataaaactggtggagttggcaagagtaaaaaaagytatgtttctgcatttatcactcaccatctcccaccaagccatactataagagcacactgtgacaaaacagtcctagctctatctttaaatkttcttaattacagtaattatacacagagcaaacatgaactgcttcacttgccagcaaaacacagcagcaaggggactacaacacggcagtccttaaagggcgaagagtgaaaaaaaaaatctgacaaccatgggtttcaatgacagctttctcttcctgactgaaggctggcaatgacttctcacaggctgctgctg

SEQ ID NO: 84794 - DNA, 587 bp, Chicken  19866894382751_4
agctgggagagaggctgaggcacagccttatctcctactttctctccaacagcacagtagaaagtggacagtgagaagaaaaagaagcttctactactgggtttaagcatttccatgccttgagacagttccttgagacactgcaaggtatcctaaacaaatctcaaagctctcctcttggtatgaaagacagaaaaggccaagattcactgatagtgattgaactccaggaaaacaagccttatagaattaaaaaaaatcaccataaaactggtggagttggcaagagtaaaaaaagayatgtttctgcatttatcactcaccatctcccaccaagccatactataagagcacactgtgacaaaacagtcctagctctatctttaaatkttcttaattacagtaattatacacagagcaaacatgaactgcttcacttgccagcaaaacacagcagcaaggggactacaacacggcagtccttaaagggcgaagagtgaaaaaaaaaatctgacaaccatgggtttcaatgacagctttctcttcctgactgaaggctggcaatgacttctcacaggctgctgctg

SEQ ID NO: 84795 - DNA, 497 bp, Chicken  19866894382751_5
ctactactgggtttaagcatttccatgccttgagacagttccttgagacactgcaaggtatcctaaacaaatctcaaagctctcctcttggtatgaaagacagaaaaggccaagattcactgatagtgattgaactccaggaaaacaagccttatagaattaaaaaaaatcaccataaaactggtggagttggcaagagtaaaaaaagatatgtttctgcatttatcactcaccatctcccaccaagccatactataagagcacactgtgacaaaacagtcctagctctatctttaaatkttcttaattacagtaattatacacagagcaaacatgaactgcttcacttgccagcaaaacacagcagcaaggggactacaacacggcagtccttaaagggcgaagagtgaaaaaaaaaatctgacaaccatgggtttcaatgacagctttctcttcctgactgaaggctggcaatgacttctcacaggctgctgctg

SEQ ID NO: 84796 - DNA, 599 bp, Chicken  19866894382753_1
  misc_feature (1)..(14): n is any nucleotide
nnnnnnnnnnnnnncttatcagtccctccactgtgccttgctctgtcacttcagttccctgttctggcttctcaaatgaacaccttttggagctgattgaataatctacttttcacttcaaggcatgcatcaaataaataaataaataacccgactaaaaacatgtgagttggataaggaactattcaatttagcttcagggccctccattttaaaccttattgtaaaaataaaagggggtcacttttaaaatgaaaagcgaaaccagattgtttcagaagtgacactttgtctgagctyttacyctttcttactttctccactccaggctatttatcaaagtctgtagtacccaaggttgccaatttcatgccaaatgactttaattttccagaaactgcaaatgtcccttgcagttataaataaccacagagtacaaaatgattaccagagatctatctgaagaattattcgtgtcagcagatgtataaccatatacaaatatttatataatcagaaagcyratggcaaccccaaattcttctcctattttttttcctcgctcttttctaacatgcttcctaaatttgtccaatggt

SEQ ID NO: 84797 - DNA, 599 bp, Chicken  19866894382753_2
  misc_feature (1)..(9): n is any nucleotide
nnnnnnnnncttatcagtccctccactgtgccttgctctgtcacttcagttccctgttctggcttctcaaatgaacaccttttggagctgattgaataatctacttttcacttcaaggcatgcatcaaataaataaataaataacccgactaaaaacatgtgagttggataaggaactattcaatttagcttcagggccctccattttaaaccttattgtaaaaataaaagggggtcacttttaaaatgaaaagcgaaaccagattgtttcagaagtgacactttgtctgagctyttacyctttcttactttctccactccaggctatttatcaaagtctgtagtacccaaggttgccaatttcatgccaaatgactttaattttccagaaactgcaaatgtcccttgcagttataaataaccacagagtacaaaatgattaccagagatctatctgaagaattattcgtgtcagcagatgtataaccatatacaaatatttatataatcagaaagcyratggcaaccccaaattcttctcctattttttttcctcgctcttttctaacatgcttcctaaatttgtccaatggtttgca

SEQ ID NO: 84798 - DNA, 541 bp, Chicken  19866894382753_3
gtaaaaataaaagggggtcacttttaaaatgaaaagcgaaaccagattgtttcagaagtgacactttgtctgagctyttacyctttcttactttctccactccaggctatttatcaaagtctgtagtacccaaggttgccaatttcatgccaaatgactttaattttccagaaactgcaaatgtcccttgcagttataaataaccacagagtacaaaatgattaccagagatctatctgaagaattattcgtgtcagcagatgtataaccatatacaaatatttatataatcagaaagcyratggcaaccccaaattcttctcctattttttttcctcgctcttttctaacatgcttcctaaatttgtccaatggtttgcacagaatccatcagtctgacttcaagcatactcmaaagayggaggaacaaattggttaggacccaaaaaaataaatgtttcatttacacatgtaaagctgctagttaacagaattcaagcatcaattaatggctgttgtctgactgcaaaaaaaaaacaat

SEQ ID NO: 84799 - DNA, 540 bp, Chicken  19866894382753_4
taaaaataaaagggggtcacttttaaaatgaaaagcgaaaccagattgtttcagaagtgacactttgtctgagctyttacyctttcttactttctccactccaggctatttatcaaagtctgtagtacccaaggttgccaatttcatgccaaatgactttaattttccagaaactgcaaatgtcccttgcagttataaataaccacagagtacaaaatgattaccagagatctatctgaagaattattcgtgtcagcagatgtataaccatatacaaatatttatataatcagaaagcyratggcaaccccaaattcttctcctattttttttcctcgctcttttctaacatgcttcctaaatttgtccaatggtttgcacagaatccatcagtctgacttcaagcatactcmaaagayggaggaacaaattggttaggacccaaaaaaataaatgtttcatttacacatgtaaagctgctagttaacagaattcaagcatcaattaatggctgttgtctgactgcaaaaaaaaaacaat

SEQ ID NO: 84800 - DNA, 427 bp, Chicken  19866894382753_5
caaagtctgtagtacccaaggttgccaatttcatgccaaatgactttaattttccagaaactgcaaatgtcccttgcagttataaataaccacagagtacaaaatgattaccagagatctatctgaagaattattcgtgtcagcagatgtataaccatatacaaatatttatataatcagaaagcyratggcaaccccaaattcttctcctattttttttcctcgctcttttctaacatgcttcctaaatttgtccaatggtttgcacagaatccatcagtctgacttcaagcatactcmaaagayggaggaacaaattggttaggacccaaaaaaataaatgtttcatttacacatgtaaagctgctagttaacagaattcaagcatcaattaatggctgttgtctgactgcaaaaaaaaaacaat

SEQ ID NO: 84801 - DNA, 421 bp, Chicken  19866894382753_6
ctgtagtacccaaggttgccaatttcatgccaaatgactttaattttccagaaactgcaaatgtcccttgcagttataaataaccacagagtacaaaatgattaccagagatctatctgaagaattattcgtgtcagcagatgtataaccatatacaaatatttatataatcagaaagcyratggcaaccccaaattcttctcctattttttttcctcgctcttttctaacatgcttcctaaatttgtccaatggtttgcacagaatccatcagtctgacttcaagcatactcmaaagayggaggaacaaattggttaggacccaaaaaaataaatgtttcatttacacatgtaaagctgctagttaacagaattcaagcatcaattaatggctgttgtctgactgcaaaaaaaaaacaat

SEQ ID NO: 84802 - DNA, 599 bp, Chicken  19866894382761_1
  misc_feature (1)..(26): n is any nucleotide
nnnnnnnnnnnnnnnnnnnnnnnnnngtcttttccacctttctgattctatgattctatggaaacacagatttatttcagaacccaaaagttgcattctctttggacatacagacagatgcctggcttatacagctcactcatacgacagtgccttttgttagaactgttggcaccactggaaaatgtcagtatgctttggtcacataattcctccttcttcatgtactatatagtgtggttttatttgtcttacattcaaatttcactaaagaaacataacgtttagctttttacagastgcctttcctcttccctcccaccagacagcacttagcacgctttccccttaatacatccaaggctttttcctcctggattttgttatctagcttcagtgcgtggcaaatgctgaatggtcagaaggcataggaarctccatggaaagtagtcctggagctggagtaggcagtgatgttcttgtgttggtcatgggcagctcctttctgtgcaaggaaagttcattgcctgggatgaatagcaggggacaacaacacaaacatccagtgccataaccagcaaagctgctcgaaggttttg

SEQ ID NO: 84803 - DNA, 600 bp, Chicken  19866894382761_2
tcactcatacgacagtgccttttgttagaactgttggcaccactggaaaatgtcagtatgctttggtcacataattcctccttcttcatgtactatatagtgtggttttatttgtcttacattcaaatttcactaaagaaacataacgtttagctttttacagastgcctttcctcttccctcccaccagacagcacttagcacgctttccccttaatacatccaaggctttttcctcctggattttgttatctagcttcagtgcgtggcaaatgctgaatggtcagaaggcataggaarctccatggaaagtagtcctggagctggagtaggcagtgatgttcttgtgttggtcatgggcagctcctttctgtgcaaggaaagttcattgcctgggatgaatagcaggggacaacaacacaaacatccagtgccataaccagcaaagctgctcgaaggttttgattcagatttatattttctcatcgtagaacctttgagattattctccttgcatgttttccatgctcactgctaagtacccgtgacaagcagtatgtctccacaagtctgctgttctccaggctggatttcaccttg

SEQ ID NO: 84804 - DNA, 599 bp, Chicken  19866894382762_1
  misc_feature (1)..(51): n is any nucleotide
nnnnnnnnnnnnnnnnnnnnnnnnnnnnnnnnnnnnnnnnnnnnnnnnnnngttaaagtattagcagtgctttattgtgctgctatttcccttttacttcctcactcatgtgccctgaacagagcaaacactcactggggctcttggggacagaggaggggatgtagtgccagtacgtagcagcacatgggttcagcgtgacacagtgcccatgttgtgtggcactcctgctagagaaactcagagcgaaggtctccttcctcatggccaaggtcagcggcaccagcagtacggagctgyrcgtgtgagagcagatccttttcactcagcttcttcaccccgtggaagccaaagggcagggctgaaggctcataaagcacgggtggttcagatcagagcagaccatctgatcgaaaaaaaaamcgaagcaatttttccccataagctggcactgtgggcatcacaagggctgtgtgcccaacactgtcctctgtaaacgtgtcctctgtgaggcttggcaagagaaaggcacagctcacagctgcacctcgaaatagctgtagcaaaccattctttctatctctccatgagaaataaga

SEQ ID NO: 84805 - DNA, 599 bp, Chicken  19866894382762_2
  misc_feature (1)..(50): n is any nucleotide
nnnnnnnnnnnnnnnnnnnnnnnnnnnnnnnnnnnnnnnnnnnnnnnnnngttaaagtattagcagtgctttattgtgctgctatttcccttttacttcctcactcatgtgccctgaacagagcaaacactcactggggctcttggggacagaggaggggatgtagtgccagtacgtagcagcacatgggttcagcgtgacacagtgcccatgttgtgtggcactcctgctagagaaactcagagcgaaggtctccttcctcatggccaaggtcagcggcaccagcagtacggagctgyrcgtgtgagagcagatccttttcactcagcttcttcaccccgtggaagccaaagggcagggctgaaggctcataaagcacgggtggttcagatcagagcagaccatctgatcgaaaaaaaaamcgaagcaatttttccccataagctggcactgtgggcatcacaagggctgtgtgcccaacactgtcctctgtaaacgtgtcctctgtgaggcttggcaagagaaaggcacagctcacagctgcacctcgaaatagctgtagcaaaccattctttctatctctccatgagaaataagag

SEQ ID NO: 84806 - DNA, 600 bp, Chicken  19866894382762_3
gcaaacactcactggggctcttggggacagaggaggggatgtagtgccagtacgtagcagcacatgggttcagcgtgacacagtgcccatgttgtgtggcactcctgctagagaaactcagagcgaaggtctccttcctcatggccaaggtcagcggcaccagcagtacggagctgyrcgtgtgagagcagatccttttcactcagcttcttcaccccgtggaagccaaagggcagggctgaaggctcataaagcacgggtggttcagatcagagcagaccatctgatcgaaaaaaaaamcgaagcaatttttccccataagctggcactgtgggcatcacaagggctgtgtgcccaacactgtcctctgtaaacgtgtcctctgtgaggcttggcaagagaaaggcacagctcacagctgcacctcgaaatagctgtagcaaaccattctttctatctctccatgagaaataagagacaaaagactttgtccttcttggctccattcacctgagcaagtggtgctgagggctgcacagatttggtgccacaacatgtgcacctctgctgctcgcaatgaatcagctctgagaaacaaar

SEQ ID NO: 84807 - DNA, 600 bp, Chicken  19866894382762_4
cgaagcaatttttccccataagctggcactgtgggcatcacaagggctgtgtgcccaacactgtcctctgtaaacgtgtcctctgtgaggcttggcaagagaaaggcacagctcacagctgcacctcgaaatagctgtagcaaaccattctttctatctctccatgagaaataagagacaaaagactttgtccttcttggctccattcacctgagcaagtggtgctgagggctgcacagatttggtgccacaacatgtgcacctctgctgctcgcaatgaatcagctctgagaaacaaaraamcccaacttcagcacacagccctcagcaaaaccaccacacactcaagcagcatcagcagctgtgggctctgcccattgcctgcagctccctgtgtcccctgccaacgtgcggtcccggcgagcgtgtccaagtgcccacgtgcccaagcaccctcgtgcagctgtgagccagcaaaaagtctgaaggaaaatcctcctggcactgacagatggaccccgcatcacctgcagcaatgaacgcagcagtcagtttgtaggagggagtgagcagcggcactcttctgaacaaggagctggg

SEQ ID NO: 84808 - DNA, 600 bp, Chicken  19866894382762_5
agcaatttttccccataagctggcactgtgggcatcacaagggctgtgtgcccaacactgtcctctgtaaacgtgtcctctgtgaggcttggcaagagaaaggcacagctcacagctgcacctcgaaatagctgtagcaaaccattctttctatctctccatgagaaataagagacaaaagactttgtccttcttggctccattcacctgagcaagtggtgctgagggctgcacagatttggtgccacaacatgtgcacctctgctgctcgcaatgaatcagctctgagaaacaaaraamcccaacttcagcacacagccctcagcaaaaccaccacacactcaagcagcatcagcagctgtgggctctgcccattgcctgcagctccctgtgtcccctgccaacgtgcggtcccggcgagcgtgtccaagtgcccacgtgcccaagcaccctcgtgcagctgtgagccagcaaaaagtctgaaggaaaatcctcctggcactgacagatggaccccgcatcacctgcagcaatgaacgcagcagtcagtttgtaggagggagtgagcagcggcactcttctgaacaaggagctgggaac

SEQ ID NO: 84809 - DNA, 600 bp, Chicken  19866894382769_1
actgcccattccagtgagcaggaaggacaaggggaaccaggaagacaagaagatatgtgggaatgggtttgggagtcacacgggacacagtgtccaggttgccacgccagtatcataccgctttggtttttaagccaagatcaactggagatacaaacacacacacggttctggtgtaagggatcaggtcccagacaaatgagttggcctctaaattcatgggagggtaccctcagaatcgggccattttgtgacagcagacatctcagtttgtggatacctctctgtaaaaaaacaaamcaaaacaaaacaaaacagcataaagaggcatttaaatgcaagctaagaaccagattctgggtgcaggagcttacactcagccttacaccagcaaactgaggtagttccctgcacagaaagaaggctctggagatcgtctccctccaaatgcagaagctgaacttccagaggtactgtaaatgatgcaggaaaaatctccaggagcgtgtgtcttttgaagtgccactgggaggatcaatcctattacagtcctcccgaggaagtgttaatcttccacacaaagaaaccaaggctcactct

SEQ ID NO: 84810 - DNA, 600 bp, Chicken  19866894382772_1
atctctgtctgaagaccagagatgaagctgggattctccccctgcacaggggataagttttgagagcgtgcaggagaacaatgctgtctaacaaactgccatcaaattttaatgaaatttatacatctcagctgtttgcattacaaatggatgtgaatgctaataaaaatgaagatttgctacagtgtaaatatgtcatttaagtgcgtgttaacaataaaacattttattacatgaaagaagataaaatctctactatccctgtgatttcagatgtttaatgctctaaaggacgtacaygagataaaaatacattcaataaaatgagtgccagtgcagtgaaatcatcttatctagaatctgaagtttcagaaaaatatattatgcatttctaaacacagaggacagtccaattaggtacgtggtaactcattattaatagcacataagacaatgcccacaaagcagcacaaagctgtcagcagagctgcacagccatcgtacccagacgtctccttctgcagcccttacgcacccaagtagtcatgctgctttctgagggattactcattgaaggaagggctgccgtttccagtccta

SEQ ID NO: 84811 - DNA, 600 bp, Chicken  19866894382778_1
gtgtgtgtcataactgggaaatatatacacactgcttctctttacatactcaagtaatggatataacagaaaggacggttgtgaggatttaaaataattgatttcaccaatgtgtttgtaatgtttagaacaaaagcaaaattgaatgaaaacatgatgtaaattggaggaatatttatacttcagaactcctccctaagcatatgaccgaatgtggtgagattttttgtttgtttatttgtttgtatgtttctttatgtttgataacttttgtttcttcttaggttcaaaaaaaaaaamaaaaaaaaaaacagaagatattgcggtttaagagccagccttgtaatttatggagaatttaacaaaactctgataagatgtcaaactctgattgctatctagaatgaaaaatgtccaaagatacacttgaaactaatccttgacaaatgcaattagaatttactaagacaaggaaatcacacagaccaaattaaatcttagatctgatgaagaatgtcacaaaatgcttcaagggtggagtctactgaaaacaagacagagaaatatatactttggcaaaagaggcaatgtcatatagtg

SEQ ID NO: 84812 - DNA, 600 bp, Chicken  19866894382782_1
tggaagcagagcagaaacaacgccaccctcagataaggcgtctttgagactacgaagcctaaaatattttgccagaatgaaaacctgacagacattggctgacaaagtcctgcactgaaaccactgagctatgaaagaatggtcttcgtttcttaagacttgcagtgtctaatgaactaagcaataatggaatactccaagtattccataaatggcacagactggagttattcctcccgttcctttttaaacgcagttcaccaaagaagcagacagagctcagcaggctctgggaggaargagagagaaaaggaaagcagctgctcatgctatggtacctgaaatccatcaccatttactatcaattttaaataaacgcagagagtcccataacaaaggtttctagagaagtgtcaaaagtcttaattaattgtacctatatataaacatttacatctaaaaattcttttaatctactggttatgaacactgcaggtaagactcatacatttgcattttctttaaaaaaaaaaaagccctggcagaagcaccacaaaacatctgagagaagagctttttgtcatcttgagcatcacaatg

SEQ ID NO: 84813 - DNA, 600 bp, Chicken  19866894382785_1
cctgcttcctatcaggtagaatcatgttagatggagagattttactaaaaattcttatctcagaataatttattgtaggatacccacaggtaagatatgagcgctaggtcatatcctcacatctgtgcagacacagtcgttcccatttcactcggctgtgagttcctttatctaattctggccatcccaggagccccgggagctgtgcccacacaccccacagccactgctctgtcagcagctccatagctacactggaagacagctatcataaaaggtcatggctaaaaaggaagatgmaactttacacaagcccaggaaaagcctctgacaccccaagagatacactgtaacagtggaactctcaatgtttgtcttcaagcttggcgccatcagtcctaccctgacagagcgagcgcagggttcctacatgaccagccacgaaggccaaacacactctgcatgcctacagtgtgcattttttcaggtcaagacaaagcctgaagccaggggaaaaaagaatattcatgacttataccctacatctgtatgaagaggtgtctgtcttaattttctttaaagtttgttcattttttaaac

SEQ ID NO: 84814 - DNA, 600 bp, Chicken  19866894382793_1
atgttgctccactgcagtcaatactgcactcccaaagtaagggagccagaatccagtctagtcaggcacaatgaaagcagatcttcagcttgcttctgctccgtactttgtacacatattccagaatatcacctttctaaaagggacagaatgtatcccaccatgcaccaaggacccccactgccttggaaactgtgggctacgagcacactgtgagcactacctagcactttgcagacttgactttatgagagcaacagcaatttactggccttgacacagaaggaggtgaagcaaaaragggaaaagaaaaggggaaagaggaacakttctcatacttgacctcagccccacaatatgatgacatattatgtcctacaaatgaacagtatctgcttttaatatgctacagataattcaaatataattcatatacttgcatttttattaatttattaatttattaatattataaataatgcatgaaaaatctattgaaacagttctgtggtttaactgtacaaggaaatagcttagtttttataagtaacagcactttcctgtcaaaatttctaccagtacataatgaaatgttgtagt

SEQ ID NO: 84815 - DNA, 600 bp, Chicken  19866894382793_2
tcccaaagtaagggagccagaatccagtctagtcaggcacaatgaaagcagatcttcagcttgcttctgctccgtactttgtacacatattccagaatatcacctttctaaaagggacagaatgtatcccaccatgcaccaaggacccccactgccttggaaactgtgggctacgagcacactgtgagcactacctagcactttgcagacttgactttatgagagcaacagcaatttactggccttgacacagaaggaggtgaagcaaaaragggaaaagaaaaggggaaagaggaacakttctcatacttgacctcagccccacaatatgatgacatattatgtcctacaaatgaacagtatctgcttttaatatgctacagataattcaaatataattcatatacttgcatttttattaatttattaatttattaatattataaataatgcatgaaaaatctattgaaacagttctgtggtttaactgtacaaggaaatagcttagtttttataagtaacagcactttcctgtcaaaatttctaccagtacataatgaaatgttgtagttttgtatctctacgcatttacaggttctt

SEQ ID NO: 84816 - DNA, 600 bp, Chicken  19866894382810_1
agatgtggtctgtcatccttgggtaataacaaagacagctttaacacacgttttagtggatttgagatatcaaaccagttttcttcttcctagaccatgaagaagagtatttttcctgtgacttgtagtgtctttcctaatggcaaaaccttgttctgttgggctttaaattttgcccaaactggctttaaaaggtaggaatggctgcttgaagcagcgctttgtgtttcttttacgtcaggagtgaatgtaagaacttctgttgaaaaacatgaagaagtttgcggcagctgaatgttrttagagactggccttatgctctgaggtaaggctctgtgccatagcaggacaaatagcattgcctagctgcgccatggaagagccccccatttagctaacagctaatagtgaaggcatgaccaggagtttaagccgactctcatccaaccaccatatgagatatttgatagctgtgagtgtttggacctttttgttcccctgagctgtctcttcacagtagacatttcagggtctttcaaccagttaggaaagttcattatatttttaatataatgtaaaaaaattaaaataatgatttga

SEQ ID NO: 84817 - DNA, 600 bp, Chicken  19866894382812_1
caggctgagcagtcccagctccctcagtctgttttcaaagggaagcttttccatgccttggatcattcttgtggccctcctctagatgcactccagcaagtccatatctctcctgtactgaggattctacatctggacacagtactccaggtgagtacttggggatagagatatctggtgtcctaaggaaagcttctttaatgatctaccagctctcctttatccttgaagatagattcctaggcaactttgctgactaactccctgaacagctggaatttggctatcctaaaattaaasttcctgattttactttttgtctctctgacatccttcaatagtttgaactccaccattccatgattactacagcccaggcaacctccaatcctgatgtcactaatcagttcactcctgttggtgagcaacaggtccagcattgcatcctctctcagtggggctctctattaactggcttataaaacgatcctagatacatcccaggagcctcctgcattacaaagtccagattgtttgtagtattttgctagcatacaaaaacataaagaagccagaccactgagtttttttttaattgat

SEQ ID NO: 84818 - DNA, 573 bp, Chicken  19866894382826_1
gaaaatcccaaaggagttcttagagagcagcacagctcactgaattatctctgtgttttctattttaaacgttgtgtttcttttttaattatacattgaacttctggctgttcctggataattttcatcacagaaggtttggaagcgtgcaaaatttagggatgaggattttgaactatgtgtggaatgcttcctctttcagtgtttttgatcaagagctcaacttctttttttgtgtacagtattttacaaaaaacaagtcatttgatgctgggcactcaaatggacaaatacaggctrgcaaaatacctcagaaaaatgaatgggatatttcactgtccctcaggcctttcaatattcatattcttcacagtattttcagtgcaattgttattgcttcgctaaagcaaactgcctttcccatagaaatagttattcattttggctgttcatcatttcagaacagggactgtgttctttccaaatgcacgtaaaagcttctgaaatatatgagagaagttctaatctcatccactttctaaccagaaagactatgtggatggaaagttttag

SEQ ID NO: 84819 - DNA, 600 bp, Chicken  19866894382828_1
cagcctcgcttacctgtgtcagaacaggtaattgcaataaatcatcccgtgccccccgctctctgcagcacagagaagattaatggcagcagacactggagctgccaacttggaagatttctgtggcagagcaggaacagctatgcatgaggaatttgtgataaaaagctaggctgggactgtaatatagtgctggaaaggagccgagctgcccttccataatgcagccacattaaggtctgtctgattgtgatgacagacaggtatttgactgaatacactggaagctataaaaaaaawaataataataawaawaaaaaagtarctaaaagctaatgtcaaaaggtgatgtagggttgtcacatgccatctgcaataatttttgctaygaccacttgctgttaaggagggcaaaggaaataatattgtcgctggctgccaggctgcctgttatgcaggctctggggacagagggtcccttgtcaccctccytcatgaacatgcagctctggccaagagacatgtattgtctcacttgttttcctttgcattggttggaagaaaaatgctgttggggagaggagaggaggaatatgttgt

SEQ ID NO: 84820 - DNA, 600 bp, Chicken  19866894382828_2
cctgtgtcagaacaggtaattgcaataaatcatcccgtgccccccgctctctgcagcacagagaagattaatggcagcagacactggagctgccaacttggaagatttctgtggcagagcaggaacagctatgcatgaggaatttgtgataaaaagctaggctgggactgtaatatagtgctggaaaggagccgagctgcccttccataatgcagccacattaaggtctgtctgattgtgatgacagacaggtatttgactgaatacactggaagctataaaaaaaawaataataataawaawaaaaaagtarctaaaagctaatgtcaaaaggtgatgtagggttgtcacatgccatctgcaataatttttgctaygaccacttgctgttaaggagggcaaaggaaataatattgtcgctggctgccaggctgcctgttatgcaggctctggggacagagggtcccttgtcaccctccytcatgaacatgcagctctggccaagagacatgtattgtctcacttgttttcctttgcattggttggaagaaaaatgctgttggggagaggagaggaggaatatgttgtactcgggtaagt

SEQ ID NO: 84821 - DNA, 600 bp, Chicken  19866894382828_3
gtgtcagaacaggtaattgcaataaatcatcccgtgccccccgctctctgcagcacagagaagattaatggcagcagacactggagctgccaacttggaagatttctgtggcagagcaggaacagctatgcatgaggaatttgtgataaaaagctaggctgggactgtaatatagtgctggaaaggagccgagctgcccttccataatgcagccacattaaggtctgtctgattgtgatgacagacaggtatttgactgaatacactggaagctataaaaaaaawaataataataawaawaaaaaagtarctaaaagctaatgtcaaaaggtgatgtagggttgtcacatgccatctgcaataatttttgctaygaccacttgctgttaaggagggcaaaggaaataatattgtcgctggctgccaggctgcctgttatgcaggctctggggacagagggtcccttgtcaccctccytcatgaacatgcagctctggccaagagacatgtattgtctcacttgttttcctttgcattggttggaagaaaaatgctgttggggagaggagaggaggaatatgttgtactcgggtaagtgga

SEQ ID NO: 84822 - DNA, 600 bp, Chicken  19866894382828_4
aggtaattgcaataaatcatcccgtgccccccgctctctgcagcacagagaagattaatggcagcagacactggagctgccaacttggaagatttctgtggcagagcaggaacagctatgcatgaggaatttgtgataaaaagctaggctgggactgtaatatagtgctggaaaggagccgagctgcccttccataatgcagccacattaaggtctgtctgattgtgatgacagacaggtatttgactgaatacactggaagctataaaaaaaawaataataataawaawaaaaaagtarctaaaagctaatgtcaaaaggtgatgtagggttgtcacatgccatctgcaataatttttgctaygaccacttgctgttaaggagggcaaaggaaataatattgtcgctggctgccaggctgcctgttatgcaggctctggggacagagggtcccttgtcaccctccytcatgaacatgcagctctggccaagagacatgtattgtctcacttgttttcctttgcattggttggaagaaaaatgctgttggggagaggagaggaggaatatgttgtactcgggtaagtggaagcacctgca

SEQ ID NO: 84823 - DNA, 600 bp, Chicken  19866894382828_5
cagacactggagctgccaacttggaagatttctgtggcagagcaggaacagctatgcatgaggaatttgtgataaaaagctaggctgggactgtaatatagtgctggaaaggagccgagctgcccttccataatgcagccacattaaggtctgtctgattgtgatgacagacaggtatttgactgaatacactggaagctataaaaaaaawaataataataawaawaaaaaagtarctaaaagctaatgtcaaaaggtgatgtagggttgtcacatgccatctgcaataatttttgctaygaccacttgctgttaaggagggcaaaggaaataatattgtcgctggctgccaggctgcctgttatgcaggctctggggacagagggtcccttgtcaccctccytcatgaacatgcagctctggccaagagacatgtattgtctcacttgttttcctttgcattggttggaagaaaaatgctgttggggagaggagaggaggaatatgttgtactcgggtaagtggaagcacctgcagtaggataccgtgtagactctccatgcatcaaataacgtattacctagagctggagactgctct

SEQ ID NO: 84824 - DNA, 600 bp, Chicken  19866894382828_6
ctggaaaggagccgagctgcccttccataatgcagccacattaaggtctgtctgattgtgatgacagacaggtatttgactgaatacactggaagctataaaaaaaawaataataataawaawaaaaaagtarctaaaagctaatgtcaaaaggtgatgtagggttgtcacatgccatctgcaataatttttgctaygaccacttgctgttaaggagggcaaaggaaataatattgtcgctggctgccaggctgcctgttatgcaggctctggggacagagggtcccttgtcaccctccytcatgaacatgcagctctggccaagagacatgtattgtctcacttgttttcctttgcattggttggaagaaaaatgctgttggggagaggagaggaggaatatgttgtactcgggtaagtggaagcacctgcagtaggataccgtgtagactctccatgcatcaaataacgtattacctagagctggagactgctctattcttctagagctggagactctatatgggctttataaccagggtggagaagggcagatagaccagcaacattgtgaggctgctggccctggcacttcatcac

SEQ ID NO: 84825 - DNA, 599 bp, Chicken  19866894382834_1
  misc_feature (1)..(115): n is any nucleotide
nnnnnnnnnnnnnnnnnnnnnnnnnnnnnnnnnnnnnnnnnnnnnnnnnnnnnnnnnnnnnnnnnnnnnnnnnnnnnnnnnnnnnnnnnnnnnnnnnnnnnnnnnnnnnnnnnnncactttccttctctgatctttcctattctgagactaagacttcatgatctattcctgactagatgatgcagcaaactggtattatcatttagactacaacttcctgattcccattatcagacaactgttagctttgtgcttaatcagaaaaataaacatcttcatttaggaagaggaagaagagragaatttttcctaaatgcagtaaaattgtcaaaatgaaattgtttgttatattattatattcaaggaaaaatgagaaacagatgatagataaatgtgatgggagattaaaagagaaacagtcttggacgtgaatattatcactttcaacacaactaagaacatagaagataaaatccttaaatccctatccagttttacttctggtagatgtgtaggttaagtaaaatttggtgagtttccttcacaaggagttaagaaacaaatgtgttgacaaacttctgctcctgctgaacctatg

SEQ ID NO: 84826 - DNA, 600 bp, Chicken  19866894382842_1
ccacctgtttaatggcattgaagcatgaaaatccagggagatcagcttttttcattactttacattacaagtgagaagcactggggatagctcttgtgctcagtgctgcactgccctgggcagatcacttcattgcactgcaatgttaccccctactagaaagacaaaccctgctctgaagtgatgtgctctgctcccaagggatgctcacaacaggactgacatgctcccagctatgttcaggtggctgcttctgagccactgaacatcgtaacattgcagcttaaaggttgaatatgygctctttcaatacctgcatagcacctgaagcttccagagaatatgttaactaatttgtttttcataaaaaccctaattaaactcagccacctgtgcatcagatgctgtagcgagatgtactggaagcccttgttctaacccataaaaacctatagttgctcgagctgaaaattcagtattcactgaatgtagtccctgtagggattccacggagagctgagggctcacaggaattgcacagtgctgcccagggccgcccccctcaccagcttaggggcacctaacaacttcttaaacttg

SEQ ID NO: 84827 - DNA, 600 bp, Chicken  19866894382843_1
ctgtccttccaccgtgcttcaggacagccaaacccacgggatccaacgcacgctgtgagctgctgcttgctcaactcaaacatgatcaaggagctttggcagaagccaggtccatccccacgccggcctgtttctgagccaaggatcacaaggatgcttgcttaatatttatgtttcagcagtacccagaagctccagcacagagcaggactccatcctgctacagactgcacaaagagaaagctttgaggaacaaactgctctgctctgagatgccgcaggagttgcaccagaggcttyccaggcgctctgcaaacccagacaaaagccataaaatctgggctgcagggaagaaccaggaaatgggtaatgtgatagaaggaatttctccatctataaccatcgcagctccataaggttgtttaaaataaggaacagagactgttttctttgtggaaatcctatgtttattattagttatgcctctgagtataaataaatacgtaatggattgcatattggttaattcccttcattgtgcatttaattgcttccttgtttgctttgtactttccactctgctatatcctcatatttcag

SEQ ID NO: 84828 - DNA, 600 bp, Chicken  19866894382852_1
acagtaacgcattgtatgcttttagtttcacaaaacacagtactgaaatgatattagtcatggatagagatttagtgtgagattagtaaatgcccaagattggtgaaagattgataagtaacctgaaagtgaaattcatttgtaacagttttagtgtaaaaactcagcatggtgtatcatgaaatcgtactacatagctattcaactgaaaatcagaattaatttagactgcttttgttggaaatgaatagcttgacaaagtattttatctcccactgtgtacttaaaaacatcattgtwcaaagaacagaactttgatatttttattttgaagatacctagaaagtaaaatatgtagaataacagcatcacataagactttcaacaaacaaaaatgtctaatatactcttgactatggcatagatctgctgaggaacacttctgaaaattacatgtagtccacattatctattttctagatctgtttcagtacctcccctttctacatgaaaatatatgtattcagacgatctgtgaaaattgatatctgaaagttctttcaatctctataaatgcagaagggacatgattttaacatt

SEQ ID NO: 84829 - DNA, 599 bp, Chicken  19866894382857_1
  misc_feature (1)..(166): n is any nucleotide
nnnnnnnnnnnnnnnnnnnnnnnnnnnnnnnnnnnnnnnnnnnnnnnnnnnnnnnnnnnnnnnnnnnnnnnnnnnnnnnnnnnnnnnnnnnnnnnnnnnnnnnnnnnnnnnnnnnnnnnnnnnnnnnnnnnnnnnnnnnnnnnnnnnnnnnnnnnnnnnnnnnnnnttgccctttgcttgccattccttctacactgaagaggggagctaaaaacactggggaggaacaagttctttattctcttgcactgcaaagaggaaagtgaggcagagcatcaggcaggaggtgtgagaacctgmagtggggtgcagctgggccgtatggatagagctcggtgtgagtgggccgaggggaaaggctgttgcctgctgatgtgaccttcaaaaagaagggagctgaaggctggagcataggctggaatgacagcttcctttcatgttgtctctcatgaaagaaacacaggaaaagttgaattaagtgatgtataattccctaagggaatggaattttattagaggaaatgactgccaaaaaaaatcttaaaataattaataccagcacttccactttttaagtgctctgaaagatagaaaaggag

SEQ ID NO: 84830 - DNA, 600 bp, Chicken  19866894382857_2
ttctaggccaccaggcagtaattatttctgtgacgggaaagctttgcaggttttctaatttgcactgtagatactgaatgaaatacaataataaactgtaatgaaatggagtcggatctttaagagctcagtctctcagaatggatggatggttcaagaacacattggtgaaaattaacagcatactaatgttgtaaacgtatcatcaggcaaattaataaagtgtttataagcaaataggaagagagcatttctaaattcctttcattagggggtgtggatggggagtcagtgagcagygtgtgatgcagccgttgttagaatgcgttttggaaaggaaccagcacgagttggaggattaatgagtctgtgtctcaggcttctgtgcctgcactcagcctgcctaattgcagatacttaaatcaggcagcaattctggtggcgtagggacttcagggacccttagtgggctcatactgaccttttggtacaggtgggaaggtgctgggtctgactgtagtctgtgatccgatctgcagttaaccagcatggctagcggaaggtgataggcatagtgggtaagggatgttgctacctcaa

SEQ ID NO: 84831 - DNA, 599 bp, Chicken  19866894382861_1
  misc_feature (1)..(32): n is any nucleotide
nnnnnnnnnnnnnnnnnnnnnnnnnnnnnnnnaaaaattcatgggcatgatcaatctctgcttaaaaatctgctttagaatgcaactttgtaaaataatgttgtgtggttcagcctttgtcttagtgatttgcaggtaatatcttctttgtgtaccggtggaaggactgcttattctgatcagcaatctagttcaagctataaccaaaaaggtttgatttctttaatttcacttttgtttcattttgtttttaaacacttactcaagtgacacctttaataaagtttctgtaattgggakttgtcttctaaatttgttaatgatgtgggatgcagaattkaataatccactcttttattccatagttttctttaaagaaaatgaatctattgcaggctttcttgttaaaagcaacagatagattctgaatgcctcatagtaagtttcctcagaagggacctgatcctatcaggttccaaaaaatattaagcctcatagtcagacttagtcacccttgcttccttgcacctcttgatattattttttccattctcaaaatgagaaaataactyatgggaattgtttctttgctgtaacca

SEQ ID NO: 84832 - DNA, 600 bp, Chicken  19866894382861_2
atgggcatgatcaatctctgcttaaaaatctgctttagaatgcaactttgtaaaataatgttgtgtggttcagcctttgtcttagtgatttgcaggtaatatcttctttgtgtaccggtggaaggactgcttattctgatcagcaatctagttcaagctataaccaaaaaggtttgatttctttaatttcacttttgtttcattttgtttttaaacacttactcaagtgacacctttaataaagtttctgtaattgggakttgtcttctaaatttgttaatgatgtgggatgcagaattkaataatccactcttttattccatagttttctttaaagaaaatgaatctattgcaggctttcttgttaaaagcaacagatagattctgaatgcctcatagtaagtttcctcagaagggacctgatcctatcaggttccaaaaaatattaagcctcatagtcagacttagtcacccttgcttccttgcacctcttgatattattttttccattctcaaaatgagaaaataactyatgggaattgtttctttgctgtaaccaagtaatcaagcttcagaaacaaatggaaagtacagaaaaaa

SEQ ID NO: 84833 - DNA, 561 bp, Chicken  19866894382861_3
cctttaataaagtttctgtaattgggakttgtcttctaaatttgttaatgatgtgggatgcagaattkaataatccactcttttattccatagttttctttaaagaaaatgaatctattgcaggctttcttgttaaaagcaacagatagattctgaatgcctcatagtaagtttcctcagaagggacctgatcctatcaggttccaaaaaatattaagcctcatagtcagacttagtcacccttgcttccttgcacctcttgatattattttttccattctcaaaatgagaaaataactyatgggaattgtttctttgctgtaaccaagtaatcaagcttcagaaacaaatggaaagtacagaaaaaatggaagcagaacaactcactttctctgtaagtttgtattttactgctctttcacagtaaaatcttgcctcatcacctgctattttcaatcatctaatgggaaaaaggcacttcccattcagactcccagtgcacgcagggactggagagtaattcttactctgcttccctactgctagaaaagctcattcact

SEQ ID NO: 84834 - DNA, 599 bp, Chicken  19866894382872_1
  misc_feature (1)..(88): n is any nucleotide
nnnnnnnnnnnnnnnnnnnnnnnnnnnnnnnnnnnnnnnnnnnnnnnnnnnnnnnnnnnnnnnnnnnnnnnnnnnnnnnnnnnnnnnnctcacgttgtcaggcataaataaggtgagacgagtgatggaggcatagctatggccttatctgactgtgcagctacgggcaagtctcattatcaactagaggatggctaataaacctatacccatcctcattctccagtattgcaagacctctccccttcttcagcagctatgcttgggccacaatccacagttgcaatgctggaatgatgsaatattggaatgctgggacatkgaaaggctgagatgctgggatgctgaggtgttcagatgctgggatattggaatgctgagattttgagatgctgagttgttgggatggtgggatgctgagctgttgagatgttgggatgctcaaataatgagatgttgggatatggagatgctgagatgctccctggtgaagcagtcttcactgagttcttggaataacagggcacrtggaggcagatgaytgcagaacatctatttaatgaggtctcacaggcttccctacatctctttgcaagctc

SEQ ID NO: 84835 - DNA, 599 bp, Chicken  19866894382872_2
  misc_feature (1)..(66): n is any nucleotide
nnnnnnnnnnnnnnnnnnnnnnnnnnnnnnnnnnnnnnnnnnnnnnnnnnnnnnnnnnnnnnnnnnctcacgttgtcaggcataaataaggtgagacgagtgatggaggcatagctatggccttatctgactgtgcagctacgggcaagtctcattatcaactagaggatggctaataaacctatacccatcctcattctccagtattgcaagacctctccccttcttcagcagctatgcttgggccacaatccacagttgcaatgctggaatgatgsaatattggaatgctgggacatkgaaaggctgagatgctgggatgctgaggtgttcagatgctgggatattggaatgctgagattttgagatgctgagttgttgggatggtgggatgctgagctgttgagatgttgggatgctcaaataatgagatgttgggatatggagatgctgagatgctccctggtgaagcagtcttcactgagttcttggaataacagggcacrtggaggcagatgaytgcagaacatctatttaatgaggtctcacaggcttccctacatctctttgcaagctcctgcaagtctgggatggaggat

SEQ ID NO: 84836 - DNA, 596 bp, Chicken  19866894382872_3
ttgcaagacctctccccttcttcagcagctatgcttgggccacaatccacagttgcaatgctggaatgatgsaatattggaatgctgggacatkgaaaggctgagatgctgggatgctgaggtgttcagatgctgggatattggaatgctgagattttgagatgctgagttgttgggatggtgggatgctgagctgttgagatgttgggatgctcaaataatgagatgttgggatatggagatgctgagatgctccctggtgaagcagtcttcactgagttcttggaataacagggcacrtggaggcagatgaytgcagaacatctatttaatgaggtctcacaggcttccctacatctctttgcaagctcctgcaagtctgggatggaggatttattgcttgaagtaagaattacagcacataacactgaccttggctgcctgggagcaggagagcactctccatgtttgcactcagtttttacgtccatctcccagtctgaagagtgggctcatctgcactgctcgtgcacaaccacatcactcacgcacaaattcatcacttgtgcacaactgtgtcacccttgcagaacctg

SEQ ID NO: 84837 - DNA, 582 bp, Chicken  19866894382872_4
cccttcttcagcagctatgcttgggccacaatccacagttgcaatgctggaatgatgsaatattggaatgctgggacatkgaaaggctgagatgctgggatgctgaggtgttcagatgctgggatattggaatgctgagattttgagatgctgagttgttgggatggtgggatgctgagctgttgagatgttgggatgctcaaataatgagatgttgggatatggagatgctgagatgctccctggtgaagcagtcttcactgagttcttggaataacagggcacrtggaggcagatgaytgcagaacatctatttaatgaggtctcacaggcttccctacatctctttgcaagctcctgcaagtctgggatggaggatttattgcttgaagtaagaattacagcacataacactgaccttggctgcctgggagcaggagagcactctccatgtttgcactcagtttttacgtccatctcccagtctgaagagtgggctcatctgcactgctcgtgcacaaccacatcactcacgcacaaattcatcacttgtgcacaactgtgtcacccttgcagaacctg

SEQ ID NO: 84838 - DNA, 599 bp, Chicken  19866894382881_1
  misc_feature (1)..(266): n is any nucleotide
nnnnnnnnnnnnnnnnnnnnnnnnnnnnnnnnnnnnnnnnnnnnnnnnnnnnnnnnnnnnnnnnnnnnnnnnnnnnnnnnnnnnnnnnnnnnnnnnnnnnnnnnnnnnnnnnnnnnnnnnnnnnnnnnnnnnnnnnnnnnnnnnnnnnnnnnnnnnnnnnnnnnnnnnnnnnnnnnnnnnnnnnnnnnnnnnnnnnnnnnnnnnnnnnnnnnnnnnnnnnnnnnnnnnnnnnnnnnnnnnnnnnnnnnnnnnnnnnnnnnnnnnnntggccccgtgcccgcagcgagccccggctctgtsccttggtccaccgccctggggacagccctatggccaggacaccggccycagccaccagcagtgcaccctggtcccctgctgacacctgcgggtgagcaggcgtccctgcatgtcaccgtgtcccacagtgtcaccgtgcccctgcatgtcaccgtgtcccacagtgtcaccctgcctctgcatgtcaccacgtcccttcacgtcactttgcccctacatgacactttgtcccaacagaccgccccatctgaacgtgtcatcccgtccctgcccatcacctcactacgtgtcatccctcc

SEQ ID NO: 84839 - DNA, 599 bp, Chicken  19866894382881_2
  misc_feature (1)..(218): n is any nucleotide
nnnnnnnnnnnnnnnnnnnnnnnnnnnnnnnnnnnnnnnnnnnnnnnnnnnnnnnnnnnnnnnnnnnnnnnnnnnnnnnnnnnnnnnnnnnnnnnnnnnnnnnnnnnnnnnnnnnnnnnnnnnnnnnnnnnnnnnnnnnnnnnnnnnnnnnnnnnnnnnnnnnnnnnnnnnnnnnnnnnnnnnnnnnnnnnnnnnnnnnnnnnnnnnnnnnnnnnnnntggccccgtgcccgcagcgagccccggctctgtsccttggtccaccgccctggggacagccctatggccaggacaccggccycagccaccagcagtgcaccctggtcccctgctgacacctgcgggtgagcaggcgtccctgcatgtcaccgtgtcccacagtgtcaccgtgcccctgcatgtcaccgtgtcccacagtgtcaccctgcctctgcatgtcaccacgtcccttcacgtcactttgcccctacatgacactttgtcccaacagaccgccccatctgaacgtgtcatcccgtccctgcccatcacctcactacgtgtcatccctcctggcatgtcaccctgtccctctgtgtcgctttgcccttacatcatgcc

SEQ ID NO: 84840 - DNA, 556 bp, Chicken  19866894382881_3
caccagcagtgcaccctggtcccctgctgacacctgcgggtgagcaggcgtccctgcatgtcaccgtgtcccacagtgtcaccgtgcccctgcatgtcaccgtgtcccacagtgtcaccctgcctctgcatgtcaccacgtcccttcacgtcactttgcccctacatgacactttgtcccaacagaccgccccatctgaacgtgtcatcccgtccctgcccatcacctcactacgtgtcatccctcctggcatgtcaccctgtccctctgtgtcgctttgcccttacatcatgcccctcytacatatcctctgggaccccaaccccatcaggaccccccagcactgctgtgcctgtgcacaagggccctgaatctcctctgaatccctccatcgtcccctccacccctcctccaccctccctcctccacatccccccattcccccctccatcccctcttccccactggggctgtgccctgagggaggaagacaagcattgggattacaccgggcagctctgcctttgggagccaataccctcattaattaattaag

SEQ ID NO: 84841 - DNA, 600 bp, Chicken  19866894382884_1
gtgtcacatgttttgagctcctttcaggtctcaggtgctggaaccatgacattcagaggatgttttcctgatgaaaagtgttaatgctttaccatatgtagccactcatgatgaattgctttggcattcactgtaagaacattagccaagatgaactcatttggtgttaatgtcaatgtaatatatggctccctggatatccccttgtagtttaacatccatttcaaaaacaatttttcaaaagagttttaaattaatgctttaatgttttagaattaacagacaaacccttcaaattgyattttttcacttcagcctaaatattgtgcttattggccaacctgcttattaggaatgaaacctctattctcaaaggaaacgttgtgaactgcagtcctttagcatacttgtcctctaacacacatgtaaaatcacaatcttcagtggaaataatgtagttgctgttaaatggccttgaactgctactcatacattcagatgtctgcataytagttattcctttgcttgtgttactgagccttctaaaatgaatctcatacacagaagcaacaaacaggtggttattcctttcttattatc

SEQ ID NO: 84842 - DNA, 600 bp, Chicken  19866894382884_2
tttaacatccatttcaaaaacaatttttcaaaagagttttaaattaatgctttaatgttttagaattaacagacaaacccttcaaattgyattttttcacttcagcctaaatattgtgcttattggccaacctgcttattaggaatgaaacctctattctcaaaggaaacgttgtgaactgcagtcctttagcatacttgtcctctaacacacatgtaaaatcacaatcttcagtggaaataatgtagttgctgttaaatggccttgaactgctactcatacattcagatgtctgcataytagttattcctttgcttgtgttactgagccttctaaaatgaatctcatacacagaagcaacaaacaggtggttattcctttcttattatctagtctatctatggttttgtctttgcccgcccttttgtttagtcaagtgaaacagtcttgtgttttaatttataaacacagttgaaagttatatatatataaagttatgtatatataaacacaatgaagttacctaatgctgctaatactgcctggtctagcactccacacttggcatgtggtctagactgtgggacagtaacaaattgt

SEQ ID NO: 84843 - DNA, 599 bp, Chicken  19866894382889_1
  misc_feature (1)..(87): n is any nucleotide
nnnnnnnnnnnnnnnnnnnnnnnnnnnnnnnnnnnnnnnnnnnnnnnnnnnnnnnnnnnnnnnnnnnnnnnnnnnnnnnnnnnnnnnctgagtcagggtctcccagtgtcgttttgtcctacatggggaagatgtcaggatttgcatcaggaaaatcattaaatactgtaaatgcaaagtttgcgggtaatttaaagggctgatagggaagctccataacaattaattcacaacagttttctgagtcagatagtcaaaaatacacaatactattttttttggaagcagtaccgttgcagrctcyatcaagtcttttttaaaacatgcttattactcagtgatgagctaactctgtagtgttgaaaagattgctttagttgagcataataaaactggatgcacatctgaagaatacttcaattccctatgtccctgggactgcaaagctggactggaagtttagatgatacatgctcttgcgcagtataattattgttttactctacttcccgcctgaactcaaagtgcaggcacatgggcaactttgccctttttctgtcttaaaaggcggtattttgggaagcagccacaggggaaaa

SEQ ID NO: 84844 - DNA, 599 bp, Chicken  19866894382889_2
  misc_feature (1)..(83): n is any nucleotide
nnnnnnnnnnnnnnnnnnnnnnnnnnnnnnnnnnnnnnnnnnnnnnnnnnnnnnnnnnnnnnnnnnnnnnnnnnnnnnnnnnnctgagtcagggtctcccagtgtcgttttgtcctacatggggaagatgtcaggatttgcatcaggaaaatcattaaatactgtaaatgcaaagtttgcgggtaatttaaagggctgatagggaagctccataacaattaattcacaacagttttctgagtcagatagtcaaaaatacacaatactattttttttggaagcagtaccgttgcagrctcyatcaagtcttttttaaaacatgcttattactcagtgatgagctaactctgtagtgttgaaaagattgctttagttgagcataataaaactggatgcacatctgaagaatacttcaattccctatgtccctgggactgcaaagctggactggaagtttagatgatacatgctcttgcgcagtataattattgttttactctacttcccgcctgaactcaaagtgcaggcacatgggcaactttgccctttttctgtcttaaaaggcggtattttgggaagcagccacaggggaaaagagg

SEQ ID NO: 84845 - DNA, 600 bp, Chicken  19866894382901_1
gccaatttgctgtccaggagcttatcattcttttaagttatttataattgttctaaatgtttctctgtcttaatttacgattcccagactatttcctattgacctgtgggtatcagtgtaatgcattcatcaatgtgtttagtaagtctgtattttgttaccttatactgatttctgcatttgtccatctcagcctgaatctctcattgacctgaaacccaccctccaggggcaaccagcagcttccacaccagcctttcactattcattgtccttcctaatgagaacaacattagactwctacctcaacacgactgaaatgatttcatggtagaaaatgatcgtctctatacttcagaagcactggtggtgtttgcgtattcaaattagaatccttccatactaacgtgttttattatcaccattattatttctgtatgctgcggaaaagaagagaatcattattttccatcagttcatttagcagcggttgaaagtttcttctagtaaacacaaggatcagtctctgctctgaagaatcaagtaactacaaaaacgcagtggcatcttttatgcaaagcatcacccctatgcctttac

SEQ ID NO: 84846 - DNA, 600 bp, Chicken  19866894382903_1
gcatttatgcagttgctatgtcagtataaagtagtagttaggaaataaggtcatgtaacagcactttgaaaatgttttatttacaactgcttggaacagtgatcaagatggtgttttttttttcttctagtcttttcctttatcaatgcatgccctgtgacagttaatctgtaaaattacatttcaaagaaaatacttcttgaaaagccaaagtaaaacctgagaatgcgtgatgttttcttttggtggtcagataccagtaggtgttgtgttgttcattatttggctttgtttttcttytgttttgctttttagttggatttttgtttgttttgttttatttgcttttgctttctcatcaggaattcattgtgagttcctgatagaacacagcaagctctttagcaccacagagaaaacaaatcaagtgtagatttctcaagcaaaagtgtaggtggagaaagctgtggttatttagccttgagaagagaaggctccaggaagaccacactggcctttcagtacctcaggcgagcctatgggaaagctgggaagggactgtattcatcagggagtgtagtgacagggcaagaggcaatg

SEQ ID NO: 84847 - DNA, 600 bp, Chicken  19866894382904_1
ctagggagagatgctgaactgaaattgaactagaggtggttcattcagatggttctgtgcatgagatcagcaaagacaaaaatgggaacgaagtcaagaataaacttagaatgacagaacaattcaagctggcagggatcttgagaggttgctagtccaacctcctgctcaaagcagggtcagcaagcagatcagagcagggttatctgggctttctccagctctgtcttggaaaatctctgaggatgcaaactgtacaacctccctcagtaatcttttctgatgcttgactgatctctycatgaattttttcccctaaaaccattcagaagttctcattgcaacttatgcctattttctcctgccctcctgtcactcaccattgcaaagattctgtgattgtcttcttgataacctctttgtaggtattagtaggctcctagaaggtgccatctaagccttttgctcatttgtarggaaacacaagataaacaggagatgggaaacctactgggggactgaagagagggaagaaatagagctagggagggcgagaaaggacaagagaaaacttattctgagatttagggaggggatagc

SEQ ID NO: 84848 - DNA, 600 bp, Chicken  19866894382904_2
gggtcagcaagcagatcagagcagggttatctgggctttctccagctctgtcttggaaaatctctgaggatgcaaactgtacaacctccctcagtaatcttttctgatgcttgactgatctctycatgaattttttcccctaaaaccattcagaagttctcattgcaacttatgcctattttctcctgccctcctgtcactcaccattgcaaagattctgtgattgtcttcttgataacctctttgtaggtattagtaggctcctagaaggtgccatctaagccttttgctcatttgtarggaaacacaagataaacaggagatgggaaacctactgggggactgaagagagggaagaaatagagctagggagggcgagaaaggacaagagaaaacttattctgagatttagggaggggatagcctccagagctatctagaagagcagcttcaatgaaactaatgatgcaaaaggcagaacagacagtgcctgacatggaatgagaggccaggacaaccagagcaaaacaatgacgtaaggcattagcaacaaggctgaaaagagaggagcaggtagatcttgtaggaagttcagatgag

SEQ ID NO: 84849 - DNA, 600 bp, Chicken  19866894382906_1
tttaagctttatgctagaagaaacgtttaattaagagcactcaatttatgggttgcttgggatcctgaatctctgatctttcttgtttttctgccttttgggagttcttcaaaactttcttatgaagaaaggcagtaatactgaagataataatctgtctcttctgtattggacaccatggataagaagagttgtaaaagaagctagagccttctaggaataaagaaaaagacagctgctgtgaacctaccagtatagtggccaggactaattctaactgtgaataatacttgttctttraggaagtggaatctggagagccatttacaggcatcacatgcagaggactttgggaggagagtttgttagctcctgtccagaaagaaagttgcatctggggacactattggtagagaaatacttctggcctccacgctggggtggaggagggygaggagcaaatttctgatctagattggatgaacttctcctcgtagttctaatgtggtttgacacggtctatgttgcctagcaataagtaatgaaatgaataaaaactaggttatctggaacaagtgtaatctctgttcccaaatcagc

SEQ ID NO: 84850 - DNA, 600 bp, Chicken  19866894382906_2
atctgtctcttctgtattggacaccatggataagaagagttgtaaaagaagctagagccttctaggaataaagaaaaagacagctgctgtgaacctaccagtatagtggccaggactaattctaactgtgaataatacttgttctttraggaagtggaatctggagagccatttacaggcatcacatgcagaggactttgggaggagagtttgttagctcctgtccagaaagaaagttgcatctggggacactattggtagagaaatacttctggcctccacgctggggtggaggagggygaggagcaaatttctgatctagattggatgaacttctcctcgtagttctaatgtggtttgacacggtctatgttgcctagcaataagtaatgaaatgaataaaaactaggttatctggaacaagtgtaatctctgttcccaaatcagcttttaaaatccaaagtaatttaaagcttagagaatggcagtgggttttcctatttgtttcatctgtgtgtttttgttttttgttttttgtttttttttaatgcatgtgttaaatcttgcatgtagaatgtttggagattggtggctctgctt

SEQ ID NO: 84851 - DNA, 599 bp, Chicken  19866894382910_1
  misc_feature (1)..(2): n is any nucleotide
nnctgccctgcaccagccggctgtggtgctcgtggggagggctgttggtacaccgaaaggtttgaggctgtccgctggtggcagcagcagccctcgtgctccgttctcttatctcctgccagctgcagtggtccccaggtggtaaaagcagactttctcccaaagggtttggctcgatggccaactgagtgtaaacaggagaagaagagttcaaagtctgggtgacctgagcttggagcttctggtgaggacagcgagtgtgccggcttgtgcaacagctccctccagaataggctcccrtgttatgtaatgacagcgcgctgcttcccactgacagctctaagctttgacaaagcaaataaccccaatcccatttttacagcagcttttgtctatttgtctgtaactgctccctcgcttccgaggtgttggagaaaaagcatcaggcagttatggcccagggagctcagaggagttggacatcctacacccaacttgcagagctggttggcgttctgtaaagccaacaagcagacctgagcattctgcagggcagggaaagatggaatggtcactgaccccatttccaagcagccaca

SEQ ID NO: 84852 - DNA, 600 bp, Chicken  19866894382913_1
ttaaacatgatttcgtacctattaaggactcaaagagaaaataatctgcaatattagtaatatgacattgcttgtatcctttcttttatgaataataaatgcagctctgaaattgcaacagaagtacaaatgttcccttaaacagcatgcttgttttatttagatgaagtatgtaaaaaatcactgtcttatagtataataaatctacccccttattctatttggaacatgccagctgctaccaagggacaaagggaagactacttttttttccctagcagtagtggggtaacggattcstctgagaactggaattgtattctgatcagtagaagaggaagggaagatcagaatgagaacagaagcaaagtgctgactcctaaattgtggagagcacggtccattttaggagttgtcttgcaggtttgcacaagctaatagaataaggcaagtggagagtctgtaaacaccctgctgtgcaagataagctatgctgtgactgctgtatcttccattccagtgatgatatcaatgctagcagaaatactggtcttggtttggtttggatggagaagttgtgtcagcagtcctggcagttct

SEQ ID NO: 84853 - DNA, 599 bp, Chicken  19866894382919_1
  misc_feature (1)..(170): n is any nucleotide
nnnnnnnnnnnnnnnnnnnnnnnnnnnnnnnnnnnnnnnnnnnnnnnnnnnnnnnnnnnnnnnnnnnnnnnnnnnnnnnnnnnnnnnnnnnnnnnnnnnnnnnnnnnnnnnnnnnnnnnnnnnnnnnnnnnnnnnnnnnnnnnnnnnnnnnnnnnnnnnnnnnnnnnnnnggctgtttttttgtttgtttttaatttatttctagtgagttgccatatgccctgaggatcatggtggatgtaaatggatttaattgactattcactgtaaaagaagccagatatgctaagctgggtaatrgaatgtaatatctgtaaagtgattgaggatgacaacctgaattgtctcaaaagtatgcttggaaattcctgccccaaacaatactctcctagtacttgttaacaagttgtccgatttggctgcaaactgattaaacaatcccataatattttctaggttattacctttggatctactgactagtctgtatctccaccaaagatatttaccctggtttgtagggctctcccaggtttaaaaaaaaaaaaaagaaagaaaactaaggggaaaaccagtgtcaaaggactactcagatgtgc

SEQ ID NO: 84854 - DNA, 599 bp, Chicken  19866894382925_1
  misc_feature (1)..(140): n is any nucleotide
nnnnnnnnnnnnnnnnnnnnnnnnnnnnnnnnnnnnnnnnnnnnnnnnnnnnnnnnnnnnnnnnnnnnnnnnnnnnnnnnnnnnnnnnnnnnnnnnnnnnnnnnnnnnnnnnnnnnnnnnnnnnnnnnnnnnnnnnnnnnacagacttgctgcttttgcattatcaattcagttgtgccactggtttactttatacactttgcttgagaaaaataagctgtaatgagaatctggtctggggtttattttctctgctttttatgacatctatggcatagtgctgtgtttcactgctacccmcagagccatgacaaatacatgaatgcaatatgctgcaagttgggtgacctcccaggcaagatagggcaggaataatmgaggagctgatgatcagcactcagtaatttgtccctgtgatggtacgtggatctactctaatcagcaaggatcttcctctgtgcagaagtgcttggtccattgctcacagtaaacccaaatagcggtaaccaggactgtagctgcctctagatggcgatgattgactgattaatgtttgttctgtaattgaaaatgattactggcttatcctggattaatcc

SEQ ID NO: 84855 - DNA, 599 bp, Chicken  19866894382925_2
  misc_feature (1)..(63): n is any nucleotide
nnnnnnnnnnnnnnnnnnnnnnnnnnnnnnnnnnnnnnnnnnnnnnnnnnnnnnnnnnnnnnnacagacttgctgcttttgcattatcaattcagttgtgccactggtttactttatacactttgcttgagaaaaataagctgtaatgagaatctggtctggggtttattttctctgctttttatgacatctatggcatagtgctgtgtttcactgctacccmcagagccatgacaaatacatgaatgcaatatgctgcaagttgggtgacctcccaggcaagatagggcaggaataatmgaggagctgatgatcagcactcagtaatttgtccctgtgatggtacgtggatctactctaatcagcaaggatcttcctctgtgcagaagtgcttggtccattgctcacagtaaacccaaatagcggtaaccaggactgtagctgcctctagatggcgatgattgactgattaatgtttgttctgtaattgaaaatgattactggcttatcctggattaatccagttgcgatgctgcagccgtttagcaaattacagcttcascgcagaaagctgcagtgagtctaacaaaaaaatgtct

SEQ ID NO: 84856 - DNA, 600 bp, Chicken  19866894382925_3
ttgggtgacctcccaggcaagatagggcaggaataatmgaggagctgatgatcagcactcagtaatttgtccctgtgatggtacgtggatctactctaatcagcaaggatcttcctctgtgcagaagtgcttggtccattgctcacagtaaacccaaatagcggtaaccaggactgtagctgcctctagatggcgatgattgactgattaatgtttgttctgtaattgaaaatgattactggcttatcctggattaatccagttgcgatgctgcagccgtttagcaaattacagcttcascgcagaaagctgcagtgagtctaacaaaaaaatgtctctgtccagttgaaatratgggggaaatgtggccaagaagtatagcagagtttggccagaacattaggatggatttacaaactgttgtgagatctttaattatcagcaataccagaagctttcttttctagaacagtatttgctcatgaggtctcttgcagaaaccaaaccatgaggacatttaaaccgtaataaaacagggaaggatatcaaatcagtcctcaattgctctgaactcctaggaccatgttaatagcttgttct

SEQ ID NO: 84857 - DNA, 600 bp, Chicken  19866894382925_4
agcactcagtaatttgtccctgtgatggtacgtggatctactctaatcagcaaggatcttcctctgtgcagaagtgcttggtccattgctcacagtaaacccaaatagcggtaaccaggactgtagctgcctctagatggcgatgattgactgattaatgtttgttctgtaattgaaaatgattactggcttatcctggattaatccagttgcgatgctgcagccgtttagcaaattacagcttcascgcagaaagctgcagtgagtctaacaaaaaaatgtctctgtccagttgaaatratgggggaaatgtggccaagaagtatagcagagtttggccagaacattaggatggatttacaaactgttgtgagatctttaattatcagcaataccagaagctttcttttctagaacagtatttgctcatgaggtctcttgcagaaaccaaaccatgaggacatttaaaccgtaataaaacagggaaggatatcaaatcagtcctcaattgctctgaactcctaggaccatgttaatagcttgttctggttggcctctgacacagaatggtcccactgtgcaagacgtaccagcagtgag

SEQ ID NO: 84858 - DNA, 524 bp, Chicken  19866894382927_1
gctctgcctatcattcttcttacccatccctgcggaacaaatccactactggaattgtttgtggctagcgtgtggcagccaccctgagagccagcacagcagagagctactgagtgagaaactggagctgctgcacctcagctaaggagtcacactctgtctgaaacaacttgcacctgctgtgttctagtgccatccaaagagaactctctgcataaggcctgtccatactcgtgcttgtgtggtcccagcaagcactcagctacccacacctgctagcaagggtgacagttccccttrtgaatgaagcccaaccttttccagattaggtgctgaagctaatgagattctgaactagagacttactgaagaggtgagtttctcgagttgggctgaagcagacagtggcaatgggctttttatgagcctttatttctccgtagcagaagtcagctgccacatgaatcagtttgacaatccctctccttcctgcagctgccaagatattatgagatttcttccga

SEQ ID NO: 84859 - DNA, 599 bp, Chicken  19866894382928_1
  misc_feature (1)..(29): n is any nucleotide
nnnnnnnnnnnnnnnnnnnnnnnnnnnnnttaccgtagggaacttgcaatgaggagcctgcatatacagtcatgttttagagctcctggctgacacagaatttctcacagatgcgcactgccagtccctcactactgctcaagctttgctcttccagataaaccaaggaatgtttttctgatttttgttcatttaccagtctagagctgcatgggtctgaagaacagaacaacaagtcttctgagattaagtcttacatacaaaaatctcaatgatcctttcattctgacatgtatttgratatagagtttctgaatgggtgagtgagagaaactttacatgacaatttcaggtattctgaattcttactggaccatttaaaaaaaaaaacagaaatgagcaattaagctgcatacacagctttttatttatgatggtcttgatattcttacacacayacacacacacamacaaaaaatacagctacttttatgaacaaaagacttcctctcaacagtagagaaaagaactaataaacgagatattcccaatgtctgttttaaataatgtgtttgggctaatgaataaagaaacctttt

SEQ ID NO: 84860 - DNA, 600 bp, Chicken  19866894382928_2
taaaccaaggaatgtttttctgatttttgttcatttaccagtctagagctgcatgggtctgaagaacagaacaacaagtcttctgagattaagtcttacatacaaaaatctcaatgatcctttcattctgacatgtatttgratatagagtttctgaatgggtgagtgagagaaactttacatgacaatttcaggtattctgaattcttactggaccatttaaaaaaaaaaacagaaatgagcaattaagctgcatacacagctttttatttatgatggtcttgatattcttacacacayacacacacacamacaaaaaatacagctacttttatgaacaaaagacttcctctcaacagtagagaaaagaactaataaacgagatattcccaatgtctgttttaaataatgtgtttgggctaatgaataaagaaaccttttggctagtgataattagtgaataatttggactaatgattgagaggtcagttggatcatctgtgaataatgaaagggaaattattctagcatgcactaaatggtgagtcttctaccaaagaggaacagaaaaaatgatttgtcagatgtccatgggggcat

SEQ ID NO: 84861 - DNA, 600 bp, Chicken  19866894382928_3
tgtttttctgatttttgttcatttaccagtctagagctgcatgggtctgaagaacagaacaacaagtcttctgagattaagtcttacatacaaaaatctcaatgatcctttcattctgacatgtatttgratatagagtttctgaatgggtgagtgagagaaactttacatgacaatttcaggtattctgaattcttactggaccatttaaaaaaaaaaacagaaatgagcaattaagctgcatacacagctttttatttatgatggtcttgatattcttacacacayacacacacacamacaaaaaatacagctacttttatgaacaaaagacttcctctcaacagtagagaaaagaactaataaacgagatattcccaatgtctgttttaaataatgtgtttgggctaatgaataaagaaaccttttggctagtgataattagtgaataatttggactaatgattgagaggtcagttggatcatctgtgaataatgaaagggaaattattctagcatgcactaaatggtgagtcttctaccaaagaggaacagaaaaaatgatttgtcagatgtccatgggggcatatcatgggggca

SEQ ID NO: 84862 - DNA, 600 bp, Chicken  19866894382930_1
gaaataaaaaaacccatcaacacgaaacacagcttggaatcagctgctggtttcacggccgcccccagcccagggctgtgagcaggaaggggggctgagcggtgtggcacgcagcatcccctgctcccctgagtcactgcagccccccatttctcagcacctgcttccactacaaaagcagccctctggaaaggctaaggacagttttatctgctagaagtctacgatcacatgaaagcataagtacttaaaatgaagcccttatctgcatttctgtacgacaggcatagcaacagcagyaacacctcctcttttgcagccgtaagcagaaatcgatgtgtttttcatccatctttcagcgaggatgaagcagcacaaatgcagcattgctgtaggccccacctgagccagctgggctgtccgtgtacacagcrgtaccacaggtccctctgtgacaccttcccacgggcgggtgggctgcgtgggcgtaaagcctacaggtgtaacactgaacgacacggacaccttacccaaatcctgacagaacgcccacggtgcagcacaagccgtgctgcgggagggatggaagcccgacaggcc

SEQ ID NO: 84863 - DNA, 600 bp, Chicken  19866894382930_2
cactgcagccccccatttctcagcacctgcttccactacaaaagcagccctctggaaaggctaaggacagttttatctgctagaagtctacgatcacatgaaagcataagtacttaaaatgaagcccttatctgcatttctgtacgacaggcatagcaacagcagyaacacctcctcttttgcagccgtaagcagaaatcgatgtgtttttcatccatctttcagcgaggatgaagcagcacaaatgcagcattgctgtaggccccacctgagccagctgggctgtccgtgtacacagcrgtaccacaggtccctctgtgacaccttcccacgggcgggtgggctgcgtgggcgtaaagcctacaggtgtaacactgaacgacacggacaccttacccaaatcctgacagaacgcccacggtgcagcacaagccgtgctgcgggagggatggaagcccgacaggcccacgggcaggcacctgacggagcctcgcagcaccacacaaccccgacccgkggccgccccgctcagctcggcggggctgcggcgcgcagcgcccctcaggcggcgccctcacgcggactacaactcccagcgtg

SEQ ID NO: 84864 - DNA, 519 bp, Chicken  19866894382930_3
tctttcagcgaggatgaagcagcacaaatgcagcattgctgtaggccccacctgagccagctgggctgtccgtgtacacagcrgtaccacaggtccctctgtgacaccttcccacgggcgggtgggctgcgtgggcgtaaagcctacaggtgtaacactgaacgacacggacaccttacccaaatcctgacagaacgcccacggtgcagcacaagccgtgctgcgggagggatggaagcccgacaggcccacgggcaggcacctgacggagcctcgcagcaccacacaaccccgacccgkggccgccccgctcagctcggcggggctgcggcgcgcagcgcccctcaggcggcgccctcacgcggactacaactcccagcgtgcagcgcggctcccacagccttaaggcgcccccctgcggcggcggctcgtgtggagaagagcctagcccgggcggcagcgggcggcgtcgagcggggctgagcggtgcgggctgctgccctgcggccgggcggggag

SEQ ID NO: 84865 - DNA, 600 bp, Chicken  19866894382932_1
gggagggatggagagaggcaaaaagagtcttaaagcaagaagcgaactttccctgttgcattaaaataacattccgggaggtggaggaagatgagggctcggagcatgcctggaacggatttctgtgagcccggtgttggtgctgccccatccctcgctcccacgtcagccctctgcccgcagtcagtgcggggtccccaggtctgtgggctctgccctgtgccacccacccctatggagctgctgggctcagcctggtccccaacccccagcagccctgctgccgtttggtgccttctyccccggatccccttttcccaccccctacaatgctgatggtgcrctttgctggccgtgcccagacggctcctcgcgctctgcatcccaatcccggccattttggcatcctcagggccgcaccggctgctctggcaccagatgcgatgctacggccccaggccccaaccccatggtagtccccgagccaaccccgctgtccccccaggcccaacctcacacccactcctccgcaccacctcagcagcactgctgggtttattccccygttggtctgagcggtggctgagcagctccgtgccg

SEQ ID NO: 84866 - DNA, 600 bp, Chicken  19866894382932_2
gaactttccctgttgcattaaaataacattccgggaggtggaggaagatgagggctcggagcatgcctggaacggatttctgtgagcccggtgttggtgctgccccatccctcgctcccacgtcagccctctgcccgcagtcagtgcggggtccccaggtctgtgggctctgccctgtgccacccacccctatggagctgctgggctcagcctggtccccaacccccagcagccctgctgccgtttggtgccttctyccccggatccccttttcccaccccctacaatgctgatggtgcrctttgctggccgtgcccagacggctcctcgcgctctgcatcccaatcccggccattttggcatcctcagggccgcaccggctgctctggcaccagatgcgatgctacggccccaggccccaaccccatggtagtccccgagccaaccccgctgtccccccaggcccaacctcacacccactcctccgcaccacctcagcagcactgctgggtttattccccygttggtctgagcggtggctgagcagctccgtgccgtgcccacctcctcgccctgcagctgtcaccgtgctgtgggggc

SEQ ID NO: 84867 - DNA, 600 bp, Chicken  19866894382932_3
cccccagcagccctgctgccgtttggtgccttctyccccggatccccttttcccaccccctacaatgctgatggtgcrctttgctggccgtgcccagacggctcctcgcgctctgcatcccaatcccggccattttggcatcctcagggccgcaccggctgctctggcaccagatgcgatgctacggccccaggccccaaccccatggtagtccccgagccaaccccgctgtccccccaggcccaacctcacacccactcctccgcaccacctcagcagcactgctgggtttattccccygttggtctgagcggtggctgagcagctccgtgccgtgcccacctcctcgccctgcagctgtcaccgtgctgtgggggcagagccagggaatgctgctccgcgttcatcccgtttgcccaaatccgccccctgctgtgacataggttggtgattttggatggcagttgcagcccggctgaagcagccgctgtggaagcagcacttggcttttggagaggtctgtgccgctctgtgtgccgtctgatggctgctggggggggttctccagggctcagtgcagaaccacatgggatggggttt

SEQ ID NO: 84868 - DNA, 599 bp, Chicken  19866894382935_1
  misc_feature (1)..(135): n is any nucleotide
nnnnnnnnnnnnnnnnnnnnnnnnnnnnnnnnnnnnnnnnnnnnnnnnnnnnnnnnnnnnnnnnnnnnnnnnnnnnnnnnnnnnnnnnnnnnnnnnnnnnnnnnnnnnnnnnnnnnnnnnnnnnnnnnnnnnnnnaggaaagtctagaacaacaaaagaaacaacaaaggagcagtgattctttcctttctaagaaaacaattctgaattaactgttcttaatttctgaagccaaatccatgcatggcaaagaatttagagccttagattgtcaaagattcgtattaggtacaaaacackacaatgctgtgcacaagtcacagttcaaaacctttttcatgtttgcataaaatacttgataaaaatagaacatgctgagtgaacgaaacaaacatcttgtgtttttgtataattgcactaagaaagaaatgacagtatgccaccacgtttctgtagagactgtgggtaccttacccaagttttggtttcaatagccaaatgtagaatgatggtgaaaagtgctgttgtggtgatgggagttccccaggagaaaatatccacctccgaatcatagtaagtctgtaaaggagacagaattt

SEQ ID NO: 84869 - DNA, 600 bp, Chicken  19866894382935_2
gtgcacaagtcacagttcaaaacctttttcatgtttgcataaaatacttgataaaaatagaacatgctgagtgaacgaaacaaacatcttgtgtttttgtataattgcactaagaaagaaatgacagtatgccaccacgtttctgtagagactgtgggtaccttacccaagttttggtttcaatagccaaatgtagaatgatggtgaaaagtgctgttgtggtgatgggagttccccaggagaaaatatccacctccgaatcatagtaagtctgtaaaggagacagaatttagcccaagmtgttaccagttctcctcaaaatgcctgaaatagcatgtcttgaaccaaacacttacaaaataagggatgaagaagcaaacgaggctttgatacatagcatcaatcatgttcatccaaaacatgtgtggttgatactcctgtggcacaaaaagaaaagagaagaagaaaatcagagatgctatttgctgggctaggtattttagagtgaacattccaatggaccctttggcttgtgccactgtttccaacactttggtgatcagttaggtacccttgtggatgaatcatgaagtctatctg

SEQ ID NO: 84870 - DNA, 600 bp, Chicken  19866894382940_1
taacaaaatacataaaattatttgccataactagagttagcaccacaccgtgccctccttgtgcccaggtttcagcctagacagcattaacagcacattcatatttagttgcttctgggcaatgagtgcacacctggggcagggcccctgcctttgtaatgtggggcagtaggaggggctgcaatgcaagtggggggtgtatgtggcctgtgggctacaggttggacatgcctgtgcttgaacctcacaggccttaattgctccattcttttcaaagctttaagaacagaagttcccatwgggcagtaacacaaagtgttttctccacagtaacattccatgtttgtttctattttgtacttactggagtaaggttgactagtaatagtctgtttctatgtggargctgtgaaatattaaatgcctagtgatagccactttaagttgctactatttcttgattttcttttctaaggtgatttgacaagagaaaagcatccaactaccagagagatgttctccagtaggtgagtgcaaagagggctctttgtttccagctgccagattattctggtaaagacaccttttagagatatgctg

SEQ ID NO: 84871 - DNA, 600 bp, Chicken  19866894382940_2
tagttgcttctgggcaatgagtgcacacctggggcagggcccctgcctttgtaatgtggggcagtaggaggggctgcaatgcaagtggggggtgtatgtggcctgtgggctacaggttggacatgcctgtgcttgaacctcacaggccttaattgctccattcttttcaaagctttaagaacagaagttcccatwgggcagtaacacaaagtgttttctccacagtaacattccatgtttgtttctattttgtacttactggagtaaggttgactagtaatagtctgtttctatgtggargctgtgaaatattaaatgcctagtgatagccactttaagttgctactatttcttgattttcttttctaaggtgatttgacaagagaaaagcatccaactaccagagagatgttctccagtaggtgagtgcaaagagggctctttgtttccagctgccagattattctggtaaagacaccttttagagatatgctggaaaaatcaaagcaacagcagttatgacagtgtttgtgatcatgtaatattgtcatgaacttccagaagctcacatgagaagcttcataattaaagataatgcct

SEQ ID NO: 84872 - DNA, 599 bp, Chicken  19866894382947_1
  misc_feature (1)..(87): n is any nucleotide
nnnnnnnnnnnnnnnnnnnnnnnnnnnnnnnnnnnnnnnnnnnnnnnnnnnnnnnnnnnnnnnnnnnnnnnnnnnnnnnnnnnnnnntctgaaaacctgaaggatcctggcacttagctcagaaacttcgccacttaacatcacccagatcctgttttatgagcaatcctttcccagaatctctcgtgtcttgcaagtgctgaatccagcattttaaaacagaactctggggagaggaggtaggatggagcgcaagaaaattaacactcacacatctgtcagagatggagacaaagatgrtgaagtccctccgatttaaatcaacgtcacacagtgccaaagctttgatagctcatcagataaacagaaacctgtaagcaacataaatagctaagtaggaaattctatatctcctgactaagatgctataaattattacccaaggcatttaaaaatatttccttgtgttctactgcataaggaaaagaaggacagtaatggcacttaacattagttcctaatttaatacataaataatacaaatcctaattttgtattacatgtaaaattcttcctacaktaaacagcaaagaggtcct

SEQ ID NO: 84873 - DNA, 600 bp, Chicken  19866894382947_2
agagatggagacaaagatgrtgaagtccctccgatttaaatcaacgtcacacagtgccaaagctttgatagctcatcagataaacagaaacctgtaagcaacataaatagctaagtaggaaattctatatctcctgactaagatgctataaattattacccaaggcatttaaaaatatttccttgtgttctactgcataaggaaaagaaggacagtaatggcacttaacattagttcctaatttaatacataaataatacaaatcctaattttgtattacatgtaaaattcttcctacaktaaacagcaaagaggtccttgtggtcttttacaggggcatcactgtctattataactggttttatttaccaattaatcctcttttttaattggggcgatattgtaatacttcccctatcgttctatttaaaatttccctttgtccttaaagaactggttagatttgggttctaattagtttcagtgtccttatgagacttaagaagggggccacacatcagtgcaaatatgcacctcctcttgcaaaaacactcagctgatttgacaatcagtcttctcagattgcaccagataacagtc

SEQ ID NO: 84874 - DNA, 600 bp, Chicken  19866894382958_1
acttgcaaggcaatttcagagttaatctaacaatgcatttattgactcacatcagaaaacacgcaacagaagatggactcctgtccacttaactgcaaagccaactataccgtatagtgagcccagcagctcgtactctaacttctgctcatcctgcaaggtggcagaagagaatccagaaaaatgaaacagaggctcctaacagccacttgtactttatgcctgctgtcagtttcttgtgcttatattaaaacgagagaatggaaaataaaaattaaaaagtgacaacttctgtgtagyacatccctacttacattyaattccactccaaaaagcatcaggtcgctccttccactgcaataatttctccctggaaagcaggagcccttcacacaagcagtagggcaaaccaaaagctttctgtcctaccttgcatactcagactgtataaatgactggccagctaaaggggaaaacaaattactatgacataaagaagaccacgtgcccattttattattgttcctctcctcgcactaccggggtctcagatatagaacactgtctgaagccattttataaacatggggtgtgggtcaa

SEQ ID NO: 84875 - DNA, 600 bp, Chicken  19866894382958_2
gagttaatctaacaatgcatttattgactcacatcagaaaacacgcaacagaagatggactcctgtccacttaactgcaaagccaactataccgtatagtgagcccagcagctcgtactctaacttctgctcatcctgcaaggtggcagaagagaatccagaaaaatgaaacagaggctcctaacagccacttgtactttatgcctgctgtcagtttcttgtgcttatattaaaacgagagaatggaaaataaaaattaaaaagtgacaacttctgtgtagyacatccctacttacattyaattccactccaaaaagcatcaggtcgctccttccactgcaataatttctccctggaaagcaggagcccttcacacaagcagtagggcaaaccaaaagctttctgtcctaccttgcatactcagactgtataaatgactggccagctaaaggggaaaacaaattactatgacataaagaagaccacgtgcccattttattattgttcctctcctcgcactaccggggtctcagatatagaacactgtctgaagccattttataaacatggggtgtgggtcaaacaaccccgggagtctgg

SEQ ID NO: 84876 - DNA, 600 bp, Chicken  19866894382968_1
cagaactaaacaagcaaaaggcttaacctccaagactaccaactaccaactaagattatgcaagcactaaagagacaaatgatagtggatcactgggtgtaaccaagtgacagatggccttaaaggatgcagtgctctccgctggactatattgactgcattgaccagcttaccgctgctgtaaaagtggcctacagaaacaatttcattttcccagaaaaaccctatctcagtaactgaaatatcaaaaatatcatttggacaaaattatgcaagtaaggtttgagaaatacttttttkttgttgtatctccaygcagcacaagtgggtaaaattcatgtcatgcagtaaacagaccattcttactgtggctgtaacataaatcaggtgtaaaggtaccaaacctgaaaggatgaaactctgttctacccaccactkcaaaagcttatgctattgaagaacaggagaccgtaaaaataaaattttaaaaagtaagtacataagaatgctgaagtaaatgaaaatatagcaaaactagtatagaatttctggcaaacagtccagatcagaaagtgctaggatgacaaaaggtgaatgccg

SEQ ID NO: 84877 - DNA, 600 bp, Chicken  19866894382968_2
aaaaggcttaacctccaagactaccaactaccaactaagattatgcaagcactaaagagacaaatgatagtggatcactgggtgtaaccaagtgacagatggccttaaaggatgcagtgctctccgctggactatattgactgcattgaccagcttaccgctgctgtaaaagtggcctacagaaacaatttcattttcccagaaaaaccctatctcagtaactgaaatatcaaaaatatcatttggacaaaattatgcaagtaaggtttgagaaatacttttttkttgttgtatctccaygcagcacaagtgggtaaaattcatgtcatgcagtaaacagaccattcttactgtggctgtaacataaatcaggtgtaaaggtaccaaacctgaaaggatgaaactctgttctacccaccactkcaaaagcttatgctattgaagaacaggagaccgtaaaaataaaattttaaaaagtaagtacataagaatgctgaagtaaatgaaaatatagcaaaactagtatagaatttctggcaaacagtccagatcagaaagtgctaggatgacaaaaggtgaatgccgttaataagaagtgtt

SEQ ID NO: 84878 - DNA, 600 bp, Chicken  19866894382968_3
ccgctggactatattgactgcattgaccagcttaccgctgctgtaaaagtggcctacagaaacaatttcattttcccagaaaaaccctatctcagtaactgaaatatcaaaaatatcatttggacaaaattatgcaagtaaggtttgagaaatacttttttkttgttgtatctccaygcagcacaagtgggtaaaattcatgtcatgcagtaaacagaccattcttactgtggctgtaacataaatcaggtgtaaaggtaccaaacctgaaaggatgaaactctgttctacccaccactkcaaaagcttatgctattgaagaacaggagaccgtaaaaataaaattttaaaaagtaagtacataagaatgctgaagtaaatgaaaatatagcaaaactagtatagaatttctggcaaacagtccagatcagaaagtgctaggatgacaaaaggtgaatgccgttaataagaagtgttggaacagatattagcttgtatctaaatatatgcaagtaaactttagaacgagttaagagctgtcctggatttgtcactaatgttggaaaaattacaggctaaaaatatattacttttctcatt

SEQ ID NO: 84879 - DNA, 537 bp, Chicken  19866894382975_1
tcctcctactgaaccacaaagtgcgattcctgtgctactgttaattacaaacatgagccctaaacccacaaactctctggtgtgtgcaagcaagaaaagggccggctgagccacgtcccccctcctcaccagcacatttaacaacgtgcctacgttaagctgctgcttggtcccttctccaaagcaccaccccgagcccgctgcacgccgtgctcctccacacgaagcccacgatggtgggacgccccgctcccagccgcggcgctctgcagggctccggcgatgccctttgtaccgccraggactgcgctgtgygcgaggactttcctcattgctttgtctcaccctcagaatatgacacagaattcctgaatttcggttctcctcttttccttatctgggtgtttacggctccagtcccgttctccatcatctcgcaccttatctttaggtcagtttgttccttgtcttcgcatgaatgaaatcacacatatggtgctacacagccattagcacgcaccttttcctttaactctt

SEQ ID NO: 84880 - DNA, 522 bp, Chicken  19866894382975_2
acaaagtgcgattcctgtgctactgttaattacaaacatgagccctaaacccacaaactctctggtgtgtgcaagcaagaaaagggccggctgagccacgtcccccctcctcaccagcacatttaacaacgtgcctacgttaagctgctgcttggtcccttctccaaagcaccaccccgagcccgctgcacgccgtgctcctccacacgaagcccacgatggtgggacgccccgctcccagccgcggcgctctgcagggctccggcgatgccctttgtaccgccraggactgcgctgtgygcgaggactttcctcattgctttgtctcaccctcagaatatgacacagaattcctgaatttcggttctcctcttttccttatctgggtgtttacggctccagtcccgttctccatcatctcgcaccttatctttaggtcagtttgttccttgtcttcgcatgaatgaaatcacacatatggtgctacacagccattagcacgcaccttttcctttaactctt

SEQ ID NO: 84881 - DNA, 600 bp, Chicken  19866894382976_1
agcgtacaaatcaataacttgttattaattcctttaggaaatctaatagccattaacaggattcagcgagggggttccactgtttcattttaacgttcaagtaagactccaaatgtaactttgcagtcagctttcatttcagactgtccgaagggcagtccgggtaccgctgctgaggagtccatccatgggtgcagcaggaggccgtgccgtgccgagccgtgccttgcagtgctgctcccaccgcacacagatcagatctgaaagatgccaaatcgtgtgtgtgcttcagagctcagygatgggtgacgggtgccccagaaatacctgcagtttctgaactgaaccctttgaagttcatgcagccctgtaagctgggacagaccaaggtaatttcagcatttcgttgtgtcatcttcaatttaacacacaaattgcttaatgtgggagttgtgactgcaggcacacactgccgtttcctgccctggtttcagcaatattgaatttccccggccctaccaggtcgccaagcctcatggcgctcacagagaccggtcattaggaaggcgagggaaggagaaaggagcagctcctgtgtgt

SEQ ID NO: 84882 - DNA, 600 bp, Chicken  19866894382980_1
agaataaacaaagtaaaagtatttaaatctaaaattgttaagtaatctcttgagaagatgtggctacacattggtgtaggtgaactgctgtgtcatggcctgaactgatgattgagcacctggtgaagggggtggctggctcaggaagcacaggtgcaatcaatccaccacctgtgcttcccatctgaccagattcagggtccacccctccctgggctcatttaagggttagcctccaaagggagaatgtcttctggatgaaggctgtttcctgaggaggagtgttctgtgcttagagakcctcaccatgagttgggtgagtcaccttttttctatgtatgattattgatgttgttaatgaccctttacctagtactgcaaagaacttatcagaagcagttttactgctcctaaggaccaagaattggtaattgaagagctaaggaccaccaattggtaattggtgttcagcctggtacctactctcatctcaacctcatgggtgatgttttattacactgttcagttagatgctgttttatgttatgaaatatatgcaagaccatatgtatgatattcttactaatgacttaatgtcaa

SEQ ID NO: 84883 - DNA, 600 bp, Chicken  19866894382988_1
tgcattacataccgcctctggcaacgtcgggagctgctgcttgtaatggaggcttactcttaaaaaataggatggatttcctccgctctgatgcccagagggaagaggaccatacacattcatagaaattagatctgtacggccctgggagcacctgactttatttaccctcaaatgtcacccatacattcgcatttcattgggaaactgtcaacacaaatgtcaaaatgccttactgtgtgaaacaggggcaatttgctttaaaattaattattcgcttggttttcatatacaaaacamttcacgractccagcaggacaagcttgccttttcatctgcgttgtcttgttatgcaggatcccttcaaatgataacattttcccttcacacagcaaagcccagggaaaaaaaaacccacccttctatgccagcattttatatgtagaactcaccgagcgccagaataatgtaatagtgatgaataatacatagccaaaatggattgtacgtaatctgctgggttatgaatctcagctttgtagctcttctttctaatccgttctattttgttggtttcatctgacaaggctggaaataat

SEQ ID NO: 84884 - DNA, 600 bp, Chicken  19866894382988_2
cataccgcctctggcaacgtcgggagctgctgcttgtaatggaggcttactcttaaaaaataggatggatttcctccgctctgatgcccagagggaagaggaccatacacattcatagaaattagatctgtacggccctgggagcacctgactttatttaccctcaaatgtcacccatacattcgcatttcattgggaaactgtcaacacaaatgtcaaaatgccttactgtgtgaaacaggggcaatttgctttaaaattaattattcgcttggttttcatatacaaaacamttcacgractccagcaggacaagcttgccttttcatctgcgttgtcttgttatgcaggatcccttcaaatgataacattttcccttcacacagcaaagcccagggaaaaaaaaacccacccttctatgccagcattttatatgtagaactcaccgagcgccagaataatgtaatagtgatgaataatacatagccaaaatggattgtacgtaatctgctgggttatgaatctcagctttgtagctcttctttctaatccgttctattttgttggtttcatctgacaaggctggaaataatctcgcaa

SEQ ID NO: 84885 - DNA, 600 bp, Chicken  19866894382994_1
agtttggttgttttttcccccgtacaagtgtacagggggaagggggaatttaaaccaactctgcagtgtttctagactgccctgagctcaacgttcagtaatgcatttcagataggcctgagtgctaactttttgcatcaatgttattaacactattatttggttgggtttttttcattatttattccaacagtgttgtggaatttttggctttaatttggaaacttcagtaactgcagtcaggtatttggaaaaactcagatgtttaaaaaaaacctcaggcattgaaaaacctttaartggcatgccatatttttgcaaactgcttctggttaatttgtcattgaccagaatggagttttctggcctggtcatgtaacggttgtatggaggacaactgtatgtctttggcattcagtaatcatactgttagatattatgagaaaggtttgcatttctcctggtaatggataaatgtgagattgtgggactatattttattattgactttatactcaaagcttctaatttccaaagcactaaagrttgttgttgtatttccctgctttggaaatgctgatccagtttgcctttaccgac

SEQ ID NO: 84886 - DNA, 600 bp, Chicken  19866894382994_2
tttggaaaaactcagatgtttaaaaaaaacctcaggcattgaaaaacctttaartggcatgccatatttttgcaaactgcttctggttaatttgtcattgaccagaatggagttttctggcctggtcatgtaacggttgtatggaggacaactgtatgtctttggcattcagtaatcatactgttagatattatgagaaaggtttgcatttctcctggtaatggataaatgtgagattgtgggactatattttattattgactttatactcaaagcttctaatttccaaagcactaaagrttgttgttgtatttccctgctttggaaatgctgatccagtttgcctttaccgactaattggtagtgattgatggcgatgttctggcctcagttaaggctaacatttgaacagaactgttcagagaggatttacagaatcttcaagttacatttgggcactgaagtatagcagctgaagtcaaagcatacttcacacatttaacttgaaaatctgccgctgtagtcctgttgaaatcctgagatctagaaaaatctccccttgtttttcattagtgcagcattacatttaagaagagctgc

SEQ ID NO: 84887 - DNA, 600 bp, Chicken  19866894382994_3
actgaagtatagcagctgaagtcaaagcatacttcacacatttaacttgaaaatctgccgctgtagtcctgttgaaatcctgagatctagaaaaatctccccttgtttttcattagtgcagcattacatttaagaagagctgcaaggaagtaatctattgtgtacaatagagataaaattatagcgaattttacaggaaaacagtgctattagatttcaaagatgcagcttgaaaagcaaggagagtctgatatatgacttcacagtcagtctgccattaactgtcaaattcatatactytgagtgatgctgttttaygtttgatgctagactctaatgattaaatgcttcatcaactggtctgttagcacatcttcgtcttcatagcgccaaggagaacaaataacattgatcagatattcacttgcatttagaaaagcaatatttcacttgtggagatacgacggagagagagaatgcctccttttgaaagccagacaaataaaatgaacagaatacacctcatcataaatgtaggatggtgggattttttgtaattatggaaagtgacaagtttctcaaacctgctttactacatga

SEQ ID NO: 84888 - DNA, 600 bp, Chicken  19866894382994_4
aagtcaaagcatacttcacacatttaacttgaaaatctgccgctgtagtcctgttgaaatcctgagatctagaaaaatctccccttgtttttcattagtgcagcattacatttaagaagagctgcaaggaagtaatctattgtgtacaatagagataaaattatagcgaattttacaggaaaacagtgctattagatttcaaagatgcagcttgaaaagcaaggagagtctgatatatgacttcacagtcagtctgccattaactgtcaaattcatatactytgagtgatgctgttttaygtttgatgctagactctaatgattaaatgcttcatcaactggtctgttagcacatcttcgtcttcatagcgccaaggagaacaaataacattgatcagatattcacttgcatttagaaaagcaatatttcacttgtggagatacgacggagagagagaatgcctccttttgaaagccagacaaataaaatgaacagaatacacctcatcataaatgtaggatggtgggattttttgtaattatggaaagtgacaagtttctcaaacctgctttactacatgaaggtttttcacattacat

SEQ ID NO: 84889 - DNA, 600 bp, Chicken  19866894382996_1
aaagttttagattagatatcaggaagaatttctcaatggcaggggtgattatacattggaatatgctggccaggaaggtggtgaagtcttcatccctgactttatttaacagatatgtggaagtgctacttcaggacgtggtttacaggtgaacttgtaatgtcaggtgcatggttggacttgagagtcttaaaggtaagtctccaatgtaaccaattatattacaggaaaatatttctcagtatgaatgagatacatattttacaaggacaattttattattactcccaaattcctaarcaatatcatatttagtgaaaggagctcataaacaattttgctgttgtggaggctaatacagtaattyacaaacacatataaagaattctttttgatattttttagacatattcactgaattgcatggaaatttgaatcacttttcaataaatatgtcaatgcccaaataggactcctaataaagttcatattttatttttgmtgatgttcaaatacctgtggtagattgataacattttcttaagttaggtaaccagcttacaactgcatgctacagttcaatctgttttatatttagct

SEQ ID NO: 84890 - DNA, 600 bp, Chicken  19866894382996_2
ggccaggaaggtggtgaagtcttcatccctgactttatttaacagatatgtggaagtgctacttcaggacgtggtttacaggtgaacttgtaatgtcaggtgcatggttggacttgagagtcttaaaggtaagtctccaatgtaaccaattatattacaggaaaatatttctcagtatgaatgagatacatattttacaaggacaattttattattactcccaaattcctaarcaatatcatatttagtgaaaggagctcataaacaattttgctgttgtggaggctaatacagtaattyacaaacacatataaagaattctttttgatattttttagacatattcactgaattgcatggaaatttgaatcacttttcaataaatatgtcaatgcccaaataggactcctaataaagttcatattttatttttgmtgatgttcaaatacctgtggtagattgataacattttcttaagttaggtaaccagcttacaactgcatgctacagttcaatctgttttatatttagctgaatcaacaaagaagatactaaatcatatactttcatatcctgcagtacttggactccatactgatt

SEQ ID NO: 84891 - DNA, 600 bp, Chicken  19866894382996_3
tccaatgtaaccaattatattacaggaaaatatttctcagtatgaatgagatacatattttacaaggacaattttattattactcccaaattcctaarcaatatcatatttagtgaaaggagctcataaacaattttgctgttgtggaggctaatacagtaattyacaaacacatataaagaattctttttgatattttttagacatattcactgaattgcatggaaatttgaatcacttttcaataaatatgtcaatgcccaaataggactcctaataaagttcatattttatttttgmtgatgttcaaatacctgtggtagattgataacattttcttaagttaggtaaccagcttacaactgcatgctacagttcaatctgttttatatttagctgaatcaacaaagaagatactaaatcatatactttcatatcctgcagtacttggactccatactgattagaaattgctttcaactatagcagtaactcaaaatcttgcattcagcattcagtactgtagtggtttggttttatacctgaactgtatcaccgtgttattgccacctagggatttttttttaatttttttttccc

SEQ ID NO: 84892 - DNA, 600 bp, Chicken  19866894382997_1
aagaaactgcagtggtagtagagagagtggggggctgcagcaggaagccctgcacaccccacagcacaaggaggaaaacaaaacaaaacttgcatgtcttcaagcctccctgctgccactacagggcagcgttgggcagatataccctactctgattcatgtctttattggtgtgttgggcaaagtatccatcaggaagcgtgaggcagagaaaagaggtgacaaccaagcagacagaatttcaacactcagctttcacaaataaagcagggaaaaacaataacaaacaagttgggagcytttgaggagaagcagagcactctaaggagcattgggtgatctccaagagaagtgcagagctggaggagacccaaggtggcactgaagaaggggcagcaaggggcatgctgtaggttggcgtggtgaaaatgccccagtggacctcttctcaaaacctgaatgtgttgggcagagaggaagtgctggagggaggatgtgcacataggagatgggagcagttgagtgtgtaggggaaagtggtcctatgtctgcatggtgccacagcacagagctggaagtacgtaacagccaatcttaaaa

SEQ ID NO: 84893 - DNA, 600 bp, Chicken  19866894383015_1
atggctacgtgaatacatgagaagtatacgtgtgagaattcacaatgattgccctgtaggaagagtgaattggtaaagttcattcagttggtttgtactgctcaattgtgcttgttggtactgtgggccctttggctagttattattgcccactgttgttatttacagctgtttcacctctaattcttgctcctatttgtttttgtatagtgtggaaggaggacttatcctccctaaaaaaataagtccaccacaaccttcttcactttacaaatgaaagcaaacaaaaaactcaccccmaaacacctcttttgcagcttttgcacatgtttgagaggtggaacatgcaaagagagatctgtatctgttgcactaaagtgaagtgtccagagaccccaaattatttgcagattggtctgtgacaagagacgagtaataactgtaacaggcggtgctgtgaatctgcaatatacaaaaatagcttttgcagtagctacttcatacacctgaattgttcactatggacttggcagctcttctgtgtttgtgatctttccttgatgtgtggaaaagtacacttgcagccttggctcactacgt

SEQ ID NO: 84894 - DNA, 600 bp, Chicken  19866894383016_1
aaaagctttgctagatgaaacctttgtgcatgtggatggctttcgctcctctttttcatttcattgcacccagactttgaggggcgtaggtagcacagaagaaacagcactggtacgtgcctctgactcatcattttgctgccatttgtccattcctcactgatggccacagcaccaggagccacaaacgcgtgcgtctcggccagggatgcccatggggcacatctcgaccaacagcatcaggtggcacacgatgaaggtgcaaagcaaaaggagatgaaagggccccagcccccagcrctgcccacacacagctctgcagcagcactcagagctggagatctctgctgctgggagcacagagccagcacacagctgctgaaagacgcaaccagaggggcactcaaggcttgcaacctgaaattaagagtctttatcaaccatcttttccattccaaaagacctttttttgttgttgttttcttctctctctctctctttttttttcttttttaaatgaggagacaaatgtcaggcttgactcattcttcatgaaatgcacccgtgaaatggagcgctctattttaagaatcgccacct

SEQ ID NO: 84895 - DNA, 599 bp, Chicken  19866894383022_1
  misc_feature (1)..(111): n is any nucleotide
nnnnnnnnnnnnnnnnnnnnnnnnnnnnnnnnnnnnnnnnnnnnnnnnnnnnnnnnnnnnnnnnnnnnnnnnnnnnnnnnnnnnnnnnnnnnnnnnnnnnnnnnnnnnnnnaatgaagctcgattgctggacatgtaggcactgtaggtaacacgcttatattgttttaactacatattttagagcttctgcagggccacttgggcaatcaggaaaattattccccattatgtgcctgtagcgtgagggggcatgggaactgatcaatgggacagagtatgtagatctatgatttattaraactgtcaagtaaatagttgttcatgtcttgatcatatgctcaagagcaaacctgtcactgtatcttggaggaggatggaagcttcctccaagaccacaacaatataggctgataggcctaaagatcttaggctcctttctctgtattggatcatggcattcaccttctaggattctctgggtattgcagtaacaggtggttgctgaagacaagatcgtggtctcccatgccctgtcctcatgacaaattctaagagtggcttttgtcattccttctaataattgtaaaaaactcattg

SEQ ID NO: 84896 - DNA, 600 bp, Chicken  19866894383025_1
tattttgtccacagaaagcattgttttttcgttcaaaatgttatagattacttaacagaaaggtataatgactttcaagtatcaccaggcctcctgcaaggtcagagaaaacatagtcgaaaggtgtaaggggtcttacatgtatgcttttcaataatgtttatcccatgaatactcaggagttcccagtgacgtgaactacaattgaagattttttataatgctctcctgaccgttgggcactatctttttggaactgatcaaaaaagtttcaactaaaacacacagaggagagcaacwtcttttagcaacatctctttgtgttagttcagtagctatccaagtagcaacagcctcataataccgatctctctaattccaaggcaatagaaaatgcatagaagagcaaatatggataaagacaagctgtcctttactgctgaattagcaaatttgcttagttttaggcaaacataaatattctgggaaatcaacatggagaatttcctagtggagaaacaaagaaatccatttaagatccatactgcagtctgatgtatcaggtgctgtaaatattacagcataatacacataattaca

SEQ ID NO: 84897 - DNA, 600 bp, Chicken  19866894383027_1
gctcacatccactgttggatcaccgtaaacattcagcaaatgtcaatgaatgtcagttggtgccattttttcttcatgaaagaattcaattccacacctttgtttcatatgcacttccatgccagttgctattttgtcagactgcccctctgctgctatctgtcacatggcaacaaaacgtaacagaatattgctgggatgattcaacctctactgccggaccaccaatgtctgcctctgatgtcgtgggccaacataataaagaaggaagcattactttcagaacagccgttgcacgtytcctggaatcacactcttctcatcatgcatctatgcaaaaaatagtatgacaactgatgatgtcatgatgtcatggttttgtaacttcgctatctgaaaaattttgaaaaagagtccaaagatttcctatctaggagagtaaaaaatattcttgttgctaatgcttttccataagcagtggtaaaatagtgaggaaggcaataacatttcttgcaggaccaactaccgtatatctagaatattcagtgttcacaaatgatttcaatttcatgcactactatctgctgctgagtagtctct

SEQ ID NO: 84898 - DNA, 600 bp, Chicken  19866894383027_2
cttgttgctaatgcttttccataagcagtggtaaaatagtgaggaaggcaataacatttcttgcaggaccaactaccgtatatctagaatattcagtgttcacaaatgatttcaatttcatgcactactatctgctgctgagtagtctctactcaagtgagaatgatgatctacagattagatcattacgcaaaataagaaatattgaattaagtgctttattttttttcctgtgtttctttcccttagaaaggttatttctatctctatttagttgaaagatgctttaaaaaagaaaaygacttcacaataaagaaatgacagtcagtccttccattttgcataactatagcagcctgttgatcaatctggtgtgtgacagagctcaagtctgataatttgatgggtttttttcataatttacacttttgttcacaccattcttaattccaatatttgatattttaataatttgacagttacattttctggtttcaacttttgaatttcagtaaaagtttggattgccaaagatttctcatactcgtggtccagaaaatacactggcatttgattgaaagtttcctttcttgcatcagc

SEQ ID NO: 84899 - DNA, 599 bp, Chicken  19866894383029_1
  misc_feature (1)..(40): n is any nucleotide
nnnnnnnnnnnnnnnnnnnnnnnnnnnnnnnnnnnnnnnntgcagataacagagaacatgggaatgagcacatcgcccaacaccagattttctcctctcagcatcctaacagagcatggcacacttcttccagtcgccctctccagtgctctcaaaggtcacagcgtatgcagtcaggaaaggagcattttctctcatccatttctgcctgtggcacctcaatgagccacagcacactgcacacgtagccacgaccaagagaggagtccacgaatacacacaccctgaccagcataatcwagaggtcaatgctgctgaagtccagactggtgaaacacagcctgaaagggacagaccaacactgcagctgtgtgcacaggactggcaycaggtgctgcagcctgctctcatgagatgaggaagcaagccaagtccccccccccgccgccccagcacattcttttccattttgtcccaagtcctgctgctacacacctgagggttcagccgggccagctcctctattttctgccacatttcttctcgttccttcatcctgaaccttcccctgcagagagagagcacacaagtgtgaactc

SEQ ID NO: 84900 - DNA, 600 bp, Chicken  19866894383029_2
tttctcctctcagcatcctaacagagcatggcacacttcttccagtcgccctctccagtgctctcaaaggtcacagcgtatgcagtcaggaaaggagcattttctctcatccatttctgcctgtggcacctcaatgagccacagcacactgcacacgtagccacgaccaagagaggagtccacgaatacacacaccctgaccagcataatcwagaggtcaatgctgctgaagtccagactggtgaaacacagcctgaaagggacagaccaacactgcagctgtgtgcacaggactggcaycaggtgctgcagcctgctctcatgagatgaggaagcaagccaagtccccccccccgccgccccagcacattcttttccattttgtcccaagtcctgctgctacacacctgagggttcagccgggccagctcctctattttctgccacatttcttctcgttccttcatcctgaaccttcccctgcagagagagagcacacaagtgtgaactcctgggggcagcacagctttcaccaacaggaagacaagaacagaaatagcagaagagcacaggtaagggaagagctgctcagcccttcag

SEQ ID NO: 84901 - DNA, 600 bp, Chicken  19866894383030_1
ttggtccccacacctccctgctacccgcaggcacatgggcagcaaggtgctggtccaacagagggtggtgatgcattggaacatgttgcccaaggagcctgtggataccccagtcctggaggcattcaaggccaggctggatgtggctctgggcagcctggtctgctggttggcaaccctgcacatagcagggaggttgaaactagatgaacattgtggtccttttcaacccaggccattctatgattctatgaacaagccgtcacccagcaaaacagacttcttacatttttccttccyccaagtactgcacagcccataaatagctttaaaatgcaaccagaatcttcttctaccttcgtgctcttttccctctgcaggaagcagggctcactctgctctccggagtttgtttgttgccctaggagacacgctgacaagcatcacaagctttgaaagtcaattgctcgctggagttgaaaatgtgttttcaggtatctggctgataggtcctccaccaggaggatgtgtctggaatgctgagtgaggcagccgagcctggccccggggcagcgacgggagatggctgcgctccgatgt

SEQ ID NO: 84902 - DNA, 600 bp, Chicken  19866894383037_1
aaaggaaagcagtttaatatttatgcacatgcacagaaaagcatgaagacattcttcaggaccttttctttccaacagtgccgctgttacacaaaggctgctctaaaggtatttttaatgtcaaacagaaaatgcaattaatgtgtgatttaatcacagtctcacggagacagacatcactacagttctggatattgcttctcgtagattttatttgtccttgtgattcttgtttgtctccactcgtggcagacaaacctactcatactctcctgagtgattttgtcctttggcctaaargtccataagactgcagctgtgttgacttctcatctccagcagcaaggaacttggagaagtgtccaccttcttcaaagcagaaatctttgctaaagtttttttctagtattttcatcgtatagtgactgctataaggacattttatttcaactgcagggccaatctcacaccttctttctttagctttcttttcctagtcctggcatgaagacatcttgttgtctcagctatgcgatttctagctatcccactgtgttagtcattcttctccttgatcatcacagccatggtctctggatc

SEQ ID NO: 84903 - DNA, 599 bp, Chicken  19866894383038_1
  misc_feature (1)..(44): n is any nucleotide
nnnnnnnnnnnnnnnnnnnnnnnnnnnnnnnnnnnnnnnnnnnnatctttagaggagcccaagtgctgcatgcagttctcctcctgtttaaattatgcatgacttgcacggttaataaagcagaaaacgtaagtattcagaacatgatggttatcctcccgacaaacttagagttgcaagagaaagaacggctcattgagaaggctgaggtgtgcacggagcatttgtaagcagataaatggcatcacatcaaagccgtgggagtttgtgagcctggggggtggatctccaggtgccacrctgccctggatggggcacacgatgtccccggggtccccaggctctgccaccgcccctgaaatcatagaatcacagaatggcctgggttgaaaaggaccacaatgctcatccagttccaaccccctgctatgtgcagggtcgccaaccagcagcccaggctgcccagagccacatgtgggcgatacttctccctgcaacagcccccaggttagaggtgctgcccatcccatcctgcctgcaggtgtggataccattagggcaggtgtcagtgcttcctgatcccaagtgctgtgaggagc

SEQ ID NO: 84904 - DNA, 600 bp, Chicken  19866894383041_1
ttgtttttcctttagagattaactcactgttggtgtgagcggattaattcagaataattaagtcaggactgggattagccattggtttttatccatttgtagtttattctaatcatgagttctgtggtcagtggtgttctaggcttgtgggaatgcactctccctttctttcccagcatccacagaaccgtacagtttccagtgactggaaacctgctgcttaagtagagatgtgggatcaaggggccaatttagctgataccctattccttgtgtagtcagttagcagtgcaaggtaawacccttctagtctggctacaggatctaccagacacagaaccagaactatctcatccgtgaaactggaaaaaaaagagctgacacggaagaatgaatggagaaccattagtatgaggtctgagttgagtgttaaaacaaaaaaacatgctggtttaaaattgttgcaaaaacaataaatcagctatcttattctgaaggcagcagtcacgctttctggtaaaaagtgtgagtgaatatgctgcctaaatgaataaaatcagcccttttccaataatcgtccagttccacaatttgtccagt

SEQ ID NO: 84905 - DNA, 600 bp, Chicken  19866894383045_1
cacttgtttgtttgccctctgtccctcctttctgactatcagtctgaaggcagattaccaaccctttttcaacagtccctatcatgtcctagaatttgatttcttttcatttttgaccggtgttttattctggtatcagggtaacattcacaaataaaagacaaaaataattagattactgacagccacctcccaataaatattacatcacacataggttagatacgtagttattctagcattaaaattaagctatgtgtgctgctgcactcccctcagtagcactgcatttttacagcrtgttgagcatcatgatctgaatgaacgttgaaatggaaacaaaccattttaattgtaggctatggatcactgctggccatctatgcataaacatgtaaaagagactgaactaacagctgccatgtrttaaaaaggtaccaatctagcaggatgcagtttaagatatctcttaaatacaatactcccttttcataatcctgtgtttattttccatcacatcattgctgtcagacttgacatttttgtttttcaggcagaattttgactgaaaataatatgagttctacgcatggagtagtt

SEQ ID NO: 84906 - DNA, 571 bp, Chicken  19866894383045_2
attctggtatcagggtaacattcacaaataaaagacaaaaataattagattactgacagccacctcccaataaatattacatcacacataggttagatacgtagttattctagcattaaaattaagctatgtgtgctgctgcactcccctcagtagcactgcatttttacagcrtgttgagcatcatgatctgaatgaacgttgaaatggaaacaaaccattttaattgtaggctatggatcactgctggccatctatgcataaacatgtaaaagagactgaactaacagctgccatgtrttaaaaaggtaccaatctagcaggatgcagtttaagatatctcttaaatacaatactcccttttcataatcctgtgtttattttccatcacatcattgctgtcagacttgacatttttgtttttcaggcagaattttgactgaaaataatatgagttctacgcatggagtagttgctgatttgggatgtaagtgtattgctcacaaggggaaattaatcattacaagagaacactctaccataatgttctctcagctataaagctgctcta

SEQ ID NO: 84907 - DNA, 599 bp, Chicken  19866894383053_1
  misc_feature (1)..(82): n is any nucleotide
nnnnnnnnnnnnnnnnnnnnnnnnnnnnnnnnnnnnnnnnnnnnnnnnnnnnnnnnnnnnnnnnnnnnnnnnnnnnnnnnnnctgttctctaatttgaagtagtggtcaagaggaggacattataacacagaaataggctgaaattctttgaactgaggtaacatgctgatatgagccaaggtccatgagcagagacagagagatatgggctctctgtgtagacagaaaacggctacggacaacccaagaacaaactggcaaatggatgcacaaaatcaaagacattcacagcatctcaycacaaggaagggaggtaaaacctgcacaggttagccaagcagcagcaagagagttatgaaagattaaacactgcttcaaatcctgtatgcaaaagtactcagattcgaaatggatcacagaacatcttgcctctgaatctgctttacctgtcttaattgaaatccttaattaaaagcaaaaccctctaaaacagtctgataagaatttcattgcatcagccttgctaagtgaatctgtaaaagtgatgttgcaaacaagacctaccagatttgaaatacagggtcaattctggaagcat

SEQ ID NO: 84908 - DNA, 600 bp, Chicken  19866894383053_2
agatttgaaatacagggtcaattctggaagcatgctactcttccacataaccgtatgaactaagctgaaggaaaattattctgttctacaccctgctgaagaaataggcactgaagtgtatcaacatttgttatccgtaatgtcaccatcctactttccaaagagataatgactgaagactgtcatattgtttgagagcatttgagaaaatctcaaagtacttcagatggacaaagcatccatcacaactttcattaactgttttcttatctcccgctcttgggggagaaaatacaatcycatcttatttacatagcatgttgtaggaataaataracaacaacaagatacagcacccaatcaatagaggacagcagctcctaagaagtgaatacaaacatcaataaattgcatttggagaaaagatgagaaaatgtaaccaggctgtattccaaattaaagtgggatattgtttctctgccaaacactgtcaacaatgcagggaaggtacagctcagcatggggcactgtaacaagatggtctcaaaggaagcccacttcaaaaacagttcacagcatgcaaacttaagacactgtatt

SEQ ID NO: 84909 - DNA, 600 bp, Chicken  19866894383053_3
actcttccacataaccgtatgaactaagctgaaggaaaattattctgttctacaccctgctgaagaaataggcactgaagtgtatcaacatttgttatccgtaatgtcaccatcctactttccaaagagataatgactgaagactgtcatattgtttgagagcatttgagaaaatctcaaagtacttcagatggacaaagcatccatcacaactttcattaactgttttcttatctcccgctcttgggggagaaaatacaatcycatcttatttacatagcatgttgtaggaataaataracaacaacaagatacagcacccaatcaatagaggacagcagctcctaagaagtgaatacaaacatcaataaattgcatttggagaaaagatgagaaaatgtaaccaggctgtattccaaattaaagtgggatattgtttctctgccaaacactgtcaacaatgcagggaaggtacagctcagcatggggcactgtaacaagatggtctcaaaggaagcccacttcaaaaacagttcacagcatgcaaacttaagacactgtattaagaagaaaaaaatcagtaacttttatgcagtccat

SEQ ID NO: 84910 - DNA, 600 bp, Chicken  19866894383059_1
ttctctgtctgcaaaatcaaggtctttgtcgtatacttgacccctgaactatagctgggaagttaatcttgcacgatacttggtagttgctggatacctttcagcccttaaagcattcaggattaaacatttagagtgtacatgtgtagaagcccatgtggggaaaagggggctgctgcacagagaccaatggtacgcttgctcaagatcatctggtggtgcagagatataattccacattgaggtggcccaagctctaccctggggtaaggcagcatctttctctgccatattttgttrtccatcagcaacctgagcttctaaaatgctaaagaaaggtagtgttgagtaagctttccttatgtrtatctttccttattcatatctgttacccgttccccatctggttttcatagcaaaaaggagcccagggagagtgtgagggacaagtgtgagatgtccttaagcagctagctgaaccaaggcgagttgagcagtttctgaaaaccagaacatgaagtttccacacaggcttccttagagacctggaaaaggaaggcatcaataaatacactgcctttgcgagacagaatgagcagt

SEQ ID NO: 84911 - DNA, 600 bp, Chicken  19866894383059_2
tcttgcacgatacttggtagttgctggatacctttcagcccttaaagcattcaggattaaacatttagagtgtacatgtgtagaagcccatgtggggaaaagggggctgctgcacagagaccaatggtacgcttgctcaagatcatctggtggtgcagagatataattccacattgaggtggcccaagctctaccctggggtaaggcagcatctttctctgccatattttgttrtccatcagcaacctgagcttctaaaatgctaaagaaaggtagtgttgagtaagctttccttatgtrtatctttccttattcatatctgttacccgttccccatctggttttcatagcaaaaaggagcccagggagagtgtgagggacaagtgtgagatgtccttaagcagctagctgaaccaaggcgagttgagcagtttctgaaaaccagaacatgaagtttccacacaggcttccttagagacctggaaaaggaaggcatcaataaatacactgcctttgcgagacagaatgagcagtagtggaaagcagttgggagccagttagttatttatctgaaagaagtacagtatgttacttttccac

SEQ ID NO: 84912 - DNA, 600 bp, Chicken  19866894383059_3
ctgttacccgttccccatctggttttcatagcaaaaaggagcccagggagagtgtgagggacaagtgtgagatgtccttaagcagctagctgaaccaaggcgagttgagcagtttctgaaaaccagaacatgaagtttccacacaggcttccttagagacctggaaaaggaaggcatcaataaatacactgcctttgcgagacagaatgagcagtagtggaaagcagttgggagccagttagttatttatctgaaagaagtacagtatgttacttttccacctctgctaggggacttagraagacaaatgccttttacttcctgcctgagagragttaagctctttctataaaaagaatgaatttggaaaacgtctggcatgtttctgtgtgcgtgcataatggtctgtgtcttttatcagacagagctttaggagatacaaagttcatgtgtgcatgagtctgtcattaccagaaagactttggcaaattgcagagaattcagacagctgcaacgaaagtgattaatacgctagagaggagagattaagaattacatacgaatggtttgtctgaatgagagagaagaggggaaaagaag

SEQ ID NO: 84913 - DNA, 600 bp, Chicken  19866894383059_4
aaaaggagcccagggagagtgtgagggacaagtgtgagatgtccttaagcagctagctgaaccaaggcgagttgagcagtttctgaaaaccagaacatgaagtttccacacaggcttccttagagacctggaaaaggaaggcatcaataaatacactgcctttgcgagacagaatgagcagtagtggaaagcagttgggagccagttagttatttatctgaaagaagtacagtatgttacttttccacctctgctaggggacttagraagacaaatgccttttacttcctgcctgagagragttaagctctttctataaaaagaatgaatttggaaaacgtctggcatgtttctgtgtgcgtgcataatggtctgtgtcttttatcagacagagctttaggagatacaaagttcatgtgtgcatgagtctgtcattaccagaaagactttggcaaattgcagagaattcagacagctgcaacgaaagtgattaatacgctagagaggagagattaagaattacatacgaatggtttgtctgaatgagagagaagaggggaaaagaagagggtgatgctaaaactgccaatcctgtactga

SEQ ID NO: 84914 - DNA, 600 bp, Chicken  19866894383064_1
tgggctgcacttattcatcaatgactcagctccttggtcaacatgcttttggttatgtcttgcccctgttttattaatcagcaattactgaatgcacctctaatagcttgctcttatttcaaaggcacctttgttttatcactgcattagtacaactcttgaactaagacaccaaagattattaaataatgttacactgaacttttcaactgatatctgtaaatgcacatatgcttcgatgttacaggtctacctaagcccaaggactttgcatcttttagtctttatttcaaaattcartgtttagaagcacttttcaaaamcagtattacaatagaaattatttgaaagctgtaaatagttgacaaggaaacaaagaacaaataatcattataaagtattctggccccaacaggaaaaatctgtacattttacatcaggtatagaagatcaactgaatttcagagtttttctatgcttaatacatagtaaaagcacatttgaaatctaggaagtcaaaagtctgtgggtgcctatattgaagacagtgaatttctcatgcatgcaactcttcgaaaaaatggatcaaaattgggtttg

SEQ ID NO: 84915 - DNA, 600 bp, Chicken  19866894383064_2
actcagctccttggtcaacatgcttttggttatgtcttgcccctgttttattaatcagcaattactgaatgcacctctaatagcttgctcttatttcaaaggcacctttgttttatcactgcattagtacaactcttgaactaagacaccaaagattattaaataatgttacactgaacttttcaactgatatctgtaaatgcacatatgcttcgatgttacaggtctacctaagcccaaggactttgcatcttttagtctttatttcaaaattcartgtttagaagcacttttcaaaamcagtattacaatagaaattatttgaaagctgtaaatagttgacaaggaaacaaagaacaaataatcattataaagtattctggccccaacaggaaaaatctgtacattttacatcaggtatagaagatcaactgaatttcagagtttttctatgcttaatacatagtaaaagcacatttgaaatctaggaagtcaaaagtctgtgggtgcctatattgaagacagtgaatttctcatgcatgcaactcttcgaaaaaatggatcaaaattgggtttgtttttatattattcctatattta

SEQ ID NO: 84916 - DNA, 600 bp, Chicken  19866894383064_3
gtaaatagttgacaaggaaacaaagaacaaataatcattataaagtattctggccccaacaggaaaaatctgtacattttacatcaggtatagaagatcaactgaatttcagagtttttctatgcttaatacatagtaaaagcacatttgaaatctaggaagtcaaaagtctgtgggtgcctatattgaagacagtgaatttctcatgcatgcaactcttcgaaaaaatggatcaaaattgggtttgtttttatattattcctatatttacaaatactttaggatgtattaatctccagrtgcctgtctgtacattcctaacraagtggtatgtgtggcaagttcaacagaggtgggagaaattacttgctggaatccacaacacgtcacaatccatcagccatttatacaaactcagcaacaacaaagcataccttaatcacccaatgattctgaacttccaaagtgccagagggctcatgagtcccaagtgctgggttttgtacaaatatcagccagattacaaagagctagatgcaggcaggaatgttcaaagaaacactgagacaacagcggaatgaacatatagtgagttagtta

SEQ ID NO: 84917 - DNA, 600 bp, Chicken  19866894383064_4
agaacaaataatcattataaagtattctggccccaacaggaaaaatctgtacattttacatcaggtatagaagatcaactgaatttcagagtttttctatgcttaatacatagtaaaagcacatttgaaatctaggaagtcaaaagtctgtgggtgcctatattgaagacagtgaatttctcatgcatgcaactcttcgaaaaaatggatcaaaattgggtttgtttttatattattcctatatttacaaatactttaggatgtattaatctccagrtgcctgtctgtacattcctaacraagtggtatgtgtggcaagttcaacagaggtgggagaaattacttgctggaatccacaacacgtcacaatccatcagccatttatacaaactcagcaacaacaaagcataccttaatcacccaatgattctgaacttccaaagtgccagagggctcatgagtcccaagtgctgggttttgtacaaatatcagccagattacaaagagctagatgcaggcaggaatgttcaaagaaacactgagacaacagcggaatgaacatatagtgagttagttacagtacaacagttcaattagtta

SEQ ID NO: 84918 - DNA, 600 bp, Chicken  19866894383070_1
aaatgttggctatcacatctttaatggatgataaacgacgtagttcttatgcacgttgttgcagttcgtagcctgactcaataatatattggaaaattatatgatttaacacctcaaacattctgaatataaaagcttaaaaaggttaatctagattgaatgaaagtcataaaaaacaaaattatacatgtgaaaataaataatttggatcaaatctgacttttgtggatccaatcagaatattgcctaactggattaaaagaggtcatatgagttacagagcccaactcatttctaagrtttttttttttttttttttcatgggagtttgccgtattgcaagtcataatgcagctcattaatttctcatgcttaccttaaacaattttaggttaaaaagtccttctctcttattatgtggagacgtcttatacaccacggctcctccatccctctcatggatctaattatacataggatggactccagtttcaattttgtcatagaatctctaaatcatgagttccaagaaaaagtctgtgttggataaatgattggcagctatttggtttctgtgtatatgctttattgctgttgttg

SEQ ID NO: 84919 - DNA, 600 bp, Chicken  19866894383070_2; identical to SEQ ID NO: 84918

SEQ ID NO: 84920 - DNA, 600 bp, Chicken  19866894383073_1
tacattcttctactgctgctgatgaaagagtaagaaagatttaaagggagatggatctcccttctgcagttattgctgccatcctggtaaacgcagggtcagaaagtcttctcagtaaggatagcaataggccctggtctagtacagccacttcctaacagctcaggatatttttctttaaaaagaagtaacgcagaagttgcttaggtggtggagaatggggactatatgggcttaaggaggcagaggtgggatttcatattccagaggatatgaaatggggaaacgagaggggatggygcttcaggatatgatgggaaagtgaaagaatcccttgcaggtgccttaagcttaattaatgcatttcaacccatctgctgtgcagtctcctcaaatcttctctctcccccacagtatcttgcatctctcgtcatcctcccccttcccacccccccaacacacacacccctcagatttcaccacctgcatctgtatcttctctcaaatgctgcaaatgtctgatgcgattgaatccaactagtgcagaagtctgaggctgagcagtctatacacatggattagatttctggatcaaggctg

SEQ ID NO: 84921 - DNA, 599 bp, Chicken  19866894383080_1
  misc_feature (1)..(168): n is any nucleotide
nnnnnnnnnnnnnnnnnnnnnnnnnnnnnnnnnnnnnnnnnnnnnnnnnnnnnnnnnnnnnnnnnnnnnnnnnnnnnnnnnnnnnnnnnnnnnnnnnnnnnnnnnnnnnnnnnnnnnnnnnnnnnnnnnnnnnnnnnnnnnnnnnnnnnnnnnnnnnnnnnnnnnnnnctggcactgagggatgtggtccctcagtaggcatggtggggatgagttgggtttggacttggtgatcttagagctcttttccaaacttaatgattctatgattctatgataaggatacatctaccctaaccragtcctctgtcatatatacatatacctgggtggctgtttcccctgtggattttatttccgtaacttcctctgtttgctttctgaagcctygtaaattttggacatccaaagcatcttgagatgaggagtgctgtgggtgacagcatgaactgtgaaaaggattcttcctttgtatatcccctttcagtttattttcacatcattgctaaaaaaaaaatgcaaataatcaagtcttgagcttttgaaaaaaacttkctgttagatrtgagaagaaaataattatctgtactatgaaatgg

SEQ ID NO: 84922 - DNA, 599 bp, Chicken  19866894383080_2
  misc_feature (1)..(78): n is any nucleotide
nnnnnnnnnnnnnnnnnnnnnnnnnnnnnnnnnnnnnnnnnnnnnnnnnnnnnnnnnnnnnnnnnnnnnnnnnnnnnnctggcactgagggatgtggtccctcagtaggcatggtggggatgagttgggtttggacttggtgatcttagagctcttttccaaacttaatgattctatgattctatgataaggatacatctaccctaaccragtcctctgtcatatatacatatacctgggtggctgtttcccctgtggattttatttccgtaacttcctctgtttgctttctgaagcctygtaaattttggacatccaaagcatcttgagatgaggagtgctgtgggtgacagcatgaactgtgaaaaggattcttcctttgtatatcccctttcagtttattttcacatcattgctaaaaaaaaaatgcaaataatcaagtcttgagcttttgaaaaaaacttkctgttagatrtgagaagaaaataattatctgtactatgaaatgggtkaagttttacctgcaaccctatatccactctggcagacttcaccttaagaaagtcagaagcatattggaggaagtccagggtacagca

SEQ ID NO: 84923 - DNA, 600 bp, Chicken  19866894383080_3
taatgattctatgattctatgataaggatacatctaccctaaccragtcctctgtcatatatacatatacctgggtggctgtttcccctgtggattttatttccgtaacttcctctgtttgctttctgaagcctygtaaattttggacatccaaagcatcttgagatgaggagtgctgtgggtgacagcatgaactgtgaaaaggattcttcctttgtatatcccctttcagtttattttcacatcattgctaaaaaaaaaatgcaaataatcaagtcttgagcttttgaaaaaaacttkctgttagatrtgagaagaaaataattatctgtactatgaaatgggtkaagttttacctgcaaccctatatccactctggcagacttcaccttaagaaagtcagaagcatattggaggaagtccagggtacagcaagtgtggcaggtgttaaaaagtgacctgaatgaatcactgaatcactgagctttctttgaccagaaataaaaaggctgaagagaggacataatggtcaggcactctgaagaaagtactgcatataaaaagactatgattgttgttcattgtgttttagaaatactc

SEQ ID NO: 84924 - DNA, 600 bp, Chicken  19866894383080_4
atgattctatgataaggatacatctaccctaaccragtcctctgtcatatatacatatacctgggtggctgtttcccctgtggattttatttccgtaacttcctctgtttgctttctgaagcctygtaaattttggacatccaaagcatcttgagatgaggagtgctgtgggtgacagcatgaactgtgaaaaggattcttcctttgtatatcccctttcagtttattttcacatcattgctaaaaaaaaaatgcaaataatcaagtcttgagcttttgaaaaaaacttkctgttagatrtgagaagaaaataattatctgtactatgaaatgggtkaagttttacctgcaaccctatatccactctggcagacttcaccttaagaaagtcagaagcatattggaggaagtccagggtacagcaagtgtggcaggtgttaaaaagtgacctgaatgaatcactgaatcactgagctttctttgaccagaaataaaaaggctgaagagaggacataatggtcaggcactctgaagaaagtactgcatataaaaagactatgattgttgttcattgtgttttagaaatactctttgaggcag

SEQ ID NO: 84925 - DNA, 600 bp, Chicken  19866894383080_5
tcctctgtcatatatacatatacctgggtggctgtttcccctgtggattttatttccgtaacttcctctgtttgctttctgaagcctygtaaattttggacatccaaagcatcttgagatgaggagtgctgtgggtgacagcatgaactgtgaaaaggattcttcctttgtatatcccctttcagtttattttcacatcattgctaaaaaaaaaatgcaaataatcaagtcttgagcttttgaaaaaaacttkctgttagatrtgagaagaaaataattatctgtactatgaaatgggtkaagttttacctgcaaccctatatccactctggcagacttcaccttaagaaagtcagaagcatattggaggaagtccagggtacagcaagtgtggcaggtgttaaaaagtgacctgaatgaatcactgaatcactgagctttctttgaccagaaataaaaaggctgaagagaggacataatggtcaggcactctgaagaaagtactgcatataaaaagactatgattgttgttcattgtgttttagaaatactctttgaggcaggacacaaagtaataagattcctttacaggaaaggaga

SEQ ID NO: 84926 - DNA, 599 bp, Chicken  19866894383091_1
  misc_feature (1)..(131): n is any nucleotide
nnnnnnnnnnnnnnnnnnnnnnnnnnnnnnnnnnnnnnnnnnnnnnnnnnnnnnnnnnnnnnnnnnnnnnnnnnnnnnnnnnnnnnnnnnnnnnnnnnnnnnnnnnnnnnnnnnnnnnnnnnnnnnnnnnnaaaagctgcaaacttctgtgtcttgattctggcaattgaaaggggatttttcctctctatcagatcagagacagttaacaaattcagacctcattccagacgttactgtgattgaatttcactttctgttcaatcaagggccttcctcagaagggtgcaaatgtataaycttcaaaatttcagtctgagggatgttctgagaatatttctgttgaggctgatctctgctcaggtgatctcacctgtgggtcacctgcttctgtttctcctatgatacagacaacatctgtagaattggttgttttsatctttgcaaccctgcttcagggyaattastaatattaatttatagctttcctacagtatcattcacattgaattatagcatgagtatatataccacgtttctcctaatggtaccttttgttatttgcaagagtaatttctctctgaataagttcagtggcc

SEQ ID NO: 84927 - DNA, 600 bp, Chicken  19866894383091_2
tgcaaacttctgtgtcttgattctggcaattgaaaggggatttttcctctctatcagatcagagacagttaacaaattcagacctcattccagacgttactgtgattgaatttcactttctgttcaatcaagggccttcctcagaagggtgcaaatgtataaycttcaaaatttcagtctgagggatgttctgagaatatttctgttgaggctgatctctgctcaggtgatctcacctgtgggtcacctgcttctgtttctcctatgatacagacaacatctgtagaattggttgttttsatctttgcaaccctgcttcagggyaattastaatattaatttatagctttcctacagtatcattcacattgaattatagcatgagtatatataccacgtttctcctaatggtaccttttgttatttgcaagagtaatttctctctgaataagttcagtggccccagagaactcctgcttggcttccagctgctcttgagagaggagtgaagcactgtgttgacgttgtcagcatcagattcttcagaattggaatgcttcaagttttgaagaagtttgcagccttttcgtaccctgacgc

SEQ ID NO: 84928 - DNA, 600 bp, Chicken  19866894383091_3
ggcaattgaaaggggatttttcctctctatcagatcagagacagttaacaaattcagacctcattccagacgttactgtgattgaatttcactttctgttcaatcaagggccttcctcagaagggtgcaaatgtataaycttcaaaatttcagtctgagggatgttctgagaatatttctgttgaggctgatctctgctcaggtgatctcacctgtgggtcacctgcttctgtttctcctatgatacagacaacatctgtagaattggttgttttsatctttgcaaccctgcttcagggyaattastaatattaatttatagctttcctacagtatcattcacattgaattatagcatgagtatatataccacgtttctcctaatggtaccttttgttatttgcaagagtaatttctctctgaataagttcagtggccccagagaactcctgcttggcttccagctgctcttgagagaggagtgaagcactgtgttgacgttgtcagcatcagattcttcagaattggaatgcttcaagttttgaagaagtttgcagccttttcgtaccctgacgccatatgtgacgttggcagcattct

SEQ ID NO: 84929 - DNA, 600 bp, Chicken  19866894383091_4
tgaaaggggatttttcctctctatcagatcagagacagttaacaaattcagacctcattccagacgttactgtgattgaatttcactttctgttcaatcaagggccttcctcagaagggtgcaaatgtataaycttcaaaatttcagtctgagggatgttctgagaatatttctgttgaggctgatctctgctcaggtgatctcacctgtgggtcacctgcttctgtttctcctatgatacagacaacatctgtagaattggttgttttsatctttgcaaccctgcttcagggyaattastaatattaatttatagctttcctacagtatcattcacattgaattatagcatgagtatatataccacgtttctcctaatggtaccttttgttatttgcaagagtaatttctctctgaataagttcagtggccccagagaactcctgcttggcttccagctgctcttgagagaggagtgaagcactgtgttgacgttgtcagcatcagattcttcagaattggaatgcttcaagttttgaagaagtttgcagccttttcgtaccctgacgccatatgtgacgttggcagcattcttggaat

SEQ ID NO: 84930 - DNA, 599 bp, Chicken  19866894383092_1
  misc_feature (1)..(123): n is any nucleotide
nnnnnnnnnnnnnnnnnnnnnnnnnnnnnnnnnnnnnnnnnnnnnnnnnnnnnnnnnnnnnnnnnnnnnnnnnnnnnnnnnnnnnnnnnnnnnnnnnnnnnnnnnnnnnnnnnnnnnnnnnnnactgaaactttaagagaaggtaattagagggaaaaaaaaaaaacaacatagggaagaatgaggaataaaaaggagaaaacagagggagttggaagaaaaaatgtgctcccctgtgcattatgtggttgaacctggtctggtgttcaagctccatgagctctgccattcctacaacaragatcatccatgatgccagctgggtgatgacatgatgacacgtctgatgaaggcagatagtctggccaatagcctgagggacggagatctgcacgctgggttggtggctgcaatcatacaaatgagccgtctagagcagagggaggaattgatataagttcagtgatggaattctttttcttctttgtgtcccacacttcccagtgctcatggagagttaaaggttaaagaaactaaagtcacaaagtgtaatccatgagcatgcttgtctccttcactgtgcttaaaacacctggcct

SEQ ID NO: 84931 - DNA, 600 bp, Chicken  19866894383092_2
tgaggcagagtgaacaggtcatcccctgtatgctcaggacctctctcttgcttgctgcatcacctaaggtgcagggaagttaaccacaaccttatggggaatgtggctgtatgctgtcctgggaaatggtacttttcctctttgctgcaaaatttctgtgcggtaccgggcacatttttgaaacctgccttgataggggtggtgactgcctgggtgttccttgtcttacacgtgtgtgggtggagatttcaggtctgacgtgaaggagtgcagagttctcacagctgtaactgaggtaaygtatagtgtgcttttaaggcagaaagtatagtaccaagtaaactgagaattcaggtcccagggaatacacagaagtaatggaaacttctgaccttaatcgctttatgcttcggtttcctatgtgttgattgtcccaccccctcacattgcaggacttacaaagattggctaatatgcagaaatactcggatgctgtagcaatgaggccagaccaagagactccgagtaattttattttcagagccagttttgaatagtaggtaaagcatgaggctaggcgaaagaccgaatagcagctca

SEQ ID NO: 84932 - DNA, 600 bp, Chicken  19866894383097_1
tgttgcaggttagctttcagcaactcctgatacatcctttcagtttgataggcaagattcccaatatttagtgctaggtgggcttcacagtaagtattaatttagatttccatcaacttagctatgagaacagcatatgggattgttaagataccttttttctgttggttcttaccatgcagtactttgattgtcctagataccagtttgattcaccattacatgttttttttttttaaatccacataagctgtaatttatttatgaaatctgggtattaacctagagaaagaaagcatraatatgctttttgatatatatttaagttctgtttatcataattaaatcattttcttcttacagctcaattaaagatagacatatctccagctccagagaatccccattactgcctgactccagagttgctgcaagtcaaactttacccagacagcagagttagacctacaagagaaatcctggagtttcctgccagggatgtctacgttccaaataccacatacaggttagttttgaaatacgtctcacatttcaaggcctgagattggcaggtccagagattcttactttatcagctgg

SEQ ID NO: 84933 - DNA, 600 bp, Chicken  19866894383106_1
aaccctgatttttaaaatttcatactagctgtgtcttggcagtctcttcttgtgcttgctcagcacctcaggttttgtgcagctaaggatgatgactgagggtggtaatatcgaggcttcttgctgcccctgtcaatgagatgctaagtacctctgctggcccaggctgatgcttacagggagttggaaatgaagggcactggtgaggttttgatgacttctttaaagcagagtaggaatcttttacagaattttctgctatgggtattcaaagcagctcgcacttggaattgcaagaaycttattggagcratgagaaattaatagcaataaggtttttatgcagcaaagatattaaataaagcaggtggtcgttcttactatcctgcrgtagtgttgtctaatgtagagtcagtttttattttacatttatgttaaggtattctaatctcagcaagttctttttctagctctctcgttatgttagaagtattccagttgcatctaagggtttaggttttctgtaataggtagtgaattttctagttaacaaaatggagcctgaatctcttgactcatctgtacaaaktcagcttctct

SEQ ID NO: 84934 - DNA, 600 bp, Chicken  19866894383106_2
taaaatttcatactagctgtgtcttggcagtctcttcttgtgcttgctcagcacctcaggttttgtgcagctaaggatgatgactgagggtggtaatatcgaggcttcttgctgcccctgtcaatgagatgctaagtacctctgctggcccaggctgatgcttacagggagttggaaatgaagggcactggtgaggttttgatgacttctttaaagcagagtaggaatcttttacagaattttctgctatgggtattcaaagcagctcgcacttggaattgcaagaaycttattggagcratgagaaattaatagcaataaggtttttatgcagcaaagatattaaataaagcaggtggtcgttcttactatcctgcrgtagtgttgtctaatgtagagtcagtttttattttacatttatgttaaggtattctaatctcagcaagttctttttctagctctctcgttatgttagaagtattccagttgcatctaagggtttaggttttctgtaataggtagtgaattttctagttaacaaaatggagcctgaatctcttgactcatctgtacaaaktcagcttctcttcagctgcaagg

SEQ ID NO: 84935 - DNA, 600 bp, Chicken  19866894383106_3
gatgactgagggtggtaatatcgaggcttcttgctgcccctgtcaatgagatgctaagtacctctgctggcccaggctgatgcttacagggagttggaaatgaagggcactggtgaggttttgatgacttctttaaagcagagtaggaatcttttacagaattttctgctatgggtattcaaagcagctcgcacttggaattgcaagaaycttattggagcratgagaaattaatagcaataaggtttttatgcagcaaagatattaaataaagcaggtggtcgttcttactatcctgcrgtagtgttgtctaatgtagagtcagtttttattttacatttatgttaaggtattctaatctcagcaagttctttttctagctctctcgttatgttagaagtattccagttgcatctaagggtttaggttttctgtaataggtagtgaattttctagttaacaaaatggagcctgaatctcttgactcatctgtacaaaktcagcttctcttcagctgcaaggcttaggtactttgtcagtcactgaattatagttggtctctgccctcatcctatttctccctttcatcctcttgatact

SEQ ID NO: 84936 - DNA, 450 bp, Chicken  19866894383106_4
attgcaagaaycttattggagcratgagaaattaatagcaataaggtttttatgcagcaaagatattaaataaagcaggtggtcgttcttactatcctgcrgtagtgttgtctaatgtagagtcagtttttattttacatttatgttaaggtattctaatctcagcaagttctttttctagctctctcgttatgttagaagtattccagttgcatctaagggtttaggttttctgtaataggtagtgaattttctagttaacaaaatggagcctgaatctcttgactcatctgtacaaaktcagcttctcttcagctgcaaggcttaggtactttgtcagtcactgaattatagttggtctctgccctcatcctatttctccctttcatcctcttgatactgtgtagccttcttcccacgccccgacagaaatcgctgggctatgagggc

SEQ ID NO: 84937 - DNA, 600 bp, Chicken  19866894383107_1
catgaagacagctaagttccttcaggcttcttgaaaatacacagtgaggtagaggatgaagggaaattgctgtagggggcttatcatgaaggcattccattttgcttcttaatgtatgaatattcatgctaattctttgtctgcttaaaagagaaatgtaaccacaaccttcttataacataaactcaaacagcaagacactgacactaaggaacatggtttagttcactgaccttgggatgtcaggttgatggttggatgtgatgatcttgctggtcttttccaacccaaatgagtctwtaaatgtgtaacctgcttaacaagctgtggtattggcattagcttttttgaccaggcactgatacatatgccgtattttaaatgctcatttgctttgtacaactgcattaaaaattgtagctattgttttaccatatatcctcttgtcctgtagccaatatactgcaaatacaaaatagagctgattatgatgtaaggtaaaacatgtatgtggaaaacatgaattctaaaaatgactgctttgggacgtttgagtttcactaccagtatttaaactactagtcgtccccccccccccct

SEQ ID NO: 84938 - DNA, 600 bp, Chicken  19866894383108_1
aaggctgcaatgaggtcaccctgcagcctttttcacttgagaaagagaagctttttttgggggggaactgttgagttgggaactgaacccactgattgatcacttggggaaaggactgggtcagccctgggagcacacatgaaggcaattcactcgtgtgactggaaggggtggagcctagctgcactcctcttagagtccatttaagggttgactcaatcaaatattatgagatcagatcaaaaaattggaacaacaacttggtatactgatggggaagaaatcaaagctaattttctyagtaaagcaggcccayaacattacatcagatgatacccaggctcctaaattgatggaccggtgtacaaccatagtagatgatcatcaaatctcgtttattgtttcagctgcgtgtacatttatagcgcggataataggctcatacatattgctaagtggagctcaggattggctcgctagtcagtgtcaactacccctatctttgtgctctgtggttatctctcagcaaacactctcttactgacttctcaaaacactgttgccggctttctccatctgcatccttttttgttccttgtt

SEQ ID NO: 84939 - DNA, 600 bp, Chicken  19866894383108_2
caccctgcagcctttttcacttgagaaagagaagctttttttgggggggaactgttgagttgggaactgaacccactgattgatcacttggggaaaggactgggtcagccctgggagcacacatgaaggcaattcactcgtgtgactggaaggggtggagcctagctgcactcctcttagagtccatttaagggttgactcaatcaaatattatgagatcagatcaaaaaattggaacaacaacttggtatactgatggggaagaaatcaaagctaattttctyagtaaagcaggcccayaacattacatcagatgatacccaggctcctaaattgatggaccggtgtacaaccatagtagatgatcatcaaatctcgtttattgtttcagctgcgtgtacatttatagcgcggataataggctcatacatattgctaagtggagctcaggattggctcgctagtcagtgtcaactacccctatctttgtgctctgtggttatctctcagcaaacactctcttactgacttctcaaaacactgttgccggctttctccatctgcatccttttttgttccttgttctcatacctgaccttg

SEQ ID NO: 84940 - DNA, 599 bp, Chicken  19866894383111_1
  misc_feature (1)..(187): n is any nucleotide
nnnnnnnnnnnnnnnnnnnnnnnnnnnnnnnnnnnnnnnnnnnnnnnnnnnnnnnnnnnnnnnnnnnnnnnnnnnnnnnnnnnnnnnnnnnnnnnnnnnnnnnnnnnnnnnnnnnnnnnnnnnnnnnnnnnnnnnnnnnnnnnnnnnnnnnnnnnnnnnnnnnnnnnnnnnnnnnnnnnnnnnnnnncaataaaacacacagaacagatggaggcaaaaaccaagatgcacagaaggagataaagaccatcattttaactatttatttatttattggctttgcatcactgggaggggggrggggattttgtatggyttttggagtttaagtcatcatcttgttcttagaactattgcaaataaaataagtttgtgtatcagtgaatattaacacaaaaaatccagggtmtctgcaagttttgtcattaagcaaaaccactgaatcatattagaaagagagcttgtgaatataaatttgtctattttaaacggagtttgccacgatttaaaacagttatggtcaagcctaaaacccaatccagatcacataataaatctgaaggatttgttgcggagtctccttctgtggagatattcaa

SEQ ID NO: 84941 - DNA, 599 bp, Chicken  19866894383111_2
  misc_feature (1)..(171): n is any nucleotide
nnnnnnnnnnnnnnnnnnnnnnnnnnnnnnnnnnnnnnnnnnnnnnnnnnnnnnnnnnnnnnnnnnnnnnnnnnnnnnnnnnnnnnnnnnnnnnnnnnnnnnnnnnnnnnnnnnnnnnnnnnnnnnnnnnnnnnnnnnnnnnnnnnnnnnnnnnnnnnnnnnnnnnnnnnncaataaaacacacagaacagatggaggcaaaaaccaagatgcacagaaggagataaagaccatcattttaactatttatttatttattggctttgcatcactgggaggggggrggggattttgtatggyttttggagtttaagtcatcatcttgttcttagaactattgcaaataaaataagtttgtgtatcagtgaatattaacacaaaaaatccagggtmtctgcaagttttgtcattaagcaaaaccactgaatcatattagaaagagagcttgtgaatataaatttgtctattttaaacggagtttgccacgatttaaaacagttatggtcaagcctaaaacccaatccagatcacataataaatctgaaggatttgttgcggagtctccttctgtggagatattcaagacccttctggatgcc

SEQ ID NO: 84942 - DNA, 599 bp, Chicken  19866894383111_3
  misc_feature (1)..(78): n is any nucleotide
nnnnnnnnnnnnnnnnnnnnnnnnnnnnnnnnnnnnnnnnnnnnnnnnnnnnnnnnnnnnnnnnnnnnnnnnnnnnnncaataaaacacacagaacagatggaggcaaaaaccaagatgcacagaaggagataaagaccatcattttaactatttatttatttattggctttgcatcactgggaggggggrggggattttgtatggyttttggagtttaagtcatcatcttgttcttagaactattgcaaataaaataagtttgtgtatcagtgaatattaacacaaaaaatccagggtmtctgcaagttttgtcattaagcaaaaccactgaatcatattagaaagagagcttgtgaatataaatttgtctattttaaacggagtttgccacgatttaaaacagttatggtcaagcctaaaacccaatccagatcacataataaatctgaaggatttgttgcggagtctccttctgtggagatattcaagacccttctggatgcctacctgtgcaacctattgtagggtacctgctttagcaggggggttggacttgatgttctcttgaggtcccttccaacccctgtgattctgtga

SEQ ID NO: 84943 - DNA, 599 bp, Chicken  19866894383120_1
  misc_feature (1)..(204): n is any nucleotide
nnnnnnnnnnnnnnnnnnnnnnnnnnnnnnnnnnnnnnnnnnnnnnnnnnnnnnnnnnnnnnnnnnnnnnnnnnnnnnnnnnnnnnnnnnnnnnnnnnnnnnnnnnnnnnnnnnnnnnnnnnnnnnnnnnnnnnnnnnnnnnnnnnnnnnnnnnnnnnnnnnnnnnnnnnnnnnnnnnnnnnnnnnnnnnnnnnnnnnnnnnnnccattttgatagaaaccaaaggtcaaagagttaaaccacatatatctgaattcagaactgcattcggaagtttggatttgtaatgaaatggatttrtaaatgaaatttttatttatcagactgtattgaaatctggaaaagaattgcagtttaatccagtttatctggcttacaaggattgggcaggggttattttttgttgttcttgttttttaagattgactactatgaaagagaaatgagagaaatctacttttcaaatgacttttcattgaaaatctagcaccaaataaaaaatgagtgtgctatggaaaacactgggtttgaatttccttccccaggtaatcactgcacaaagccactttagaatttaaaatgcaggatggatgagcagg

SEQ ID NO: 84944 - DNA, 600 bp, Chicken  19866894383120_2
attgaaatctggaaaagaattgcagtttaatccagtttatctggcttacaaggattgggcaggggttattttttgttgttcttgttttttaagattgactactatgaaagagaaatgagagaaatctacttttcaaatgacttttcattgaaaatctagcaccaaataaaaaatgagtgtgctatggaaaacactgggtttgaatttccttccccaggtaatcactgcacaaagccactttagaatttaaaatgcaggatggatgagcaggttaggaatgagtaagagaagaaaaaaacwctcatctgcatgggagagagtggggcttctgcttcaatgtgacaataccatattgttcaggaactctaattctaaatgttgcccaaaccattgctgttattgttttgagtacattaattttgcttaaattcagcagtgtttccaacagtatggcttattttcagtaaaacgagattttcttagggaaatatgagtaaccatgtgagaaattgctgaaaattttccatgtgaagttatgagatctctattaatgtatctaagtattctatttgtcttaagatttacagtgtctatcagtaa

SEQ ID NO: 84945 - DNA, 600 bp, Chicken  19866894383128_1
gccctagtgcatacagcccaatctcaaaggcgcagaggtgaaggttgcggtgtggtccctggtgcccaccactggaggaagggtgggtgaagatggaggtactgctgtttccacctgctttgataaggactgtcttggccaattcaaagtagaagtgggcagctgcctctgaaggctggttcgggacatgaggagcatggctctccagccgcctccctttatacctagagaaaacaagaggaaattctcagagagcaatggtactccaagttctctagctcaggtgcaaagttcctatawttaggatccagagaaaacaaagaaacttttccaggaaagcatttcctaatgcacacatacatgctagtcccctgacatcagagaaggctgcctctacgcatcatgtactattcattacctgccaacctccacagtttttgcacgggctcccccactggctctcctactgccactggaagaggaagatcccagtgaatcacttgaagaactgctgatgctgtcgctgtcttgtcctctgccccaggatgttgttgcccaccccccacgtaggggacgccgactgagcgttggagaactgtc

SEQ ID NO: 84946 - DNA, 600 bp, Chicken  19866894383130_1
aaactaatcttaaaacaataaataaataaagtgaatgtctgaatacaaagccctgaaaattgttttgcaatgctcctgataagtggagccagcaactgattactcatcattttcacatggaccctctaggagatacctaatcttgtgtctttcagagagaaaaacaaaatttcccagtctggacaagaatagcttcttatccttactgcaaatatgggagtgtttgaatacaactgttgttttagtggcacccatgctgtgtgtggatataaaaacataatgctttctttggcacaaatrtcttttgccctgaagatctcagaccatttcagtattgacctacacatgctgttctatttatatgaaagtcaatgaatacctatgtgtgctagtaaggtgaagaaatgtttgcctaaacaagacctaagtgtttgtttacatggggaagtcagtgcaaaatgcatccccatacctgactgcacagtaaattcctcagtagtcaacaggatgcagtctagctcaaaccttcagtaagcatgaaaacccaactagattttgttgcccgaataatatattaaataaatgaatacttttcttgtg

SEQ ID NO: 84947 - DNA, 599 bp, Chicken  19866894383139_1
  misc_feature (1)..(66): n is any nucleotide
nnnnnnnnnnnnnnnnnnnnnnnnnnnnnnnnnnnnnnnnnnnnnnnnnnnnnnnnnnnnnnnnnntctcccaagttaggcccacagaaacagtgaagagatggatagattagtctgtggcttctgggctggctgggagttatgccccagtcaactaccagcatttgcactatttccacttttaccacttacagtctcatgtgttgccattaaaatttttttctttctctagatatccacttttcactctgaactgtgaatctaaaatataaagagggaatttggaagaaagggtttttytgttctttttttttggtatctattccatatttctgacaaattccaccatacattctttaacttactgttcttaataagcaaaattgtgagcagatggagtcttctattcctatactattttcattattttcatttagatttattgaagtacaatgttttaataatctaacttgctagaaaatatctgtaaaatggaaacacagtttttcctttttcagacttcatgctccacatttagtcttcaygtagctaaatttttggtcaacakaaaaatgctcttacaccccattataggatgg

SEQ ID NO: 84948 - DNA, 600 bp, Chicken  19866894383139_2
actctgaactgtgaatctaaaatataaagagggaatttggaagaaagggtttttytgttctttttttttggtatctattccatatttctgacaaattccaccatacattctttaacttactgttcttaataagcaaaattgtgagcagatggagtcttctattcctatactattttcattattttcatttagatttattgaagtacaatgttttaataatctaacttgctagaaaatatctgtaaaatggaaacacagtttttcctttttcagacttcatgctccacatttagtcttcaygtagctaaatttttggtcaacakaaaaatgctcttacaccccattataggatggactattacacattttttatcagaaatagcccctctgtaccctcatgtattagcaattaataccctcctgttgcaccctctgttgtttcctcgtactgtttaatatagtttaacttcaggtgtcttgttgaaatgattaggttaaaaacaaccctgtgttttttaaaaactttgatttacaccagttcagcttgcttgacttttaactgttaaactgatgtaggcttgtcaccagtaaggctgtttg

SEQ ID NO: 84949 - DNA, 600 bp, Chicken  19866894383139_3
ataaagagggaatttggaagaaagggtttttytgttctttttttttggtatctattccatatttctgacaaattccaccatacattctttaacttactgttcttaataagcaaaattgtgagcagatggagtcttctattcctatactattttcattattttcatttagatttattgaagtacaatgttttaataatctaacttgctagaaaatatctgtaaaatggaaacacagtttttcctttttcagacttcatgctccacatttagtcttcaygtagctaaatttttggtcaacakaaaaatgctcttacaccccattataggatggactattacacattttttatcagaaatagcccctctgtaccctcatgtattagcaattaataccctcctgttgcaccctctgttgtttcctcgtactgtttaatatagtttaacttcaggtgtcttgttgaaatgattaggttaaaaacaaccctgtgttttttaaaaactttgatttacaccagttcagcttgcttgacttttaactgttaaactgatgtaggcttgtcaccagtaaggctgtttgtgagtttattacagcttcccctt

SEQ ID NO: 84950 - DNA, 600 bp, Chicken  19866894383141_1
tattggaagggaaggcattttgtattttgtttctatgcagcattctcttagttttgtttttatggaatattcgttggtttggagcccaagtcctttgtgtctgagctacaggtactcatcagaataacacaacaaagaccagttttcacttggattgactgtgaatgcaaaactgtgagctctgtgcttagcctgcatgtatggcattgtacagttgaagtcacctgtctcactaccaccagagctgcctgtctggtttgtcagctactgtatagcttgccaagatgaactgtgtctttstaatgctctgtgtagtgttgtggccaaaattcgtacatggttgagaatctgtgtatgatattctaactaatgcgtatgtggtaatggcttctatgtagttgatacgaaaaatgtaggttgcttcytattgcttaaaaaacaagagtaccttctctgcagttttctgtccatgggccccaaattggtagttcaagggataggtgtaggagaaacaattatagtaaaaatctgtttataaataattttgttagcccgcggagttatacagagttttcatggaaatggaaagttcaagtgcgt

SEQ ID NO: 84951 - DNA, 600 bp, Chicken  19866894383141_2
aacacaacaaagaccagttttcacttggattgactgtgaatgcaaaactgtgagctctgtgcttagcctgcatgtatggcattgtacagttgaagtcacctgtctcactaccaccagagctgcctgtctggtttgtcagctactgtatagcttgccaagatgaactgtgtctttstaatgctctgtgtagtgttgtggccaaaattcgtacatggttgagaatctgtgtatgatattctaactaatgcgtatgtggtaatggcttctatgtagttgatacgaaaaatgtaggttgcttcytattgcttaaaaaacaagagtaccttctctgcagttttctgtccatgggccccaaattggtagttcaagggataggtgtaggagaaacaattatagtaaaaatctgtttataaataattttgttagcccgcggagttatacagagttttcatggaaatggaaagttcaagtgcgtagtaataatagcatggtgagtgcttactggagtggtgaaagcagatcctagaagacaaatcaggagcactacagtcttcatgtttttcaaatcttaaacaggatggtagttagtggttcagtggt

SEQ ID NO: 84952 - DNA, 600 bp, Chicken  19866894383142_1
aaggttggctgacaccagaatagagagggtaggaaatgtgctcctcaatttgagtaacgggttctgttcttcttctggcaaaacgcctaacactgagcacgttgcttaatatctatgctctccagttttcttgcctcttaaacagaggcaatagctctctaaaatgggcccgagaacatttaaaaggcaactggtttgttcttatcctgacattgtcattattagtcagaaaaaaacagtcgctcatctcccaagtcctgtgctaaactgagaggcacatctagggaagtgacaaaatcygaacacccagcatgctgctacaagagacgsggtggcaaatgggcctctcataaactgcaaaggctaaagactgcttcagccttcactccctgtgggaagaacctggctggcctagacttgtaaaaatcacagcaccttgaagtggtacctggaaacttctgtctgccaggaaggcacctggtgcaggggagcaggaattccccactatgatcacaggatttcgattgcagcacagtatgcaactcggctggcacttgtgattcctgtaatctgctgctccacgtgcccaggtttggagat

SEQ ID NO: 84953 - DNA, 600 bp, Chicken  19866894383142_2
aggaaatgtgctcctcaatttgagtaacgggttctgttcttcttctggcaaaacgcctaacactgagcacgttgcttaatatctatgctctccagttttcttgcctcttaaacagaggcaatagctctctaaaatgggcccgagaacatttaaaaggcaactggtttgttcttatcctgacattgtcattattagtcagaaaaaaacagtcgctcatctcccaagtcctgtgctaaactgagaggcacatctagggaagtgacaaaatcygaacacccagcatgctgctacaagagacgsggtggcaaatgggcctctcataaactgcaaaggctaaagactgcttcagccttcactccctgtgggaagaacctggctggcctagacttgtaaaaatcacagcaccttgaagtggtacctggaaacttctgtctgccaggaaggcacctggtgcaggggagcaggaattccccactatgatcacaggatttcgattgcagcacagtatgcaactcggctggcacttgtgattcctgtaatctgctgctccacgtgcccaggtttggagatctttggttgctctactttctactcagcatc

SEQ ID NO: 84954 - DNA, 599 bp, Chicken  19866894383148_1
  misc_feature (1)..(44): n is any nucleotide
nnnnnnnnnnnnnnnnnnnnnnnnnnnnnnnnnnnnnnnnnnnnttttgattccctgaattccatcagttctgatgaatttcactaacataaaacttaagtattgttgaatcaagactatattttggagatgttttattacagacttggtaaggaacattcaagtacatgcttttaactaattatgtattgacttaacagaatctgaagctgattttttttttttaactaatatttcaagattgagctgacatcagcctagagcaaagaaatacaatgcaaacacatgccagtatctgtstctctctccagttttggctgcagactcaaggcaaaaagagttcagtgtggtttacaattagagactcgtgaaattcaagcctgtgagttcctctgagagtacgggcttatctgcccctttaacaatgttatgatgtagtcgggggattgaactcagtctstacaggtcccttccaacctctgcaattctgtgtttctgtgaaacagatccatcaaataaatgcacacatttgtttggaattttttttgctggtgtgaatattttatacatctatactgttttttctttatagcaattat

SEQ ID NO: 84955 - DNA, 600 bp, Chicken  19866894383148_2
caagtacatgcttttaactaattatgtattgacttaacagaatctgaagctgattttttttttttaactaatatttcaagattgagctgacatcagcctagagcaaagaaatacaatgcaaacacatgccagtatctgtstctctctccagttttggctgcagactcaaggcaaaaagagttcagtgtggtttacaattagagactcgtgaaattcaagcctgtgagttcctctgagagtacgggcttatctgcccctttaacaatgttatgatgtagtcgggggattgaactcagtctstacaggtcccttccaacctctgcaattctgtgtttctgtgaaacagatccatcaaataaatgcacacatttgtttggaattttttttgctggtgtgaatattttatacatctatactgttttttctttatagcaattatttctgattgcttttgaaagtactctaaaagtttcaatagtcctttgctgtaatgaaaataagcaaaagatatgtagtttatttttttgtatacagctcttgaatttttgtacacaatctatcacagctttctgaagtgataaagcacaataaggaagagaa

SEQ ID NO: 84956 - DNA, 600 bp, Chicken  19866894383150_1
gcaagtctgaaggtaaaatttgacttttctttcaccaggaacaccagcaaggatgcaacaatggaggtcatgtgctgaagatttagctgaaatctatgctgaaagataaaatcaaaacccacgtaccaggaggaaaaatctctatggagcatcctgccagcccagcagtctctgcagagggctggtaactggcaccagggcaggggaccactgccccaaagtaccccagctggcagggcacagagagcctgagccttgctcctagccatgatgcaccaagcaggatgacaagtatggcaycccagggtgctgctgccccagccactgtacaaacagcaaccaaagggcagcagagacagcaggggatgggtattttccacagggtcagccccaaggggagctggggaagatgagctgttatctgcagccagcagctgggcttgggttggtttggctttaaagatgcagcatttttctagcccacaatgcaaagttctgctggcgtatttatttcagcaaggagtgtgagatcacacatcccttgccaaaagayttgtgtcacgatgaatctctgacgacaagagagcgtttttataccac

SEQ ID NO: 84957 - DNA, 600 bp, Chicken  19866894383150_2
ccttgctcctagccatgatgcaccaagcaggatgacaagtatggcaycccagggtgctgctgccccagccactgtacaaacagcaaccaaagggcagcagagacagcaggggatgggtattttccacagggtcagccccaaggggagctggggaagatgagctgttatctgcagccagcagctgggcttgggttggtttggctttaaagatgcagcatttttctagcccacaatgcaaagttctgctggcgtatttatttcagcaaggagtgtgagatcacacatcccttgccaaaagayttgtgtcacgatgaatctctgacgacaagagagcgtttttataccaccttaatttatatcactgtgaggaggtgtagctccgtccactgccggcccttttgccaacacaccgcattctgcgctctgcccacgcagcccttcctctgccagcagaggttatcataatgtctctgtcaaataccaagcagacgcttgaccttagctctgccacagtgtcttggtcctgaaacaactgctgcatgcacatggcgaggtaactgtgagcagaacaggacaaagattgcatcactgggggtgagg

SEQ ID NO: 84958 - DNA, 600 bp, Chicken  19866894383152_1
aattaacatttaaatagcattcattgcaaaaaaaaaaaaaagtatgttggagtatgacaatggcaagatcattaatttcagatactgatactgcttttgagaatcacccatatatagtcacccagtctttgacttatcctctgtaaaacatcaggtgccctttcaaacttcaaggccttggtttttgtgcagatgagcctgccctggctcctctctgtccattacacgggattgcctaaatcctggaaataccactggactctcacaatttaaaggaggcagaataaaactgtttgagartgaaaaataaacaatacttaaagaaaagtaaaaatgatagtctgctactatttgcacggatgaattgcaaaggagatatggccaagaaaaacctcccacccatagctatgcagctggcagggataataagcctagactctcctgtcacagcttttcttccttcccatgcccatacatctacaatggaaaaacgaaagacagctgaggaacctgagtgtgatctttaccttccatctaaatttaaatacaatgaatgccactcttctaattgcctggagctttattctgtcaataaagaca

SEQ ID NO: 84959 - DNA, 599 bp, Chicken  19866894383155_1
  misc_feature (1)..(55): n is any nucleotide
nnnnnnnnnnnnnnnnnnnnnnnnnnnnnnnnnnnnnnnnnnnnnnnnnnnnnnnttagcttggtgtcacctgcaaacttgctgagggtgcacttgatgccatcatctatgtcattaatgaagatgttgaagagcactggtcccaagaccgacccctgagggacagtgcttgtgaccggccttcaccctggcacagaatcattgatgaaagccctttgactgcgaccagccaaccaattcttaatcctctgaacagtccatcttgcaaatccatacctctctaatttagagagaaggatrtggtgagggaccacatcaaaggctttgcaaaagtccaggtagatgacatctatcgcccttctcccatccaccaatgctgtcactccatcacagaaggccacagattggtccggcaagatctgccgttggtgaagccatgatggctgtcttgaatcacctctttgtcttgtatgtgtcttaacatagcttctaggaggatctgctccatgaacttcccaggcagataggtgaggctcgccagcctgtagttccccaggtcatcctgggatggatattatctggtcctatggaccaataca

SEQ ID NO: 84960 - DNA, 454 bp, Chicken  19866894383155_2
tccagcctcagggttaggaccaccaccaagaggcagccaccactacacagcatcctccccaacagactgacatcctcctccccaccatcccccaaggggagggaacaggggcctggttgactattcaacacagggatgcacatgctcaggcttctaccgcatccaagggacaaacaccaatgcaccattcagcaaggactgcctcttgcttcgccttattctttaggttcatcatggagggcacacaaactcttcacctttctgcagggcccagctccctcacacatctacgtgtccacrggcatctgcagagcacatctccttgccctctggcatatgaattgtaccaggatctggaaggagacatagagacaaatatatcagtgaagtactgtcccctgtgccccacccacagagaccaaggcccaccccacaccagaaaccaccaccagga

SEQ ID NO: 84961 - DNA, 600 bp, Chicken  19866894383160_1
tctctccgtgagaccaggaggcccgtgcaccataagctgctccaggaacgtaagcaaacacctcttggaaaatgtggcatgccttcctttgatcttgctgagaagctttggagtatgtataagaaggagttgtctttttcacgcccacctcctcacactgcatggttaaaattagtttcccctctttctgatgatatttgtaatatgcggagtgaaagttgttctttcatttctttgtctgtaatgaagatttattctcccttcaaaagtcttcaggccaaaagttaagtttgtcctggrctgtttttaggtggcaattcaaagaaacatcatctggcattatgattgaacataatttctactttgatgtacaaattaggctcttttgatgtggagcagttgttcccatagcaaagcgattctgcagtgaagttcattattagcaagcaattattaaataaatacatctgtgtatagtatgtaggcaaaagtgatggtratgttgcctaagtaagccttccttatgctttatgttatacctgctgtttctggtctgtcaaaattctgtcagattttgaatgcttggaattgaattatcca

SEQ ID NO: 84962 - DNA, 600 bp, Chicken  19866894383160_2
gtaatatgcggagtgaaagttgttctttcatttctttgtctgtaatgaagatttattctcccttcaaaagtcttcaggccaaaagttaagtttgtcctggrctgtttttaggtggcaattcaaagaaacatcatctggcattatgattgaacataatttctactttgatgtacaaattaggctcttttgatgtggagcagttgttcccatagcaaagcgattctgcagtgaagttcattattagcaagcaattattaaataaatacatctgtgtatagtatgtaggcaaaagtgatggtratgttgcctaagtaagccttccttatgctttatgttatacctgctgtttctggtctgtcaaaattctgtcagattttgaatgcttggaattgaattatccatcattgtttttccttgagtctgctatttattcgttctactttctgtactgtagaaatatctcaaatgtttccagaaatacattgctttgggtgttttttggggagttgttgtcctgccctgcttcagggcaaagccttgaaatctgaaaaggtagggaggtgtctgataccaattctagataaaccccttaggctgggc

SEQ ID NO: 84963 - DNA, 600 bp, Chicken  19866894383164_1
aatatttacacttgtggagtgggcaaatataaagctagaagcaccatgaacattatcagagaagtacaaggagctttgctttcagaaacttaagaccaagcaacttcattaattcactgtttattaacttacaccattgatgtcatgttttgttatagcacagcgtgtcatagtttccagaaatagatgcaacaaacatggttttgtaataaatgatttgatttgtataaactattatttgatttcctaagcttacatgtgtcgcatttgctgataacccagaggaacatctgtctttcrgagaaatgtagggaacatgagyaaaaacactcgagagaaaaaaatgatgaccataatgcgctgaaggcaaaggcatccaacagcaagaatatggtgcttcaagcgcctggtgatgccccatctggactactgtgtcccggtttgggggccccagttcaggaaacatatggagctgttggagcaggtccagaggaaggccacaaagaagatcgtagggctggagcacctctcctataaggacaggctgagagatctgaacttgttcagtctggagaagcatgcagggaatacttcattgca

SEQ ID NO: 84964 - DNA, 600 bp, Chicken  19866894383164_2
gcaaatataaagctagaagcaccatgaacattatcagagaagtacaaggagctttgctttcagaaacttaagaccaagcaacttcattaattcactgtttattaacttacaccattgatgtcatgttttgttatagcacagcgtgtcatagtttccagaaatagatgcaacaaacatggttttgtaataaatgatttgatttgtataaactattatttgatttcctaagcttacatgtgtcgcatttgctgataacccagaggaacatctgtctttcrgagaaatgtagggaacatgagyaaaaacactcgagagaaaaaaatgatgaccataatgcgctgaaggcaaaggcatccaacagcaagaatatggtgcttcaagcgcctggtgatgccccatctggactactgtgtcccggtttgggggccccagttcaggaaacatatggagctgttggagcaggtccagaggaaggccacaaagaagatcgtagggctggagcacctctcctataaggacaggctgagagatctgaacttgttcagtctggagaagcatgcagggaatacttcattgcaacttttccagtacttaaaggga

SEQ ID NO: 84965 - DNA, 600 bp, Chicken  19866894383166_1
attccactggaggtgatagaatgcgcaggaaactaggaatggttggccatttagcgtgggcattgcaaatggcctgtagttgtgttactttattggtacatactgtgttggagtgcatacttgattattgagatatatattactatataacaggaaaacattttgttagtgggagattattttttgctgagtaatgtatttctaaaatccagaattgatggagctgtgggaacatatgtaatgattttcctggatatgaatgcagtgctgtcagattcattgttgctccactacctacaygtcgttctgtttagaaaagacattgatagacaggtaattaatactaaagaaagacaggattctttgttaggaattctttgtgctacttctcttgagaagtgagagagtaggcagtgccctattgtataatttgtcttcattctaggatcctgtataattgtttccattgcatcatcatggcattatccagctcactttctgggctgatacagcagtaaaaagggaaggatggaagaagtgttcctgacaaacatttcttggcactttgtgcacaagcatatgcatatagggattgttcca

SEQ ID NO: 84966 - DNA, 582 bp, Chicken  19866894383186_1
ataaatcaaagaatcagaaatattaaaaatcagacccagttattatcaccctgccttttgatgaagaaaagactgttcaaaagcaaactagcagaaagcaccctcaacaatttgctgtgggagctttttcttttcaagtttaacaatgatgcaagaatttgctttcctaagggtgcaggggtgtttgtttgtttttttttccttaatcttctgaaagtgtcaatgagacaacatgaagcaataatgagagcagaacactgatctaagcagatcagatgctccaaagagcttctctttgcrtttggcaaatgcctacagtatctgtcagtactgctttgtattaaaccgctggctcatgtgtctgggatgggacatcacaaaaggctgcaggacgcttgatgatatgcatgagaccacctgctacatatggacaagataagctccggtgtgcaagatagctggaagtatttcctctgttttcctagattttgttctcattcttccaatgcgggtggattttttacagagcaagagatgtatatcgatatcctgggtttggcttagtttttctttcccaagtgt

SEQ ID NO: 84967 - DNA, 599 bp, Chicken  19866894383189_1
  misc_feature (1)..(196): n is any nucleotide
nnnnnnnnnnnnnnnnnnnnnnnnnnnnnnnnnnnnnnnnnnnnnnnnnnnnnnnnnnnnnnnnnnnnnnnnnnnnnnnnnnnnnnnnnnnnnnnnnnnnnnnnnnnnnnnnnnnnnnnnnnnnnnnnnnnnnnnnnnnnnnnnnnnnnnnnnnnnnnnnnnnnnnnnnnnnnnnnnnnnnnnnnnnnnnnnnnnnagactccacaacctctctggacagcctgttctagtgctctgtcaccctcagtgtaaagtttttcctcatgtctgtatggaactacttatattttagtttgtgcygattgcygttctattactgggcactgctagaaagagcttagttctcttggctaccacccattagataagcattgataagatccctctcagtcttctcctggctaaacagccccaggcctctcagcctttcctcatgagggagatgtccagtccactaattttcaaaaaaawtttaaagaaatctttctactacaacctttagttgctcaacatattacatgcttgacaatttatctgtccatgatacaataaatgctggaagctaaaactgatctgtttcatatagaccatctgattga

SEQ ID NO: 84968 - DNA, 599 bp, Chicken  19866894383189_2
  misc_feature (1)..(189): n is any nucleotide
nnnnnnnnnnnnnnnnnnnnnnnnnnnnnnnnnnnnnnnnnnnnnnnnnnnnnnnnnnnnnnnnnnnnnnnnnnnnnnnnnnnnnnnnnnnnnnnnnnnnnnnnnnnnnnnnnnnnnnnnnnnnnnnnnnnnnnnnnnnnnnnnnnnnnnnnnnnnnnnnnnnnnnnnnnnnnnnnnnnnnnnnnnnnnagactccacaacctctctggacagcctgttctagtgctctgtcaccctcagtgtaaagtttttcctcatgtctgtatggaactacttatattttagtttgtgcygattgcygttctattactgggcactgctagaaagagcttagttctcttggctaccacccattagataagcattgataagatccctctcagtcttctcctggctaaacagccccaggcctctcagcctttcctcatgagggagatgtccagtccactaattttcaaaaaaawtttaaagaaatctttctactacaacctttagttgctcaacatattacatgcttgacaatttatctgtccatgatacaataaatgctggaagctaaaactgatctgtttcatatagaccatctgattgatcatgca

SEQ ID NO: 84969 - DNA, 599 bp, Chicken  19866894383189_3
  misc_feature (1)..(25): n is any nucleotide
nnnnnnnnnnnnnnnnnnnnnnnnnagactccacaacctctctggacagcctgttctagtgctctgtcaccctcagtgtaaagtttttcctcatgtctgtatggaactacttatattttagtttgtgcygattgcygttctattactgggcactgctagaaagagcttagttctcttggctaccacccattagataagcattgataagatccctctcagtcttctcctggctaaacagccccaggcctctcagcctttcctcatgagggagatgtccagtccactaattttcaaaaaaawtttaaagaaatctttctactacaacctttagttgctcaacatattacatgcttgacaatttatctgtccatgatacaataaatgctggaagctaaaactgatctgtttcatatagaccatctgattgatcatgcagtagtcactgaaactactaaagtatctttctcctatacatgtttgagtattcataactcacagctacttctacaattccttcatctatctgtaaaggtagatgccaacagtagagcattccaattcaaattatttcttatgaagtctgaattaggcagtgttag

SEQ ID NO: 84970 - DNA, 600 bp, Chicken  19866894383203_1
tgctgcaagggagtcgttagttttgtacaggaccagatctgatctttcattcccagaacatgaagtaattcccagatgttgccttagacactgcagacagccactggagagcatcacatcaggcaaagaccagggcgagcaaagcttattgcccacaggtgtgactggaaaactgcagagcctgtgagatatcttctcacagctgtgcataggttggatttgatcctaaaaggtcagctaggttgatgccattgtgtagacaagagagcagaataggaggaagagtcactgcagaggagwgatgggcctgggtataggtcccactagttgcaccaggacccctggagagccatgacaggcagctgggagtacacaggctgtgctctgcttgctgctgtggaaggctgcaggtgctgctatccttcctactatccagccttctggtgcagagacagagcatggctgtgagcctcagcaggttgtgcccagggctagaggagctgctcaagtctcagatcactgaagctccttctttcacctctgagaacttaggcatggagccacggacatcccaggccttctttgcaactagaagggatg

SEQ ID NO: 84971 - DNA, 599 bp, Chicken  19866894383205_1
  misc_feature (1)..(172): n is any nucleotide
nnnnnnnnnnnnnnnnnnnnnnnnnnnnnnnnnnnnnnnnnnnnnnnnnnnnnnnnnnnnnnnnnnnnnnnnnnnnnnnnnnnnnnnnnnnnnnnnnnnnnnnnnnnnnnnnnnnnnnnnnnnnnnnnnnnnnnnnnnnnnnnnnnnnnnnnnnnnnnnnnnnnnnnnnnnnacagaaggctgcaggatgctgttctttttggcactgttctctgcatttcacagggggatgcatcttaccaacaagcctgctgagcaaggctgccatacagaggctcctaatcagtgctggcatctccyytggccaggcctgccagcagctgcaccactgtagtgccactgacctgccagaggctctcaccatrccatgctaayagggctgctgtgtcccactccttatccctgcaacacagcagtttgtagacacgtggcagaaaagagaagctctttgtgarttctgtgtccccrtggcccctctgtcagcccacaacccctcctgctaaccaagtccttgaaatggctgtatcttccctcacaggtgggcagaccctgcttttctcctcagcaaaaagcaccccatctctcaaagtaactccacc

SEQ ID NO: 84972 - DNA, 599 bp, Chicken  19866894383205_2
  misc_feature (1)..(171): n is any nucleotide
nnnnnnnnnnnnnnnnnnnnnnnnnnnnnnnnnnnnnnnnnnnnnnnnnnnnnnnnnnnnnnnnnnnnnnnnnnnnnnnnnnnnnnnnnnnnnnnnnnnnnnnnnnnnnnnnnnnnnnnnnnnnnnnnnnnnnnnnnnnnnnnnnnnnnnnnnnnnnnnnnnnnnnnnnnnacagaaggctgcaggatgctgttctttttggcactgttctctgcatttcacagggggatgcatcttaccaacaagcctgctgagcaaggctgccatacagaggctcctaatcagtgctggcatctccyytggccaggcctgccagcagctgcaccactgtagtgccactgacctgccagaggctctcaccatrccatgctaayagggctgctgtgtcccactccttatccctgcaacacagcagtttgtagacacgtggcagaaaagagaagctctttgtgarttctgtgtccccrtggcccctctgtcagcccacaacccctcctgctaaccaagtccttgaaatggctgtatcttccctcacaggtgggcagaccctgcttttctcctcagcaaaaagcaccccatctctcaaagtaactccaccg

SEQ ID NO: 84973 - DNA, 599 bp, Chicken  19866894383205_3
  misc_feature (1)..(107): n is any nucleotide
nnnnnnnnnnnnnnnnnnnnnnnnnnnnnnnnnnnnnnnnnnnnnnnnnnnnnnnnnnnnnnnnnnnnnnnnnnnnnnnnnnnnnnnnnnnnnnnnnnnnnnnnnnnacagaaggctgcaggatgctgttctttttggcactgttctctgcatttcacagggggatgcatcttaccaacaagcctgctgagcaaggctgccatacagaggctcctaatcagtgctggcatctccyytggccaggcctgccagcagctgcaccactgtagtgccactgacctgccagaggctctcaccatrccatgctaayagggctgctgtgtcccactccttatccctgcaacacagcagtttgtagacacgtggcagaaaagagaagctctttgtgarttctgtgtccccrtggcccctctgtcagcccacaacccctcctgctaaccaagtccttgaaatggctgtatcttccctcacaggtgggcagaccctgcttttctcctcagcaaaaagcaccccatctctcaaagtaactccaccggtatccctggaatatctgcagatacctgcaggcctttgcttctgtttcttaagtagtgtggtag

SEQ ID NO: 84974 - DNA, 599 bp, Chicken  19866894383205_4
  misc_feature (1)..(97): n is any nucleotide
nnnnnnnnnnnnnnnnnnnnnnnnnnnnnnnnnnnnnnnnnnnnnnnnnnnnnnnnnnnnnnnnnnnnnnnnnnnnnnnnnnnnnnnnnnnnnnnnnacagaaggctgcaggatgctgttctttttggcactgttctctgcatttcacagggggatgcatcttaccaacaagcctgctgagcaaggctgccatacagaggctcctaatcagtgctggcatctccyytggccaggcctgccagcagctgcaccactgtagtgccactgacctgccagaggctctcaccatrccatgctaayagggctgctgtgtcccactccttatccctgcaacacagcagtttgtagacacgtggcagaaaagagaagctctttgtgarttctgtgtccccrtggcccctctgtcagcccacaacccctcctgctaaccaagtccttgaaatggctgtatcttccctcacaggtgggcagaccctgcttttctcctcagcaaaaagcaccccatctctcaaagtaactccaccggtatccctggaatatctgcagatacctgcaggcctttgcttctgtttcttaagtagtgtggtagttacacaagc

SEQ ID NO: 84975 - DNA, 599 bp, Chicken  19866894383205_5
  misc_feature (1)..(17): n is any nucleotide
nnnnnnnnnnnnnnnnnacagaaggctgcaggatgctgttctttttggcactgttctctgcatttcacagggggatgcatcttaccaacaagcctgctgagcaaggctgccatacagaggctcctaatcagtgctggcatctccyytggccaggcctgccagcagctgcaccactgtagtgccactgacctgccagaggctctcaccatrccatgctaayagggctgctgtgtcccactccttatccctgcaacacagcagtttgtagacacgtggcagaaaagagaagctctttgtgarttctgtgtccccrtggcccctctgtcagcccacaacccctcctgctaaccaagtccttgaaatggctgtatcttccctcacaggtgggcagaccctgcttttctcctcagcaaaaagcaccccatctctcaaagtaactccaccggtatccctggaatatctgcagatacctgcaggcctttgcttctgtttcttaagtagtgtggtagttacacaagccataaagttggcttgtaatgagcaacagaaggctatgcaatttgctgctcaaaaacgcatacgcattgcatcatttgata

SEQ ID NO: 84976 - DNA, 599 bp, Chicken  19866894383205_6
  misc_feature (1)..(4): n is any nucleotide
nnnnacagaaggctgcaggatgctgttctttttggcactgttctctgcatttcacagggggatgcatcttaccaacaagcctgctgagcaaggctgccatacagaggctcctaatcagtgctggcatctccyytggccaggcctgccagcagctgcaccactgtagtgccactgacctgccagaggctctcaccatrccatgctaayagggctgctgtgtcccactccttatccctgcaacacagcagtttgtagacacgtggcagaaaagagaagctctttgtgarttctgtgtccccrtggcccctctgtcagcccacaacccctcctgctaaccaagtccttgaaatggctgtatcttccctcacaggtgggcagaccctgcttttctcctcagcaaaaagcaccccatctctcaaagtaactccaccggtatccctggaatatctgcagatacctgcaggcctttgcttctgtttcttaagtagtgtggtagttacacaagccataaagttggcttgtaatgagcaacagaaggctatgcaatttgctgctcaaaaacgcatacgcattgcatcatttgatatctggtccaccac

SEQ ID NO: 84977 - DNA, 600 bp, Chicken  19866894383206_1
acgtgctcttcatccagttgcatgcaagtgacctatggtctgtgtgcctccacttcacctctagcaggaagtcatcaggctagatggccaaatgaagcaaactgccctagccccatgggactccagtgtcctacaacagctgtggatctgcctcaggcttaaagttttaagttactgatacaaagttgtgccataagtaataaattactgcctcacgttcatagaggtcagttaagcctctctttcaatggccttcctgccttaacgtgctcccattctgagtgcttaaatgagtcctcrcagmtctcagaacaattacatttgtaaaatctgacactaaaacttatttttctgtcaaacatccaggaattttcatgcccctctctaaccttggctctcgacacaaacatggttccttctaccaggcacctgctccacttctgcagtcgcaagtgagcagataaatcagcaaaaagacaccactcccatggaggacctaattttaaactacgattttccatcttctttatctgatcagttgtggcccaaaatcttagcagcaggaagagctgcttttccactcttcccctaatgatttct

SEQ ID NO: 84978 - DNA, 600 bp, Chicken  19866894383206_2
gctcttcatccagttgcatgcaagtgacctatggtctgtgtgcctccacttcacctctagcaggaagtcatcaggctagatggccaaatgaagcaaactgccctagccccatgggactccagtgtcctacaacagctgtggatctgcctcaggcttaaagttttaagttactgatacaaagttgtgccataagtaataaattactgcctcacgttcatagaggtcagttaagcctctctttcaatggccttcctgccttaacgtgctcccattctgagtgcttaaatgagtcctcrcagmtctcagaacaattacatttgtaaaatctgacactaaaacttatttttctgtcaaacatccaggaattttcatgcccctctctaaccttggctctcgacacaaacatggttccttctaccaggcacctgctccacttctgcagtcgcaagtgagcagataaatcagcaaaaagacaccactcccatggaggacctaattttaaactacgattttccatcttctttatctgatcagttgtggcccaaaatcttagcagcaggaagagctgcttttccactcttcccctaatgatttctaaac

SEQ ID NO: 84979 - DNA, 600 bp, Chicken  19866894383210_1
ttttctccagacatacctgacatttaaatggctggaggatcagacaaaggtttgttattgcacaccatattctgcatgcagtctccccagctgggcagcttctttgttttaataatgctgggagctgtggaggtgagtgcggtgtttctgttctctgccatgaggtttctctgcctgcacacacaggcacgtatcaccatatcagctctccttagcaagctgcaagggcaagaaacatatacaggaatatcatttgtttaaataaatctatgttctgatgctaattgacagcaagacacraggcctgaggcatgaagcagttattatgactgtttttaacaccactgaaagaccaatactttaaagcccagcaggattcacgcaatcatattctgcatggccaaacagctgctgtttgggtgtctccaatgagcagaagacaactcagggaaagagcttatcatcccccccccccttatttttccccctaaagataagccttatctccagcagttcacaaatttgactgctctgtggtctatttcagttttctttcctggctgtttaatttaggtgctctgtaggttctgcacagtgcca

SEQ ID NO: 84980 - DNA, 561 bp, Chicken  19866894383213_1
aaacgtttgtatgggttggaaggcttatttgcagaataatgactttgtgctaaaaggtctgcaaaggcttctaatcggtcgtcatcaggattagaaagcatttggaattaatacatgtaaataaagggtgattatttggttgatctgggaatattcctggtttgatataaagcgtttattaaaggggtttatgaaaaaccttgatggataaagggagtttattaatgaagctgtgtgttgggagatcagcccttatctcctctatcccatcccatgcaggacccaggctggcagtcgtgsatctgcttaggatctgtaggatttggctgctctatagagggcactctgagatctgcagtatcataaataaactcatttccttaatctggtaacccgtctttttactggacttaattgatgatttggtgcatatatttaatcttattgtgtgaaaaagctgctatggaaagtatgtaattataataaatatgtaaacaggattgatttttttcatgttatgaagatgtttcagaggaactgatttattttagtacaagatga

SEQ ID NO: 84981 - DNA, 600 bp, Chicken  19866894383215_1
acaaaccaaattttaaaattccttgcgtagagtatttcttccagatgtggccttgcaaaagtagttttgtggcactgcagaccgcgcaggctctattttggtggctgtgttccatgtatgtagctattagtctttacctaggatttatttctctagagggaacctggagtaaacgcagctggagaaggtgcaggagccagccctgcctcctgggtgcacagacaaaatattcttattgtcctctgtgtcctcctgtgcctctggtaagggtcccagtgatggtgagatcctcctagctcwgggcacccaggcaggggctgggcaatgcagcctactcccatgggacrcccaggactgcatgtctgtgctctctgtccttccaccccgcaaagtcactctgcagcacgggcattgcagcattagtctttcccgagcacatggagcggagcctgttgctgataaacctgatacccgaaggacgtgttccttttttgcagtgtttctgtgggaggtttgagatgaagagaggaaaacatggaaatcatttttatctcatgctcagtccctgcctggtaaatcctgaagaaccgatgccacttg

SEQ ID NO: 84982 - DNA, 568 bp, Chicken  19866894383215_2
tggccttgcaaaagtagttttgtggcactgcagaccgcgcaggctctattttggtggctgtgttccatgtatgtagctattagtctttacctaggatttatttctctagagggaacctggagtaaacgcagctggagaaggtgcaggagccagccctgcctcctgggtgcacagacaaaatattcttattgtcctctgtgtcctcctgtgcctctggtaagggtcccagtgatggtgagatcctcctagctcwgggcacccaggcaggggctgggcaatgcagcctactcccatgggacrcccaggactgcatgtctgtgctctctgtccttccaccccgcaaagtcactctgcagcacgggcattgcagcattagtctttcccgagcacatggagcggagcctgttgctgataaacctgatacccgaaggacgtgttccttttttgcagtgtttctgtgggaggtttgagatgaagagaggaaaacatggaaatcatttttatctcatgctcagtccctgcctggtaaatcctgaagaaccgatgccacttggtgcgggaagcaggg

SEQ ID NO: 84983 - DNA, 600 bp, Chicken  19866894383222_1
agaaaaatcgtaatacttacaaatctatatccttttatagagtagccagcactgcagcttggcaatcattaatgggtatgatctcaccttgagcactatgtgcagttttggatgccacaacatgagaagaacagaaagctatcagagagctccaaagaagggatacaaaagtggttaagggcctggagggcatctgcctctaagagagtgatgtggctaacaaaacaaatacagggctctgaaagctcttcaccatgccaatcccttgaccaatactgtaacatgcatctctatttcacycccggttcatacatggtgtaaaactattgtgtgaagcagcagcaaactccttttttggtccactgcaggtacctgtcaacacagtagggtcatttcagtatgcacccatgaagtgcaggagatcctatttactcagaacctagatttggtagaattttgttctgacatactgtgtgacaaaacagagttcagagcagactgctctaaaccatggctcaaagcagttcaattgtgtcagacaggagagagttctttccagcagaatatctttatatttaaaaaaaaaaaaaaaaaaaggat

SEQ ID NO: 84984 - DNA, 599 bp, Chicken  19866894383228_1
  misc_feature (1)..(7): n is any nucleotide
nnnnnnncaccacacatccatagcccagcacggtgcaggctgctgtgatcctggctctcagagtccagcttacttaaaaaaaagcctggaaaaccctaccagattgaatgtttttgttgttattattaattaatacttatgtctgggaaaaaaaaaaaaagaataaaaccaaaccacagctccctgtcatcgccttggtagcgagcaataaggcctggcatgtctgacagtcatattatttgcacgttactggagcaaaattatattagaacctctgtgctaacagacaggaaaagaaaytgtggctccaagcaacatattcctgtaaaccaggtaggctgtttccagttataataaaatactggcagagagggcagaggaggtgagcaaggaacactgaaatggggctgagagatgagttcagagactccagttttattctcctttctgttcctgagctgctgcatgaccagagacagaatcatcccttgtgtccaagggagagggccaggaattgggaaacaaagtgccttggacacagagaaacaaagcaactccttcccagcctcacacccaccaaaggcttttcttcccctgcc

SEQ ID NO: 84985 - DNA, 600 bp, Chicken  19866894383230_1
agcaggagctgtcactgcctgcaaaaggcagtatatttctgcagtaaagatctttaccttgtttggcaggaaggtctctaaagaaaacagcagaatgacaaattttcatcagctgtgatttcagcagacggtgaaaagggtacataacatcatcaataatgggctttaggtggttctgcactttaacctttgcacataagtatggaactgcaattagaaactgaaaacaaaatccagacagaaataagaattaggacagaaatgcagcagtcatctcattcaggacattctcatgtattyctatgagatcttctctacacatggctcttagatttcagaagatacaactatgaaaaatctgctttctgaataggctaactttatcaacagtttcctgtcactggatttgtatgtgcagaattgcttgctctgagagcattttctctgtagttatgtaaaaatgactggctaaaaagcctgtggactcaatattcctctgcctcttacttttcatggttgccaaggccagatctggtgcccagaaaagcagtggcaagatttccaatgttttcaatgggctttggtttgggctgcagcctc

SEQ ID NO: 84986 - DNA, 600 bp, Chicken  19866894383231_1
agcacagttatgtagttcagaaataatggaagcgctcagaaaaaggtgcccgctgattgttacttcagggttttaaagtgacaagcagtaaagggtgaagactgactctttgatcttaaaaagcttgaaaagagagagctttactctgttcaaataatttcaggtaattgtaagtaatccgaattgagtcttagggctgcagggctttacataagtgattcgcatttgaagagactttgaataaacataaatttgggcttcaggagcctctttagagtattagagctttcagcaaacttyrgttaacccttgcgggctgaggcaggagatatcatgcctgctgtgaaaaaggcgccagcctacaggggaaatgatgacagcctggaagggtgaaggaaaatgctgtggttatgctgtatattagcgctggccagatcaagtgctgccctttctttcacactcaggggaatgagcaagttgaggaatgttattaaatgaacaggaagcttgaacttaagagctttggaggaccttgccctactgatctttgtagggctgcaaatgtggaggtaaaatacctcaccacaggtgtacttcatg

SEQ ID NO: 84987 - DNA, 600 bp, Chicken  19866894383231_2
gcacagttatgtagttcagaaataatggaagcgctcagaaaaaggtgcccgctgattgttacttcagggttttaaagtgacaagcagtaaagggtgaagactgactctttgatcttaaaaagcttgaaaagagagagctttactctgttcaaataatttcaggtaattgtaagtaatccgaattgagtcttagggctgcagggctttacataagtgattcgcatttgaagagactttgaataaacataaatttgggcttcaggagcctctttagagtattagagctttcagcaaacttyrgttaacccttgcgggctgaggcaggagatatcatgcctgctgtgaaaaaggcgccagcctacaggggaaatgatgacagcctggaagggtgaaggaaaatgctgtggttatgctgtatattagcgctggccagatcaagtgctgccctttctttcacactcaggggaatgagcaagttgaggaatgttattaaatgaacaggaagcttgaacttaagagctttggaggaccttgccctactgatctttgtagggctgcaaatgtggaggtaaaatacctcaccacaggtgtacttcatgc

SEQ ID NO: 84988 - DNA, 599 bp, Chicken  19866894383232_1
  misc_feature (1)..(37): n is any nucleotide
nnnnnnnnnnnnnnnnnnnnnnnnnnnnnnnnnnnnncctgtttctctattattttccttcttccctccctctcttttcctccttccactgcacatgcattctccttccccgggctccccccctcacactcctcacacaaggctcctctccatgctccctgcatccccccttatccagcaccaccctccagaaggccaggcagtgggggagcgctgcacacagctggtccccagctcccccgagccctggccatcaaagcttctccatctggccggaaagcagccggaggctctcctgcygcctccggtcctcccaggtgctggggccatgcaggccctgggaaccctggaagcccaggcaagctggcagtcccatagggaactgctgctcaccccccgttttccgtcctgcttccctatttgaccctggaggaattacagtctctgcccatttgacgatgcctgcggaagcagccagagccacaagcagcacactgtatttgaactctgctgcttatctgaagcctaagcactctttgtggtgatccaacaggtaccagcttgggtatggtagcttcatacacagtgatccgaacctg

SEQ ID NO: 84989 - DNA, 600 bp, Chicken  19866894383238_1
tatttgttatagccacagaatctcattttacccctttgctcatttccgacctgctactaagttaccaagcactggagtgatgcaccaaagagcacctacagatgctgttaacataatgaaaccaaaccttcatctacttacaacatgttgtatctgcttggaaaaaaacaggtgatttttttttactcccaaaagttggcaccatgacaactacttaaagttctgaatttatgaaaacaggatctacacatgaaataagtaccttggatggaaataatcgactagttgtactgagcaaakctgcatttgtaagcagattatcacttatcctttttactttactggtcatgacatctgtcaagcagttttagttttttaagtatttcagtaggtatgttctatgtatgtgtcatatcatgtatgtgtacgcttacagctactattgcaaacctttacctgtaaggctgttcctttcaactggaaaaaactgaggatatgaatctgttcctgcaggcagggggatggagagggcactttctaagaagagcaaagattagctttttgttggttaaatagagcatttgtctctgagtttygcaa

SEQ ID NO: 84990 - DNA, 393 bp, Chicken  19866894383238_2
aaakctgcatttgtaagcagattatcacttatcctttttactttactggtcatgacatctgtcaagcagttttagttttttaagtatttcagtaggtatgttctatgtatgtgtcatatcatgtatgtgtacgcttacagctactattgcaaacctttacctgtaaggctgttcctttcaactggaaaaaactgaggatatgaatctgttcctgcaggcagggggatggagagggcactttctaagaagagcaaagattagctttttgttggttaaatagagcatttgtctctgagtttygcaagcaaattaggttaagtatttttaaataaagcaacaagtacagcactacagcrtaaagctcgaaggacggtctttggagctcagcactgg

SEQ ID NO: 84991 - DNA, 337 bp, Chicken  19866894383238_3
atctgtcaagcagttttagttttttaagtatttcagtaggtatgttctatgtatgtgtcatatcatgtatgtgtacgcttacagctactattgcaaacctttacctgtaaggctgttcctttcaactggaaaaaactgaggatatgaatctgttcctgcaggcagggggatggagagggcactttctaagaagagcaaagattagctttttgttggttaaatagagcatttgtctctgagtttygcaagcaaattaggttaagtatttttaaataaagcaacaagtacagcactacagcrtaaagctcgaaggacggtctttggagctcagcactgg

SEQ ID NO: 84992 - DNA, 600 bp, Chicken  19866894383256_1
tagaataacgtttcaataagttggttttcttttttctattcttagctgattattcctgctttttatatatgagtatactttgtatgtttttcgtcacttgcagttgattctgatttttttttttttttttgaggtttttgaatttcataaaataatagaatcgtttgggttggaaggggccatgaaaggtcatctagtccaactcccctgcaatgaacagggatatttacagctagatcagtttgtttagagccctgttcagcccaatgttacatgtctttaggggtgggacatcccccmccctctctgagcaaccacagagccagtgcttcacaacccttatcataaaaaacgtcttccttatattcagtctgaatctcccctcttttagtttgaaaccatttccccttgtcctgtcacaacagaccctgctacagagtccatccccttctttcttatagccccctttagacagtgtaaggctgctgtcgcatctctcttgagctctcttctccaggctgaacagctccagcgctctcggcctgtccttgccgtggctgtgttccattccttgaatcatttttgtggtcctcctttggg

SEQ ID NO: 84993 - DNA, 600 bp, Chicken  19866894383260_1
tctgcatgtgccctcccctccatctcttactgctttgactttcattctttcctgggaacactccctaagaaataacaacgaggtcaatacaaagtcaaatttatcccccaaaataaagtgtatccaaaggtccacaacaaaccagagtaaattaaggttctaaaattatcagaaattcacaaaactagatatttgatgaggtttttatattagacttcatcaggaacatgactccaaatgtcaaccgaaacactttgatgagacaattgtaaggagcaggacaataggtctgaggtggastcatgaaaaatgagtattgtttaaaggctcattcactcatgagggaaaaagttttccttgtccaatgagtccgaatggcctgaattcttgtcaaggtgattccacctcaaaatattagaagccatttctgaacgagagtttacgcagcgacatgtaaagtagatatttttccttttgacagcaatgaattcttttgatagtgatgaatctgaagaaaatgaccagtgaatgctatttatggctgactgaccacatcaaagcaaggctaaactggatattaaaacagtagctcagtgacag

SEQ ID NO: 84994 - DNA, 600 bp, Chicken  19866894383264_1
tgattgtgtccaacagagcattggccctataacagattatgtctgcaaaagcaaaaaagtttgttctaggttctgaggattgctgtcttcaaaaggctggtaatcggcactatttttgaaaatgggcctattttgaagttggtatgaagatgaaagaagcatcaaatatgctgggcacattgaaagatgaagttataatgtaattttgctgcagtttggtgccaagttaaattcatctgaagaagtgtaaatacatttttaatacatgtttgtaagaggaaatacatcagtttgaccatsttgttttgttggctgaacaaatcaaaattatttatttctactatcattctgtgttgcccagtcataactcagagtccttaccttctctttcagttctttctttttccttagaacaccttactgtgcccccaatctgccctcctcttctttgaaagaaagagatgtatcagcttttacaatattttatctgtaacattttatcacwcatagcattttcgcctcatatattgattttaaaatattcttcttatagtgggaatttggctgtaaaaggagaaaccttactgatgcttggactaa

SEQ ID NO: 84995 - DNA, 564 bp, Chicken  19866894383264_2
ttgctgcagtttggtgccaagttaaattcatctgaagaagtgtaaatacatttttaatacatgtttgtaagaggaaatacatcagtttgaccatsttgttttgttggctgaacaaatcaaaattatttatttctactatcattctgtgttgcccagtcataactcagagtccttaccttctctttcagttctttctttttccttagaacaccttactgtgcccccaatctgccctcctcttctttgaaagaaagagatgtatcagcttttacaatattttatctgtaacattttatcacwcatagcattttcgcctcatatattgattttaaaatattcttcttatagtgggaatttggctgtaaaaggagaaaccttactgatgcttggactaatgacaatgaaacaaatcagcctttgcattgaagaacaaatactgctataactaagtcattgtggttagcatgcctgtcccagatgacttgcttcaataagaattatgttcagacttgggagtagaaaagggcatttttgatgctatttggaaatcttttatgattcata

SEQ ID NO: 84996 - DNA, 599 bp, Chicken  19866894383266_1
  misc_feature (1)..(40): n is any nucleotide
nnnnnnnnnnnnnnnnnnnnnnnnnnnnnnnnnnnnnnnnacccttcttacaatgtaaaatatattgctctgctgtcaattgcatgtgctcttcttcagtgatctgtggaagatttagtggcaacccatcaccacagtacctgagaaggtaccacaaaaccacaaagccacaaagaggagtgatggcatctcctccttccttcccatgcattttctcttttcctactgtcaggtagctagctaaagtaaggatctgctgctgtcaccaaacctggtctttaccactgtttactgttactyctccttcctccaacataaatgaggcaattaaaacaaaccacctttaaaagcggtctgcttctaagaacagcagatrttgccaaggtatagcgagaaggacccttgtgcccacaccaacaactgccttgcttaatccctttccctcagcacagcaatgtcccaaacagtgcgaggaaggggttagtgttacaagctggtaccaacatgcagatacaaaggtatacttctttttgcaaacaaattctcagctacagattaactggcactcttactctactgtgacagcagtgaaactccat

SEQ ID NO: 84997 - DNA, 600 bp, Chicken  19866894383266_2
caattgcatgtgctcttcttcagtgatctgtggaagatttagtggcaacccatcaccacagtacctgagaaggtaccacaaaaccacaaagccacaaagaggagtgatggcatctcctccttccttcccatgcattttctcttttcctactgtcaggtagctagctaaagtaaggatctgctgctgtcaccaaacctggtctttaccactgtttactgttactyctccttcctccaacataaatgaggcaattaaaacaaaccacctttaaaagcggtctgcttctaagaacagcagatrttgccaaggtatagcgagaaggacccttgtgcccacaccaacaactgccttgcttaatccctttccctcagcacagcaatgtcccaaacagtgcgaggaaggggttagtgttacaagctggtaccaacatgcagatacaaaggtatacttctttttgcaaacaaattctcagctacagattaactggcactcttactctactgtgacagcagtgaaactccatcagcacctggttcacactaaggtgaaagaatcaatcaccatgaaaaacctgatacaaacctgcagctgtcaaacaat

SEQ ID NO: 84998 - DNA, 599 bp, Chicken  19866894383267_1
  misc_feature (1)..(12): n is any nucleotide
nnnnnnnnnnnntattgatgtcgctgaggaaatagaccctgccctgcatttatatgctggatgtgcaggatgtcgtcgggaatgcaaagtgctttggataagtttcttggaatggtgataagaaaaatctttatcccatgagtgctaaagatccaggcctttaagtaggtagtgtcaaattaattacaaagtaaagcctttacatttcagaacagctggtttttacatttttagagctgaattttgttcctgattactgtaggcttactcctgcgaagcgaaccataaaataagaccagrggaaagttgttaagggagtcatgatatctgtaattccaggcgttgtgcacactgagagggctgttcttctcctagttttcctgtagttggtatttcctcctagtcgaaacttttcccttgtgcctgaggaggacaggagccaatgcatgctgccaatgcaaagaaggggtagatatggagatgccrttccatggagttgcttttggaagcctttgcactgtgcttttgggctcatttatgcttggctgaatggttactgccatcactgatggcatctgggctttgtcagagcacttttg

SEQ ID NO: 84999 - DNA, 590 bp, Chicken  19866894383267_2
caaagtaaagcctttacatttcagaacagctggtttttacatttttagagctgaattttgttcctgattactgtaggcttactcctgcgaagcgaaccataaaataagaccagrggaaagttgttaagggagtcatgatatctgtaattccaggcgttgtgcacactgagagggctgttcttctcctagttttcctgtagttggtatttcctcctagtcgaaacttttcccttgtgcctgaggaggacaggagccaatgcatgctgccaatgcaaagaaggggtagatatggagatgccrttccatggagttgcttttggaagcctttgcactgtgcttttgggctcatttatgcttggctgaatggttactgccatcactgatggcatctgggctttgtcagagcacttttggttgctgttctggggactgatgctgagctaaattggggtgaggccaaagtgatgctgctgaggggcatccsaggaaatgtttgagtataaaaatgctggtgtgctgaatgcgagttctcaacattttgcattattgccatcttctggctctgtgggctggtgagtttttgccgtggg

SEQ ID NO: 85000 - DNA, 406 bp, Chicken  19866894383267_3
cctagttttcctgtagttggtatttcctcctagtcgaaacttttcccttgtgcctgaggaggacaggagccaatgcatgctgccaatgcaaagaaggggtagatatggagatgccrttccatggagttgcttttggaagcctttgcactgtgcttttgggctcatttatgcttggctgaatggttactgccatcactgatggcatctgggctttgtcagagcacttttggttgctgttctggggactgatgctgagctaaattggggtgaggccaaagtgatgctgctgaggggcatccsaggaaatgtttgagtataaaaatgctggtgtgctgaatgcgagttctcaacattttgcattattgccatcttctggctctgtgggctggtgagtttttgccgtggg

SEQ ID NO: 85001 - DNA, 600 bp, Chicken  19866894383268_1
agccaagaaaataatggcattctcaactggtgacaccattctaccctgcaaaaatgaaattaagcacaaatcaaataccgggctgggttaatttaaagcctgcatgttaatctcagagcaatctcactgaagttcagagtataacctatgttacattgatacaaaatgagtgcagggtccacctccttcttttgaacttgatggaattcggcagcgctgataaagggcctttttcttctgaaatctgtcattccagttggctgaataaaaaccattatggggtgtggacttctctctctytttttttctttcctttcccttaatgaaaggagcatttcatgagctttgaaataattttgctgtttctcccttctgctgtgccctctcattgccagtcaggaatggaaatgaatggaaatggaaaatgaagggaaagccagggaagagaggaaggaaaactaccgaagttgcttgatatgacacttaaatgtattccttttggataaaaaagctgatcattttccaggaatatggctaaaggagagagaaacgcgcatttttaaaactcttctgcagttctttcttcttgcaagaacgact

SEQ ID NO: 85002 - DNA, 600 bp, Chicken  19866894383270_1
cttgaaatgtctgagcttaggtatccaacatcccaagaacgaccaactttaaaaacagtgatcagagtttatcagtgaaatgttccttgcttttccctccccagaccacatcgacccctttcctgaaccatcagaaatattcaggagttttctcttgggtagttgaattacttcttatagattgaatgtgcgtgtttaacaggtttcctcaaggatcacgatccttgcctcttttcttaaaactgatatttgtgtgcatttgtgtgcgtactcatgcctgccatgttctctgactctcckatgtttgttatgcttcagacaaataccccagggagattatgtaaaaaagcccggagaggccgactctttctatagcgacatgcctcctggagtcagcacaaactctgcatctagttctaagaagaggtctgcttttctgtcgcattttcagatttctacctgttccatcacccattattccattagtcagaacatttcattgttttgcagcaggtttgattctttcttctttctttgtggaatgttayggttggcatcctttgtgctttgattactgattttttttttctcacacgccct

SEQ ID NO: 85003 - DNA, 600 bp, Chicken  19866894383270_2
tttgtgtgcatttgtgtgcgtactcatgcctgccatgttctctgactctcckatgtttgttatgcttcagacaaataccccagggagattatgtaaaaaagcccggagaggccgactctttctatagcgacatgcctcctggagtcagcacaaactctgcatctagttctaagaagaggtctgcttttctgtcgcattttcagatttctacctgttccatcacccattattccattagtcagaacatttcattgttttgcagcaggtttgattctttcttctttctttgtggaatgttayggttggcatcctttgtgctttgattactgattttttttttctcacacgccctgagctactaattattacgattagatcagaataaacattttccaatggaagccaactttgggcagtccgattttcatcactttcctgcttgaaaatccctttcaagtagactacagtaataactgctgaataaaaaaatattaaaattaaaaaaacacactttttatcatctttgtcatgtaatcaaagaaaaggaacactgtcttgcttcaataataaatgtaaaattgtttttatacctttattaat

SEQ ID NO: 85004 - DNA, 558 bp, Chicken  19866894383271_1
gtcagaagactactgttcagaaagtagaccaaagaaacagtaaaactcattttaagttctgagcttaacatcaggtaaaacgtcagtctctattgttcaacctactaaacgataaaaatataaggacaaaaagtccaaacaatcagatgatcaactgtaatgaacagaagaaaaaagcagatcatatgaaatgcaaaaagaactactgcaattgctataacaaacctctgctaaaagcaaattaagaaatagtttgctctcttcttgtaggccccccaaaaaaatcaaggtttgccttcytaccctatcaaaaactaaattaagtttctactctcaaattggcagaaaacaaaacaatcaatataagaaaaaaatctctgaaaacagttctgaatgcataagaaaacatttcaggtttgcacactaagaatcttgaaaattccaaggatttctgctatttcagtacatttaacccttcacaatgtataggcattctaaatcacctaaggagggagttcgtgcagcttccacttcatagtaagtcaataaatctttgag

SEQ ID NO: 85005 - DNA, 599 bp, Chicken  19866894383279_1
  misc_feature (1)..(210): n is any nucleotide
nnnnnnnnnnnnnnnnnnnnnnnnnnnnnnnnnnnnnnnnnnnnnnnnnnnnnnnnnnnnnnnnnnnnnnnnnnnnnnnnnnnnnnnnnnnnnnnnnnnnnnnnnnnnnnnnnnnnnnnnnnnnnnnnnnnnnnnnnnnnnnnnnnnnnnnnnnnnnnnnnnnnnnnnnnnnnnnnnnnnnnnnnnnnnnnnnnnnnnnnnnnnnnnnnntttgaaagcctcttctgagtttctaggcttgattctgatctcataagtaattgtgacagcgacacgctgattttaacttgatgtcaactrcttgaaacrtatcttcttttctcaaactgtttggttggaggaaagtatttacattttctctttctctctctctcttctttccctaattaaaaacttcacttaatctcagcacttcgtattttctaaccttgcagctgctgacacaaggcctgatcctgtgttatgtgtatataactccactgattttcagagacgctcttgacttagtgaggaaatcctgactgttaagtccttctctgccactttttccaggctgtatattcttgatctctccacattgtgacatatgagtcacacag

SEQ ID NO: 85006 - DNA, 599 bp, Chicken  19866894383279_2
  misc_feature (1)..(201): n is any nucleotide
nnnnnnnnnnnnnnnnnnnnnnnnnnnnnnnnnnnnnnnnnnnnnnnnnnnnnnnnnnnnnnnnnnnnnnnnnnnnnnnnnnnnnnnnnnnnnnnnnnnnnnnnnnnnnnnnnnnnnnnnnnnnnnnnnnnnnnnnnnnnnnnnnnnnnnnnnnnnnnnnnnnnnnnnnnnnnnnnnnnnnnnnnnnnnnnnnnnnnnnnntttgaaagcctcttctgagtttctaggcttgattctgatctcataagtaattgtgacagcgacacgctgattttaacttgatgtcaactrcttgaaacrtatcttcttttctcaaactgtttggttggaggaaagtatttacattttctctttctctctctctcttctttccctaattaaaaacttcacttaatctcagcacttcgtattttctaaccttgcagctgctgacacaaggcctgatcctgtgttatgtgtatataactccactgattttcagagacgctcttgacttagtgaggaaatcctgactgttaagtccttctctgccactttttccaggctgtatattcttgatctctccacattgtgacatatgagtcacacagtgagtatct

SEQ ID NO: 85007 - DNA, 600 bp, Chicken  19866894383279_3
cttctttccctaattaaaaacttcacttaatctcagcacttcgtattttctaaccttgcagctgctgacacaaggcctgatcctgtgttatgtgtatataactccactgattttcagagacgctcttgacttagtgaggaaatcctgactgttaagtccttctctgccactttttccaggctgtatattcttgatctctccacattgtgacatatgagtcacacagtgagtatctgacaggttgctcgtgttatgtctgcaacagaaaaaggatctcgttggtttcacatgagaaagtcraatcctaaatttggctggaaaaaaagtaaagggataaaaattaccaccagataaaacacaatgcacatattcttctcccctaaaagatttatttactcaaatacgccatagttttcaaagacacttgtatttttttaatattttaaatgggttgccttgaataaaagccatcttacgaaggaaaaagaagtcagaaaaacaagtctgaccttgaacaaatttcatgtggtagtgattcactctagagtcatcttagtcagatagtcaacatcagctaatcataaactcatgattattaca

SEQ ID NO: 85008 - DNA, 600 bp, Chicken  19866894383284_1
aaaaagagagagaaaaaaaaaaggcgtatttttatgtttaagctgcaatacttactgaatttgtactaggagatcataattataccgttactcaaggaagatgttattttctccacagtttgtcaagatttcattttcagtcatcaatacacaataatttttaaaaagatatattgtctagcttgtaagcaaggagcaatcatattacattgcttggaacaccaccctctgtttgatcctgaaattactgcataggaagataaatgatatttccactgcagagactccacaaatagcgcyttaacaacttgttctccagatacgcctttttcttagcctttcaaagctacaatgtcagacaatatgataaacatactaaaataaaggtgaaattaactttgtaagatcaaaaccaatatgtaatgcagttgaaaaattagacaagggcaatagtggcagcaaagtctatcttgttccatattatgtttgctggctcagagggcttgtacacagccatgacctaaaacaagttaagtaactccaaagtaggaggactgtgcccaaatcagcacagtgctgcatcccaactaacaagacttg

SEQ ID NO: 85009 - DNA, 599 bp, Chicken  19866894383287_1
  misc_feature (1)..(202): n is any nucleotide
nnnnnnnnnnnnnnnnnnnnnnnnnnnnnnnnnnnnnnnnnnnnnnnnnnnnnnnnnnnnnnnnnnnnnnnnnnnnnnnnnnnnnnnnnnnnnnnnnnnnnnnnnnnnnnnnnnnnnnnnnnnnnnnnnnnnnnnnnnnnnnnnnnnnnnnnnnnnnnnnnnnnnnnnnnnnnnnnnnnnnnnnnnnnnnnnnnnnnnnnnnaaaaaaaaaaaaaaaaaaaaaatcagagacagcatttagaaacaggctttttggggggaaagaaagaaaaaagaaaaagaagaagaagaaaaaaggakaaagtggcttcatttcaccttagaaatactattctccagttttctggattgttactgttccagacagcatgatggcttttgctctcaggaagtgggagcgtctttggttctggtgaatataacccactatcaaatgttgtttctgtagtttccacaagcccattacacttctaggaaaatagtaatcaaagtaatccaaataagatgttggtcataagacacaacctcctctctctgtggagcatttggaagatacaaagtggacatagccaggggaagggacaacaggactgtagatt

SEQ ID NO: 85010 - DNA, 600 bp, Chicken  19866894383293_1
atcaaagtctttctggttttgaagtttcttgtggtgaaattacatgactctgagtcatcaaagaggattcttcttactcatccttggaggcacaacttgtatcttcctgcatttcgaaagacattgctttaatattctcagataacgaattagtttctgattaataattctatacccaagtggctccttgcattaacagcccgttataacagcaaataacctagttctatttgtacacaaaacctctcgtggctttgtgactgggtgttatgtgctgtatgtgtgtatggagcttgaaaygcaatgacggcgggcgctgcttagaatatgtgagccttagaatttgcatcctgtgatgacctttcctgcagtgagcactgaggtgagagaaaatagctgaacactgaatcctttctgtggcccaccagctgtgctgactcctgcagcgctctgcaatcccagcgtccctgtgagggtggctgccacraggacggcccatctgccttcctgctgctgggagggacatgcwggggtgccctgcagacccagccacagctgagagaaggctggggctcagctttgaaatgctaatctgtttct

SEQ ID NO: 85011 - DNA, 600 bp, Chicken  19866894383293_2
ttgcattaacagcccgttataacagcaaataacctagttctatttgtacacaaaacctctcgtggctttgtgactgggtgttatgtgctgtatgtgtgtatggagcttgaaaygcaatgacggcgggcgctgcttagaatatgtgagccttagaatttgcatcctgtgatgacctttcctgcagtgagcactgaggtgagagaaaatagctgaacactgaatcctttctgtggcccaccagctgtgctgactcctgcagcgctctgcaatcccagcgtccctgtgagggtggctgccacraggacggcccatctgccttcctgctgctgggagggacatgcwggggtgccctgcagacccagccacagctgagagaaggctggggctcagctttgaaatgctaatctgtttcttctgtccttccaagatgtagcccagggaggcagtgggtggggaagttggtattaatttagaatttgaagctttagcgcaatctgttacagttttagcacattaggagctgtttaatatttaaggcggttttgaagttaagatggaacttcgtcctactttcaaaattggcaagaaataccaccctga

SEQ ID NO: 85012 - DNA, 600 bp, Chicken  19866894383293_3
tttgtacacaaaacctctcgtggctttgtgactgggtgttatgtgctgtatgtgtgtatggagcttgaaaygcaatgacggcgggcgctgcttagaatatgtgagccttagaatttgcatcctgtgatgacctttcctgcagtgagcactgaggtgagagaaaatagctgaacactgaatcctttctgtggcccaccagctgtgctgactcctgcagcgctctgcaatcccagcgtccctgtgagggtggctgccacraggacggcccatctgccttcctgctgctgggagggacatgcwggggtgccctgcagacccagccacagctgagagaaggctggggctcagctttgaaatgctaatctgtttcttctgtccttccaagatgtagcccagggaggcagtgggtggggaagttggtattaatttagaatttgaagctttagcgcaatctgttacagttttagcacattaggagctgtttaatatttaaggcggttttgaagttaagatggaacttcgtcctactttcaaaattggcaagaaataccaccctgattttgaaaaagcacctcgctgcgaattaaatatagcaatcag

SEQ ID NO: 85013 - DNA, 600 bp, Chicken  19866894383296_1
tctccaagttacaaatttccagttcaagtgtgattcttggctgttctacaggttatgaacaaatatctcccagaactacgttgccctttcaaatctaaaatccactggaacaaaataagtgcctgcttaggacagcttgaagtattttaacatgtgtttcaacaggaaaaacctttgtctgaaatcttgtttaccaaacaagttccattagtatgctttcaattttttcccccgttgacggaaacttcctcttaacagttgctaatgaaaagtatttgaaattctcttgtggtaacttayggcatggaaaactgattttgtaatgtgtgcacacaatagctttcaaacaaaaaaaaaaagactgcagaagcatagcttttgccttctgatgctttttaagcacgtccaatataaagaccttttttgctacttcatcttgaaagggacacagcatttagcctactaccatagttgkggtgggtttcctttaaggtgcagccagattttatattgtgtctagctctatagctagaactgagtaacatacctagataaatatccagcagtggaaatggtgaccaaaagcacataacaacgctc

SEQ ID NO: 85014 - DNA, 600 bp, Chicken  19866894383296_2
tgtctgaaatcttgtttaccaaacaagttccattagtatgctttcaattttttcccccgttgacggaaacttcctcttaacagttgctaatgaaaagtatttgaaattctcttgtggtaacttayggcatggaaaactgattttgtaatgtgtgcacacaatagctttcaaacaaaaaaaaaaagactgcagaagcatagcttttgccttctgatgctttttaagcacgtccaatataaagaccttttttgctacttcatcttgaaagggacacagcatttagcctactaccatagttgkggtgggtttcctttaaggtgcagccagattttatattgtgtctagctctatagctagaactgagtaacatacctagataaatatccagcagtggaaatggtgaccaaaagcacataacaacgctccaagagtcactcaagattttaaatagctctgctcttacctgaacagcaatatatagtcctggaacattgaaagactcaaacatgatttcagcagtatattctctattttctggagtatttaatggaggttcagtctatgaaatgaagaaaagacatcttacttgcattcagatta

SEQ ID NO: 85015 - DNA, 600 bp, Chicken  19866894383297_1
ggctcaaagatttatagggcagaattgtattggtgaggccgatgctccagctcaagtggtgatcaggtgtggaggcagcaagtgaagtcagcctggttcagtgcagtggggctgtcgtggttttgtgatctttgttattggtgttccatatcataacatcatgtagtgcactgggagttaaagagttaattgtgtagttccatagattgttgatagttccattacctgtttcagaagaaaaatgatctacagctcccagaaaacttcactgttccatttccgtttttgtgataaaactgyctgggagtcacaggaccatttctattttgctgcatcaaagagggttgcaaaaaatcacaagtaagtcagtccagactgtttgtaggtctaactagaagagatctttgaggaaaaggaattgtaaacagaattgatgttaaaagtatgtagaagagaataatggtagacactggacatgttgtcagagaagcccagttagacacttcctctcaattggaaccatccaaaccattgcttctgcagtgatcgtaccatctaccaaatccacatctctccagaggaataaagtcccccttcatg

SEQ ID NO: 85016 - DNA, 600 bp, Chicken  19866894383297_2
agagggttgcaaaaaatcacaagtaagtcagtccagactgtttgtaggtctaactagaagagatctttgaggaaaaggaattgtaaacagaattgatgttaaaagtatgtagaagagaataatggtagacactggacatgttgtcagagaagcccagttagacacttcctctcaattggaaccatccaaaccattgcttctgcagtgatcgtaccatctaccaaatccacatctctccagaggaataaagtcccccttcatgtcctcagcttatcccctggcaacaaagattgcctttcwtccttggctacatgagactatgagaaaaatggatcacatgcaggcaaaggttggggtgcagacaactgtaaaractctgaagagagaaatgatctcactttgagagaaccgtgtcagtgcaggcagcaaccaggagctgacagatatttctgcccatcatctattgaagacattccaccaaaaacctagctgcctgccccacagagcaaaagcagccagcaaaccccaggaaggcctctgtggttttcaggtctacaaggataggagagagggaagagagaagagagagtaggagacagg

SEQ ID NO: 85017 - DNA, 600 bp, Chicken  19866894383297_3
aaaggaattgtaaacagaattgatgttaaaagtatgtagaagagaataatggtagacactggacatgttgtcagagaagcccagttagacacttcctctcaattggaaccatccaaaccattgcttctgcagtgatcgtaccatctaccaaatccacatctctccagaggaataaagtcccccttcatgtcctcagcttatcccctggcaacaaagattgcctttcwtccttggctacatgagactatgagaaaaatggatcacatgcaggcaaaggttggggtgcagacaactgtaaaractctgaagagagaaatgatctcactttgagagaaccgtgtcagtgcaggcagcaaccaggagctgacagatatttctgcccatcatctattgaagacattccaccaaaaacctagctgcctgccccacagagcaaaagcagccagcaaaccccaggaaggcctctgtggttttcaggtctacaaggataggagagagggaagagagaagagagagtaggagacagggatattaggctttagccatgttttcagtgagccctggctgccctgtttttagaagagagcactggacactcag

SEQ ID NO: 85018 - DNA, 600 bp, Chicken  19866894383298_1
tgccattgtgctctacttccttctatccctctctcctaggtatacctccagtcccaagacatgtcctgctacagccagtgtgtgccatgccggccctgtggcccgactcccctggccagcagctgcaatgagccctgtgtcaggcagtgccagaactccaacgtcgtcattgagccctctcccgtggtggtgaccctgcccggacccatcctcagctccttcccacagaacacagttgtgggatcctccacctccgctgctgttggcagcatcctcagctctgagggcgtgcccatcacytcrgggggctttgacttgtccggctttggcagccgctactgtggcagaaggtgcccaccctgctaaagccactggccatggtcccggagaaattcatccataaaccagaaacatggtgctggatgaaggaatcttcaagcccctgctttcagaatacctgacccgacttggctagtctaggaaatgctgataggaaggggcaatcccgtgctttctgaaaacatgactcatgtgttttattgttaccctctacctaaccctttctctccattgtctttctttctttctttttttcctttt

SEQ ID NO: 85019 - DNA, 600 bp, Chicken  19866894383298_2
cattgtgctctacttccttctatccctctctcctaggtatacctccagtcccaagacatgtcctgctacagccagtgtgtgccatgccggccctgtggcccgactcccctggccagcagctgcaatgagccctgtgtcaggcagtgccagaactccaacgtcgtcattgagccctctcccgtggtggtgaccctgcccggacccatcctcagctccttcccacagaacacagttgtgggatcctccacctccgctgctgttggcagcatcctcagctctgagggcgtgcccatcacytcrgggggctttgacttgtccggctttggcagccgctactgtggcagaaggtgcccaccctgctaaagccactggccatggtcccggagaaattcatccataaaccagaaacatggtgctggatgaaggaatcttcaagcccctgctttcagaatacctgacccgacttggctagtctaggaaatgctgataggaaggggcaatcccgtgctttctgaaaacatgactcatgtgttttattgttaccctctacctaaccctttctctccattgtctttctttctttctttttttcctttttcc

SEQ ID NO: 85020 - DNA, 600 bp, Chicken  19866894383312_1
tgggaggaatcacggaagtatttggccaagaaaatacagctctttcccctccttgcctgaagggggctgtatcttttttattacaagcatccaagaactatcacagcagcgaatgctcaaagcttaacagaaaacaatgcaacttaaaataaaaatcccaactctgctgatcattcctggaactaactttgactttgtcaagccctgaaatgtaccacctagcctgtgatattaagaaatcaacagattttgcctgtgcagtgtagcaaacaagttcacttttcttacttctgatcttarcgaagtttcttcttccactctgtttggcatttcatcagtttctttagcttttagtaacaatttctgaaaaaacacacaaaacagagtatttttttaaatgtcaatcattcacaaagcagtaaccacatatgcccattttctttactaatcttatactacagcctttccttgaccacaaactcctacaggggtatttcatagaatcacagaatcacaaggttggaaaggacctacaagatcatctagtccaaccgtcctctcttaccatcgctaccacaagccaataaaccatatctcgta

SEQ ID NO: 85021 - DNA, 599 bp, Chicken  19866894383314_1
  misc_feature (1)..(81): n is any nucleotide
nnnnnnnnnnnnnnnnnnnnnnnnnnnnnnnnnnnnnnnnnnnnnnnnnnnnnnnnnnnnnnnnnnnnnnnnnnnnnnnnnacaggatagaaacgttttgccaaatcacccacaggaagcacagcaggcacactggtgagcaggggttatgatgagaagtaggtcttagtttagttagactacagataagggcatcccagaaataactccagacctggtgattgataactgcatcagttgttgtgtattgttgagcagctgtgggaatctgtgagcacacagtcttcaaaactgtgatcygtcacttgcatgcacaattctgcacatacctgtgatgtatgtaaattgcttgctgacagctctgtaggtagaatccagcctgcaaggtgcagcacattgtttcacaactgcacataaaccacaagagtctcagattaattgtgttttccatattttagcagtatcacttacaggaaagaatgaaaaataaatgttgtatatatgtattatctaaacatatttcatgactaaaatattttgtagaaaaataaagttgtaacttttatcagagtgaaagatggctttgtattactaatgca

SEQ ID NO: 85022 - DNA, 600 bp, Chicken  19866894383315_1
gaaagaacaaactgaggagaaccagtaatcagctctcgctgtctcactgagagcatgcctctgtttagtaacctgcttctgagaaaggtccctgaggaacctgtaagctgtgaatgcagatctctgtaggagtttaattagatgctgtccttcagagaagcatagttgctttttctttaagaactgggcttctgcttcctaattaccttgctcttcctgactgggactgctaaagatgatctgaaccaggtaaatgaatgcagtaaattgacgttcataaatacaatcagccactttttrcttggacaaaaagtgtgatatgtagtagcacaggtttgcaagagactgactagaatgtaagaatggtacaaattctttttagaagatggcctagaaattaagtcacctttaccttgtaaggttagatgggtcgtccatgcttcagctggagcttccagtgacttctaaatgagcacagcatcaggtgagcagcaacctagtcagtaattaatagatctagttgcatgtccctgtcacctcgctgtctcagatatgcaggccagattgagccactgagcccttaatgcagctcctaagtag

SEQ ID NO: 85023 - DNA, 600 bp, Chicken  19866894383316_1
attctttacattaaaaatactttgcatatattaattggttgcaaaataagtggtgaaataattgcttaattattttaaattgagacaaaatgcaggagaagttgaatcacgtagacatatggtaacgctacattatctggtaagctacttgttcttcattttcatagttatgggtgcttacagatactaaattgcttctagataggtatatttttgttccatgacattggtagaaattgatcaggaattgaaaagaaatactaataaagatgcctatgaagtttaaagtcagtacattcrcttatttaataaactaacattttaatttcagaaagatttcttatgagatatcttgtatacctcaaaaataagaagtgaaaataaagatttataaccacaattttacacaattttgatttatcatgcccatataaaatgcaaagataaaaagatccagctacctgctgtattgtctggacagtactgtaattttcttcccacataaactgaaaacaaccactccaaaattgaataccagaattcatattgacttcaaagaaaagacatgtaataattcagtttgtaatttggcttagagtt

SEQ ID NO: 85024 - DNA, 599 bp, Chicken  19866894383317_1
  misc_feature (1)..(139): n is any nucleotide
nnnnnnnnnnnnnnnnnnnnnnnnnnnnnnnnnnnnnnnnnnnnnnnnnnnnnnnnnnnnnnnnnnnnnnnnnnnnnnnnnnnnnnnnnnnnnnnnnnnnnnnnnnnnnnnnnnnnnnnnnnnnnnnnnnnnnnnnnnncagcgaggggcagctagttatctcacccactgacctgtgtctgccagcaggctgctcggcataggcggccaggaagctaattctctgctgcaatgggagagctggaaatgctatgagggcctgcgtgacacaatcaaataaaatgcacgagcagaggtaaragcctgcctgcaatgcctggagaaagcttcactggtttcttaagtgcttgcatccagctgagagcaaacagcccaagctctgtcagctcagctggagggtagtgataacagaaactgccaaatgaagggcaagggacatgcaggggtacactggtgtctctgatgtggcgtgtgcttctgggatggcggtgggagccctgccagcctacttgtatctcagtgaagcaacctgggagcttacaatccccttttaaagccccaagcccttttgtttggccactagcatgcagtcaggtttt

SEQ ID NO: 85025 - DNA, 600 bp, Chicken  19866894383318_1
cgcacagaccaacgcatgcagagaaagggaagtatatttgtttttctgtttgatgcagtggagtagtttctggttataaatttttccagcctgattcagaaaggccaaaacagaagtccagagagacacaattcatctaaaattgcttcattgttttttaagtgaaaccagaagcgctggggacctagatactctgtctccagccagctgtagcatgggctgagagctgtaagtggaagatggaaatcttcccttgtgtggtttcccagctgccaacactgcatgttggcagaggtgagstgcccttgactcgcttctttccaattcttccaaacatccatttgtcaaaaagccgcacattcatcaccaccctccttgtccaagtcaagctctgtgttccttgtcctccagcgtccctccccgtccctgcaggacgcagggatggctgtcacacagccactggtgctgggcagctgctctctccccaccatacascactgggccagcgcacatactcagttcacctgtttaagattccattttgtgtcacgggtggtgctgctcatcttccagctgcagagagactttggctagagccaa

SEQ ID NO: 85026 - DNA, 600 bp, Chicken  19866894383318_2
gtctccagccagctgtagcatgggctgagagctgtaagtggaagatggaaatcttcccttgtgtggtttcccagctgccaacactgcatgttggcagaggtgagstgcccttgactcgcttctttccaattcttccaaacatccatttgtcaaaaagccgcacattcatcaccaccctccttgtccaagtcaagctctgtgttccttgtcctccagcgtccctccccgtccctgcaggacgcagggatggctgtcacacagccactggtgctgggcagctgctctctccccaccatacascactgggccagcgcacatactcagttcacctgtttaagattccattttgtgtcacgggtggtgctgctcatcttccagctgcagagagactttggctagagccaagtggggagaaatcctttctgaagagacatctttccaccagcgcctccactcaggcctttctgacacggattttcttactacgcatgagacagagacacacctgccccatwcaggcactgggacatctctgcctccttacaagagttatscagtcaacaggagctgccccttgctgggaggaagatgaggatttcc

SEQ ID NO: 85027 - DNA, 600 bp, Chicken  19866894383318_3
gcgtccctccccgtccctgcaggacgcagggatggctgtcacacagccactggtgctgggcagctgctctctccccaccatacascactgggccagcgcacatactcagttcacctgtttaagattccattttgtgtcacgggtggtgctgctcatcttccagctgcagagagactttggctagagccaagtggggagaaatcctttctgaagagacatctttccaccagcgcctccactcaggcctttctgacacggattttcttactacgcatgagacagagacacacctgccccatwcaggcactgggacatctctgcctccttacaagagttatscagtcaacaggagctgccccttgctgggaggaagatgaggatttcccaggaaggccccactgccatccccagacaccaccagcactgggacctgggttctgtctctgcagtgtgaccttacccggtgtacgccacaacttccttactctcagcaaggaactactaccgctctgccactccctgcagcctcccaattagagactaatcactccttgccctgtttcaccccacaggtgcatggcatcttcctctccatgagct

SEQ ID NO: 85028 - DNA, 600 bp, Chicken  19866894383318_4
cacacagccactggtgctgggcagctgctctctccccaccatacascactgggccagcgcacatactcagttcacctgtttaagattccattttgtgtcacgggtggtgctgctcatcttccagctgcagagagactttggctagagccaagtggggagaaatcctttctgaagagacatctttccaccagcgcctccactcaggcctttctgacacggattttcttactacgcatgagacagagacacacctgccccatwcaggcactgggacatctctgcctccttacaagagttatscagtcaacaggagctgccccttgctgggaggaagatgaggatttcccaggaaggccccactgccatccccagacaccaccagcactgggacctgggttctgtctctgcagtgtgaccttacccggtgtacgccacaacttccttactctcagcaaggaactactaccgctctgccactccctgcagcctcccaattagagactaatcactccttgccctgtttcaccccacaggtgcatggcatcttcctctccatgagctcacagggctgccagcaaggcagggtcacagtaacaccgc

SEQ ID NO: 85029 - DNA, 600 bp, Chicken  19866894383318_5
ctgcctttgttcctgctggcctcgagtcagctcggcataaaggactcgtgaaaaacagtatccatcacttctgaaaactgcctagcacattattagagcaggagaagttcaactgcagatcacatgcattttttggctttgaacaaatggcatgagtcaatcctctataaattcaaaatgtgtattagagcacagactcctattttaagtgggttttgcaccttgcctcctttttccacacaattgctggagattagccctgccactttgctacttccaagcttctccacataacaagaygcagagagagttcatgacactctgtcacccatacccctgggacggaaggcagggaagcacctaccccaagctgcagtgggagggaagggagaaaaggggcggcrgggggagaggaggcagcagctttctaattgcacttcctgaaaaagcttctgagaagaaaatgactgacagagagagcgaggcagcctgagagcatcctctgtgccgcaacacacacagggagctggagagataagaggcattttctgtactccaaatggcctaaacaaataaattacagtcttgataaccttttat

SEQ ID NO: 85030 - DNA, 580 bp, Chicken  19866894383318_6
aagttcaactgcagatcacatgcattttttggctttgaacaaatggcatgagtcaatcctctataaattcaaaatgtgtattagagcacagactcctattttaagtgggttttgcaccttgcctcctttttccacacaattgctggagattagccctgccactttgctacttccaagcttctccacataacaagaygcagagagagttcatgacactctgtcacccatacccctgggacggaaggcagggaagcacctaccccaagctgcagtgggagggaagggagaaaaggggcggcrgggggagaggaggcagcagctttctaattgcacttcctgaaaaagcttctgagaagaaaatgactgacagagagagcgaggcagcctgagagcatcctctgtgccgcaacacacacagggagctggagagataagaggcattttctgtactccaaatggcctaaacaaataaattacagtcttgataaccttttatttcactgctgtgccatttgtgctactctggttgggattgggtcattcccaggataaatcctcaactgcaaggctttaaaattga

SEQ ID NO: 85031 - DNA, 600 bp, Chicken  19866894383322_1
ttggtgcccaacagtagatttctagtccttttctattaatccttgcactaaaattcaacattaccaatatgtcattttcatttcgtttattctgccaacttctactttttcctcttattgattttattcctgtctaaaacctctttctgttgtttttcagtagaataaaaatgggctaaatcaagcactttacccaattgatgactcttcatacttgaccaagaatctctatgccagaaataacattccacagtctggaaacgataaggatgaaaaggtccattacaacatattaatcaytgttctttcatttttctttaggcaggacaagttccattgctgtttactctgtgacttgtgatgggaatctttgaagcctgctttacaataggaatgaccttaggctctacatgctttctttgactttttaaactgctgtgccaaaatacatgcccatcagtatgcataatttgtgtatgcacttgctaggacagaacgcagaactcactgtcagcctgcagtggggaggtcggtgtttttctgtgcctgatctgagagaacagctgtgctaagtgtgtggtgaaatcagggtcacagcag

SEQ ID NO: 85032 - DNA, 600 bp, Chicken  19866894383323_1
ggacagcctgccagcagcccggggcgggtgcgatgggcatcccagtgcatggagagggagctgggatgtgcagcgtggggcagccctgcagccttggtggcagtggatggagctttgcgtggctgggttctgggagcagtcaggtttgggattgtagctccagacaggtgggctcttggctggccctgatggcgatagcatcgtggttgtgtcaccctcacagcctgcgtagcatctctgggtgcgttaggaagcaatagagctgatactgctctctctgaaggttaggaagaacttttyctttgrgccctaagaaaatggaggctgtgaggagctacgatgcatcttctcctatggtcttgcagaggggatggccctttggatgccactcttctcaactgcactgcttgtggcagtggaaggatggcagcaagaggtgacacctgccttcatccaagagcctccagagccaggcaggccagagcagcacggagctggccaccaaaaccttccacccaagcaaaaaaagccctacaagtaccctatctcccaacacctctgtccgtgcattgcgcatcaaacccgcaacatggaaaatca

SEQ ID NO: 85033 - DNA, 600 bp, Chicken  19866894383323_2
cctgccagcagcccggggcgggtgcgatgggcatcccagtgcatggagagggagctgggatgtgcagcgtggggcagccctgcagccttggtggcagtggatggagctttgcgtggctgggttctgggagcagtcaggtttgggattgtagctccagacaggtgggctcttggctggccctgatggcgatagcatcgtggttgtgtcaccctcacagcctgcgtagcatctctgggtgcgttaggaagcaatagagctgatactgctctctctgaaggttaggaagaacttttyctttgrgccctaagaaaatggaggctgtgaggagctacgatgcatcttctcctatggtcttgcagaggggatggccctttggatgccactcttctcaactgcactgcttgtggcagtggaaggatggcagcaagaggtgacacctgccttcatccaagagcctccagagccaggcaggccagagcagcacggagctggccaccaaaaccttccacccaagcaaaaaaagccctacaagtaccctatctcccaacacctctgtccgtgcattgcgcatcaaacccgcaacatggaaaatcagagccc

SEQ ID NO: 85034 - DNA, 600 bp, Chicken  19866894383326_1
tcagaggttttgtgactcttttctcttggaaagtttcctccttctgctcagaatgctaacatgggtggcacaattcaagaatgattaacatttatctgggatttgaggacatctggcaagcccatttgagctgctacactgctgtacgtctggaaagcctggatgtatctactgaatgaaacagatcagtgccaagcacttgaagagtaaatctgtgttttcaaaattctgaatatgatgcctctgaaaagcattgggcttaccatgtggggcatcctggtatacatcactctggcttawctggccagaaattgtatgtagtttaaaaacaaaaaagaatttaggaaatatgttgttaatgttcaactgtagaaatggaaggaatgcatgctgactaaatatcctattcaaggaagcatcaaacaatttagacttaactgataattatgtttttagaaaatgcattcttcactgttctcaatagaaaagctggtttttaaagagatgattagggaattaattgcaatattttagggatttcttacaatatttactaattaattctaagactactgtgatcactaaaagggatcactaagc

SEQ ID NO: 85035 - DNA, 600 bp, Chicken  19866894383330_1
ctctttaatactactttatatttctgcgcattaatcttagccactaaattaaaataatctgccgcatactagaagtcataagtcattcttagagatattattgcacaccttcaaagcttgagactaaatatgagcaccatataactgatagtggatcaataatttcataattactttttttttttttccagaaggctttatttacttagcacaaggagtaaaccacatgcatatgttcctgctttcgctgtactttttatttaccagaggggacagagcttttttattgtgttctcatayacaaggttgttgaaagagattgaaagatgaaggaagaggagatcatgagaaatgagaaggattataaaagacttagaaataagcttccatttcattgaaacaggtagctatattrtttggctttaaggaagttttaaacccttatcttaaggatccttgtcgacgtaaaatgaactgatgttacaatgattcaatactgtgttcagcatttctgagcttgagtgctctgcattcgttgtctgtgtcatgctgggctgagagataataagaagcaagtgagagaccagcatccacatagag

SEQ ID NO: 85036 - DNA, 600 bp, Chicken  19866894383330_2
gcttgagactaaatatgagcaccatataactgatagtggatcaataatttcataattactttttttttttttccagaaggctttatttacttagcacaaggagtaaaccacatgcatatgttcctgctttcgctgtactttttatttaccagaggggacagagcttttttattgtgttctcatayacaaggttgttgaaagagattgaaagatgaaggaagaggagatcatgagaaatgagaaggattataaaagacttagaaataagcttccatttcattgaaacaggtagctatattrtttggctttaaggaagttttaaacccttatcttaaggatccttgtcgacgtaaaatgaactgatgttacaatgattcaatactgtgttcagcatttctgagcttgagtgctctgcattcgttgtctgtgtcatgctgggctgagagataataagaagcaagtgagagaccagcatccacatagaggtgtcctagtgacaattttctgaactctctttttgagctttgagtaaaaaaaaacaaataatggaaacagtggagagcagtggaaaatggagaagctggaaattaaaaaagctag

SEQ ID NO: 85037 - DNA, 600 bp, Chicken  19866894383337_1
aggccttgcagccaggcggcagcgaggacaccttgctggagcggctcttggcctactatggcccccaggaggggggcaagaaaggttgggatggggaccagcaccacctggatgtgttgaccaagccacctgtggtccctgtgcccaacagtgccttgtgtccctacagggcatgacccgctgctgcccagcgacaaaccccggcacttcttcttgggccacagctcgggcaccaactgggtgcactacgatgccacgggctggctcaaccacgtcaagcacaacccggccacccagaaygcctccatgctgctgcaggagtcacagaagtgagtggggtccccagtttgggggaacggagcagggggyggtttgggaaggaggcgtttttgggggtgacggtccctttgtgccccccaggaagatcatcagcagcctgtttgcggggcgcggcagctcggcgctggtgctgtcgggctcggtggcagggctggaggggggctcacagctggccctgcgccgggccaccagcatgcgaaaaaccttcaccaccggggtggccgcagtcaagaagaaatcgctgtgcatccaagtcaagct

SEQ ID NO: 85038 - DNA, 600 bp, Chicken  19866894383337_2
aggggggcaagaaaggttgggatggggaccagcaccacctggatgtgttgaccaagccacctgtggtccctgtgcccaacagtgccttgtgtccctacagggcatgacccgctgctgcccagcgacaaaccccggcacttcttcttgggccacagctcgggcaccaactgggtgcactacgatgccacgggctggctcaaccacgtcaagcacaacccggccacccagaaygcctccatgctgctgcaggagtcacagaagtgagtggggtccccagtttgggggaacggagcagggggyggtttgggaaggaggcgtttttgggggtgacggtccctttgtgccccccaggaagatcatcagcagcctgtttgcggggcgcggcagctcggcgctggtgctgtcgggctcggtggcagggctggaggggggctcacagctggccctgcgccgggccaccagcatgcgaaaaaccttcaccaccggggtggccgcagtcaagaagaaatcgctgtgcatccaagtcaagctgcaagtggtgagcaggggatgccgggctggggatcccaccaccacgctttgtgcatcctgtcgccctgc

SEQ ID NO: 85039 - DNA, 600 bp, Chicken  19866894383339_1
aacattttatctttggagaatttagctgctgcttttgctcttttgctccttctgaacccttgtaatacaacctatttaatagcatgtgctccactattacaactctttttaaaatctgttgtatctcagtatatataaatagaaacagaggagtgcagctgacaaaagaagccaagtgcatgacctcatctcaaacagcataacaacaacaacaacaaaaacaaaccgaaaaacagtagtaaatttacatcacacagaatgtgatgaactacagagtataaaaaagagttttagctgttmtgggcaggttcctctgttttcacagtttaactgttcactctgtatgggagctggaaactctctatgttgacatcccttcatcccttatgctttcctgtaaagagacagtacagtagaagtgataagtaaaaaatacagtaggagtcccctctttccaatgaaagttgagttgtcagtagaagggagtacaggcacacagtctttaggagaaaatatgtttgcagacctgtgagtcctgcactgcagccaaaagcattgctaacaacccccrggaaaatattatgaaagaaggaggaaaaa

SEQ ID NO: 85040 - DNA, 600 bp, Chicken  19866894383339_2
cagagtataaaaaagagttttagctgttmtgggcaggttcctctgttttcacagtttaactgttcactctgtatgggagctggaaactctctatgttgacatcccttcatcccttatgctttcctgtaaagagacagtacagtagaagtgataagtaaaaaatacagtaggagtcccctctttccaatgaaagttgagttgtcagtagaagggagtacaggcacacagtctttaggagaaaatatgtttgcagacctgtgagtcctgcactgcagccaaaagcattgctaacaacccccrggaaaatattatgaaagaaggaggaaaaaagactacaaagagtaagataactgatacactgatacatccattatttgctgtgggaaagtgcattttctctctccagcaccaggagaactgatggctacctcttcacaatcgttgggaactatatagtgatatgcacttcaattataaacacttcgggacttctcctggatacagcacgggcacagtaatgaagcacattttattgatctattttacatggtgtccaactgaactagtggaaaaaaaagtgaaaaacatactttttttctg

SEQ ID NO: 85041 - DNA, 600 bp, Chicken  19866894383340_1
ttccaagaaccagcttttcacctggagtaaatcaatagctctccactatagcacagctgagctgtcccagctgaattatttatggagctaattgagcttacttatagaagagaggaagttgctgtgagctttgtggtagaaaggtgaaatggagtgacctaagtggtgattgaaaatgtgttggtggtaatccatgcttttctgatgaagcacctcttccccaggtaggctatattgctattcttctatctggaaacttattatcttttctttcaacagcaaaaaataccctaggttgaraagaattttcttctatggtagagagtactctgcaggaactcttcagaccataaagcagctctaccccattgtaactgggctctagttcattagcagaagatggtgcttagtggagctactgtgcatcccaaagagtgagagaaatctgctctccaaagaaattgtggaagagtgcagtgttagtagtagtagaagtaagcctgggaaaaactctttttttttttttccttcctttggaagtaataaatcttgaaccaaagagatgtaatgtatctaaatctgtggttggggcttggtttc

SEQ ID NO: 85042 - DNA, 600 bp, Chicken  19866894383345_1
aaacggagctttttccactcccagcctataaatactgcttgtgcagaggtatattagcagtgctatttataggctgaacacactgtacacgtagcagctacgacctcagccagtgcttcctctttatctttgtatgtaccaccacctccttatcagctcttcattacagcgattccttcccctccgacatgctgagcatcactccccaagcacagccctgccagcactaccccaatgccatcccaaacagtgcttcgtgaacccatggcaccctggctggccctcaccttcatttccagytgttaaatttcattacccaaagctaaaaatacatcagcactttccccatatgacttttccaaataagtcgccatggcaactgatgctcctggctcagaactgggcatggatgcatccatggagtgaatctctcaacagagatgctgcccgggcttgggagaaagtttgacctgctctgcatggggatcttttatcccgactgagaaaaacaaagccctgttttgccttttaaaggaaaagtaagggagtaagttccacagcgatgctgcctcagcagctctgcattggccccagcacaca

SEQ ID NO: 85043 - DNA, 600 bp, Chicken  19866894383350_1
gcagctgccacccgcatggccgccgggctcgccgcgtcccgtgtcggtggctgaaggcggcggcgaggggaagcgccgggccgagcgcgcctcacggccgagcggcgctaagcgctgaggtgcctcccgccgcccaacggtccggcacgcgcccgatcgctgcgcgcgcggcgcagcggcgccaaagggagcgcggctgagggagcggcgggaacgggcgcagcccgcggcgcggctcacctgcgggaggcggatccatagcgaagcaggccatgcgggcggcggggagaggcggcaacygctccgccgggcgctttcaaacagcacggaacttcctgccgtcgtcacttccgccgccgccatcttgtgacgggagaggcgcgagctgtgcccgcctacttcctgcagagcgcgatgctgtggtgctcaccgcgctattggagatggctgtgggggcagcgcagggcagggctgcgggttgtgtctcacacccacatcggaatggaaaagcagtgatcggcttgcctcgggaatgcggaaataaagaccagggaacagtagccagatttcacatatttttcacttaaatccagttatcca

SEQ ID NO: 85044 - DNA, 599 bp, Chicken  19866894383353_1
  misc_feature (1)..(38): n is any nucleotide
nnnnnnnnnnnnnnnnnnnnnnnnnnnnnnnnnnnnnnttataaaaaaaaaaaaaaaagaaaaaagaaaagaaaagaagtcttacaggaataaagaaggcaaataactataattttaactcagcaatgccaaggaacttcctttaacactttctgttttgtttataaagcaatacattcccattcacttgaagctcaagctcagcttttcacagtaaaacaacttccctactctcttacagttactcagacaaggaataacatctgtagcacagatctgattatcatttctgcaggagcragtgacagggaatcaagaagaattttctttacagagggttttgctttattcttctctttggtcaaataggaaatwttgcttctggaggtactgtaaatgcttatctagtatctctgaagcaccaatgacaaaggagctggcagatgtaaatcacatggcacttaccatatgagcaagcagggcctccatacggcctcaaacagtcacacctgaacgttgtccaaaggtccacacacagcccgccatgaaagcagggctcagagaggcaccactcagtgcggtcacagccctgtgtcaca

SEQ ID NO: 85045 - DNA, 600 bp, Chicken  19866894383353_2
gaagtcttacaggaataaagaaggcaaataactataattttaactcagcaatgccaaggaacttcctttaacactttctgttttgtttataaagcaatacattcccattcacttgaagctcaagctcagcttttcacagtaaaacaacttccctactctcttacagttactcagacaaggaataacatctgtagcacagatctgattatcatttctgcaggagcragtgacagggaatcaagaagaattttctttacagagggttttgctttattcttctctttggtcaaataggaaatwttgcttctggaggtactgtaaatgcttatctagtatctctgaagcaccaatgacaaaggagctggcagatgtaaatcacatggcacttaccatatgagcaagcagggcctccatacggcctcaaacagtcacacctgaacgttgtccaaaggtccacacacagcccgccatgaaagcagggctcagagaggcaccactcagtgcggtcacagccctgtgtcacagaggaaacctcgctcacagggagagccaccgggagcacagcttcagcatccacctgcaagtcttccaggcagccaa

SEQ ID NO: 85046 - DNA, 495 bp, Chicken  19866894383357_1
gttctctcctgtccggatgcggccttgtgggtgtgatgatatgcggggcctgcgacgtgcccgggctccaggcccagctggcaacaggaggcagttgctgggcagcacggtgaggagctgcagctttctgagcagggggatttggagttaagctctgggctttggcaagtgtcatgctgcaaggcgcaccagaggactcgcaattgcaaatgagaaaaaatcaaagcggggcacaaagaggtcgatcctctctttcccagagtgaaaaaggcacttttcccacttattcttttcttttcwtttttttcttttcttttcttttcttttttttttttttttttggagggggagatgagggggactctgcttcctttctcatagaaaggagatgttaaccccttcttgactgccgcacctttaacatctcatggaaactcactgcctactgcctttcctattgtcctatccctccacctgctttcagtataaaaacaa

SEQ ID NO: 85047 - DNA, 494 bp, Chicken  19866894383357_2
ttctctcctgtccggatgcggccttgtgggtgtgatgatatgcggggcctgcgacgtgcccgggctccaggcccagctggcaacaggaggcagttgctgggcagcacggtgaggagctgcagctttctgagcagggggatttggagttaagctctgggctttggcaagtgtcatgctgcaaggcgcaccagaggactcgcaattgcaaatgagaaaaaatcaaagcggggcacaaagaggtcgatcctctctttcccagagtgaaaaaggcacttttcccacttattcttttcttttctwttttttcttttcttttcttttcttttttttttttttttttggagggggagatgagggggactctgcttcctttctcatagaaaggagatgttaaccccttcttgactgccgcacctttaacatctcatggaaactcactgcctactgcctttcctattgtcctatccctccacctgctttcagtataaaaacaa

SEQ ID NO: 85048 - DNA, 600 bp, Chicken  19866894383383_1
cctggagcccattggaacaggcctctgcacatccatagccagagattagagcaaagatgctctgacatagcagattccagtgtctgaacagctcagcaatatgggctgaagacacccagggaagaataatgcatagcagcattgaaaagcagcacgcttagaagaaacacagttagtgggcatggcggggatgggttgatgtttggacttaatgatcacagaggtttcaactttaatgatgctatgattatatgaccaaaagcacagtgagtagattgagccccacggttattcctccargtggtgttaacccctctggctcaaggaggagaaaattgaacgtgtatgcttaagcaaacaaaaccaatgaaaccccacycaaaatactccccaaaaatcatattctaggaaaaataagctgtgtgggagatttctgtccaggttatggttgtctttcaggagcaactggctctcttcatttaaatcagacgttttactgatgtcccttgagaaaaataaagcaaaagcattgttcagcccttgcctgcagccagcatagctcaggagacagtctgccctcttctatcacaaagaaaacaa

SEQ ID NO: 85049 - DNA, 600 bp, Chicken  19866894383383_2
gtgtctgaacagctcagcaatatgggctgaagacacccagggaagaataatgcatagcagcattgaaaagcagcacgcttagaagaaacacagttagtgggcatggcggggatgggttgatgtttggacttaatgatcacagaggtttcaactttaatgatgctatgattatatgaccaaaagcacagtgagtagattgagccccacggttattcctccargtggtgttaacccctctggctcaaggaggagaaaattgaacgtgtatgcttaagcaaacaaaaccaatgaaaccccacycaaaatactccccaaaaatcatattctaggaaaaataagctgtgtgggagatttctgtccaggttatggttgtctttcaggagcaactggctctcttcatttaaatcagacgttttactgatgtcccttgagaaaaataaagcaaaagcattgttcagcccttgcctgcagccagcatagctcaggagacagtctgccctcttctatcacaaagaaaacaagcaattcagtctttattccctgtaaactaccaccaaaatccacttgtatcctcagtggatgcctggatcctttggccct

SEQ ID NO: 85050 - DNA, 599 bp, Chicken  19866894383385_1
  misc_feature (1)..(144): n is any nucleotide
nnnnnnnnnnnnnnnnnnnnnnnnnnnnnnnnnnnnnnnnnnnnnnnnnnnnnnnnnnnnnnnnnnnnnnnnnnnnnnnnnnnnnnnnnnnnnnnnnnnnnnnnnnnnnnnnnnnnnnnnnnnnnnnnnnnnnnnnnnnnnnnncctggggacagatggccccacgaggggtgaaatgctccttggtggcatccccaaccccacctttggccacctgctgctggcaggggacagggttggccgtcatagccttatccagactgtagccagcttctcccttgggaaacggccccagcagcmcatcaggtgtcttctgtggggcgtggatggggtggaaggcgctgcygtgcctcgtcaccaccctccctccrtgggcttccagcggtgccattcgcccatcgctgtgatgctccgcgaataacgcagcatccatggggctgaaggcgaatccgggatttggatgcaggtacctggctggaggcagaggtggaggctcaggatccctcggtggccccattgctttcagcgagggcaacgtgcccggtgcatccagcctggacacgaagccatctgaggggctgggatagtggctccggggg

SEQ ID NO: 85051 - DNA, 599 bp, Chicken  19866894383385_2
  misc_feature (1)..(98): n is any nucleotide
nnnnnnnnnnnnnnnnnnnnnnnnnnnnnnnnnnnnnnnnnnnnnnnnnnnnnnnnnnnnnnnnnnnnnnnnnnnnnnnnnnnnnnnnnnnnnnnnnncctggggacagatggccccacgaggggtgaaatgctccttggtggcatccccaaccccacctttggccacctgctgctggcaggggacagggttggccgtcatagccttatccagactgtagccagcttctcccttgggaaacggccccagcagcmcatcaggtgtcttctgtggggcgtggatggggtggaaggcgctgcygtgcctcgtcaccaccctccctccrtgggcttccagcggtgccattcgcccatcgctgtgatgctccgcgaataacgcagcatccatggggctgaaggcgaatccgggatttggatgcaggtacctggctggaggcagaggtggaggctcaggatccctcggtggccccattgctttcagcgagggcaacgtgcccggtgcatccagcctggacacgaagccatctgaggggctgggatagtggctccggggggctgagggcttaaggtaagtgctgggaaaagggggagatttcccat

SEQ ID NO: 85052 - DNA, 599 bp, Chicken  19866894383385_3
  misc_feature (1)..(73): n is any nucleotide
nnnnnnnnnnnnnnnnnnnnnnnnnnnnnnnnnnnnnnnnnnnnnnnnnnnnnnnnnnnnnnnnnnnnnnnnncctggggacagatggccccacgaggggtgaaatgctccttggtggcatccccaaccccacctttggccacctgctgctggcaggggacagggttggccgtcatagccttatccagactgtagccagcttctcccttgggaaacggccccagcagcmcatcaggtgtcttctgtggggcgtggatggggtggaaggcgctgcygtgcctcgtcaccaccctccctccrtgggcttccagcggtgccattcgcccatcgctgtgatgctccgcgaataacgcagcatccatggggctgaaggcgaatccgggatttggatgcaggtacctggctggaggcagaggtggaggctcaggatccctcggtggccccattgctttcagcgagggcaacgtgcccggtgcatccagcctggacacgaagccatctgaggggctgggatagtggctccggggggctgagggcttaaggtaagtgctgggaaaagggggagatttcccattcaccatgaagccgaaagctttgta

SEQ ID NO: 85053 - DNA, 599 bp, Chicken  19866894383387_1
  misc_feature (1)..(99): n is any nucleotide
nnnnnnnnnnnnnnnnnnnnnnnnnnnnnnnnnnnnnnnnnnnnnnnnnnnnnnnnnnnnnnnnnnnnnnnnnnnnnnnnnnnnnnnnnnnnnnnnnnntatttagagaaaagggagtgactgtaaacttatctaaacccaggaatgtgacctgggcataatgtatttcccaagtacagaggcttctgtaatttggacaaaagaagtaattgaatgcaacattacgtgttgttactactagaacgctcatattttaggaaacttggacatttttcttgtttcataaatatatttcagagwagtttgtaatttgttacattatatattwaaaagtttcagattaatttctgcattactgtgttgttccctttaaaatgcattgctcggttttcagaatctttatyaaaaagtattaactggggaaattgtgccctgtgtttaatagaaacaaatatttttttgcagattaagttttggatttatgaggttatcraagttcaattatacatttattggaatttatttctaacaggatgtgagaaaagggaaagaaattatatgtgtatgtacatataaataacacagtacgtatcatacta

SEQ ID NO: 85054 - DNA, 599 bp, Chicken  19866894383387_2
  misc_feature (1)..(71): n is any nucleotide
nnnnnnnnnnnnnnnnnnnnnnnnnnnnnnnnnnnnnnnnnnnnnnnnnnnnnnnnnnnnnnnnnnnnnnntatttagagaaaagggagtgactgtaaacttatctaaacccaggaatgtgacctgggcataatgtatttcccaagtacagaggcttctgtaatttggacaaaagaagtaattgaatgcaacattacgtgttgttactactagaacgctcatattttaggaaacttggacatttttcttgtttcataaatatatttcagagwagtttgtaatttgttacattatatattwaaaagtttcagattaatttctgcattactgtgttgttccctttaaaatgcattgctcggttttcagaatctttatyaaaaagtattaactggggaaattgtgccctgtgtttaatagaaacaaatatttttttgcagattaagttttggatttatgaggttatcraagttcaattatacatttattggaatttatttctaacaggatgtgagaaaagggaaagaaattatatgtgtatgtacatataaataacacagtacgtatcatactatatcagtgtatttgtaataccatttggt

SEQ ID NO: 85055 - DNA, 600 bp, Chicken  19866894383387_3
agagaaaagggagtgactgtaaacttatctaaacccaggaatgtgacctgggcataatgtatttcccaagtacagaggcttctgtaatttggacaaaagaagtaattgaatgcaacattacgtgttgttactactagaacgctcatattttaggaaacttggacatttttcttgtttcataaatatatttcagagwagtttgtaatttgttacattatatattwaaaagtttcagattaatttctgcattactgtgttgttccctttaaaatgcattgctcggttttcagaatctttatyaaaaagtattaactggggaaattgtgccctgtgtttaatagaaacaaatatttttttgcagattaagttttggatttatgaggttatcraagttcaattatacatttattggaatttatttctaacaggatgtgagaaaagggaaagaaattatatgtgtatgtacatataaataacacagtacgtatcatactatatcagtgtatttgtaataccatttggtagttcctttragcctggaagtctgtttctttttattatcgtttaaataaagtttcttataactgtgtaaatcttgtt

SEQ ID NO: 85056 - DNA, 600 bp, Chicken  19866894383387_4
tggacaaaagaagtaattgaatgcaacattacgtgttgttactactagaacgctcatattttaggaaacttggacatttttcttgtttcataaatatatttcagagwagtttgtaatttgttacattatatattwaaaagtttcagattaatttctgcattactgtgttgttccctttaaaatgcattgctcggttttcagaatctttatyaaaaagtattaactggggaaattgtgccctgtgtttaatagaaacaaatatttttttgcagattaagttttggatttatgaggttatcraagttcaattatacatttattggaatttatttctaacaggatgtgagaaaagggaaagaaattatatgtgtatgtacatataaataacacagtacgtatcatactatatcagtgtatttgtaataccatttggtagttcctttragcctggaagtctgtttctttttattatcgtttaaataaagtttcttataactgtgtaaatcttgttatgcaatgatgatgtaaaacaatccagaatgaaggaggtaggtgatgggaaaacaagaaaactgagttactatattttgaaataagttt

SEQ ID NO: 85057 - DNA, 600 bp, Chicken  19866894383387_5
agattaatttctgcattactgtgttgttccctttaaaatgcattgctcggttttcagaatctttatyaaaaagtattaactggggaaattgtgccctgtgtttaatagaaacaaatatttttttgcagattaagttttggatttatgaggttatcraagttcaattatacatttattggaatttatttctaacaggatgtgagaaaagggaaagaaattatatgtgtatgtacatataaataacacagtacgtatcatactatatcagtgtatttgtaataccatttggtagttcctttragcctggaagtctgtttctttttattatcgtttaaataaagtttcttataactgtgtaaatcttgttatgcaatgatgatgtaaaacaatccagaatgaaggaggtaggtgatgggaaaacaagaaaactgagttactatattttgaaataagtttgttgtattgaaaaatttatttaatgcttataaattacctggacttagatcatgaatcatcagttcagtatttagatagggaatttcaaattaaaatgtaagtgctctgtgaatctatatttgtaattatgtaagccatgttctt

SEQ ID NO: 85058 - DNA, 600 bp, Chicken  19866894383395_1
gggctggtgtgcattctggtgatgcccagcagtgctgtgtggaactgctaatgatctgagggtggatttccctgtacaaaaaagagctggacaagttatccctgctcctacagtggcacagactcttatgggatggctcaggaccagccccacaggaggtgtgttccttagagctgatggctgcaggatgcacatatgcacacccaggagggtttcaccctccctcagaggtggatataaagcagggaggttgacttatgcagacaaaaagcagagtgtcagcatagggctggaggagcygaggcagaggcggtcaggcggggggagggaaggggccagccctggagctcctggcatagagctcaccccgaaataaaggcattgaggatgccgagcaacctcattataaggtggttattattgttctggctttgttattaaacttgttgtaacccctaggatcctgtcccagagcagcaccccgttgtgctgggtgctgcacaaacagagcttgcggctacggttaaggttgggtcaagggtgctgctggagactgagtctctcagaggggctcagcccccatatctgcagcttgcagcc

SEQ ID NO: 85059 - DNA, 600 bp, Chicken  19866894383400_1
gcaacccttcctggctcagaaagaagtgagattagaggctttttgtccaacagattaagcctgtgaggattccttttttcaccctctaagtctcatcttttgtgttcgctatttcaagccagttggctaaacctgagtgtctgatttgcatgcctttaaaaaataataataattgccatttgcatttttttccccccacttcaaagcaagaacatcaggtgcagggacacgacctggggtagggctaatgcccagtggctcccacatcaccatgagctccacaaacaccctgcagtaagygtgtcagcagcaagcagccttctgttgcacatccccagtcaaggaaaagctgtcagtgccaagtgcagagacccagcacgctacgagcgtttgatccttggggacaatagagggattttggtcccagcacttgagcagcactcaacgacatattaagtgccccagttcttctgcaaagagtaaaacctcatacagaggccttccagtgcctgaaggggagtcacaggagaggtgggaaaggtttccgtaaggacactcagtgacaggacaagagggaatggcttcaaactaaaagaaggg

SEQ ID NO: 85060 - DNA, 600 bp, Chicken  19866894383407_1
catttgagacctttagctatagagaagcacataaggaaaactgtttccatagaaacatgccccacagctgtagttagtataggaaaaatagttttatgattatttcaatgaagttctaccttttgttttcaatgcaaaatgtatacaataggttgcttcacagcatgatctcagtgtagctgaggtcttacatgtgaaatccaccccaatgtgaaagaaccccgcgtttccctcatgtgttcctaagagctttattagatcttgtgcatagtgtctctgacagaatgatttttccataarataaaattgcttttcagtatttattctctgtataataaatgtttacttttatatcaattcacaatgttgtacataaatttctcagaaattgtgctttaagggtagaggatcagataagcttccaacacattcaggagtgggatgttcagtgatcccagaaggaggtgagtcaggccygaggagaaccatagcaaagcggagggtgggcacaaagaatttgctaacagcttggcaccattttcattccacttcagatcagttcaaatttagatggaaaatttctgatgggttccctggaaa

SEQ ID NO: 85061 - DNA, 539 bp, Chicken  19866894383407_2
agctgaggtcttacatgtgaaatccaccccaatgtgaaagaaccccgcgtttccctcatgtgttcctaagagctttattagatcttgtgcatagtgtctctgacagaatgatttttccataarataaaattgcttttcagtatttattctctgtataataaatgtttacttttatatcaattcacaatgttgtacataaatttctcagaaattgtgctttaagggtagaggatcagataagcttccaacacattcaggagtgggatgttcagtgatcccagaaggaggtgagtcaggccygaggagaaccatagcaaagcggagggtgggcacaaagaatttgctaacagcttggcaccattttcattccacttcagatcagttcaaatttagatggaaaatttctgatgggttccctggaaatgacaaggtttgcagcacctccaaactattcaatccaagctatttctaggagagcgctttgccctgtttctttgcacggctgcatggggcaggagccatcttgtgtagatccacaa

SEQ ID NO: 85062 - DNA, 600 bp, Chicken  19866894383409_1
aataagaaacacacaaaccatgtggtgcctttatgctacaaatactccacaaacgcttgtttaaaagaaaatttcagaagcagaaatatgaatttgaaagcagagatctcatttaactggagctggttggaaagtgctttgtaagaccaagatccattcttgtggatctgaaaagtattttgcccgaaatcagaatgtgtcattttaatttattttaaagagtaatcttcccagaacagtctaagttgaacaaaacacctggtttgaataattcaaactagtaccattgtataacttttytactcggaaaatgagtaatatgaattgaaatacaaaagtggttttgtggaaagtatgtacttccattttatatatagggatgttagaagtttgcttgtttcaaaatttgttttagttgaatttgtgtttttgaacaacaaagtacttcactaagtaacttgttcagttttctgctgggcaatagtcagatttagatttagatatgctaaaaattaaagcaattgatgtgggaaacagaagactttcactgaatgtttagactgacctgaatttgaattactggatgaagtctttgggtct

SEQ ID NO: 85063 - DNA, 599 bp, Chicken  19866894383412_1
  misc_feature (1)..(57): n is any nucleotide
nnnnnnnnnnnnnnnnnnnnnnnnnnnnnnnnnnnnnnnnnnnnnnnnnnnnnnnnnattttcaaattaaatgtggtgtggggttttttgtagttgttgtgttctggtggttgggtttttttagtattgcttatggaatcatagctaaacaagcacatagtattctttttttttttttttttttttgctgaaagaccaaatcctgtcttgcctttcagagacgtgttagttacactatgtcactgcacgctgtcctctgtccctgcttctcttttacccttgctgacttttcacattcartttttgagtaatttttaatgactgctttttcccaggtgttcctaacagtttattcagtcacaagaaattctgaaaacacgcctgaagatgaaaacttctgaaattctgacactaactcagcagtttcctatagctccatgtttcttgcattccatcactttattcagccaaatggcagaacaatctcagaagctgcttctggcattcatgtagcagatcatgaatgagtctgcaccgagctctcagagggcttataatgttagaggaagtgtaaaggraaggaatacatcttacagtgc

SEQ ID NO: 85064 - DNA, 600 bp, Chicken  19866894383412_2
cttgctgacttttcacattcartttttgagtaatttttaatgactgctttttcccaggtgttcctaacagtttattcagtcacaagaaattctgaaaacacgcctgaagatgaaaacttctgaaattctgacactaactcagcagtttcctatagctccatgtttcttgcattccatcactttattcagccaaatggcagaacaatctcagaagctgcttctggcattcatgtagcagatcatgaatgagtctgcaccgagctctcagagggcttataatgttagaggaagtgtaaaggraaggaatacatcttacagtgcacttctatcatatgtatgagtatcagctagggcagaaaagaggctgatgtgagagctgtgaaagtacggagcagacagtgtggacgattcatctaatgggcctttatatgccagcattggaaaaatttacatttggactacttccttagagtttctttgcattcagcagaaacaagtaggcatttctagagcataaataatttcttccagtggttgacctctcaggtcagtatattgtttcctcgaagctcccacgttacctggagttagatcaggtta

SEQ ID NO: 85065 - DNA, 600 bp, Chicken  19866894383417_1
ctatagtggcttttacccacctaatgtaagatttgttcagtattacatgtcatctttaatcacaaggagacaagaaaagaatcagttgaagttaataaaaaataaaattagatatctgtgtgtggctgaagtaaaaacaaaacacaacaatacaaaacaaacttctttgtagtggtgttttgatgtcaatctcagaaatttaccaaaacactcacaattatttaaactttgttaaacgtgggataaatgagacaaagacagtgcttgacctgttttcatccctgctagtgtaaggattgkttttgggcatcttgactgactgcctaatgtcttattcactaacatttaaattaaataaaatccatttttagatattaagccactgttcagtattaaaattatacttccagctacacatgataaagttgagagaattgtctttatgcatgtataaaccatctttgaaatgtaatatttatgatatctttccttctctaacctgatgaaagttttatgaagattaaatatatgtgtaaaattaaaaatagaacatatgatataayaaatgattaatgttaacacttctgtacctataggggc

SEQ ID NO: 85066 - DNA, 585 bp, Chicken  19866894383417_2
cttgacctgttttcatccctgctagtgtaaggattgkttttgggcatcttgactgactgcctaatgtcttattcactaacatttaaattaaataaaatccatttttagatattaagccactgttcagtattaaaattatacttccagctacacatgataaagttgagagaattgtctttatgcatgtataaaccatctttgaaatgtaatatttatgatatctttccttctctaacctgatgaaagttttatgaagattaaatatatgtgtaaaattaaaaatagaacatatgatataayaaatgattaatgttaacacttctgtacctataggggctgatggaagaaaacaaagttcagatcacagttttaaatcccaaatccataacaatgggtcagctatatggacaatttgatccagtttcacatgaatggtcagatggcatcctagcagtgagtttcagagcatttgcttcttcccaagtaagtgcgaacaggattaaagtattgttggaaatcccctttcaatacatgcatttaggacttcagttctatgctgtgttcacaacaagcgtaggattcata

SEQ ID NO: 85067 - DNA, 600 bp, Chicken  19866894383420_1
cctgtccttgtcctgtggcattgccaaaatgccagtttgagcatcctgtcaaggggctgcatagggattcttgtgggcgttctgtgttccccttcacctcttctgtcttctcttcccatttgacatttatgccaagctattctcacaaagttttgctttggttttatttttatctgatttcccagcactcctcccatcccagctccacctgccctaggctgaaggcagcactgatgactcacaggatggcatgaaagccagaatcaggctgaagccatgcagtgggtgacgttgctggarctgtgtggactctgcctgtgcagtgtcaccagcataggcttgtgtctcttatctggggagtgtgcacgtgctggggagacctttgttgtgatagttggaggaataaagtccaatgggaaaggaagagcatttccctggcgggaaggagtcaaaactccagcagcagagctgcacagccaacgtagggacaccacttcagccactgctttggttcaccagttgtccctctccctctcttgcagctgcgtaaatgagtatggaagattatgatttcctcttcaaaattgttttaattggcaa

SEQ ID NO: 85068 - DNA, 600 bp, Chicken  19866894383422_1
aagcatgaaaaaggtaacaagcaaaaaggccccttacctcaacaatttaattatccccagtaattttgaagcctcaaatgtcaaagaagtccccgggctgatttatattaaaattggttaggcatttgaaaattcagtccactgctattttcacatttcataccttcaatcccgatttgttaggatttgtggagtttttcaggggtatttgggtaagtggtgtgaaaatggtttttttgagagatactctgagtattggaggagtactctcagacagaagaggactggcggccccaggtrtcagcacagcagggtggtggtgggatgggagtgcagggcacaagtggacttgaagcccaaggggagcagaactgtgtggtgatgggggaccagaagccttctctctgcacctcctgcctgccattggttcccattaagacaagctgctctctctctctacttcaacttccctgatgcaaaatgaggatagaaacactccttctttgcctgctctgactgtacagctcttttccagcatcttctggtactgctgcaactatagatggatttaaaaaaaaaatagcttttttttaacacttc

SEQ ID NO: 85069 - DNA, 599 bp, Chicken  19866894383424_1
  misc_feature (1)..(96): n is any nucleotide
nnnnnnnnnnnnnnnnnnnnnnnnnnnnnnnnnnnnnnnnnnnnnnnnnnnnnnnnnnnnnnnnnnnnnnnnnnnnnnnnnnnnnnnnnnnnnnnntgagtcataggagcaaatgaagctggcagccagctttcattgtttgtgagctgtacacccgatgtgaaagaacctgaagtatggtacatccagcagtggctgcagcataaaatgtccaaccatagcttaaacggagtagttacagctgccagactctgactgagagctctgtatgtgtgagcttcttgttctggttttggtgcrtttacagtcgctatggtaagctctgccaccgctagctctgtgcaagctgtgcagtatcaggtttgtttgtgtacctctgtagtactgttctcttgtgttttttggcatgtctgtggtacgctcctagcagyggctttgctggtattgtcaaggtctgcctgcaccaaggctcttctcagaaatgcttctcataagtcaattaccatacaaaggatttattttagtttgagtgatgcctttcaggctctgttctcactagcccacaaagctgtttcctatttacagatgtctgatacggt

SEQ ID NO: 85070 - DNA, 600 bp, Chicken  19866894383424_2
ttcattgtttgtgagctgtacacccgatgtgaaagaacctgaagtatggtacatccagcagtggctgcagcataaaatgtccaaccatagcttaaacggagtagttacagctgccagactctgactgagagctctgtatgtgtgagcttcttgttctggttttggtgcrtttacagtcgctatggtaagctctgccaccgctagctctgtgcaagctgtgcagtatcaggtttgtttgtgtacctctgtagtactgttctcttgtgttttttggcatgtctgtggtacgctcctagcagyggctttgctggtattgtcaaggtctgcctgcaccaaggctcttctcagaaatgcttctcataagtcaattaccatacaaaggatttattttagtttgagtgatgcctttcaggctctgttctcactagcccacaaagctgtttcctatttacagatgtctgatacggtaatttgagaggctcatctgttctaggctggctcaaatttaaacagaacctcaatttttttttctgttcattgtgtaataagtgtgaactttcattatcctgccttagttttgactgagaattagaagtagca

SEQ ID NO: 85071 - DNA, 600 bp, Chicken  19866894383442_1
gcaatgaaagcagggagcatcaccaaggctgtcactctggcctcactgtgctggttcatatttacggagaatgatccagctgattttttttcttgacgtgagaaaaaaatgaggaaggcaagtgtgggaaagcaaggcaatgtaacacaagcatctggtatgggggagatgctcaagggacacagcacagctcagttaatatgcagggaggcactgtaaaaacaaaataaggcaggagtggaaacaatcttctcaacagacaccctcaagccatggcacagctgggaactggagctcttygcagttccaggctgtaaccctaaaacaaggcttcctctctcacctctccttccagctaacacrggaagatgcaggggtttctctctgccaccttgctaggggtctggaatacaaatacagctggcttcrgttcccattagaagttaatttcctcaatcattttcagagagagagaaggagaaatgytcgtgatctaaaagatgaaagcaaatgaaaataagcctcataaaacctgcagtgccctaggggaaaactgccctgcaactttcattggggaattatcaaaggccctgggctggt

SEQ ID NO: 85072 - DNA, 600 bp, Chicken  19866894383442_2
acggagaatgatccagctgattttttttcttgacgtgagaaaaaaatgaggaaggcaagtgtgggaaagcaaggcaatgtaacacaagcatctggtatgggggagatgctcaagggacacagcacagctcagttaatatgcagggaggcactgtaaaaacaaaataaggcaggagtggaaacaatcttctcaacagacaccctcaagccatggcacagctgggaactggagctcttygcagttccaggctgtaaccctaaaacaaggcttcctctctcacctctccttccagctaacacrggaagatgcaggggtttctctctgccaccttgctaggggtctggaatacaaatacagctggcttcrgttcccattagaagttaatttcctcaatcattttcagagagagagaaggagaaatgytcgtgatctaaaagatgaaagcaaatgaaaataagcctcataaaacctgcagtgccctaggggaaaactgccctgcaactttcattggggaattatcaaaggccctgggctggtgggggggtttgtttgtattttataaaacagatgctttagagagtataagtcctcaaatagctg

SEQ ID NO: 85073 - DNA, 600 bp, Chicken  19866894383442_3
aagcaaggcaatgtaacacaagcatctggtatgggggagatgctcaagggacacagcacagctcagttaatatgcagggaggcactgtaaaaacaaaataaggcaggagtggaaacaatcttctcaacagacaccctcaagccatggcacagctgggaactggagctcttygcagttccaggctgtaaccctaaaacaaggcttcctctctcacctctccttccagctaacacrggaagatgcaggggtttctctctgccaccttgctaggggtctggaatacaaatacagctggcttcrgttcccattagaagttaatttcctcaatcattttcagagagagagaaggagaaatgytcgtgatctaaaagatgaaagcaaatgaaaataagcctcataaaacctgcagtgccctaggggaaaactgccctgcaactttcattggggaattatcaaaggccctgggctggtgggggggtttgtttgtattttataaaacagatgctttagagagtataagtcctcaaatagctgagattccattctgctgaacctccagcaagactagaaaaagaaacagctgatcccagttagtccagc

SEQ ID NO: 85074 - DNA, 600 bp, Chicken  19866894383442_4
acagctcagttaatatgcagggaggcactgtaaaaacaaaataaggcaggagtggaaacaatcttctcaacagacaccctcaagccatggcacagctgggaactggagctcttygcagttccaggctgtaaccctaaaacaaggcttcctctctcacctctccttccagctaacacrggaagatgcaggggtttctctctgccaccttgctaggggtctggaatacaaatacagctggcttcrgttcccattagaagttaatttcctcaatcattttcagagagagagaaggagaaatgytcgtgatctaaaagatgaaagcaaatgaaaataagcctcataaaacctgcagtgccctaggggaaaactgccctgcaactttcattggggaattatcaaaggccctgggctggtgggggggtttgtttgtattttataaaacagatgctttagagagtataagtcctcaaatagctgagattccattctgctgaacctccagcaagactagaaaaagaaacagctgatcccagttagtccagcccaggattcagcttagccacatcaagacagggctgaagcatggcacagagccgtgca

SEQ ID NO: 85075 - DNA, 600 bp, Chicken  19866894383444_1
gtgtgtgttctagctctgaaagtatgtacataattgtgtagctgggtctgatcctgtaaatatacagacacggaggtaacttttctcccatgaataattccctcacctttactctgcattaataataacgatggtgatgatgatgcagcactgtatttctctagcacctttcatcagaggatctctgagcgtgggactcatctcacccgactttgaccattaaaagttgttaggcatctcagccaagttagcactctcctcgagtccatggagcgggatcagcacctccagagggcaatygggcccatcctaagataggtgcctcagataggtgggctgaatcatggagatgcccaggaggcagcactggctggggaaaagcttgggcgatgagcgtaaattagacgccttgtttttagctgaagtgagagagctggaatctcacccattttcgctgaacctcagaagtgcctgagggctcctaggaggacactgagggaagcctttgctcggtgawgggtggcagctctctctaacgtgaacatggcagcttcttccaaatctaggtccaacaatttgggtctagatttggaaaacagc

SEQ ID NO: 85076 - DNA, 600 bp, Chicken  19866894383444_2
cattaaaagttgttaggcatctcagccaagttagcactctcctcgagtccatggagcgggatcagcacctccagagggcaatygggcccatcctaagataggtgcctcagataggtgggctgaatcatggagatgcccaggaggcagcactggctggggaaaagcttgggcgatgagcgtaaattagacgccttgtttttagctgaagtgagagagctggaatctcacccattttcgctgaacctcagaagtgcctgagggctcctaggaggacactgagggaagcctttgctcggtgawgggtggcagctctctctaacgtgaacatggcagcttcttccaaatctaggtccaacaatttgggtctagatttggaaaacagcagactcaatggcaacttcatgtggatgctaagaaagctgtgtataattatttgagttgaggtttggccgggacagtaaattcccacaggaactaaggcacaccacaacactcagcaccttccactctgagtgcaagagatgttgctttgactttgtcttcccttaggatctacacagcagaagggaacaggagagaatacgagtattaacaacctgg

SEQ ID NO: 85077 - DNA, 600 bp, Chicken  19866894383454_1
gagaagtcccagatgtgtttattactgtctttccacaagccagaaaatatcctaggaagattaatttattggtgttttctttaattggtcactttcagactctttagttagaaatgttcctttccccccactcctgaaaggcaaacaagaatttctattttagtgactgtgaaccttttttatgtctctcataaaacaccgatctcctcagcagcagctctgacacaattagggcttgtttgtccttccagctacgagcttaagagtccaagtggctccgcatggttatattctgaagamactcatgaagttcaattagcaggtttgttaagaatatttcttagcacacattcatcccacagcaacattgagcaattcttccaacaacgtggcttttacccaggacttatcagaatctgtgcaaaatccatagcactccattcttcatttatgctgtgcatttgctataaacgtcaggctgagcaggctttggctacaagtcttctgatrctgatcgaatccagarctgggatgaagggctttgtttgtttttttccagttgtgtgtcactgctatacaaacatttgtctctgaaagtag

SEQ ID NO: 85078 - DNA, 600 bp, Chicken  19866894383454_2
gcagcagctctgacacaattagggcttgtttgtccttccagctacgagcttaagagtccaagtggctccgcatggttatattctgaagamactcatgaagttcaattagcaggtttgttaagaatatttcttagcacacattcatcccacagcaacattgagcaattcttccaacaacgtggcttttacccaggacttatcagaatctgtgcaaaatccatagcactccattcttcatttatgctgtgcatttgctataaacgtcaggctgagcaggctttggctacaagtcttctgatrctgatcgaatccagarctgggatgaagggctttgtttgtttttttccagttgtgtgtcactgctatacaaacatttgtctctgaaagtagtcttttttatagactgatggagtcaccaaggttggaaaagacctccaaggtcatccagtccaaccatccccctatcaccaatgttccccactaaactgtgtccttcaggacaacatctaaatgtttcttgactgtcggtgagtccaccacccctggaggtgttcaagaaatgtttggatgtggtccygagggacacgctatatatttaga

SEQ ID NO: 85079 - DNA, 600 bp, Chicken  19866894383454_3
aattagggcttgtttgtccttccagctacgagcttaagagtccaagtggctccgcatggttatattctgaagamactcatgaagttcaattagcaggtttgttaagaatatttcttagcacacattcatcccacagcaacattgagcaattcttccaacaacgtggcttttacccaggacttatcagaatctgtgcaaaatccatagcactccattcttcatttatgctgtgcatttgctataaacgtcaggctgagcaggctttggctacaagtcttctgatrctgatcgaatccagarctgggatgaagggctttgtttgtttttttccagttgtgtgtcactgctatacaaacatttgtctctgaaagtagtcttttttatagactgatggagtcaccaaggttggaaaagacctccaaggtcatccagtccaaccatccccctatcaccaatgttccccactaaactgtgtccttcaggacaacatctaaatgtttcttgactgtcggtgagtccaccacccctggaggtgttcaagaaatgtttggatgtggtccygagggacacgctatatatttagacatatatatatttagc

SEQ ID NO: 85080 - DNA, 600 bp, Chicken  19866894383454_4
ctttggctacaagtcttctgatrctgatcgaatccagarctgggatgaagggctttgtttgtttttttccagttgtgtgtcactgctatacaaacatttgtctctgaaagtagtcttttttatagactgatggagtcaccaaggttggaaaagacctccaaggtcatccagtccaaccatccccctatcaccaatgttccccactaaactgtgtccttcaggacaacatctaaatgtttcttgactgtcggtgagtccaccacccctggaggtgttcaagaaatgtttggatgtggtccygagggacacgctatatatttagacatatatatatttagccttgtaagtgatacggatgtgcgtgcatagtgtctcgcattaaggagggtgtaacaaacgtcattagaagctttgtatttctaaagtgaatgattcagaaacataaggttaggtgtttatgttgaagaactcggtcattgtggctgccatgtcttagagcctcagtccgtagggttgtcctggtgctgcggggctgatgctgtagggatgcttcagctgcaccactgggagctgccctggggaagggctccagctctccat

SEQ ID NO: 85081 - DNA, 600 bp, Chicken  19866894383485_1
gctgcctgtaaaaggtataattatggtatggtgtgtttattaataataaaagttgtggtggggagctttctggctgaactgctgtgagaaacgggatgcttcctccatctctcagcgggtcttcccatcgcaggcagcaatactctaattaacttttgtcaagtggttcattgaatctagcaaaatggagcgatccagaggtgcctacagatctgtcagctgctatctgaaaaatggctttctgttctgcacacggaagggcctgggaaacacttgctaatgatcagttttctaaatgcrgcgtgtcctgggacaacagaggcgcaggaactgatggataacttgggggaatagagcaaaacccaagactgccaggattcataaataaaagaaaacagaggggaggaagggaaaaaaggaaaatcttccccgtattgtgaggccctgtgtgcccaaataagggacacaccgtagagttatagcatgaatcatgttcagggcaccttaaagcacatcctgttccaaccccctgccatgggcctgttgtcccctgtcagatctgatgaccccatccagcctggccttgaatgccttcaggga

SEQ ID NO: 85082 - DNA, 599 bp, Chicken  19866894383489_1
  misc_feature (1)..(16): n is any nucleotide
nnnnnnnnnnnnnnnnttggccccgcaggctggtactgagcatggcaaacaaatattgatcagcatcgctgcagcacagagtaagtgatggaaagccacaatgtgacttgaaggggagactgttttttcctcaaacaagccatgacagcctgtgatacggcatggataacttctggagataagagatgcattatctgcattaaccgggagaagggtgtcctcacgttcatcccaagaatgaaaggatgctaagctgcagaaggcagccttgtcactctcctcattttgtttatttatttrttgcctcatcygaacataaaagcaaggatgaaaaagaaacagatggaagcagcaggttgtgtaggctggaagacactgggggaagagaagtgctgctagagtgatctttagggcacaggacatcccctaagtacccacaggagcttggaagcactagaggatattgagtgtaagtagcacatctacacgtgaactctggcctgagctgcagcctgcccaactttcaggctagcacaagccaccaggaaacaagctggtgctgaagcctggcacagaaggaacatcatgaaaaggtagta

SEQ ID NO: 85083 - DNA, 599 bp, Chicken  19866894383489_2
  misc_feature (1)..(5): n is any nucleotide
nnnnnttggccccgcaggctggtactgagcatggcaaacaaatattgatcagcatcgctgcagcacagagtaagtgatggaaagccacaatgtgacttgaaggggagactgttttttcctcaaacaagccatgacagcctgtgatacggcatggataacttctggagataagagatgcattatctgcattaaccgggagaagggtgtcctcacgttcatcccaagaatgaaaggatgctaagctgcagaaggcagccttgtcactctcctcattttgtttatttatttrttgcctcatcygaacataaaagcaaggatgaaaaagaaacagatggaagcagcaggttgtgtaggctggaagacactgggggaagagaagtgctgctagagtgatctttagggcacaggacatcccctaagtacccacaggagcttggaagcactagaggatattgagtgtaagtagcacatctacacgtgaactctggcctgagctgcagcctgcccaactttcaggctagcacaagccaccaggaaacaagctggtgctgaagcctggcacagaaggaacatcatgaaaaggtagtaattaggttgtc

SEQ ID NO: 85084 - DNA, 600 bp, Chicken  19866894383492_1
gaaatggtgatagatttctgtgtttttataaacaacataattaaactgaggtcagtttcatagtgctggtctctcctcagatttcaagtaggaactatttataataaagcgagaaagccagctaataaagcatactgctgattttcaccaaaaaagaaataacaaggaacaaaatagagttagagcttccttgtacggtccatcacgtccccctcatttaggcttattcagcattaaaaaaaaaaaaaaggtgagatattaagaaacagcatctaaacaaatttattttccttgttgttmgcaaaggtttctttaaaacacaatgttttactattaaatgttgttctaacatgttatagttcttcctgagagggacgaacattttgaaatccaggctgcagattaaaatcatgatatgttttgcacacactgcactcagatagctgaacataaaaagaataacagcacaccctcaggaaaaagaaagaaggcttaccagctacttagataaggtaaagagcaatctagcacacaaatatttgggaatcaaattcaaaggggagtgaaactatgacataacgtaacactgggctccctgtt

SEQ ID NO: 85085 - DNA, 600 bp, Chicken  19866894383496_1
actgattttaacataggtgatgtagctacactgaagatggatctgaaattctcagaacattttccatgaaactgcatgaaggtttaatactacaaacaagtcttcttcagcatatgatgtattaattatagtatttttcagactataaactctccaaaaaggggacccttggaccattgagaagtttagattttaatatatttccttttaaatttaatacaggatacttgatactagactcatttacatgagtcggatttaataaacaagtgtctgtaacagaatatttgttacttaagmtttgcattttcaaaacatgccaaatgygaagaattggaaggctttgggaatcccatcatctgattcacagcacttgaaggacagggaaaaatgtattacatcccaggctaaggatgtaacaaaattcacagctattgaaaaagttttttgaaggttcatgaggcttgatgcttagtaccaaacaaggtcagactatcacctagacctgtatttttgagtatttaagtaggatttatttaagatgggaaatgaaacatcagctctgctatggcagaagagctatgaacacaggtttattat

SEQ ID NO: 85086 - DNA, 600 bp, Chicken  19866894383496_2
acactgaagatggatctgaaattctcagaacattttccatgaaactgcatgaaggtttaatactacaaacaagtcttcttcagcatatgatgtattaattatagtatttttcagactataaactctccaaaaaggggacccttggaccattgagaagtttagattttaatatatttccttttaaatttaatacaggatacttgatactagactcatttacatgagtcggatttaataaacaagtgtctgtaacagaatatttgttacttaagmtttgcattttcaaaacatgccaaatgygaagaattggaaggctttgggaatcccatcatctgattcacagcacttgaaggacagggaaaaatgtattacatcccaggctaaggatgtaacaaaattcacagctattgaaaaagttttttgaaggttcatgaggcttgatgcttagtaccaaacaaggtcagactatcacctagacctgtatttttgagtatttaagtaggatttatttaagatgggaaatgaaacatcagctctgctatggcagaagagctatgaacacaggtttattatttgagttttcagagaaggatcttatta

SEQ ID NO: 85087 - DNA, 600 bp, Chicken  19866894383501_1
acttgaaagtctgttatgtctgtgatattttgattgtctcaggtgttgactaccaaatgtcttatatatttctcaagaacttttgtgcagtcacagaaactgtggagttttgaatttgtcactggggaatcacagttaattttcagaatggcagctctggccttcatttacacctttaggtgcctgtaagaatgattcctgtcaaactgcagtgcagaattctcaagtatcaaatatttcagtacctcagaaagtggaagaaagttttttctttcaagagtatgattatataagcctagkgagagtgctctttccctagcaaagaaggcatattctgggagttagttagtggtatggtgtgcaggtactggaagttagaagtttcctcaaagtatagtatttccttaatgattagaaggaaaacttccttgaaggacactgccactgctggagatgtgtgtatgtatacccatccctctgtctatttgcacacgtagaagtaattattctggtttgctatggaaacagttcttctctactatatataagtaagggctaagtacttctggagacttaggataagatgaagggaagtgcaga

SEQ ID NO: 85088 - DNA, 344 bp, Chicken  19866894383502_1
ttgggcaacctgttcagtgcgtcaccagcctctgggtgatgagccaagggagcacactgtgaacatcacgcacatcacatgctcctccacaccttcatctgggatggactaggtgaaattggcccctttctggaggctgagggaagcagcttgcagtcctttggcctggccttgcttggtatctcaccccctgtgggctgtacaacagtggacaaaggcagccacctgctgcacccacctcaaggggtttctccagtgactgctgggagcaaacagacctgcaagctgcttctgtgtccycatcaagacctagatgtacacagccagggarcacaggttttcag

SEQ ID NO: 85089 - DNA, 313 bp, Chicken  19866894383502_2
ctgggtgatgagccaagggagcacactgtgaacatcacgcacatcacatgctcctccacaccttcatctgggatggactaggtgaaattggcccctttctggaggctgagggaagcagcttgcagtcctttggcctggccttgcttggtatctcaccccctgtgggctgtacaacagtggacaaaggcagccacctgctgcacccacctcaaggggtttctccagtgactgctgggagcaaacagacctgcaagctgcttctgtgtccycatcaagacctagatgtacacagccagggarcacaggttttcag

SEQ ID NO: 85090 - DNA, 600 bp, Chicken  19866894383510_1
caaataaaacgagggacttgacacactgaccagcagcatcagaaagccactaggggaagcaagagacctgtctgaccttgctgatttgggaacaaggacattttggggaggaggtagcaggacataacatagcgctgcataatatcacactttgtggaagatctgcttaggcaatagccaacagttacaactcaaaacaaaacacctttgtaaaactgatagcatctacttttcagtactttcccctttggccagaacacctgcaaataagtgcaggtgtgctcacattgtgctggcagyactcaggcttccctayatgsaggtttgcctgccactacatctcagtttgatgcaaaacagctgcttgaacaaaacaagaacatgaaggggcaaggtstgggcagaaatattatcaggacctgatgaaaacacagmaagaagaygggaggcacaggaagtgagtggcagtaaagaagaaaagtggcggatgttgcatttacatcaaatcagaatctccccattccagctaaggtattaacactggcatggaacaactggcatgtgttgccattgtcaaccataccagtaaagtttgttggt

SEQ ID NO: 85091 - DNA, 600 bp, Chicken  19866894383510_2
cttgacacactgaccagcagcatcagaaagccactaggggaagcaagagacctgtctgaccttgctgatttgggaacaaggacattttggggaggaggtagcaggacataacatagcgctgcataatatcacactttgtggaagatctgcttaggcaatagccaacagttacaactcaaaacaaaacacctttgtaaaactgatagcatctacttttcagtactttcccctttggccagaacacctgcaaataagtgcaggtgtgctcacattgtgctggcagyactcaggcttccctayatgsaggtttgcctgccactacatctcagtttgatgcaaaacagctgcttgaacaaaacaagaacatgaaggggcaaggtstgggcagaaatattatcaggacctgatgaaaacacagmaagaagaygggaggcacaggaagtgagtggcagtaaagaagaaaagtggcggatgttgcatttacatcaaatcagaatctccccattccagctaaggtattaacactggcatggaacaactggcatgtgttgccattgtcaaccataccagtaaagtttgttggtattaggaccacataat

SEQ ID NO: 85092 - DNA, 600 bp, Chicken  19866894383510_3
acacactgaccagcagcatcagaaagccactaggggaagcaagagacctgtctgaccttgctgatttgggaacaaggacattttggggaggaggtagcaggacataacatagcgctgcataatatcacactttgtggaagatctgcttaggcaatagccaacagttacaactcaaaacaaaacacctttgtaaaactgatagcatctacttttcagtactttcccctttggccagaacacctgcaaataagtgcaggtgtgctcacattgtgctggcagyactcaggcttccctayatgsaggtttgcctgccactacatctcagtttgatgcaaaacagctgcttgaacaaaacaagaacatgaaggggcaaggtstgggcagaaatattatcaggacctgatgaaaacacagmaagaagaygggaggcacaggaagtgagtggcagtaaagaagaaaagtggcggatgttgcatttacatcaaatcagaatctccccattccagctaaggtattaacactggcatggaacaactggcatgtgttgccattgtcaaccataccagtaaagtttgttggtattaggaccacataatatag

SEQ ID NO: 85093 - DNA, 600 bp, Chicken  19866894383510_4
acattttggggaggaggtagcaggacataacatagcgctgcataatatcacactttgtggaagatctgcttaggcaatagccaacagttacaactcaaaacaaaacacctttgtaaaactgatagcatctacttttcagtactttcccctttggccagaacacctgcaaataagtgcaggtgtgctcacattgtgctggcagyactcaggcttccctayatgsaggtttgcctgccactacatctcagtttgatgcaaaacagctgcttgaacaaaacaagaacatgaaggggcaaggtstgggcagaaatattatcaggacctgatgaaaacacagmaagaagaygggaggcacaggaagtgagtggcagtaaagaagaaaagtggcggatgttgcatttacatcaaatcagaatctccccattccagctaaggtattaacactggcatggaacaactggcatgtgttgccattgtcaaccataccagtaaagtttgttggtattaggaccacataatatagatgatgcatcagataattatcagatatttttttctgatttcagcagcagcatcgggctaagtctgaccttctgccag

SEQ ID NO: 85094 - DNA, 600 bp, Chicken  19866894383510_5
tgcataatatcacactttgtggaagatctgcttaggcaatagccaacagttacaactcaaaacaaaacacctttgtaaaactgatagcatctacttttcagtactttcccctttggccagaacacctgcaaataagtgcaggtgtgctcacattgtgctggcagyactcaggcttccctayatgsaggtttgcctgccactacatctcagtttgatgcaaaacagctgcttgaacaaaacaagaacatgaaggggcaaggtstgggcagaaatattatcaggacctgatgaaaacacagmaagaagaygggaggcacaggaagtgagtggcagtaaagaagaaaagtggcggatgttgcatttacatcaaatcagaatctccccattccagctaaggtattaacactggcatggaacaactggcatgtgttgccattgtcaaccataccagtaaagtttgttggtattaggaccacataatatagatgatgcatcagataattatcagatatttttttctgatttcagcagcagcatcgggctaagtctgaccttctgccagctctttgagtaggactagaaatgtatgcaggtattttc

SEQ ID NO: 85095 - DNA, 600 bp, Chicken  19866894383510_6
atcacactttgtggaagatctgcttaggcaatagccaacagttacaactcaaaacaaaacacctttgtaaaactgatagcatctacttttcagtactttcccctttggccagaacacctgcaaataagtgcaggtgtgctcacattgtgctggcagyactcaggcttccctayatgsaggtttgcctgccactacatctcagtttgatgcaaaacagctgcttgaacaaaacaagaacatgaaggggcaaggtstgggcagaaatattatcaggacctgatgaaaacacagmaagaagaygggaggcacaggaagtgagtggcagtaaagaagaaaagtggcggatgttgcatttacatcaaatcagaatctccccattccagctaaggtattaacactggcatggaacaactggcatgtgttgccattgtcaaccataccagtaaagtttgttggtattaggaccacataatatagatgatgcatcagataattatcagatatttttttctgatttcagcagcagcatcgggctaagtctgaccttctgccagctctttgagtaggactagaaatgtatgcaggtattttcactgctct

SEQ ID NO: 85096 - DNA, 600 bp, Chicken  19866894383517_1
taccgaatgccctgcagggaggaaattatagtaatcaagtctcgtggtcaaaaggtctgggactgctcctaggagttcactgtgggatactaacagttcctcatagcctacacaaaattcccccccccaaaaataaaaataaataaaaaataataataataaaaaaaccctttgataccacatcaacatgtggtaaattttcagagaaagtgtgggatcaaaagccaggctggcaggtcagtgaaatacctctgagctcttcccctcttgctaggaaagagagcaatgagcagtgagagytgttgttttctcttgcgatacgctacatcatgcaggagtcccttggctaaagagaaaggtgttcaggcattcccctcagcttaaacctttcagagcaccctcgccttgcactcagatgataaaacaataatttagaacagtcaagagccacaaaatccatgtaaggaaccaatcccctagcttcacacttatgttgacctgtggcttttcctaggtgatggcaaaaatgggcattctgtgggtcctcatctttcgaagaaccccacccctgacagcaagtgctgttgctggtccaacaag

SEQ ID NO: 85097 - DNA, 600 bp, Chicken  19866894383522_1
caggccattctacgactctatgattctatgaaatatgtggcaaaaggtactttactcacatgagagttgcaatgttcttccaaccaccactaacaagaagtatgttggatagcaaatctgatttcactcctggaagggaatacaagtttggttcaaaatctttgctgtacagtagtttgctccacaaagtattcagcttggtgccacccacccagaaacagcactgtttccaatagaacacagcaaaaagtagtgactgggggaaatcaatagacaaagtagagatcttcctttgagaawtgctcctggtgaggctggacagcagtgagaaacacccctgtctgggcaaacagacatctgctcggccagctctgcagtaggcaacaagcttacacaaacccagctctagtagatggtgggcagcatcaaccacttgaatatgctctgcacatgcacctacaggtgcaagctctatcccagattgatgaacagagacatttttctcttagggaaaacacaaacctacagatcaagatagctgcatttygaaacacagtgaaaagattttaaggtgtatagagtttccatacagcacaaaag

SEQ ID NO: 85098 - DNA, 599 bp, Chicken  19866894383522_2
aagtagtgactgggggaaatcaatagacaaagtagagatcttcctttgagaawtgctcctggtgaggctggacagcagtgagaaacacccctgtctgggcaaacagacatctgctcggccagctctgcagtaggcaacaagcttacacaaacccagctctagtagatggtgggcagcatcaaccacttgaatatgctctgcacatgcacctacaggtgcaagctctatcccagattgatgaacagagacatttttctcttagggaaaacacaaacctacagatcaagatagctgcatttygaaacacagtgaaaagattttaaggtgtatagagtttccatacagcacaaaagcaacttcagtgagatgcaataggaattttaaaaaagataccagaatacattaaaaaaaaaaaaagagtatatggccaactgtacgggagattgtgttggagattgtgttactcacgcggacaacacagataagatgaacatgagctgaagaacttcctgcaatttaggtgctgaaaaagtctgctgctggaaaaggcatcaaaaatgatactgggagatgttaaaaatgactcccagtctttcaga

SEQ ID NO: 85099 - DNA, 600 bp, Chicken  19866894383523_1
tactgaatgacatcccattgttggttttttccttcattttagccttctattgcagtagagtagaagtaaaatgaactcttttattttacaattcatgcaggaatttactcatgtgttacaaaagtgctttttcccactcttttcctactgagatacagaatttatggacatgccagatttttttttccagttggaaacactctgtcccaaatgccttccaggaggtatgctcccagaaatttcaactttccatggaacagtgcaattttgatgatttagaaaagtacgttatggcgacayggagtgaaaatgttgtttctcttgtctccgtggttcacctctagggcactgaaatagtacttcaaagtcttgcctcaaatcacaccaagatcccactgagttgcacttgccaatcctgttacacagtgtgtataggttgaagtaccactttcacacgaggcatggctttcctgcaacacracgcactgcaccacacgcatcagcaccagggctgacattacgcatggccggaagaggcagcgtgggagttcaagggagctaagagctggagggaagcattaagaaaaaatactgtaaaag

SEQ ID NO: 85100 - DNA, 600 bp, Chicken  19866894383523_2
ttttttccagttggaaacactctgtcccaaatgccttccaggaggtatgctcccagaaatttcaactttccatggaacagtgcaattttgatgatttagaaaagtacgttatggcgacayggagtgaaaatgttgtttctcttgtctccgtggttcacctctagggcactgaaatagtacttcaaagtcttgcctcaaatcacaccaagatcccactgagttgcacttgccaatcctgttacacagtgtgtataggttgaagtaccactttcacacgaggcatggctttcctgcaacacracgcactgcaccacacgcatcagcaccagggctgacattacgcatggccggaagaggcagcgtgggagttcaagggagctaagagctggagggaagcattaagaaaaaatactgtaaaagttggccatggcaatgttgcctgtgagccttactagcacagtgtgtatgttcctactgagaaaatgttctattttatcctagaagcagaagattaaattttgcttacacttckgattgcgctgtggaaactgcattccttctaggagtctagctaaaaaacaagagtggtttcctctctga

SEQ ID NO: 85101 - DNA, 585 bp, Chicken  19866894383523_3
atcctgttacacagtgtgtataggttgaagtaccactttcacacgaggcatggctttcctgcaacacracgcactgcaccacacgcatcagcaccagggctgacattacgcatggccggaagaggcagcgtgggagttcaagggagctaagagctggagggaagcattaagaaaaaatactgtaaaagttggccatggcaatgttgcctgtgagccttactagcacagtgtgtatgttcctactgagaaaatgttctattttatcctagaagcagaagattaaattttgcttacacttckgattgcgctgtggaaactgcattccttctaggagtctagctaaaaaacaagagtggtttcctctctgacaacctcccttacaaacaagtgcattaatgcagagaactgagagcaatcctttatatcaacaaaaccacaggggaatattcccttgtgatgtatgtttcctcactatacaaagcatcacagaatctgtataagtaccaagaaaaactaaaagtttgccttaagactgcattgctagctatttcaggagacaaaaatgaactcctccaacatgtgcaa

SEQ ID NO: 85102 - DNA, 600 bp, Chicken  19866894383525_1
tgttgggcaggaagaggctccctttacggttattaacaagtggaacaggttccggggctccttcagtggacttggcaccaaccagtgcaatagtagttgtattcttgaattgatatgagctttttgggtaacttgatctagctgcattctttacttctaaatagtaagaaaaaatgtaaattaatgtccttgtattaaaaattatttcaaaccatgaatcaattttgacagcatgtggaattacagaccttaaaacttaaagtatcggtttctacagttgaaataaaggttcatacctgyaattttctttacttttcccctaaaaaagtatctttttataaaagaatacttataaaaggattattccacaatattatcatctttaagcaataatcccatcctagggtaagtgtgtttgagacaactcttatttcccacctgttgataatggttttgagatttactagctgtggaagatgtttattcccttgaatctcctgaaaatgacagaggaggtgtaacgctctgttgctgttaaaataaataaggaataatagaagaatagtcagcacttcaaaattgtgcaatcatagttatgga

SEQ ID NO: 85103 - DNA, 528 bp, Chicken  19866894383526_1
ttttttttaatccagtaaaattgtttcttttgagtcataaaacagttctaaatgttgattttcccattattacctgtttacttaatttctcagtaactcaccaaaagccccgtcaactgtagatgctgtgtttcaccatcactcttgggcccaggctgagaccagagaacacgtcctgctgtcaactgtccatggttttgcttgctttgtgtttgactctggcttggagctcaggctccagctcatctcagcactgtcctttccaaaggcagcttggagcagcaggctgcaggctggccragacatggcagcttccacagttatctcaccttagccaaaaacagcaccagattgtgaattgtcctgctatgctccaccagtgaaaagggctaattttttttgtggatatgttatggctgtgggcaagatgagggaagaacacactgtctcagcaagcagacagcaattaaagactcttcctctcagaaatacagcgacagagaaacactggtaaaattcagatttagt

SEQ ID NO: 85104 - DNA, 599 bp, Chicken  19866894383533_1
  misc_feature (1)..(115): n is any nucleotide
nnnnnnnnnnnnnnnnnnnnnnnnnnnnnnnnnnnnnnnnnnnnnnnnnnnnnnnnnnnnnnnnnnnnnnnnnnnnnnnnnnnnnnnnnnnnnnnnnnnnnnnnnnnnnnnnnnnatagtgttaacttataatagcttcccacgattgttgttggtttttgttttttttttccagagaaattcactagttttgtacaagagattacatgcttcatagaaccttctcagtatttttttttttaaatttaaaaatctatacaggttatgcaggttatttatatagttgtcagtggggttcawtgtagctgaggcactgaactagctggaacacacaccagaaaactctaactgactgtttaatacagttgaaattggcttgctgcctgcttgtatggtaactgttgagtcacagcctgaaccactgattgagcacctgggcaaagcaacacagtcagccttgggaccatagttgaaggcaatttacctgtgcaaccagaaggggtggagcctggctgcacctctcttagacctcatttaagggctgactgctgctaaggaagggtctctggttgcagatccttcccttgtggagttttccc

SEQ ID NO: 85105 - DNA, 600 bp, Chicken  19866894383537_1
tctactgcatctaggaaaagggcccagctttgcagcatgcctagttatacatctttgttcctctcacacctcccccagatcctccaagaagggactacgagtattcatcaccattgtgtttgaagtatataaagaaaatccttaaatatattttactggttcagacagaagcagttgctgaaatttggaaggatttgttgggtgattcagtctgaacttagatgaccacatcatccttcaagatgctgagatctggttttagtatccttcttttctccacccaagaatggaaaaagcagmgaaagaacaaaactttataaacgagaccacaaacatcagtgcctctgatcaccaagagtgtggtgrgcacaaagatgatggtgcaggaaacatgaagtaaagccactgctgatgtcaccagagtaaaggtgactacacatataaaagaatggtgttccccrgtccagccaactgagccctcctagcagakccatttaatcaaggcagatgcttctgtggctatttacsggggtttgaaaagatactcyctgtatcaccatcactcccactgcatcacctagagacttttgcagtgcatcc

SEQ ID NO: 85106 - DNA, 600 bp, Chicken  19866894383537_2
cacctcccccagatcctccaagaagggactacgagtattcatcaccattgtgtttgaagtatataaagaaaatccttaaatatattttactggttcagacagaagcagttgctgaaatttggaaggatttgttgggtgattcagtctgaacttagatgaccacatcatccttcaagatgctgagatctggttttagtatccttcttttctccacccaagaatggaaaaagcagmgaaagaacaaaactttataaacgagaccacaaacatcagtgcctctgatcaccaagagtgtggtgrgcacaaagatgatggtgcaggaaacatgaagtaaagccactgctgatgtcaccagagtaaaggtgactacacatataaaagaatggtgttccccrgtccagccaactgagccctcctagcagakccatttaatcaaggcagatgcttctgtggctatttacsggggtttgaaaagatactcyctgtatcaccatcactcccactgcatcacctagagacttttgcagtgcatcctatgcggcgtggcatcgtgaagcttactcacagtttccttcctcctttccagggagagaaggaaca

SEQ ID NO: 85107 - DNA, 600 bp, Chicken  19866894383537_3
cagacagaagcagttgctgaaatttggaaggatttgttgggtgattcagtctgaacttagatgaccacatcatccttcaagatgctgagatctggttttagtatccttcttttctccacccaagaatggaaaaagcagmgaaagaacaaaactttataaacgagaccacaaacatcagtgcctctgatcaccaagagtgtggtgrgcacaaagatgatggtgcaggaaacatgaagtaaagccactgctgatgtcaccagagtaaaggtgactacacatataaaagaatggtgttccccrgtccagccaactgagccctcctagcagakccatttaatcaaggcagatgcttctgtggctatttacsggggtttgaaaagatactcyctgtatcaccatcactcccactgcatcacctagagacttttgcagtgcatcctatgcggcgtggcatcgtgaagcttactcacagtttccttcctcctttccagggagagaaggaacagctgtcgtttgatcagacaggatggttacattggcttctatcagcaaaaagagaactgctctctcctgtgctatatcattgccctcacatgctct

SEQ ID NO: 85108 - DNA, 600 bp, Chicken  19866894383537_4
ggatttgttgggtgattcagtctgaacttagatgaccacatcatccttcaagatgctgagatctggttttagtatccttcttttctccacccaagaatggaaaaagcagmgaaagaacaaaactttataaacgagaccacaaacatcagtgcctctgatcaccaagagtgtggtgrgcacaaagatgatggtgcaggaaacatgaagtaaagccactgctgatgtcaccagagtaaaggtgactacacatataaaagaatggtgttccccrgtccagccaactgagccctcctagcagakccatttaatcaaggcagatgcttctgtggctatttacsggggtttgaaaagatactcyctgtatcaccatcactcccactgcatcacctagagacttttgcagtgcatcctatgcggcgtggcatcgtgaagcttactcacagtttccttcctcctttccagggagagaaggaacagctgtcgtttgatcagacaggatggttacattggcttctatcagcaaaaagagaactgctctctcctgtgctatatcattgccctcacatgctctccctgcagcaacccccactcattycacct

SEQ ID NO: 85109 - DNA, 600 bp, Chicken  19866894383537_5
catcatccttcaagatgctgagatctggttttagtatccttcttttctccacccaagaatggaaaaagcagmgaaagaacaaaactttataaacgagaccacaaacatcagtgcctctgatcaccaagagtgtggtgrgcacaaagatgatggtgcaggaaacatgaagtaaagccactgctgatgtcaccagagtaaaggtgactacacatataaaagaatggtgttccccrgtccagccaactgagccctcctagcagakccatttaatcaaggcagatgcttctgtggctatttacsggggtttgaaaagatactcyctgtatcaccatcactcccactgcatcacctagagacttttgcagtgcatcctatgcggcgtggcatcgtgaagcttactcacagtttccttcctcctttccagggagagaaggaacagctgtcgtttgatcagacaggatggttacattggcttctatcagcaaaaagagaactgctctctcctgtgctatatcattgccctcacatgctctccctgcagcaacccccactcattycacctagcacagctggaagctgggccattcgatgcattttctt

SEQ ID NO: 85110 - DNA, 600 bp, Chicken  19866894383537_6
agatctggttttagtatccttcttttctccacccaagaatggaaaaagcagmgaaagaacaaaactttataaacgagaccacaaacatcagtgcctctgatcaccaagagtgtggtgrgcacaaagatgatggtgcaggaaacatgaagtaaagccactgctgatgtcaccagagtaaaggtgactacacatataaaagaatggtgttccccrgtccagccaactgagccctcctagcagakccatttaatcaaggcagatgcttctgtggctatttacsggggtttgaaaagatactcyctgtatcaccatcactcccactgcatcacctagagacttttgcagtgcatcctatgcggcgtggcatcgtgaagcttactcacagtttccttcctcctttccagggagagaaggaacagctgtcgtttgatcagacaggatggttacattggcttctatcagcaaaaagagaactgctctctcctgtgctatatcattgccctcacatgctctccctgcagcaacccccactcattycacctagcacagctggaagctgggccattcgatgcattttcttttcctttgtgtcaccatcaa

SEQ ID NO: 85111 - DNA, 430 bp, Chicken  19866894383537_7
cagakccatttaatcaaggcagatgcttctgtggctatttacsggggtttgaaaagatactcyctgtatcaccatcactcccactgcatcacctagagacttttgcagtgcatcctatgcggcgtggcatcgtgaagcttactcacagtttccttcctcctttccagggagagaaggaacagctgtcgtttgatcagacaggatggttacattggcttctatcagcaaaaagagaactgctctctcctgtgctatatcattgccctcacatgctctccctgcagcaacccccactcattycacctagcacagctggaagctgggccattcgatgcattttcttttcctttgtgtcaccatcaagtgtcatgctgctttcttcttgcattttaaactctgaggtcaatgaccacaaagattacagtcacga

SEQ ID NO: 85112 - DNA, 600 bp, Chicken  19866894383542_1
aggtggatacgtggtcagtgctcagctgaacatgagccagcagtgtgcccagctgattacaccactgtactcagcactgatgacgccacacttcaagtactgtgtttattctgaagcccctcagtacaacaaatacgttgagaccccggagcatgttcagagaatggctacaaagctgtgatgggtctggagcacaagacttatgaggagtgactgaggaagctgggattgttcagtctggagaagaggaggctcagggaagacctcattaatctctacaattgcctgagaggaggttgyggtgaggtgggagttggcttcctctcccakrtaactagcartaggactaaagggagtggcctcaagctgtttctggggatatttgggttggacattaggcaaaacttctccaaaagctcggtcaggcattagaaaggactgcccagggaggtggtggagtcactgaccctggaggtattcatgaaatgtttagatgttgtactgagggacgtgttttagtgggaaatattggtgataggtggatggttggaccggatgatcttggaggagttttccaaccttgatgattctatggggaag

SEQ ID NO: 85113 - DNA, 600 bp, Chicken  19866894383542_2
catgagccagcagtgtgcccagctgattacaccactgtactcagcactgatgacgccacacttcaagtactgtgtttattctgaagcccctcagtacaacaaatacgttgagaccccggagcatgttcagagaatggctacaaagctgtgatgggtctggagcacaagacttatgaggagtgactgaggaagctgggattgttcagtctggagaagaggaggctcagggaagacctcattaatctctacaattgcctgagaggaggttgyggtgaggtgggagttggcttcctctcccakrtaactagcartaggactaaagggagtggcctcaagctgtttctggggatatttgggttggacattaggcaaaacttctccaaaagctcggtcaggcattagaaaggactgcccagggaggtggtggagtcactgaccctggaggtattcatgaaatgtttagatgttgtactgagggacgtgttttagtgggaaatattggtgataggtggatggttggaccggatgatcttggaggagttttccaaccttgatgattctatggggaagagaaagaaaagggaacaaatcagatctagc

SEQ ID NO: 85114 - DNA, 600 bp, Chicken  19866894383542_3
atgagccagcagtgtgcccagctgattacaccactgtactcagcactgatgacgccacacttcaagtactgtgtttattctgaagcccctcagtacaacaaatacgttgagaccccggagcatgttcagagaatggctacaaagctgtgatgggtctggagcacaagacttatgaggagtgactgaggaagctgggattgttcagtctggagaagaggaggctcagggaagacctcattaatctctacaattgcctgagaggaggttgyggtgaggtgggagttggcttcctctcccakrtaactagcartaggactaaagggagtggcctcaagctgtttctggggatatttgggttggacattaggcaaaacttctccaaaagctcggtcaggcattagaaaggactgcccagggaggtggtggagtcactgaccctggaggtattcatgaaatgtttagatgttgtactgagggacgtgttttagtgggaaatattggtgataggtggatggttggaccggatgatcttggaggagttttccaaccttgatgattctatggggaagagaaagaaaagggaacaaatcagatctagcc

SEQ ID NO: 85115 - DNA, 600 bp, Chicken  19866894383542_4
agtgtgcccagctgattacaccactgtactcagcactgatgacgccacacttcaagtactgtgtttattctgaagcccctcagtacaacaaatacgttgagaccccggagcatgttcagagaatggctacaaagctgtgatgggtctggagcacaagacttatgaggagtgactgaggaagctgggattgttcagtctggagaagaggaggctcagggaagacctcattaatctctacaattgcctgagaggaggttgyggtgaggtgggagttggcttcctctcccakrtaactagcartaggactaaagggagtggcctcaagctgtttctggggatatttgggttggacattaggcaaaacttctccaaaagctcggtcaggcattagaaaggactgcccagggaggtggtggagtcactgaccctggaggtattcatgaaatgtttagatgttgtactgagggacgtgttttagtgggaaatattggtgataggtggatggttggaccggatgatcttggaggagttttccaaccttgatgattctatggggaagagaaagaaaagggaacaaatcagatctagccactttctgcc

SEQ ID NO: 85116 - DNA, 599 bp, Chicken  19866894383543_1
  misc_feature (1)..(54): n is any nucleotide
nnnnnnnnnnnnnnnnnnnnnnnnnnnnnnnnnnnnnnnnnnnnnnnnnnnnnnttatactcctggattgactggtgattaattgtagccaatactagattagctgtaagatctctgctgtagctgacttcataaggacaaatcttgatttaacttcacagctcttttttctagcaatttccaaatcagactgatattcagtattaatctttctagattaaaggcaagatgaccagtctctcttccttgtcagttcaatgcagtaaaaaaaatatgaaggctcccaggtacatagtacayactttccatgatgtaagtaaatggcaatgactatcgatcaataagagatcctggaagtgagcttgcatatgaaatccatgattataattttttttagtttattccctatctgtatttttgaccactccacctacttcactccaggatttatctgctacatagaggacaagtctgcaaggctcatggactacagctgatgtgttcagcttggctttgaggtcagaaattagtccctgaatctcttgaactcagcattatagataaagaacagatgaccatagacacaatattttcaagga

SEQ ID NO: 85117 - DNA, 599 bp, Chicken  19866894383548_1
  misc_feature (1)..(37): n is any nucleotide
nnnnnnnnnnnnnnnnnnnnnnnnnnnnnnnnnnnnngactggggtccctcttctgagtgtccaaaaggaggagagcagcccccatcccgcatctctcagtggctgccaggtaggaagcagccactgggcggggccagtgcccattggagtgggatggattatttgggggctgctcagaagtggttatgtaaggtcatatctcagtatgtgtaatcaaatctcagccctaagctgatccctgggaagggtgttagagaggtatttatccaagcatgccccgtgcactgtggcttccctcygacacagccagagctgaaactgggactaaattaggaaagytgtggcatcctctttctccccactgcctttagcaaatctccttgccagctgcaccctgccttgcccgtgctgaacactcatctcagcagggagcttggcttggtgctgaaattcacggcttggagcaaggctgttcccaggctcctactggctctcgggtgccatgtgtgccttggtgttcagcacggcgctgctccgggcactgcggcaacagttctgctttattgcacttgtgctgttcccaccgtggatcccacag

SEQ ID NO: 85118 - DNA, 600 bp, Chicken  19866894383548_2
tggggtccctcttctgagtgtccaaaaggaggagagcagcccccatcccgcatctctcagtggctgccaggtaggaagcagccactgggcggggccagtgcccattggagtgggatggattatttgggggctgctcagaagtggttatgtaaggtcatatctcagtatgtgtaatcaaatctcagccctaagctgatccctgggaagggtgttagagaggtatttatccaagcatgccccgtgcactgtggcttccctcygacacagccagagctgaaactgggactaaattaggaaagytgtggcatcctctttctccccactgcctttagcaaatctccttgccagctgcaccctgccttgcccgtgctgaacactcatctcagcagggagcttggcttggtgctgaaattcacggcttggagcaaggctgttcccaggctcctactggctctcgggtgccatgtgtgccttggtgttcagcacggcgctgctccgggcactgcggcaacagttctgctttattgcacttgtgctgttcccaccgtggatcccacagctgtacccttaccagcccccacagtgggttttgtgctggtt

SEQ ID NO: 85119 - DNA, 600 bp, Chicken  19866894383550_1
gcgggaggtagctggtgggtgtgctgggaagcaagcctttgcccatgcactctgaagtaagcaagccctactgctgaagggatgctatggagggctactcggagctgccatgttggtgctgcagggtgggagagtaatgcacagacttgaagagagcagctctgttgctttgtcttggcacggggacagcatcaagtactatagctgctgcgtgtggctttggcagcacgagcccttgtgcattgtgcggtcagctgctgctgctctcacagtgagaccggctttggaacatggtctgcwgccaaacagggagtttaattaaggaaatagtctgacttcamratgtggggacacagagggactgtgctgcatcactgggggctggatgctagaggaggagatgctgtcgtggagagacacagtctgtagctctgggggaaggacttgtttccaaagcctctgtcagccttgagtacatcacacagcttgcctgctctggctatactgatgtttctctaagtattctctaggcctcagatgtgcactctgcaatggagaggtaaaaccttctggcctgcctgatatctgttttaaaatacc

SEQ ID NO: 85120 - DNA, 600 bp, Chicken  19866894383550_2
cccatgcactctgaagtaagcaagccctactgctgaagggatgctatggagggctactcggagctgccatgttggtgctgcagggtgggagagtaatgcacagacttgaagagagcagctctgttgctttgtcttggcacggggacagcatcaagtactatagctgctgcgtgtggctttggcagcacgagcccttgtgcattgtgcggtcagctgctgctgctctcacagtgagaccggctttggaacatggtctgcwgccaaacagggagtttaattaaggaaatagtctgacttcamratgtggggacacagagggactgtgctgcatcactgggggctggatgctagaggaggagatgctgtcgtggagagacacagtctgtagctctgggggaaggacttgtttccaaagcctctgtcagccttgagtacatcacacagcttgcctgctctggctatactgatgtttctctaagtattctctaggcctcagatgtgcactctgcaatggagaggtaaaaccttctggcctgcctgatatctgttttaaaataccatagagggaagaaagctgctcttctataagcacagagcaag

SEQ ID NO: 85121 - DNA, 600 bp, Chicken  19866894383550_3
ccatgcactctgaagtaagcaagccctactgctgaagggatgctatggagggctactcggagctgccatgttggtgctgcagggtgggagagtaatgcacagacttgaagagagcagctctgttgctttgtcttggcacggggacagcatcaagtactatagctgctgcgtgtggctttggcagcacgagcccttgtgcattgtgcggtcagctgctgctgctctcacagtgagaccggctttggaacatggtctgcwgccaaacagggagtttaattaaggaaatagtctgacttcamratgtggggacacagagggactgtgctgcatcactgggggctggatgctagaggaggagatgctgtcgtggagagacacagtctgtagctctgggggaaggacttgtttccaaagcctctgtcagccttgagtacatcacacagcttgcctgctctggctatactgatgtttctctaagtattctctaggcctcagatgtgcactctgcaatggagaggtaaaaccttctggcctgcctgatatctgttttaaaataccatagagggaagaaagctgctcttctataagcacagagcaagg

SEQ ID NO: 85122 - DNA, 599 bp, Chicken  19866894383551_1
  misc_feature (1)..(51): n is any nucleotide
nnnnnnnnnnnnnnnnnnnnnnnnnnnnnnnnnnnnnnnnnnnnnnnnnnnctgcgtacatgctgacactgatcacacagtcaaagccacctctaggctatgaccagggccagccacacaaagatcttcaggcattacccactcttcctcctatgctgtgtgttgcctgctgttgttcctggtcaagctaagtttaaagttcacctcaaagaatgatgcgccccagaggcataattttaaacaaaagctcaacgcagtaacattagctgtttttctaaaatatttttgaagccaaatacrttttccttaattttctgagactccccaactaaagtttaatgcaaaatgtttatctgaacacacagacgcaacctgcacatcctcagccactactccacttaagattcagttctgcaagcatttcctttgaggggcagaagaatgcactgggggcagaacaggctttgaaccaaggcatgtactgccgctcgtatttcrgtcaaactcagctgaagttttcacaacaaagctctgagtttaaagaaagaaaggagcagatttgagatatttcaggaaaagaaaaccccaaccaaaagcaa

SEQ ID NO: 85123 - DNA, 600 bp, Chicken  19866894383551_2
gttcacctcaaagaatgatgcgccccagaggcataattttaaacaaaagctcaacgcagtaacattagctgtttttctaaaatatttttgaagccaaatacrttttccttaattttctgagactccccaactaaagtttaatgcaaaatgtttatctgaacacacagacgcaacctgcacatcctcagccactactccacttaagattcagttctgcaagcatttcctttgaggggcagaagaatgcactgggggcagaacaggctttgaaccaaggcatgtactgccgctcgtatttcrgtcaaactcagctgaagttttcacaacaaagctctgagtttaaagaaagaaaggagcagatttgagatatttcaggaaaagaaaaccccaaccaaaagcaaacagcctttctyctcatgaaaacgtacttcagtcctattcaaagccaacaaacagcaacagtagcagcactacgtaataccgatcccgcaatgtggccattgggctcagttctacttccttctgtcacataggttgcggagggcagggatgagcatttgaacactgagatacctaattttgaatggtccaaggtagaaa

SEQ ID NO: 85124 - DNA, 539 bp, Chicken  19866894383551_3
tttctgagactccccaactaaagtttaatgcaaaatgtttatctgaacacacagacgcaacctgcacatcctcagccactactccacttaagattcagttctgcaagcatttcctttgaggggcagaagaatgcactgggggcagaacaggctttgaaccaaggcatgtactgccgctcgtatttcrgtcaaactcagctgaagttttcacaacaaagctctgagtttaaagaaagaaaggagcagatttgagatatttcaggaaaagaaaaccccaaccaaaagcaaacagcctttctyctcatgaaaacgtacttcagtcctattcaaagccaacaaacagcaacagtagcagcactacgtaataccgatcccgcaatgtggccattgggctcagttctacttccttctgtcacataggttgcggagggcagggatgagcatttgaacactgagatacctaattttgaatggtccaaggtagaaaaaaagcctagcacgaaacctagaaatggctttggcacacattcttccagtgt

SEQ ID NO: 85125 - DNA, 600 bp, Chicken  19866894383559_1
cgggatctgacaatcctcctctggggaaacctcagcaaccgaaaatgacaggtcagtgtgcagaggactttcccagtacaagaaggaggatgcagataataggccagcattactgaacgagtgagaatagaaacacttaggctcccatcgtcagaaaaaaatagaaagggagataagaagtgagagaaggctttgtaaaaacataccaaaataactccgaagaatcagaagcaggagaaaaatagaagagaaactgagatgtgagtgctgtatgaggaaagtacttatagcagagaaaayagcgaaaaccatcaccaacaaaaggatgcattaaaagagcaaaatgagaccaaattacactyccctctgttcaacagcactactcacccaaacatgcagagcccctgcccaggaggcatgcagacatgaccccmcagctggcgctggcttggatccagctgagctccaccagctaacagcccctctyctgccctccttgacaagctgcccaacaaggagccaccactgtccctgcgacagggagacagcgagcycggtatctcagtgagctggcagataaacgagccccagtctgcaagt

SEQ ID NO: 85126 - DNA, 600 bp, Chicken  19866894383559_2
gaggactttcccagtacaagaaggaggatgcagataataggccagcattactgaacgagtgagaatagaaacacttaggctcccatcgtcagaaaaaaatagaaagggagataagaagtgagagaaggctttgtaaaaacataccaaaataactccgaagaatcagaagcaggagaaaaatagaagagaaactgagatgtgagtgctgtatgaggaaagtacttatagcagagaaaayagcgaaaaccatcaccaacaaaaggatgcattaaaagagcaaaatgagaccaaattacactyccctctgttcaacagcactactcacccaaacatgcagagcccctgcccaggaggcatgcagacatgaccccmcagctggcgctggcttggatccagctgagctccaccagctaacagcccctctyctgccctccttgacaagctgcccaacaaggagccaccactgtccctgcgacagggagacagcgagcycggtatctcagtgagctggcagataaacgagccccagtctgcaagtcctgagaatggctgagtgccttccaccctggctctgagtgcaatcacaaatgctaatcgaca

SEQ ID NO: 85127 - DNA, 600 bp, Chicken  19866894383559_3
acttaggctcccatcgtcagaaaaaaatagaaagggagataagaagtgagagaaggctttgtaaaaacataccaaaataactccgaagaatcagaagcaggagaaaaatagaagagaaactgagatgtgagtgctgtatgaggaaagtacttatagcagagaaaayagcgaaaaccatcaccaacaaaaggatgcattaaaagagcaaaatgagaccaaattacactyccctctgttcaacagcactactcacccaaacatgcagagcccctgcccaggaggcatgcagacatgaccccmcagctggcgctggcttggatccagctgagctccaccagctaacagcccctctyctgccctccttgacaagctgcccaacaaggagccaccactgtccctgcgacagggagacagcgagcycggtatctcagtgagctggcagataaacgagccccagtctgcaagtcctgagaatggctgagtgccttccaccctggctctgagtgcaatcacaaatgctaatcgacaggagcccagcatgtcattcgtcacgtctccagggctccaggaaaacccccctttcctctccttgtatcagct

SEQ ID NO: 85128 - DNA, 600 bp, Chicken  19866894383559_4
aggctttgtaaaaacataccaaaataactccgaagaatcagaagcaggagaaaaatagaagagaaactgagatgtgagtgctgtatgaggaaagtacttatagcagagaaaayagcgaaaaccatcaccaacaaaaggatgcattaaaagagcaaaatgagaccaaattacactyccctctgttcaacagcactactcacccaaacatgcagagcccctgcccaggaggcatgcagacatgaccccmcagctggcgctggcttggatccagctgagctccaccagctaacagcccctctyctgccctccttgacaagctgcccaacaaggagccaccactgtccctgcgacagggagacagcgagcycggtatctcagtgagctggcagataaacgagccccagtctgcaagtcctgagaatggctgagtgccttccaccctggctctgagtgcaatcacaaatgctaatcgacaggagcccagcatgtcattcgtcacgtctccagggctccaggaaaacccccctttcctctccttgtatcagctagggacaggaagattccctcatcctctgcacaagggagcctctccctccccct

SEQ ID NO: 85129 - DNA, 600 bp, Chicken  19866894383559_5
tgagatgtgagtgctgtatgaggaaagtacttatagcagagaaaayagcgaaaaccatcaccaacaaaaggatgcattaaaagagcaaaatgagaccaaattacactyccctctgttcaacagcactactcacccaaacatgcagagcccctgcccaggaggcatgcagacatgaccccmcagctggcgctggcttggatccagctgagctccaccagctaacagcccctctyctgccctccttgacaagctgcccaacaaggagccaccactgtccctgcgacagggagacagcgagcycggtatctcagtgagctggcagataaacgagccccagtctgcaagtcctgagaatggctgagtgccttccaccctggctctgagtgcaatcacaaatgctaatcgacaggagcccagcatgtcattcgtcacgtctccagggctccaggaaaacccccctttcctctccttgtatcagctagggacaggaagattccctcatcctctgcacaagggagcctctccctccccctatccctggctccaaccatctctgcaagaagtttcactccctgctaacttctccattgtctcagatgc

SEQ ID NO: 85130 - DNA, 600 bp, Chicken  19866894383561_1
ctcctctttgtattgcagcagagcctggagattttggcttaaattggagccggtggtggcaggtgtcaccaagaggctgctaaagtctctgcatgactgacatgggctgcagaacataagagctgagagcggatccctattctgactcccagtgtgtcgcctcttacatatgagagttcttaccagaagtaaacgtttttggctgtaaagctgatctgcaaaggaaggtaagtcacgttcaggtgtttttctttctcttttggtttttttggccctgcgaggagcccaggagataaaatrgaaagctcagaaaatagcccctgcgtgacttgtggttgtatctcagcctgcagctcttcttcaaaagctgcaaagcaatacttcacccatcacctctccagggaggagcagtgactcatggcagtaaggcagggaccgaaggagaagcccaacacccaggaagctttacttcctttgggaaatcctgagatcatcccaggataagctcgctaattttactaaaaagcataaatatgaaagcatccaacactgatctatgcgaataatagcgaatgataaagcaaaacacaagctgatgtc

SEQ ID NO: 85131 - DNA, 600 bp, Chicken  19866894383577_1
tcctagactacacacttgttagccaatcactttttggctgtgtgagctctgtagattactgcttgttcttcatttccctatgcagagtggtgctctatttccttaggacactttatgccaccctggctgtgtgccgcagctctcaaaagggaataagagtaattgatgcaggaaatgattttgaaagacacaaatggtagccagatatctgactcttgatgactcttaatggcagctagatgactgattggtgtttacacctttgaacatcttccccacgctttttagattgtagaatgytttcaagaatcagcaagactcagactcacgagtagagtttcctctgccttcccagggtgaactttctctagggtgagccagtaaatgttctactctactgttgctccctttctttcctggctcaaatccagaaataatctggcttggtcaatatgtgtccacgtacaaaaaataatcaaactgggttatgattttcaaatttgaagacragggatgttcatcttcagggaggctagttcatgtttcatctcctttttggttatcgcttagtatgctttgtataaattgccatttcaggag

SEQ ID NO: 85132 - DNA, 523 bp, Chicken  19866894383577_2
tgactcttgatgactcttaatggcagctagatgactgattggtgtttacacctttgaacatcttccccacgctttttagattgtagaatgytttcaagaatcagcaagactcagactcacgagtagagtttcctctgccttcccagggtgaactttctctagggtgagccagtaaatgttctactctactgttgctccctttctttcctggctcaaatccagaaataatctggcttggtcaatatgtgtccacgtacaaaaaataatcaaactgggttatgattttcaaatttgaagacragggatgttcatcttcagggaggctagttcatgtttcatctcctttttggttatcgcttagtatgctttgtataaattgccatttcaggagaaaaagagcagtagtcatttgtaattactgctgcatacctgtgttagtaaatgtccttatctaattgaagttgatataaatgttggtggaagcgttttagacagggaagaaatcactgaaaatatcagaaat

SEQ ID NO: 85133 - DNA, 600 bp, Chicken  19866894383585_1
cctgtacctctgctctgaattcagttgtgttctgcacctctgtcagtgctttcagtcatgccgtgtcaatgggaagagcctggcctttccccatggacagctctcacttctggaattcttcttgccccctcacagcagtgtgctaacaaagcctgcctttgtttctgtgggggaatgatgcaaggccatctgttagctcagactgataggaaaaaggcagcctttaaggatggctggtgggttactctgtgttttttccagaggtttgaccatgtccgtctctgaccagcgaatcttcasaagcattctgaggggtcgctgcagcaacaattggccgtgtatgtgtgggtattcccaccttgcagccaggcttacagcagcaggtttctcacataaatacattctaaagaaagctcagtcctggtttattttagaacataaaaaatgacacctattcctttttccctttcagttaagttttctttagattttcttgttcctctggtagaaaattccatttacttattagcttttgctggtattaaattattgccacgtataactttaattttatggatagctttaaaatatttctcccaa

SEQ ID NO: 85134 - DNA, 600 bp, Chicken  19866894383591_1
tatgatctgtggtaatacatgtttctaatgattagcgatatggtaggaattacggtgttgagaaagataatatttatgagaagagaaaaaaaatatgtattctaaacaaatgaagtaaaaagtattattattttttttaattttgagttacatttatgcagaacttctgaaagtgtttttcttgcatatgtatgtgtctttcactttaataagcctgtagtgagaatctgagtaaataagcatagcaatgcagaacatacagatctggcagaggatatgtgtttctcaataacaaaccaraaaaagtcaaagtggaatctttttaatagcaagttaattactgttcatgaggaccacttaagttcttcagctacatagacagaaacatggcataaatatattacaagacgtgctgtccagcgtagctcatctgtatgtaccagtgggtggataagccatggagaagattgtgctgtgcaaagaagagacatattttttcattccttcctttgttaaataaataccacttgttgccctttggaatcatttatttattattgactcatgctgagttcagggcaggaaggggaatcatacaat

SEQ ID NO: 85135 - DNA, 564 bp, Chicken  19866894383592_1
acctggtgggggtagagtaaagacagagctggactcttcacagtgatgcccggtgggatgacaagaagcaatgagcatgaagtgtggtaaattccatttcaacataaagcattcaggtttgataacagattacttttgatttacatctgctgaaacaccagcatcctctgttcaaaaagaagatctggagtttatttctcctttctactgcacatactgaaattagagcaggaggaagtttgatgtaaaataaagtaccataaagattataaaacacccaatgtattgcactgcggtctwgataacatatcagcaattagctgctgttctgacagcagagcccagctcttggccatgcaacactgagacagaatatgtgagaacgagtctgtgttaccacaaaacaaaaatgccaggtatgcaatacctaaagcagtttgcctgagaaaaccaacctgttgactcaacacatcttatatcggagctcagctgcttcctaaagcaagagtcctcagagtactttcacttggatcaaagacaaaatgttgtatttttaatgcaatt

SEQ ID NO: 85136 - DNA, 600 bp, Chicken  19866894383594_1
agttatatttataaatagtgtgaatctagtgaaacaggaaaactacattataaatctgaggatttaccatcacttagtacctactagtgtctaagttcttgtagacttttgtgccctgctccaagagaaacttcctgatgttgtcttatgaattggcaggaaattgaatttaacagcatacaataatggtattggtacttcaagttcatttgcgttagtctatggattctgagtctgttcagtgcagagttgtactcagtgtgcaaaaagtcttccagagcatcagataatactgttgtygttatcagtgagttctactgtagctatcactgctgttcctgtattttttttctgttgtagcatgcaataaggaggatttttttactttctctgacaacataatctactctgtaaatgtatcgtctcctgtgaatgtaagcttgtgttataaacctttaacaatttatcatctccaaagaattgtttgcctaggtctgttttcaaagtggtagagataacatcattgtttatcctcataaccacattaactaatctttagttttcttattactattttaatgttattcatctggctcatgc

SEQ ID NO: 85137 - DNA, 600 bp, Chicken  19866894383596_1
caatgttgatgcttgcttaacattgaaacaaataacaaaaaagagagtgggttaaagttgttcccaggaatgcgtattatctgtcctgagttttctcaatccaagaatcattaatttgatctaattctttataacctctttgttacagcaaaaataatcatctgtgttcagtctgtgttatagtttgttctgcgtttcggcactttcggcctgaagaatttagcacatcaaattttcagttcaagcatttggagctacggaacaaacagaagaaataaaaggagtcccaaccattgcaayracacgactacaagctgtaattcctrctattgcctctcctgcagctgcatttcaagtgaaaagcaaaacacattaaaagccatggatttcacaaggtataaacttttaccattcaygaaagagtcctcaaaactaatacatcatctaaaaaaaccaaagacaaaaccacccaacctcccccagaagaaacaacaacactcagttgttctgggaagtggaaaaaaatgcagaaaggttcaattttctttctaagctcaagctaactgattaggtttgaacagcataacaagcaagcaaatt

SEQ ID NO: 85138 - DNA, 600 bp, Chicken  19866894383596_2
aatgttgatgcttgcttaacattgaaacaaataacaaaaaagagagtgggttaaagttgttcccaggaatgcgtattatctgtcctgagttttctcaatccaagaatcattaatttgatctaattctttataacctctttgttacagcaaaaataatcatctgtgttcagtctgtgttatagtttgttctgcgtttcggcactttcggcctgaagaatttagcacatcaaattttcagttcaagcatttggagctacggaacaaacagaagaaataaaaggagtcccaaccattgcaayracacgactacaagctgtaattcctrctattgcctctcctgcagctgcatttcaagtgaaaagcaaaacacattaaaagccatggatttcacaaggtataaacttttaccattcaygaaagagtcctcaaaactaatacatcatctaaaaaaaccaaagacaaaaccacccaacctcccccagaagaaacaacaacactcagttgttctgggaagtggaaaaaaatgcagaaaggttcaattttctttctaagctcaagctaactgattaggtttgaacagcataacaagcaagcaaattc

SEQ ID NO: 85139 - DNA, 600 bp, Chicken  19866894383596_3
aacaaataacaaaaaagagagtgggttaaagttgttcccaggaatgcgtattatctgtcctgagttttctcaatccaagaatcattaatttgatctaattctttataacctctttgttacagcaaaaataatcatctgtgttcagtctgtgttatagtttgttctgcgtttcggcactttcggcctgaagaatttagcacatcaaattttcagttcaagcatttggagctacggaacaaacagaagaaataaaaggagtcccaaccattgcaayracacgactacaagctgtaattcctrctattgcctctcctgcagctgcatttcaagtgaaaagcaaaacacattaaaagccatggatttcacaaggtataaacttttaccattcaygaaagagtcctcaaaactaatacatcatctaaaaaaaccaaagacaaaaccacccaacctcccccagaagaaacaacaacactcagttgttctgggaagtggaaaaaaatgcagaaaggttcaattttctttctaagctcaagctaactgattaggtttgaacagcataacaagcaagcaaattcaagtgctggtaaaatggatgcagct

SEQ ID NO: 85140 - DNA, 600 bp, Chicken  19866894383596_4
tgatctaattctttataacctctttgttacagcaaaaataatcatctgtgttcagtctgtgttatagtttgttctgcgtttcggcactttcggcctgaagaatttagcacatcaaattttcagttcaagcatttggagctacggaacaaacagaagaaataaaaggagtcccaaccattgcaayracacgactacaagctgtaattcctrctattgcctctcctgcagctgcatttcaagtgaaaagcaaaacacattaaaagccatggatttcacaaggtataaacttttaccattcaygaaagagtcctcaaaactaatacatcatctaaaaaaaccaaagacaaaaccacccaacctcccccagaagaaacaacaacactcagttgttctgggaagtggaaaaaaatgcagaaaggttcaattttctttctaagctcaagctaactgattaggtttgaacagcataacaagcaagcaaattcaagtgctggtaaaatggatgcagctcagtttcttcctctaaataaatcagatgaaaamcctaaacaccatgaagctattcacttgcaarcaagaagaatgcagactttatgatta

SEQ ID NO: 85141 - DNA, 600 bp, Chicken  19866894383596_5
aaagcaaaacacattaaaagccatggatttcacaaggtataaacttttaccattcaygaaagagtcctcaaaactaatacatcatctaaaaaaaccaaagacaaaaccacccaacctcccccagaagaaacaacaacactcagttgttctgggaagtggaaaaaaatgcagaaaggttcaattttctttctaagctcaagctaactgattaggtttgaacagcataacaagcaagcaaattcaagtgctggtaaaatggatgcagctcagtttcttcctctaaataaatcagatgaaaamcctaaacaccatgaagctattcacttgcaarcaagaagaatgcagactttatgattaaaatccagttgatccgactccttcatttagataccagcttaaggaggcagaaacaattccttttttatcaagatgacaagcgagcggtttgccatcatagacagaagagctgagaaacacagacgacacttttggaattgcagtcratggcgcagccaaggaacttcaccagcggggcggattcatgttttggtttggcagaaaacaaacaacatcttttcccacagatctgttttcttaaaa

SEQ ID NO: 85142 - DNA, 600 bp, Chicken  19866894383596_6
acaaggtataaacttttaccattcaygaaagagtcctcaaaactaatacatcatctaaaaaaaccaaagacaaaaccacccaacctcccccagaagaaacaacaacactcagttgttctgggaagtggaaaaaaatgcagaaaggttcaattttctttctaagctcaagctaactgattaggtttgaacagcataacaagcaagcaaattcaagtgctggtaaaatggatgcagctcagtttcttcctctaaataaatcagatgaaaamcctaaacaccatgaagctattcacttgcaarcaagaagaatgcagactttatgattaaaatccagttgatccgactccttcatttagataccagcttaaggaggcagaaacaattccttttttatcaagatgacaagcgagcggtttgccatcatagacagaagagctgagaaacacagacgacacttttggaattgcagtcratggcgcagccaaggaacttcaccagcggggcggattcatgttttggtttggcagaaaacaaacaacatcttttcccacagatctgttttcttaaaaaacgtggaagtttcctggtcagagcaaacgg

SEQ ID NO: 85143 - DNA, 600 bp, Chicken  19866894383596_7
actgattaggtttgaacagcataacaagcaagcaaattcaagtgctggtaaaatggatgcagctcagtttcttcctctaaataaatcagatgaaaamcctaaacaccatgaagctattcacttgcaarcaagaagaatgcagactttatgattaaaatccagttgatccgactccttcatttagataccagcttaaggaggcagaaacaattccttttttatcaagatgacaagcgagcggtttgccatcatagacagaagagctgagaaacacagacgacacttttggaattgcagtcratggcgcagccaaggaacttcaccagcggggcggattcatgttttggtttggcagaaaacaaacaacatcttttcccacagatctgttttcttaaaaaacgtggaagtttcctggtcagagcaaacggcgcacrgagccagagggcttctgagagccttctcattaccgtaatgtttacacagtctatttcgaactagaagcatacgtttccaactaacgtgcatttatgtttaataagaaagaaagaaaaatcccacacctgatctgtacctgtgatcaccgtggagcagaactgggca

SEQ ID NO: 85144 - DNA, 600 bp, Chicken  19866894383596_8
gaatgcagactttatgattaaaatccagttgatccgactccttcatttagataccagcttaaggaggcagaaacaattccttttttatcaagatgacaagcgagcggtttgccatcatagacagaagagctgagaaacacagacgacacttttggaattgcagtcratggcgcagccaaggaacttcaccagcggggcggattcatgttttggtttggcagaaaacaaacaacatcttttcccacagatctgttttcttaaaaaacgtggaagtttcctggtcagagcaaacggcgcacrgagccagagggcttctgagagccttctcattaccgtaatgtttacacagtctatttcgaactagaagcatacgtttccaactaacgtgcatttatgtttaataagaaagaaagaaaaatcccacacctgatctgtacctgtgatcaccgtggagcagaactgggcaggattacgtagcatttggcagaagcaccttgccctcctcaaaccaggggcactgcacccagcaccgtgttatggcaagagcgactgggaagttttggggagggccagaagaaaactgcagtgtgctgtattttt

SEQ ID NO: 85145 - DNA, 600 bp, Chicken  19866894383607_1
cgtaactaatatattgaaggaagtattattatgttttcttgacagtgttcctgttttaattggtcttgtatacttgagccaatgtctgtgcactgactagagtaatcaagtagtagttccacaataaaaagtaattgttggtagttgaattaatttcttattgatgatgaggaaagatttggtctcaaatttaaaaaagtaatctcaaaagtccccaaaaacacaagacaataaaagggttttcctttgcaatctatagcaaagggataaaagccattattactaacacaaacagcatgmatttgctcaggttctaccagcttattactgatgacacatctggtataacactttttttttttttccccattagaataaatatatatatatatactcctttctagtttaaaatcatggcagaggctcttttggcaacatcaatagaaagtctgttatgacacacaacagaaaatcacttgaaaaagtatttgctgttactcacttcagaagaatgatttgtgcaaagattagatgctttggccttgagacacacacaagtaaattggggtagttttcctgagaagtattcttgttgaactg

SEQ ID NO: 85146 - DNA, 600 bp, Chicken  19866894383612_1
ggtattaagttttcttctgaatgccactgatgtctgtggaggtcattatggagggtccaaagtcaagctacaggaataccacaggtgattcatactactattgatttgtatctttgtaatgctttggtgtctcatttgtgaaccatggacattttgagtaagggatcaaagacaaagaacaaaaaactggttccccccaactagtgaaaaatactcttcatttgaagtatatcttgcagacactgtttggtgaatactgctgaataatgaatacattctagaaaattgcaagcagaaagkcagagcacacaccagataattttttcctcatggttttttcatctctctctccttagtagatacttcaggggcaagctgccatgggtggtgttgatttatttggttaataaatgtcccttcacttactaagcaatcagtaaaataaagtttcctgcaataaaagtattttatacattatagtaaattaaattgaatattttaatgcctcaaacagtaatgtattcttaatgatcatgttcccatcacatagctttaatataagtagttccatcttcaagcgatttctaaaataaaatgaga

SEQ ID NO: 85147 - DNA, 600 bp, Chicken  19866894383613_1
caaacgcacattcagttgtgtgctgcaagatagtttgatagtgggtgagttctgtgtctaatcactaggtggagatcaatgcaacatgtatggattgggttggaagaaattatttctctgctgaaagcagctgacagcagcgtagctctgttagcatgctgcagctaataaccctgccttccagggggctgttaaccccagggcagcaccgtcagggtgtggctgcactgttcccatgactggaatgaacaggaacaaaggcaacagagtcttcagaaaaaaaaacagaacttagccagmgcttgggaagcatcattgttacatcaacagtagacttgtttttcaggtctttctccattgttattaggaaataagcatgctaaattcatttcttgtgagtttttctgtctctccttcccccctctacgcattcagcattaacattcttgctgtcataccaacaacttgcatgctgcagttataaagagatctttgaacagaagtgctatgattttgagcgtagccctgtcaaggtattgctttctgcatgctcaggaaaagagtttcaagcaaatgataatttttgccaagctagttcag

SEQ ID NO: 85148 - DNA, 599 bp, Chicken  19866894383615_1
  misc_feature (1)..(75): n is any nucleotide
nnnnnnnnnnnnnnnnnnnnnnnnnnnnnnnnnnnnnnnnnnnnnnnnnnnnnnnnnnnnnnnnnnnnnnnnnnntgagcaaaggctgagggaacagcgcttgtttagcctggagaagaaaaggcttcggaaagaccttactacaaccttttaatatataaaaggggataataagaaatggactttttactgaggtctgtagtgacagaacaataggcaatgattttaaatttaaagaagataaatttagattggatataaggaagaattctttttatgatgagaatggtgagacagtgraacaggttggccagagaagttatggatgtcttatcatttcaagtgttcaaagtaaggctggacaggagtttgggcagcctgatctagyaaatattgtccctgcttatggcaagggtgttggactggatgatacaagtcccttctaacctaggtcattctatgattttagcaacagaaatctgtaaaatatttgatctaataattctgtataacagccagaaagaacataaacttattttgaaagacagcagtaaaataagtttgccacttctgcttgaaaaagaatgaatatttttcta

SEQ ID NO: 85149 - DNA, 600 bp, Chicken  19866894383615_2
agggaacagcgcttgtttagcctggagaagaaaaggcttcggaaagaccttactacaaccttttaatatataaaaggggataataagaaatggactttttactgaggtctgtagtgacagaacaataggcaatgattttaaatttaaagaagataaatttagattggatataaggaagaattctttttatgatgagaatggtgagacagtgraacaggttggccagagaagttatggatgtcttatcatttcaagtgttcaaagtaaggctggacaggagtttgggcagcctgatctagyaaatattgtccctgcttatggcaagggtgttggactggatgatacaagtcccttctaacctaggtcattctatgattttagcaacagaaatctgtaaaatatttgatctaataattctgtataacagccagaaagaacataaacttattttgaaagacagcagtaaaataagtttgccacttctgcttgaaaaagaatgaatatttttctaaatcatcctataccttccggtccctcacaatgctatttatcaagatttattaaaaaaaacactgaagaataaaacctattcagaaatac

SEQ ID NO: 85150 - DNA, 600 bp, Chicken  19866894383618_1
agtaacttctgaagtgatttatctaattttacacacatcacaaacccagcttttaaaaaacagaatgaagtttcttctctggtaatttatatttcttttttagcctatttcaagtgggtatttcagtatcatgaacgttactttgtaaaaaagtttttttgtaaaaaagtaaaaaagtcatgcagaagtcttttacacctttgtgaattagccacattaggcaattttgtgagacaaatagaaagaaaagttaactcagcaactgttcatctcactgcggaatcagactgttgaggaagmagtgttctgtgaaaaggcaaaaaatgtgctgtatgtagttttcacacttgtttgagaaagagtaagaacatgtaagattcttgytttcaggattgacagattcttcagagtcactcaagagatagaagatgagtacgagaaaaagtagatcattaactgagctcttcgatccttttgcaggtgtgcatatttcatatgcttcttaactgcacaattatttgcccactccttgatggtgattgctgcagtgcatgttcrgattctctaccaaactccttagcaaaactaacttgagaccca

SEQ ID NO: 85151 - DNA, 600 bp, Chicken  19866894383618_2
atttatatttcttttttagcctatttcaagtgggtatttcagtatcatgaacgttactttgtaaaaaagtttttttgtaaaaaagtaaaaaagtcatgcagaagtcttttacacctttgtgaattagccacattaggcaattttgtgagacaaatagaaagaaaagttaactcagcaactgttcatctcactgcggaatcagactgttgaggaagmagtgttctgtgaaaaggcaaaaaatgtgctgtatgtagttttcacacttgtttgagaaagagtaagaacatgtaagattcttgytttcaggattgacagattcttcagagtcactcaagagatagaagatgagtacgagaaaaagtagatcattaactgagctcttcgatccttttgcaggtgtgcatatttcatatgcttcttaactgcacaattatttgcccactccttgatggtgattgctgcagtgcatgttcrgattctctaccaaactccttagcaaaactaacttgagacccaagaaagtcaatgaactaaacgccagaggaacagagattttgtaaaagtgcctgctggagctagtagtccctcttcacagactac

SEQ ID NO: 85152 - DNA, 600 bp, Chicken  19866894383618_3
gcaactgttcatctcactgcggaatcagactgttgaggaagmagtgttctgtgaaaaggcaaaaaatgtgctgtatgtagttttcacacttgtttgagaaagagtaagaacatgtaagattcttgytttcaggattgacagattcttcagagtcactcaagagatagaagatgagtacgagaaaaagtagatcattaactgagctcttcgatccttttgcaggtgtgcatatttcatatgcttcttaactgcacaattatttgcccactccttgatggtgattgctgcagtgcatgttcrgattctctaccaaactccttagcaaaactaacttgagacccaagaaagtcaatgaactaaacgccagaggaacagagattttgtaaaagtgcctgctggagctagtagtccctcttcacagactacctttctgtgtcagaagtctgtctttgttaatagccactggagtgaacatgcacagtgtgagattcagtcacagcaatgaataccagataaacgtttttcacattcctaatgcacttttgttattctggctaatctgtaatctcagccactatcggtaacagtttgaaagaaata

SEQ ID NO: 85153 - DNA, 600 bp, Chicken  19866894383630_1
cttcccctcccatagctataggccattagccttgtttaaaaaaaaaaagttaattagaattgaaaaggtagaataataaaggagaaaattgtcttttggcagccccgcttaatttatttatattggcatttcaagatcattgtaatataagatgcaccttcaacctgcatgatgtattctgccttctcccagagtagctctgtgatacagcttgttcatttagacccataattgtgctccttcagcctaccctactgcaggatttcagctttctagcatcaaacgaataacaaaattcaygagagmacaagaacaactttgtggaccaaacaggagagctgcagaagtgcctttgacttttagattgccataaacatggaggtaagagctggtagaaatactgtgacagatrgagttttaataactatttcaactctgtctttttaaatgagtttgccagaaaatgatccataaagtccacggctccacctgatcaccagttacctggatctgctttttgcagagaggacaaaaaaaaccaaacaaccaccactagccacgaatttatgacatacagaggagaaatgactcacctcaaag

SEQ ID NO: 85154 - DNA, 600 bp, Chicken  19866894383630_2
ctcccatagctataggccattagccttgtttaaaaaaaaaaagttaattagaattgaaaaggtagaataataaaggagaaaattgtcttttggcagccccgcttaatttatttatattggcatttcaagatcattgtaatataagatgcaccttcaacctgcatgatgtattctgccttctcccagagtagctctgtgatacagcttgttcatttagacccataattgtgctccttcagcctaccctactgcaggatttcagctttctagcatcaaacgaataacaaaattcaygagagmacaagaacaactttgtggaccaaacaggagagctgcagaagtgcctttgacttttagattgccataaacatggaggtaagagctggtagaaatactgtgacagatrgagttttaataactatttcaactctgtctttttaaatgagtttgccagaaaatgatccataaagtccacggctccacctgatcaccagttacctggatctgctttttgcagagaggacaaaaaaaaccaaacaaccaccactagccacgaatttatgacatacagaggagaaatgactcacctcaaagagtgct

SEQ ID NO: 85155 - DNA, 600 bp, Chicken  19866894383630_3
tttatttatattggcatttcaagatcattgtaatataagatgcaccttcaacctgcatgatgtattctgccttctcccagagtagctctgtgatacagcttgttcatttagacccataattgtgctccttcagcctaccctactgcaggatttcagctttctagcatcaaacgaataacaaaattcaygagagmacaagaacaactttgtggaccaaacaggagagctgcagaagtgcctttgacttttagattgccataaacatggaggtaagagctggtagaaatactgtgacagatrgagttttaataactatttcaactctgtctttttaaatgagtttgccagaaaatgatccataaagtccacggctccacctgatcaccagttacctggatctgctttttgcagagaggacaaaaaaaaccaaacaaccaccactagccacgaatttatgacatacagaggagaaatgactcacctcaaagagtgctgaggatggcactactgccgacattatagcatgggcataagcacagtcagattttacctacaatatatctggacatgcttatacccttcctgcctgcaaacactgcc

SEQ ID NO: 85156 - DNA, 600 bp, Chicken  19866894383641_1
atcaagctccaatgccccgccacaggcagggccaccaacctccacatttaatactagaccaggctgttcagggccccatccaacctggtcttgaacacctccagggatggggcatccacagcctctctgggcagcccgtgccagcacctcaccactctcatagtaaagaacttccccctgatatccaacctaaatcttcccttcttcaactgaaaaccatttccccttgtcctgccattatctacccttgtaaagagttggctcccctcctgtttgtaggctccttttaggtgctggaargctgcagtgaggtcacccctaaagtaatagagatgagaaaatyacaagtgggcaaatccacattcggtgaagataagacacttttgccagcatttcattatggctttcctcttttggagggaatacagatataagatattcttgttagtatatctgcgtgctttagaaaacagaaattgcaaaacgcagctattttggtttttacattttcttctgtcactctctattttgtctgtattaacgccagcagctttagtactgggttggcacagctgctgcactctcaaggctcagactgaa

SEQ ID NO: 85157 - DNA, 600 bp, Chicken  19866894383641_2
acatttaatactagaccaggctgttcagggccccatccaacctggtcttgaacacctccagggatggggcatccacagcctctctgggcagcccgtgccagcacctcaccactctcatagtaaagaacttccccctgatatccaacctaaatcttcccttcttcaactgaaaaccatttccccttgtcctgccattatctacccttgtaaagagttggctcccctcctgtttgtaggctccttttaggtgctggaargctgcagtgaggtcacccctaaagtaatagagatgagaaaatyacaagtgggcaaatccacattcggtgaagataagacacttttgccagcatttcattatggctttcctcttttggagggaatacagatataagatattcttgttagtatatctgcgtgctttagaaaacagaaattgcaaaacgcagctattttggtttttacattttcttctgtcactctctattttgtctgtattaacgccagcagctttagtactgggttggcacagctgctgcactctcaaggctcagactgaagggaaaaaactcttcctgggcttctcagcttattttgaggttt

SEQ ID NO: 85158 - DNA, 600 bp, Chicken  19866894383646_1
cttcattgctttttcagcaaccaggaactttcccctctctgctgtacggatgataggaaacaacacgtgacatgtttctcaccttctcatgcacggctgtgggggctgagcttgctgtaatgcttttgggttctgtactgccagtaggtcttgggctgcctctgtctaaagctgagatgacatgagtttgacccgtattctgcttgcttagcttcagtcagagggttcaagtggcctgtgatcagatcttaatgacaagtacccttggtgacattcctaattcaataagaaatggcagartttgtacccagtgtggctgcagctcctgaacctgaatcctaytgccacaggattgtgtacatctatgggatttacgtgccccactgggcatacgaatgctccatggaaaagcctttaggagtttgtaccccagagctgtgtttccactgcttgcagctggtggtacaaggtacagctggagccctttgcttgccctgggctacttccccttgcgctgctgaggtgagacacctcagaagcagwtcctgcagctgtttatcagtgctgagaaatgctgtggcacagtctgggatgggaagc

SEQ ID NO: 85159 - DNA, 600 bp, Chicken  19866894383646_2
tgtacggatgataggaaacaacacgtgacatgtttctcaccttctcatgcacggctgtgggggctgagcttgctgtaatgcttttgggttctgtactgccagtaggtcttgggctgcctctgtctaaagctgagatgacatgagtttgacccgtattctgcttgcttagcttcagtcagagggttcaagtggcctgtgatcagatcttaatgacaagtacccttggtgacattcctaattcaataagaaatggcagartttgtacccagtgtggctgcagctcctgaacctgaatcctaytgccacaggattgtgtacatctatgggatttacgtgccccactgggcatacgaatgctccatggaaaagcctttaggagtttgtaccccagagctgtgtttccactgcttgcagctggtggtacaaggtacagctggagccctttgcttgccctgggctacttccccttgcgctgctgaggtgagacacctcagaagcagwtcctgcagctgtttatcagtgctgagaaatgctgtggcacagtctgggatgggaagcctttgctaattggacctgttggtacatctcccttggcccacg

SEQ ID NO: 85160 - DNA, 600 bp, Chicken  19866894383646_3
agatcttaatgacaagtacccttggtgacattcctaattcaataagaaatggcagartttgtacccagtgtggctgcagctcctgaacctgaatcctaytgccacaggattgtgtacatctatgggatttacgtgccccactgggcatacgaatgctccatggaaaagcctttaggagtttgtaccccagagctgtgtttccactgcttgcagctggtggtacaaggtacagctggagccctttgcttgccctgggctacttccccttgcgctgctgaggtgagacacctcagaagcagwtcctgcagctgtttatcagtgctgagaaatgctgtggcacagtctgggatgggaagcctttgctaattggacctgttggtacatctcccttggcccacgtggtgcccaaaagattaacttcttatcagccatcaccactggggtttacactcaggtcctaattatgccatccactgaaaaaggccagatagatgcctgaaggcaactsagttctgggagcatagctcaaaatcacttaaatcctaccacctttgtgcaagaggcttgctctgcctatcagattttcttatggattacttt

SEQ ID NO: 85161 - DNA, 600 bp, Chicken  19866894383646_4
tgcagctggtggtacaaggtacagctggagccctttgcttgccctgggctacttccccttgcgctgctgaggtgagacacctcagaagcagwtcctgcagctgtttatcagtgctgagaaatgctgtggcacagtctgggatgggaagcctttgctaattggacctgttggtacatctcccttggcccacgtggtgcccaaaagattaacttcttatcagccatcaccactggggtttacactcaggtcctaattatgccatccactgaaaaaggccagatagatgcctgaaggcaactsagttctgggagcatagctcaaaatcacttaaatcctaccacctttgtgcaagaggcttgctctgcctatcagattttcttatggattacttttgcgaagaaaaagcaaacctattctaattaactttggatggattgtttcacaaaaggataaaaccaattagcattgccttctcaccttgtgaagcccttgtgtggtactgttaaaggtcacatttttgaaaccagctgacaaggaggtgaataaatgcaaatcagtgagtaaatattatacataattcagtaatttgagtcttatcta

SEQ ID NO: 85162 - DNA, 600 bp, Chicken  19866894383647_1
taattcactttaacatcagtgttttggcagtttcatgcactgggtgagatgaaagtgtttgtgacctggatttttgggatgtccaaaattccttatgcctcagaagccctgcaaggagtatgctggggaatattcggagtaaacaagattataacacagcagtccataccaaggctgatgagatgaaatagatttcagctgaagtgccaacaactgcattttaatttatgtattcatttgctctttttttttttttttttttttggacagaagtataaagatttctgtggaaacaaattwgagcctttggcattggcaggagttgcattttctgatcattctgatttggaaggtgctcatacaggagttaccatcctgggaaaacagacttactgctggcaagagatttttctcactccggcacaagattagctttgtcttaaaaacgctttttgcctcttgagtttcaaggatgtggctaaatacaaggtatttgttagggaaaatgtttggcacattccagtttctgtcctttatccagtcagattgaatttgtaggtgaaaagcattgctagctcaattaaaggtatgcttcagacc

SEQ ID NO: 85163 - DNA, 600 bp, Chicken  19866894383647_2
ttgcattttctgatcattctgatttggaaggtgctcatacaggagttaccatcctgggaaaacagacttactgctggcaagagatttttctcactccggcacaagattagctttgtcttaaaaacgctttttgcctcttgagtttcaaggatgtggctaaatacaaggtatttgttagggaaaatgtttggcacattccagtttctgtcctttatccagtcagattgaatttgtaggtgaaaagcattgctagctcaattaaaggtatgcttcagaccaagcgagaaatctcctatcagraggggttaagccacagcaaagtcagcctcaaataaatggcaggaggaagtgcttggcagtgctgctagtttggaactaaaaagaaatatcattttctgaaaactgagtgctgactacaagtgctgcttacatagtgaaggaggacaaagatgcttcccatgcagcaaccctagccaatgcaggagaattattccaccccagtgcagctctgtttctgccaccctctctgtcccccaagattccccctgcttattccaactgataccaataactcaatgcttattttttgtatgcaatgaa

SEQ ID NO: 85164 - DNA, 600 bp, Chicken  19866894383651_1
cacttgtggagggacttcctgcagggctgtgtgttggcagcatggacagataagacagggtcccagctgtgcctctacagctgtgtccttcagcagttacccatcttgccgtctggggatgtcacagaaccgtagaatggcttgaattggaagagaccttaaagatcatccacttccaaaccccggccatgggcagggttaccaccaccagctcaggctgcccaggaccacatccagcctggctttgagcacctccagggatgggccagccacagcttcttggagcagcctgtgccagcrcctcgccactctctgagtaaaaaacttcttcctaacgtctaacttaattttcccctcttttagtttaaggctgtcccccttgtcctgtcactatcagactgtataaaaagttggtccctctcctgcttataagctcccttcaagtactggagggccacgttgaggtctccctggaacctccttgtgcccagctccctcagcctttcttcacaggagatatcctttggctggtagcaggcagatggtccattcctactctctgggcttgtagcagagtattagcaggtccccaaggcaaca

SEQ ID NO: 85165 - DNA, 599 bp, Chicken  19866894383655_1
  misc_feature (1)..(206): n is any nucleotide
nnnnnnnnnnnnnnnnnnnnnnnnnnnnnnnnnnnnnnnnnnnnnnnnnnnnnnnnnnnnnnnnnnnnnnnnnnnnnnnnnnnnnnnnnnnnnnnnnnnnnnnnnnnnnnnnnnnnnnnnnnnnnnnnnnnnnnnnnnnnnnnnnnnnnnnnnnnnnnnnnnnnnnnnnnnnnnnnnnnnnnnnnnnnnnnnnnnnnnnnnnnnnnctggcaattgaggggcaaaatgccatgcttgtgagtttcttattctggcccttacagaataagagatttgaaaagaaaagccttttacctatcrtatgctgcacaagtgctgtcatacatgtcatactgtcatacatgtcatacatgccaggattccatctttcataccataccaaagtccagaagcaggagacagaacataaggaagacatctaccactatatgcactcatgaaggaaagttaatggatcagacaattccttgttgcagtgtatataaggatcttggtcttggttccatgctcttcatatccagtataaatcattttcaagtaataacatcccactaacttatggccgttttttttttattatactgaactgaagccataaa

SEQ ID NO: 85166 - DNA, 599 bp, Chicken  19866894383663_1
  misc_feature (1)..(5): n is any nucleotide
nnnnntaattaatattatttatgagaaggtgttagtgggacagtaatatgtctaccacttatttgctttgatatcctgttctgctcataccagcttcaagcactcttgttattcttatcactgagccttggctcctttaagtaataagttaaacaaattgattaccatctcgtgtgcttctttttttttattattttattttttttcctgagacaaaaggtctatgcagttggaatctgtcttctatattttatattctattgatttgtacaaatagatatatcaatctgactaatgtcygtctacttgctagaaagcccaattggaggagcatgttttgccattggagaaggaaacagtgagctctgtgatagtccrtagcatctatggcaatctctttcagtcatcatgggtccatgttggagagcacatcatcttttgaaaaagctctttctgcctttatttctagcaccccatcatactggcaaaataaaattgtaaagtctttggggtccctatgaggacacaaagagaagtgyatttcagtgaaatactgaamaaatcgccttagacaattgaagacatttttgaattctagg

SEQ ID NO: 85167 - DNA, 600 bp, Chicken  19866894383663_2
ttctgctcataccagcttcaagcactcttgttattcttatcactgagccttggctcctttaagtaataagttaaacaaattgattaccatctcgtgtgcttctttttttttattattttattttttttcctgagacaaaaggtctatgcagttggaatctgtcttctatattttatattctattgatttgtacaaatagatatatcaatctgactaatgtcygtctacttgctagaaagcccaattggaggagcatgttttgccattggagaaggaaacagtgagctctgtgatagtccrtagcatctatggcaatctctttcagtcatcatgggtccatgttggagagcacatcatcttttgaaaaagctctttctgcctttatttctagcaccccatcatactggcaaaataaaattgtaaagtctttggggtccctatgaggacacaaagagaagtgyatttcagtgaaatactgaamaaatcgccttagacaattgaagacatttttgaattctaggttccgagaattccatttaaatgcctatatgttgatttttaaacctacttctaaatcagagtgtagaaatgcagttgtat

SEQ ID NO: 85168 - DNA, 600 bp, Chicken  19866894383663_3
tcttctatattttatattctattgatttgtacaaatagatatatcaatctgactaatgtcygtctacttgctagaaagcccaattggaggagcatgttttgccattggagaaggaaacagtgagctctgtgatagtccrtagcatctatggcaatctctttcagtcatcatgggtccatgttggagagcacatcatcttttgaaaaagctctttctgcctttatttctagcaccccatcatactggcaaaataaaattgtaaagtctttggggtccctatgaggacacaaagagaagtgyatttcagtgaaatactgaamaaatcgccttagacaattgaagacatttttgaattctaggttccgagaattccatttaaatgcctatatgttgatttttaaacctacttctaaatcagagtgtagaaatgcagttgtattcatacatttaaatgtacaaataatttatttatctagcacttatactttctcatttaattagattcttgatcatgcaaaatcactataagatttaaattctgatactgtgtagaagaaggaattattttgctgcttatttaggtgattgagatggtcaagt

SEQ ID NO: 85169 - DNA, 600 bp, Chicken  19866894383663_4
attgatttgtacaaatagatatatcaatctgactaatgtcygtctacttgctagaaagcccaattggaggagcatgttttgccattggagaaggaaacagtgagctctgtgatagtccrtagcatctatggcaatctctttcagtcatcatgggtccatgttggagagcacatcatcttttgaaaaagctctttctgcctttatttctagcaccccatcatactggcaaaataaaattgtaaagtctttggggtccctatgaggacacaaagagaagtgyatttcagtgaaatactgaamaaatcgccttagacaattgaagacatttttgaattctaggttccgagaattccatttaaatgcctatatgttgatttttaaacctacttctaaatcagagtgtagaaatgcagttgtattcatacatttaaatgtacaaataatttatttatctagcacttatactttctcatttaattagattcttgatcatgcaaaatcactataagatttaaattctgatactgtgtagaagaaggaattattttgctgcttatttaggtgattgagatggtcaagtatttggttcttcactattcc

SEQ ID NO: 85170 - DNA, 495 bp, Chicken  19866894383664_1
gtttcaaaattgctgggcctaagctgacagccttatttgtctcagtacgtccttgtaaagaaaaatacactgtttcactagcctgtaattgcaagtgtgtatatgttacagtaggacttcttgtgcataagtaaggcatagtggcataatttttttcaaattgtttttgttcatctgcatttaaggaaatcctactatgtctgacttctcctacaactccatctttattgacaaaagagtttctaggtagtagtgaagtgatatacagataaccacttaaggaactaggaaatatatttycagcatttaaacgagtacttggaaattctacaaatcccttttcattaactaaatatagggtatatgcatctactgctttgcaatattcaggtttacttgtttggctgtcttgtaacaagagagaactgcatttttccatggttgtttttgactgctcaggtaatattaaaacatctttacttttagcagacaaat

SEQ ID NO: 85171 - DNA, 599 bp, Chicken  19866894383670_1
  misc_feature (1)..(101): n is any nucleotide
nnnnnnnnnnnnnnnnnnnnnnnnnnnnnnnnnnnnnnnnnnnnnnnnnnnnnnnnnnnnnnnnnnnnnnnnnnnnnnnnnnnnnnnnnnnnnnnnnnnnntccgttatgctggctgtttgcttttgaagtgatctttaaaaatataatgacagtttttggcagtacaaagaactttttagctcttcttaaataaatgcttgaaacaagtttatttagatacagttgtgagtaaagatgaggggaagcatgttgtttaatatctacaacaggtaacatgcttcagtgcacaaatcaatcrtgtaaattctgcacaggtaaaatagtagcgcccttasaaaacaaatttatatagtgtatgtttttggttcagaagattttctagtcatttctgtcttcccacaggtcagaagtaaagctcagcaagcattcttcacagctctggggacatacaatttttgttgcagagatatcattcccttggttttggagttcttgcgtccagatcggcaagatgttactcaacagcaattcaaagtactgtctcattaactttgtttcgtgtctgtcttggaaagtgtatttacaattattaattat

SEQ ID NO: 85172 - DNA, 599 bp, Chicken  19866894383670_2
  misc_feature (1)..(64): n is any nucleotide
nnnnnnnnnnnnnnnnnnnnnnnnnnnnnnnnnnnnnnnnnnnnnnnnnnnnnnnnnnnnnnnntccgttatgctggctgtttgcttttgaagtgatctttaaaaatataatgacagtttttggcagtacaaagaactttttagctcttcttaaataaatgcttgaaacaagtttatttagatacagttgtgagtaaagatgaggggaagcatgttgtttaatatctacaacaggtaacatgcttcagtgcacaaatcaatcrtgtaaattctgcacaggtaaaatagtagcgcccttasaaaacaaatttatatagtgtatgtttttggttcagaagattttctagtcatttctgtcttcccacaggtcagaagtaaagctcagcaagcattcttcacagctctggggacatacaatttttgttgcagagatatcattcccttggttttggagttcttgcgtccagatcggcaagatgttactcaacagcaattcaaagtactgtctcattaactttgtttcgtgtctgtcttggaaagtgtatttacaattattaattattaatgatttttacaarcatgactcttacgcttctgtg

SEQ ID NO: 85173 - DNA, 600 bp, Chicken  19866894383670_3
ggtaaaatagtagcgcccttasaaaacaaatttatatagtgtatgtttttggttcagaagattttctagtcatttctgtcttcccacaggtcagaagtaaagctcagcaagcattcttcacagctctggggacatacaatttttgttgcagagatatcattcccttggttttggagttcttgcgtccagatcggcaagatgttactcaacagcaattcaaagtactgtctcattaactttgtttcgtgtctgtcttggaaagtgtatttacaattattaattattaatgatttttacaarcatgactcttacgcttctgtggcaaatagcttaagtgcaactaatataaacagttatttgggttaaatgtgttgtcagaagaaattttgtttattcctaacttcattgtgtattcaggtattatagaagcgaatgttagcagctatttttaatggaagttgaggaagctgtagtccaaaacagtaaacctcattgagcagtttagtcagctggaacagtagaaatggataactcaaactagacgaaaaactgatcacccaaaaacattttagtaaaagcaggtaacactctgtctgtcca

SEQ ID NO: 85174 - DNA, 600 bp, Chicken  19866894383678_1
tataaatggtcaaatagcctgctctaagggtccccagttttgtcttaacatgatcaagagttactgatccaagaaattcttctgttaaagaactatttccttctcaggtttactttctacgtattcaattcacagctctagaacatactgagatcaaccagagccacagcactggaaaaacaaaactgaaaatccagccagataggaaagcatgactaacaagtgtcaagcagactaggagacttagctatcacattactcttcattaattggtggatcacacacaatagggatcgcatycgtagtgactgaaaatttaaagtcacactgcagacagaaccccaatgagctgcacacagactgcggagcactggcagagcccccatgaagttggtgggctccaggaaatcacagcaacagctgcatgagaagtctgaaagtgtgggtttacatcaattacaacagcctccataattacagctttacacatttatgtttttattactccgggtaaagcaaaggcctttatgacaatacacagagtgacagttacagcaatctaaaaccgagtttttgtgaaaacatgcattcattgactag

SEQ ID NO: 85175 - DNA, 559 bp, Chicken  19866894383687_1
aagacacttctgaggctgcatctggagtacattgtcatgtttacagttctgcaatacttgagtgagtctggtagaggaatattaagatatctagtggaataagcaagaggatacacaaagggaaaacaagttttgtgcttatttttccctcagcttatggaatggaaaagactaagcaaaagatctaattactgttttcctttatctactctgaatctccgagaagggataagttactgcaaaaagtgcttgaatctctgtctgcaaaattgtcagaaatatactaggcaaggccctatrcaaccttctctamctttgaaattacagtttctctgagcagagattgaattcagtgatattcagaggtcatttccaaccctgtttatactttgattctgtgtagaaagccgtgtacatcctaaatttcagtccatatattcaacaagatattcaacagtaaaacatacctatcaatggatatgtgaaaaaaaatattttcaagtacattttgggtttacatttcactgcaaacttaacttattttaggatctgtaagcaa

SEQ ID NO: 85176 - DNA, 546 bp, Chicken  19866894383687_2
ggctgcatctggagtacattgtcatgtttacagttctgcaatacttgagtgagtctggtagaggaatattaagatatctagtggaataagcaagaggatacacaaagggaaaacaagttttgtgcttatttttccctcagcttatggaatggaaaagactaagcaaaagatctaattactgttttcctttatctactctgaatctccgagaagggataagttactgcaaaaagtgcttgaatctctgtctgcaaaattgtcagaaatatactaggcaaggccctatrcaaccttctctamctttgaaattacagtttctctgagcagagattgaattcagtgatattcagaggtcatttccaaccctgtttatactttgattctgtgtagaaagccgtgtacatcctaaatttcagtccatatattcaacaagatattcaacagtaaaacatacctatcaatggatatgtgaaaaaaaatattttcaagtacattttgggtttacatttcactgcaaacttaacttattttaggatctgtaagcaa

SEQ ID NO: 85177 - DNA, 599 bp, Chicken  19866894383698_1
  misc_feature (1)..(135): n is any nucleotide
nnnnnnnnnnnnnnnnnnnnnnnnnnnnnnnnnnnnnnnnnnnnnnnnnnnnnnnnnnnnnnnnnnnnnnnnnnnnnnnnnnnnnnnnnnnnnnnnnnnnnnnnnnnnnnnnnnnnnnnnnnnnnnnnnnnnnnncctgtttgggaaagaatctgtgctggagatggaggctaaattcatccaaatcatataaatcataggcagcacattcaataggcttagagatgacagtgagaagagggatagggtagaggctggagaggcgcttggagtcaaggattgcttagattattttttttwaagcataaagataaagcatscttatatggtgaggggaaggaggcagagggagagacctgaaggaagaggaggcagatggggctaagggagatgagaaaacaggacacagtgaggtcatcgggacaagcagtggggtcacagttgggaggagagctgggcaggaggcaaggaagagcaagcagaggggagcgagggagatcatatcttgtagtgtggagtttctcatgggagaagtcagcacagccctgagcagagatgtgactcttcagtgaaggcagaaggcaaggcttgaggagtga

SEQ ID NO: 85178 - DNA, 599 bp, Chicken  19866894383698_2
  misc_feature (1)..(115): n is any nucleotide
nnnnnnnnnnnnnnnnnnnnnnnnnnnnnnnnnnnnnnnnnnnnnnnnnnnnnnnnnnnnnnnnnnnnnnnnnnnnnnnnnnnnnnnnnnnnnnnnnnnnnnnnnnnnnnnnnnncctgtttgggaaagaatctgtgctggagatggaggctaaattcatccaaatcatataaatcataggcagcacattcaataggcttagagatgacagtgagaagagggatagggtagaggctggagaggcgcttggagtcaaggattgcttagattattttttttwaagcataaagataaagcatscttatatggtgaggggaaggaggcagagggagagacctgaaggaagaggaggcagatggggctaagggagatgagaaaacaggacacagtgaggtcatcgggacaagcagtggggtcacagttgggaggagagctgggcaggaggcaaggaagagcaagcagaggggagcgagggagatcatatcttgtagtgtggagtttctcatgggagaagtcagcacagccctgagcagagatgtgactcttcagtgaaggcagaaggcaaggcttgaggagtgagtcaaaggctgcaaaaaggc

SEQ ID NO: 85179 - DNA, 599 bp, Chicken  19866894383701_1
  misc_feature (1)..(54): n is any nucleotide
nnnnnnnnnnnnnnnnnnnnnnnnnnnnnnnnnnnnnnnnnnnnnnnnnnnnnnccaaggttttcactcgggcctaagagaactttctcagctgagaagctttcaccaaacagcggtgcatctggggtgtgtggtggggagaacagaggcggggggagcctctcaagctctgtcttctccgtcttctgctttgagcgtagctgatatttaaatggcctgtgtggcttcaaggtgaactcagcaaccagcggccacctgcaaaagcagcgagggaaaggggtcttaagagccagcggctgmatttctgtaacaagtgtgagcggatggagggagttcatggggatgtgagtgcaaagaactgtaagagatgtgggaggaaggcaagaaagacaaagaaacttgtctattggcaatgctagtattttaaatgggaacatgggcagaagagaaaataaatacaggctgctgagcagtgttactatcattcagtgctgtaacaacccggcctcggttccaaagtttgtttatccagaaccccacattgagcccattctgcacatgggaagcgtgcagctctgcgtatrtgaaatgtgcatcgc

SEQ ID NO: 85180 - DNA, 600 bp, Chicken  19866894383701_2
aagagccagcggctgmatttctgtaacaagtgtgagcggatggagggagttcatggggatgtgagtgcaaagaactgtaagagatgtgggaggaaggcaagaaagacaaagaaacttgtctattggcaatgctagtattttaaatgggaacatgggcagaagagaaaataaatacaggctgctgagcagtgttactatcattcagtgctgtaacaacccggcctcggttccaaagtttgtttatccagaaccccacattgagcccattctgcacatgggaagcgtgcagctctgcgtatrtgaaatgtgcatcgcagccttcgctctgcgactgagcgcagcatcgtgaaggcagtgccaatattaccagacatttaaaaccaactgatcgatgggtacttaatcatcttttcttttctccttcttaaattctgaggacagcaaaatatttcacagttggctgaactacgacgtggctgagcgctttagaagcattcacttggctttctataagctcttctcaaaatgaaatgcgtgtttcaagtgcatttgttacagggggaaaaaaagaacaaataaagaacaaataaagaaaaaata

SEQ ID NO: 85181 - DNA, 600 bp, Chicken  19866894383709_1
ggatttaggccatacggatgacaaacttgagtgacatctgggtggaaagtagaggttaaaatgaagtgaaatgaggagggacctgatgtagtctaactaaaagaaacaccattaaaagatttttatttatttattaagcatatttggagcttttgttactattctgaagaaaaaattccagctcaaaataaataggagcaaaataaacaaaataaataggagaaaaactacataaagtagaacaaaataaataggagaaaaactagcaagcgtcagagcatccgcctgagtttctgtaayccctttgcatgacagaagtacatacatgtctttcactgctctccagatacaactgcattgaaacttgtgctttggagtatcctcttatgattttaataaggtacataaacaaatgaggactggtgttctaagtatcttggtggggaactaacaatagtttgatatttgataacttgcgattagtaaatgctatccaatattaactgaacagattaacttgcatcagtggccgaaagggagattactttcatttgtgtgctgagaatcaggtgagaagcagttgctttggctcattagtgc

SEQ ID NO: 85182 - DNA, 600 bp, Chicken  19866894383721_1
ggtttggtgcctaagaataaccagtgccaccattcctgtcagtgcagcctgtgtccccttgtgcacactcattgccacctgtcacaattcagagtgaggcgtgcagggtgggggtcagtggaggtgacacccagagcctgagggatgttggagagactcgtcccaaagcgggagacagaaaagtgatgggtgtgcttcatgccgagggacagaaagaaacaccgtgagctcgtatgtgctgctgtttgtgcaacactgctgagcagcagtgagctcagctccagcacagggcaccatccrggtgcttcccttgccaaagcccrggtgatgcagtacattcaggagtgaaggtcacagctctgacctgatgtgaacacttcacagrgagcccatgatgcagagctggtctgagtcaccacccacacacacctgaaacctgggagatcagagcagcaaaatgagccagagctgagttctgcttctagcagatggttttcccagaaggcctcacacacctgtgtgcctggccctgggggctgctgggtttgctggtagcagaatgctgtgtgctgctcctgctgggacactgagcagtgtgag

SEQ ID NO: 85183 - DNA, 600 bp, Chicken  19866894383721_2
gtgccaccattcctgtcagtgcagcctgtgtccccttgtgcacactcattgccacctgtcacaattcagagtgaggcgtgcagggtgggggtcagtggaggtgacacccagagcctgagggatgttggagagactcgtcccaaagcgggagacagaaaagtgatgggtgtgcttcatgccgagggacagaaagaaacaccgtgagctcgtatgtgctgctgtttgtgcaacactgctgagcagcagtgagctcagctccagcacagggcaccatccrggtgcttcccttgccaaagcccrggtgatgcagtacattcaggagtgaaggtcacagctctgacctgatgtgaacacttcacagrgagcccatgatgcagagctggtctgagtcaccacccacacacacctgaaacctgggagatcagagcagcaaaatgagccagagctgagttctgcttctagcagatggttttcccagaaggcctcacacacctgtgtgcctggccctgggggctgctgggtttgctggtagcagaatgctgtgtgctgctcctgctgggacactgagcagtgtgagggcttctttggggtgctggcaga

SEQ ID NO: 85184 - DNA, 600 bp, Chicken  19866894383721_3
aattcagagtgaggcgtgcagggtgggggtcagtggaggtgacacccagagcctgagggatgttggagagactcgtcccaaagcgggagacagaaaagtgatgggtgtgcttcatgccgagggacagaaagaaacaccgtgagctcgtatgtgctgctgtttgtgcaacactgctgagcagcagtgagctcagctccagcacagggcaccatccrggtgcttcccttgccaaagcccrggtgatgcagtacattcaggagtgaaggtcacagctctgacctgatgtgaacacttcacagrgagcccatgatgcagagctggtctgagtcaccacccacacacacctgaaacctgggagatcagagcagcaaaatgagccagagctgagttctgcttctagcagatggttttcccagaaggcctcacacacctgtgtgcctggccctgggggctgctgggtttgctggtagcagaatgctgtgtgctgctcctgctgggacactgagcagtgtgagggcttctttggggtgctggcagagggtgttctgtgcccacctcgcagggctgcgtcttctcctttcctgctgcttgttgcaggcc

SEQ ID NO: 85185 - DNA, 600 bp, Chicken  19866894383721_4
aggaacaagggctacagtgcaaacaggtggtgcctcatgttgcattttaaggctctttacttgcaattcagaaatgctattctcgctgggaagctgcagaattggaagagctgcagctaaggagagttctgcagaaccaagatgctgggctgagtaacagtaggacgaggggtgctctgatgagtcatttggatcctgcccagactgcagacaagtcacctgcaggtcgggaaactgcaccgtgcttcctgtgggctgccagggccgggtgctgcgggatgggggacacagcagatgcayggttttgtgctggagctgtgcagggtggggatgctacgagtgatgctctgtgctggggctcagcctgtatttgctgcatgccacggtcctttgttgggaatgcagctgggctgtgcaggaagctgaggcacagcgatgaccactgcgtgcactctcagctcctgctgctcttcaaccacagccttatcacgggccatggtctgagggagggtgctccctgcagctcaccctttcttctttattgttgtagctattgttcatgacttctcaaaagctgaaatatattgtgaacgtctcccg

SEQ ID NO: 85186 - DNA, 600 bp, Chicken  19866894383735_1
caaactctgagtaatgtgacactttgtaacattactaaacattagtaattttgtcttagctgtggtagtactttcatcttccaatggaaagctattcagtgattatttcaagccttgatttccttttaacggccttctcagccatgctgctttctcacaaaaacataatatgttggttgtcattgtttagcacaaatattaaaacatgccacttagtcacatgctgtatatcgcgtttttaacagatgtgagggcattctgactctagtgaagtcacagcagcttttctatttaccttarcagctcaaaacttacttcagttgttttacccttctttgcattcttcatatcttgatgctgacacaacaagatgtttaatcttggctctgcagtacatactgagttcaaaaaaggaattgaattcaactttaatcctaggtctaatgtttgcagaaagcaatatttctgatgaacaattcactgctatgatattaagcaggttaaaaaacactgcttctagcacttcagtagatatttgcacttggagtatcagggaactctccataactctgactctaacttgagacctgaaaaaattaa

SEQ ID NO: 85187 - DNA, 600 bp, Chicken  19866894383737_1
tgaaagcatacttttaacgtttgtttatagctcttaattttctctttgtattcgttatttaaccaatgaattttgctgcttacgtacttagaaatatatggtaaaaatatatttttaagttatataagatatggctgatttgttatggtcagattcttcttattcacattaccaggaaaagaactccatggttgttcacaaaattacattttggagtcagtgaaagggaccattctatgagaagacttgacagcaatcctagatgatctgtaaggggccagaggctgctcacctgtgtcrtgtgtgtgccctacactgtgcaacaaactggtccagcacgtggaagttgccatggcagtaaaagctatattataataagacacaagacaaatgagagctctgtgaaataaacttgatgtataaattcagcacttcacttactgtctttgagagaacattattttagcccttactacttactgcagcctccttattgatacaagccattagtatagaaatcttatatgcacaggagaaacagcagtccatgctcatcttgcatccttgatcacattaggtcagtatgtaacttttaatgcc

SEQ ID NO: 85188 - DNA, 600 bp, Chicken  19866894383738_1
ctcaagctgctaagacatctgccaattttgatttcactgcttctgatttcatctgtagttctaaataatctgtggcgagtttatccatcaacaagatgtctaaatatatgatgagcttttgttttgtcatgatgaacatctggtgttcctccagactcaacctctgcttacagtggatatatttcttggttgaacctcacatttaccagcttccaagcaacttaatcaataatcttactctgtggtcagtcactgttatctcttcctggttataagagatctgatgaatgatctgataarcacaaactattcttgatttgcaacgcttgctttttctgcataatcaaattctacaaagttaatctgttttggctgatatttttgtcctattcccttttcatgtagaaacggcaagaattttgattgagcttttgcagccactgtgttgttgctgttaacagcaaagatcatgtcatccattgtctttgatgcatattttgtgaatgagcatctacacagtcaaaactcttaagtcttgttctttttgctcgtttttattctgacagaaagtgtgttctgtcccacgtgctgttgttcaat

SEQ ID NO: 85189 - DNA, 600 bp, Chicken  19866894383747_1
ctaacagaaagctgcctcctgccaagattcaagtgcaacacttcaaagcattaaaccaagaaagaaaaatgttgccagaaatttttctaatgggttagaggaaggtcagataaacaatgggttcctaagaacggtttcagctgttagaaatggattaacaacttctggctgtatgttcccaaacaaatttagcccaaagcacaacccctgcttgggaagttttagtctcagttgtttgattgtgacattcttggagttcagatagcgctttgtacattgggagtatttgtacagccttargatgggttgagcaaacagcttgttcacaacaaagcaggcagcaaacctgacatagccaagtctttcatagttactgttactatgacttactgccagccttcccacattgcacagtaatctgttcttcaggctcttctttaaattccccgtggctgttccctgcacccatcccagcagctcatctctaaccaaagcaaggcctggtgctgctctgcttctgctgcccatcctcagggaaggaacagcagcagttgccctgattcatctcaggccctacagctgtggctctgtcccacctgc

SEQ ID NO: 85190 - DNA, 558 bp, Chicken  19866894383748_1
ttagccgggagctgagagtttaaaaaacagttctgatgggactgtagaaaaaccttcaaagatgctgggagagaagtacttagctgtttggatagtaggagaaaatggtacatggtgccatttgctgaaagctgtgaactgtcaaaactctgttcaaaaggaaacgcctaacgtacatgagaaatgtgaggcatagcttgttccttccggagaaaaaaatgttctgcaatattatttaggaacacaatttttgaagtaaaaaactgactgagagttgatatgggactgggaagtcatggrctgtccagtggaagatgggaatatgctttaatttatctaaatgatgttttatttgttaccaagcaatatcttattctatgaaagtgaatactggttggaagtcagaggttctccaaatgtaacttatttgctacgggtggttcacagatggacaaattcagttcactggtgatggtgatctgggagcattgtgttctactgagatgtttcatagttctggagtgtctgcgggatctcctctcttttattctcagccag

SEQ ID NO: 85191 - DNA, 600 bp, Chicken  19866894383769_1
tgctctccagcccgcaaaggcacagccaagagaaacagccccacgtggtcccctctgcagggacagagcaaaggagacttcaggcttcgtctccactttgcacgtatctaaacacttccttttatatgatataattcggtttttgtagaagaatccctggagtgaagagccaccctccctccaaagatgcaagtgaagaggcattaattgtccaactggggcctccagggcttttctctgcattgttagctaacaaaaacgtgttcttcatttaaacacttagccccagcgttatgctgwtcattacaagcccaggcagagcacgaggcagtgctccccaccacctggccctcttgtcacacagcagccccccaagcaacacagggccgaccctttccmagtgatcctcatcagccttatggacacaatttggggagttacccccagcatcccaccagggccaggagcagaatggagctctgtcacactgctggcattkctgctccccgatgtgcccagacacatttccatagggaaacaccaaacacttggctcctctacttcgtatttctattttcctttgaatgctgtgtggctgcc

SEQ ID NO: 85192 - DNA, 600 bp, Chicken  19866894383769_2
gcacgtatctaaacacttccttttatatgatataattcggtttttgtagaagaatccctggagtgaagagccaccctccctccaaagatgcaagtgaagaggcattaattgtccaactggggcctccagggcttttctctgcattgttagctaacaaaaacgtgttcttcatttaaacacttagccccagcgttatgctgwtcattacaagcccaggcagagcacgaggcagtgctccccaccacctggccctcttgtcacacagcagccccccaagcaacacagggccgaccctttccmagtgatcctcatcagccttatggacacaatttggggagttacccccagcatcccaccagggccaggagcagaatggagctctgtcacactgctggcattkctgctccccgatgtgcccagacacatttccatagggaaacaccaaacacttggctcctctacttcgtatttctattttcctttgaatgctgtgtggctgccttggtgtttaatcccagtaattaacggggyrgcragaaaagagcagttccatctccttttcccctatacaaacacaaccggaggcgctgggctgggtcg

SEQ ID NO: 85193 - DNA, 600 bp, Chicken  19866894383769_3
ggcattaattgtccaactggggcctccagggcttttctctgcattgttagctaacaaaaacgtgttcttcatttaaacacttagccccagcgttatgctgwtcattacaagcccaggcagagcacgaggcagtgctccccaccacctggccctcttgtcacacagcagccccccaagcaacacagggccgaccctttccmagtgatcctcatcagccttatggacacaatttggggagttacccccagcatcccaccagggccaggagcagaatggagctctgtcacactgctggcattkctgctccccgatgtgcccagacacatttccatagggaaacaccaaacacttggctcctctacttcgtatttctattttcctttgaatgctgtgtggctgccttggtgtttaatcccagtaattaacggggyrgcragaaaagagcagttccatctccttttcccctatacaaacacaaccggaggcgctgggctgggtcgttcctggagcatttcaagcagagaaggaagaaagagcagcagacagaggcatcacctatcggcaagcaggaggcggctctaaagaagatcatttttatat

SEQ ID NO: 85194 - DNA, 600 bp, Chicken  19866894383769_4
gtgctccccaccacctggccctcttgtcacacagcagccccccaagcaacacagggccgaccctttccmagtgatcctcatcagccttatggacacaatttggggagttacccccagcatcccaccagggccaggagcagaatggagctctgtcacactgctggcattkctgctccccgatgtgcccagacacatttccatagggaaacaccaaacacttggctcctctacttcgtatttctattttcctttgaatgctgtgtggctgccttggtgtttaatcccagtaattaacggggyrgcragaaaagagcagttccatctccttttcccctatacaaacacaaccggaggcgctgggctgggtcgttcctggagcatttcaagcagagaaggaagaaagagcagcagacagaggcatcacctatcggcaagcaggaggcggctctaaagaagatcatttttatatcagaaacgagtgagagaagccgaattatatccatttcccaacgtttggggaaaaataagagggaaatcttttgtttcttagaaatgactttgaaaacaacctgccggttaccacccggaatacagaggaag

SEQ ID NO: 85195 - DNA, 600 bp, Chicken  19866894383769_5
tgctccccaccacctggccctcttgtcacacagcagccccccaagcaacacagggccgaccctttccmagtgatcctcatcagccttatggacacaatttggggagttacccccagcatcccaccagggccaggagcagaatggagctctgtcacactgctggcattkctgctccccgatgtgcccagacacatttccatagggaaacaccaaacacttggctcctctacttcgtatttctattttcctttgaatgctgtgtggctgccttggtgtttaatcccagtaattaacggggyrgcragaaaagagcagttccatctccttttcccctatacaaacacaaccggaggcgctgggctgggtcgttcctggagcatttcaagcagagaaggaagaaagagcagcagacagaggcatcacctatcggcaagcaggaggcggctctaaagaagatcatttttatatcagaaacgagtgagagaagccgaattatatccatttcccaacgtttggggaaaaataagagggaaatcttttgtttcttagaaatgactttgaaaacaacctgccggttaccacccggaatacagaggaagc

SEQ ID NO: 85196 - DNA, 600 bp, Chicken  19866894383769_6
tccccaccacctggccctcttgtcacacagcagccccccaagcaacacagggccgaccctttccmagtgatcctcatcagccttatggacacaatttggggagttacccccagcatcccaccagggccaggagcagaatggagctctgtcacactgctggcattkctgctccccgatgtgcccagacacatttccatagggaaacaccaaacacttggctcctctacttcgtatttctattttcctttgaatgctgtgtggctgccttggtgtttaatcccagtaattaacggggyrgcragaaaagagcagttccatctccttttcccctatacaaacacaaccggaggcgctgggctgggtcgttcctggagcatttcaagcagagaaggaagaaagagcagcagacagaggcatcacctatcggcaagcaggaggcggctctaaagaagatcatttttatatcagaaacgagtgagagaagccgaattatatccatttcccaacgtttggggaaaaataagagggaaatcttttgtttcttagaaatgactttgaaaacaacctgccggttaccacccggaatacagaggaagccct

SEQ ID NO: 85197 - DNA, 599 bp, Chicken  19866894383771_1
  misc_feature (1)..(183): n is any nucleotide
nnnnnnnnnnnnnnnnnnnnnnnnnnnnnnnnnnnnnnnnnnnnnnnnnnnnnnnnnnnnnnnnnnnnnnnnnnnnnnnnnnnnnnnnnnnnnnnnnnnnnnnnnnnnnnnnnnnnnnnnnnnnnnnnnnnnnnnnnnnnnnnnnnnnnnnnnnnnnnnnnnnnnnnnnnnnnnnnnnnnnnngccccagtgcaaaaagcacaagtaatcaggtgttccagaaggtgagcttgtagaactcacccccaccatatcactttcaccttaagcactgagagctgagttttgtttcttagtccygtgttgctatcccacttctggacaattctggcatcagactctctaaaccagtgcakattcagcccagctctggtgttgggtaccagtgttggctactgagcaacaagtacaatcatgacatgcaaaggcatcacttcagtgaaaatgcttgtggctctgctcctgcttgcaggctccaagctgagctccacgtgtgccttttggaagacatctgttttcagaaagtcacgcaatggaaaataagaaaaaaagagaacaaatttttcctctatgtcgggtataacaaggaataatggact

SEQ ID NO: 85198 - DNA, 599 bp, Chicken  19866894383771_2
  misc_feature (1)..(127): n is any nucleotide
nnnnnnnnnnnnnnnnnnnnnnnnnnnnnnnnnnnnnnnnnnnnnnnnnnnnnnnnnnnnnnnnnnnnnnnnnnnnnnnnnnnnnnnnnnnnnnnnnnnnnnnnnnnnnnnnnnnnnnnnnnnnnnngccccagtgcaaaaagcacaagtaatcaggtgttccagaaggtgagcttgtagaactcacccccaccatatcactttcaccttaagcactgagagctgagttttgtttcttagtccygtgttgctatcccacttctggacaattctggcatcagactctctaaaccagtgcakattcagcccagctctggtgttgggtaccagtgttggctactgagcaacaagtacaatcatgacatgcaaaggcatcacttcagtgaaaatgcttgtggctctgctcctgcttgcaggctccaagctgagctccacgtgtgccttttggaagacatctgttttcagaaagtcacgcaatggaaaataagaaaaaaagagaacaaatttttcctctatgtcgggtataacaaggaataatggacttaaattgcacagccagggagattcagacaagacatcaagacaaactttctaacagc

SEQ ID NO: 85199 - DNA, 600 bp, Chicken  19866894383776_1
caaacgttttcatctgtatcttaaacgaaattgctttctggtttctgttttgaaaacaaaaaaaatgtaaggaaaattttcatttaaaaggcgagaattacatttcatagaatgacagaatggtttgggttggaagggacctttaagaccctctagttccaatcccttgctgtaggctgggacacctcccactctagaccagggtgctcacagccccatccagcctggccttgagtgcttccagggagggggcattcacaacatctctgggcagcctgttccagtgtctcagcaccctcrcagtaaagaatttcttcctgatacttaytctaaaacatatatctgatatgatatcgtaatatcgagtctaaaaaatttattttctttaagtggagttgcacagaagttcaaataaccacttgcagttttacattaagaccagattwtgaacaactctgtttaaagctgttgttgtttcgtttgtttgaactcctgaacaaaaagtggtgttcaatcagatcaagaaagaagtttcaagttataagttactgctttgcatccacaagtacgaatgtctctgttttcttcagactgaggcat

SEQ ID NO: 85200 - DNA, 600 bp, Chicken  19866894383776_2
aattgctttctggtttctgttttgaaaacaaaaaaaatgtaaggaaaattttcatttaaaaggcgagaattacatttcatagaatgacagaatggtttgggttggaagggacctttaagaccctctagttccaatcccttgctgtaggctgggacacctcccactctagaccagggtgctcacagccccatccagcctggccttgagtgcttccagggagggggcattcacaacatctctgggcagcctgttccagtgtctcagcaccctcrcagtaaagaatttcttcctgatacttaytctaaaacatatatctgatatgatatcgtaatatcgagtctaaaaaatttattttctttaagtggagttgcacagaagttcaaataaccacttgcagttttacattaagaccagattwtgaacaactctgtttaaagctgttgttgtttcgtttgtttgaactcctgaacaaaaagtggtgttcaatcagatcaagaaagaagtttcaagttataagttactgctttgcatccacaagtacgaatgtctctgttttcttcagactgaggcatttgttagccaaagacccatgaggaaaac

SEQ ID NO: 85201 - DNA, 600 bp, Chicken  19866894383776_3
gaccctctagttccaatcccttgctgtaggctgggacacctcccactctagaccagggtgctcacagccccatccagcctggccttgagtgcttccagggagggggcattcacaacatctctgggcagcctgttccagtgtctcagcaccctcrcagtaaagaatttcttcctgatacttaytctaaaacatatatctgatatgatatcgtaatatcgagtctaaaaaatttattttctttaagtggagttgcacagaagttcaaataaccacttgcagttttacattaagaccagattwtgaacaactctgtttaaagctgttgttgtttcgtttgtttgaactcctgaacaaaaagtggtgttcaatcagatcaagaaagaagtttcaagttataagttactgctttgcatccacaagtacgaatgtctctgttttcttcagactgaggcatttgttagccaaagacccatgaggaaaacaggctgaattctgcactgtatcccaacccctggccaactggaggtttgtacatcttattgaaaggataattgcacattgtgatttcattaatcgaagttgtctcaaggctcagagctg

SEQ ID NO: 85202 - DNA, 599 bp, Chicken  19866894383778_1
  misc_feature (1)..(247): n is any nucleotide
nnnnnnnnnnnnnnnnnnnnnnnnnnnnnnnnnnnnnnnnnnnnnnnnnnnnnnnnnnnnnnnnnnnnnnnnnnnnnnnnnnnnnnnnnnnnnnnnnnnnnnnnnnnnnnnnnnnnnnnnnnnnnnnnnnnnnnnnnnnnnnnnnnnnnnnnnnnnnnnnnnnnnnnnnnnnnnnnnnnnnnnnnnnnnnnnnnnnnnnnnnnnnnnnnnnnnnnnnnnnnnnnnnnnnnnnnnnnnnnnnnnnnnnaaaatccatcccttcattttaaaatgcttttaacataattagcaaagcacgcrtgtgtgttttttcagctctcaagctgaggctgtgcatctgccctgtgctgactcacctggtgcctgaggtgtacatacaatctagtatgcagccaactttgaaggagtctctctcactgagagttactaagtgtgatagcaaaatacagtctgggacaggtggtgtaaggttggaggaatggggatgaaagcagccacatgtggatagaagagggctgtctctcactgggctgggaggcatgcagaggtcagatgttggatagaggtctcagtgtgcaaggggcatccagagctgaaaa

SEQ ID NO: 85203 - DNA, 599 bp, Chicken  19866894383779_1
  misc_feature (1)..(70): n is any nucleotide
nnnnnnnnnnnnnnnnnnnnnnnnnnnnnnnnnnnnnnnnnnnnnnnnnnnnnnnnnnnnnnnnnnnnnncccgcctgttacccttacgagcatgtccagtgtgtccctgcatgtcccgcagggaggccttgggcatgaacaggcagtagaggatattgtcttctcaggcaggctggtcttctgtgatgcatgccactgacaaccaactgcatccgtgtcttgaaggtgtgtttcttggcaggtcccaagaaaaccaaccagtagcttctccataacctcacacttgtcagccctgtatrgcactgggcactgaaggtgatccacagaaattatgcccagatcccatgtgttgagttactgtcatctaccttgccatcatccttgtcctgttccttgcttgtggagctgccctgcttgctactactctgtgactcacagctccttttcctaagccgctggcagagcccaaagagcactacaaggagcccagcgaaggcccagaactgctactgttacagggcagcaagcagtatggcacctttggccaccacacttwtctcccgactcattggttcaatctcatgcagcacctgagcca

SEQ ID NO: 85204 - DNA, 600 bp, Chicken  19866894383779_2
accagtagcttctccataacctcacacttgtcagccctgtatrgcactgggcactgaaggtgatccacagaaattatgcccagatcccatgtgttgagttactgtcatctaccttgccatcatccttgtcctgttccttgcttgtggagctgccctgcttgctactactctgtgactcacagctccttttcctaagccgctggcagagcccaaagagcactacaaggagcccagcgaaggcccagaactgctactgttacagggcagcaagcagtatggcacctttggccaccacacttwtctcccgactcattggttcaatctcatgcagcacctgagccatgtcctgtctcatctgctctgcacactgctacatgcgcctgtgtgtctgtgtctacatggccagccttcagctgtggcttctgggtgatgcccagcacagacaggacaaggaatatcacctgagccatggcctgtagaagatggatgctgcactcaccaatggcccaggcggcagtgcaggggagctgcctgctgatggccctcctgaagagatgacacaaactggcttccctcaataaagataatttgtctctcaaa

SEQ ID NO: 85205 - DNA, 600 bp, Chicken  19866894383781_1
cctgcattagactaataattccccaaagctctcttttgatagctgtttcatagagttcaacaaaaatagctagcaaaatgcatcttagctactgctctgtgaaatcttaccaaattcctgaacagcatctttgacaactgataggctgtctccagaaaacaaaaagaaaaacaaacaaataaacaaacaagccaaacaaaaagcaaaatcaccactggaaaaacctattgaaaaaaaagaatgacctgtaaacaaagtgtacaagttctctccggaaatgagcttaacaatcacttgaaraagacatatgtattcctttctcagatgtttggaaatcagaagcatgtcattgatacattcaggtatgagktgtcgcataagatccaaacatttgccattgcatgtatgtgtgacacagacaatgagggaaagaaatgggataaaacttttaagaaggagctctcaagagctcttgtcttatcacaagtaagtcatactctaaattaaagaattttcagctaaatggaccacaaggaacataaaatgcattttaagggccacactttggcagtctttcttatccctgagaatttagagata

SEQ ID NO: 85206 - DNA, 600 bp, Chicken  19866894383781_2
tagcaaaatgcatcttagctactgctctgtgaaatcttaccaaattcctgaacagcatctttgacaactgataggctgtctccagaaaacaaaaagaaaaacaaacaaataaacaaacaagccaaacaaaaagcaaaatcaccactggaaaaacctattgaaaaaaaagaatgacctgtaaacaaagtgtacaagttctctccggaaatgagcttaacaatcacttgaaraagacatatgtattcctttctcagatgtttggaaatcagaagcatgtcattgatacattcaggtatgagktgtcgcataagatccaaacatttgccattgcatgtatgtgtgacacagacaatgagggaaagaaatgggataaaacttttaagaaggagctctcaagagctcttgtcttatcacaagtaagtcatactctaaattaaagaattttcagctaaatggaccacaaggaacataaaatgcattttaagggccacactttggcagtctttcttatccctgagaatttagagataacggagggggattttaaaatacttttagaggaaatcttcatatatgcatttcccttctttcttataagtg

SEQ ID NO: 85207 - DNA, 599 bp, Chicken  19866894383785_1
  misc_feature (1)..(47): n is any nucleotide
nnnnnnnnnnnnnnnnnnnnnnnnnnnnnnnnnnnnnnnnnnnnnnntctctttgggtttagtcgttagtagatatcatttagttttgtcagtgttctaggcatcatcttaagagagcatattgttccctacctgtgggagtttttaaaattatgtccagtggaaaatgtgatgaacgcctacctgaaaactgattggtgcgagaaacaattgcttagaaaatacttggttagtaacgaacacagaatggcatacaaattgttttatttgcaaactgagcactgtcactgcccttcactrcatacaataaagatgagctctaacttctcatgagcagtcctccagggaatggcaaaaaggatgctaaaataatatcatactatcagctttagtcgaatgtaaacaaattcacattcaacatggaggttgcaaagcaaaaaaagcctaaatacgatcttcaccatttggctgacagttgtttctttggagtctgcagtaacgtttttgttttttttaatttaagcgtccgatctgaactggcattgcacttctttaataaactgatggtgtatttcacacgaacccccgcgtcccttgcg

SEQ ID NO: 85208 - DNA, 600 bp, Chicken  19866894383786_1
cagatgtcacttacagcctaaagaatggaattaaacccatgagaataatagaacagaaaactcagcagcaactcatgaggagtagaaaggcatgataacagagtgaggcactggttgtgctccctgttccctgggcttacccagtaactctgcctgcttttcatgggaaaactggagataagtgactgctcaaggatttttggtaaccacaggaggcagccaaagcaaagcatttcagccacagcctcctcaccgctctgtttgctgttgcagagttgggcacccaggacacgaatacayacctaacgcctattaacgtcgtcctgtcccatactaaccctatccagatcagtgatggtctttcacacttcggtggaggctgatttgatgagcaattttttcatcctgatctaccaggagaccagttcctayaatgtaatgcccgtgaaagggaccaatctcaaaaacatgtcagataagcaagaccgtgcaaggctgttggatacgtgagactttcagcagttggtgtctcttatgagtatgggaaaatgcaagaggtaataaaagtgatgccattcctaactcccagtggagggataa

SEQ ID NO: 85209 - DNA, 600 bp, Chicken  19866894383786_2
gggcttacccagtaactctgcctgcttttcatgggaaaactggagataagtgactgctcaaggatttttggtaaccacaggaggcagccaaagcaaagcatttcagccacagcctcctcaccgctctgtttgctgttgcagagttgggcacccaggacacgaatacayacctaacgcctattaacgtcgtcctgtcccatactaaccctatccagatcagtgatggtctttcacacttcggtggaggctgatttgatgagcaattttttcatcctgatctaccaggagaccagttcctayaatgtaatgcccgtgaaagggaccaatctcaaaaacatgtcagataagcaagaccgtgcaaggctgttggatacgtgagactttcagcagttggtgtctcttatgagtatgggaaaatgcaagaggtaataaaagtgatgccattcctaactcccagtggagggataatcagttcacttagactccaaacccactgatactaaaatcctctgatataatttccttctgttgtaaggatctgttggaccaagacccatcacggtaccattccaaaaggtcctgcataaccttccaggtgtt

SEQ ID NO: 85210 - DNA, 600 bp, Chicken  19866894383786_3
ataagcaagaccgtgcaaggctgttggatacgtgagactttcagcagttggtgtctcttatgagtatgggaaaatgcaagaggtaataaaagtgatgccattcctaactcccagtggagggataatcagttcacttagactccaaacccactgatactaaaatcctctgatataatttccttctgttgtaaggatctgttggaccaagacccatcacggtaccattccaaaaggtcctgcataaccttccaggtgttttcagaaatgacagctctaatgaagctcctgaccttcagactraacatacctgtgttcagctgactcccatttccctctcggtctttgaaacctcttcagagaaatttaaatgcatcttatgtagggggaggagggtcttgattgtactatgagctttcatcaagaagcttcaawgactctgactcacaactctgctaagccaaacagtggtcagaagatgatgtctaatgtcatgcaaaaagattaagaaaattaacttgttcacagcaagcacatgaattatagaatcataraatcacagaatcattaaggttggaaaagacctctaaggtcatccagtcc

SEQ ID NO: 85211 - DNA, 600 bp, Chicken  19866894383786_4
acttagactccaaacccactgatactaaaatcctctgatataatttccttctgttgtaaggatctgttggaccaagacccatcacggtaccattccaaaaggtcctgcataaccttccaggtgttttcagaaatgacagctctaatgaagctcctgaccttcagactraacatacctgtgttcagctgactcccatttccctctcggtctttgaaacctcttcagagaaatttaaatgcatcttatgtagggggaggagggtcttgattgtactatgagctttcatcaagaagcttcaawgactctgactcacaactctgctaagccaaacagtggtcagaagatgatgtctaatgtcatgcaaaaagattaagaaaattaacttgttcacagcaagcacatgaattatagaatcataraatcacagaatcattaaggttggaaaagacctctaaggtcatccagtccaaccatccaccaatactgcccactgaccatgtccctaagtactatatctgccctttccttgaacacctccagggtgactccatcacatccctgggcagactgtgccaatgcgacaccactcttttggaggag

SEQ ID NO: 85212 - DNA, 600 bp, Chicken  19866894383786_5
ggtgttttcagaaatgacagctctaatgaagctcctgaccttcagactraacatacctgtgttcagctgactcccatttccctctcggtctttgaaacctcttcagagaaatttaaatgcatcttatgtagggggaggagggtcttgattgtactatgagctttcatcaagaagcttcaawgactctgactcacaactctgctaagccaaacagtggtcagaagatgatgtctaatgtcatgcaaaaagattaagaaaattaacttgttcacagcaagcacatgaattatagaatcataraatcacagaatcattaaggttggaaaagacctctaaggtcatccagtccaaccatccaccaatactgcccactgaccatgtccctaagtactatatctgccctttccttgaacacctccagggtgactccatcacatccctgggcagactgtgccaatgcgacaccactcttttggaggagttttccctaacgttgaacctgaacctctactggcacagcctgaggccggtccctctcatcctctcactagttacccaaagactttaaaggcttaaaagagatctgactgctgtcagtaa

SEQ ID NO: 85213 - DNA, 600 bp, Chicken  19866894383787_1
atgaatacagatgtcttctaccacaggagaattaaaaccataagtaatttcttcactctccctttaaatcacttccttatattaaattccttaaacactctaacacaagctttctactttttgctgagctgcacttttgtgtaattcattgaaatatcctctattccagttagaataggaatttcttcatcagcatccagtaagaagttccgttcgactctcatctaaatgaagaagtgaaagcttaggcaacaacttctgcagttaagaggaaatacttttaccatttccatcagcacraatgtttgtagttttgagatcgactaaggttcataatggatggcaggttttctatggttatccccagaagagggatgattgcactgagaagctcttcatctttcctctttgcttaggaaggcaaagctcatccgcccaagccagcatcatccagtgccactgggcttttcccacacatggccttgggacccagttctatttgagttgggccttggcttgaggctactccctagaggcatcccactcccacagctgttccaagcaccaattgctccttgccctgatagtaatggcttgttg

SEQ ID NO: 85214 - DNA, 599 bp, Chicken  19866894383788_1
  misc_feature (1)..(172): n is any nucleotide
nnnnnnnnnnnnnnnnnnnnnnnnnnnnnnnnnnnnnnnnnnnnnnnnnnnnnnnnnnnnnnnnnnnnnnnnnnnnnnnnnnnnnnnnnnnnnnnnnnnnnnnnnnnnnnnnnnnnnnnnnnnnnnnnnnnnnnnnnnnnnnnnnnnnnnnnnnnnnnnnnnnnnnnnnnnnccctcactgaaatgcaatggggaaatggagagctgatgcttctgctccatgccaggcactggagatgctctcttctgcatctccatctatatcaatgcccagttggctttggagcctgctgaaactgyattttctgttctacagggcgaatgtccatccacaaagagatattttttaataattctgacgttaccatttctgctgacatgcagatgttttatgcacctccacaaagcttcagcaggtcgtgttcaaygtgatgaatgcgcctttcctctctggcattgcaggaatgtgaaggtggcgcaggggattgggtgccaacacccaaacaaggtgatccttaggtctcagggaaaaggcaggaacgggtggcatcatccagaggagcatgggaaagacttggtctgaatacaaaacagctgtg

SEQ ID NO: 85215 - DNA, 599 bp, Chicken  19866894383788_2
  misc_feature (1)..(44): n is any nucleotide
nnnnnnnnnnnnnnnnnnnnnnnnnnnnnnnnnnnnnnnnnnnnccctcactgaaatgcaatggggaaatggagagctgatgcttctgctccatgccaggcactggagatgctctcttctgcatctccatctatatcaatgcccagttggctttggagcctgctgaaactgyattttctgttctacagggcgaatgtccatccacaaagagatattttttaataattctgacgttaccatttctgctgacatgcagatgttttatgcacctccacaaagcttcagcaggtcgtgttcaaygtgatgaatgcgcctttcctctctggcattgcaggaatgtgaaggtggcgcaggggattgggtgccaacacccaaacaaggtgatccttaggtctcagggaaaaggcaggaacgggtggcatcatccagaggagcatgggaaagacttggtctgaatacaaaacagctgtgggagcagctaagctcatgagtgagcaaggagggccccaactacagaggacagtcaggagagcatcaggatgcagyrtgtaccttgtcctggtttctgactgattctaatrgaggtcagtctgacagtt

SEQ ID NO: 85216 - DNA, 512 bp, Chicken  19866894383788_3
tgacatgcagatgttttatgcacctccacaaagcttcagcaggtcgtgttcaaygtgatgaatgcgcctttcctctctggcattgcaggaatgtgaaggtggcgcaggggattgggtgccaacacccaaacaaggtgatccttaggtctcagggaaaaggcaggaacgggtggcatcatccagaggagcatgggaaagacttggtctgaatacaaaacagctgtgggagcagctaagctcatgagtgagcaaggagggccccaactacagaggacagtcaggagagcatcaggatgcagyrtgtaccttgtcctggtttctgactgattctaatrgaggtcagtctgacagttcccgttagaaggtccatttccaayaccttgacactctcctgagccttcatgttctttctttccttctttatagctggttggggtggagcagctgttcatgagatggatgcgtgctctcagcagagccctgggcatgctgctctgggtgctgctcatttg

SEQ ID NO: 85217 - DNA, 511 bp, Chicken  19866894383788_4
gacatgcagatgttttatgcacctccacaaagcttcagcaggtcgtgttcaaygtgatgaatgcgcctttcctctctggcattgcaggaatgtgaaggtggcgcaggggattgggtgccaacacccaaacaaggtgatccttaggtctcagggaaaaggcaggaacgggtggcatcatccagaggagcatgggaaagacttggtctgaatacaaaacagctgtgggagcagctaagctcatgagtgagcaaggagggccccaactacagaggacagtcaggagagcatcaggatgcagyrtgtaccttgtcctggtttctgactgattctaatrgaggtcagtctgacagttcccgttagaaggtccatttccaayaccttgacactctcctgagccttcatgttctttctttccttctttatagctggttggggtggagcagctgttcatgagatggatgcgtgctctcagcagagccctgggcatgctgctctgggtgctgctcatttg

SEQ ID NO: 85218 - DNA, 477 bp, Chicken  19866894383788_5
tcagcaggtcgtgttcaaygtgatgaatgcgcctttcctctctggcattgcaggaatgtgaaggtggcgcaggggattgggtgccaacacccaaacaaggtgatccttaggtctcagggaaaaggcaggaacgggtggcatcatccagaggagcatgggaaagacttggtctgaatacaaaacagctgtgggagcagctaagctcatgagtgagcaaggagggccccaactacagaggacagtcaggagagcatcaggatgcagyrtgtaccttgtcctggtttctgactgattctaatrgaggtcagtctgacagttcccgttagaaggtccatttccaayaccttgacactctcctgagccttcatgttctttctttccttctttatagctggttggggtggagcagctgttcatgagatggatgcgtgctctcagcagagccctgggcatgctgctctgggtgctgctcatttg

SEQ ID NO: 85219 - DNA, 435 bp, Chicken  19866894383788_6
tggcattgcaggaatgtgaaggtggcgcaggggattgggtgccaacacccaaacaaggtgatccttaggtctcagggaaaaggcaggaacgggtggcatcatccagaggagcatgggaaagacttggtctgaatacaaaacagctgtgggagcagctaagctcatgagtgagcaaggagggccccaactacagaggacagtcaggagagcatcaggatgcagyrtgtaccttgtcctggtttctgactgattctaatrgaggtcagtctgacagttcccgttagaaggtccatttccaayaccttgacactctcctgagccttcatgttctttctttccttctttatagctggttggggtggagcagctgttcatgagatggatgcgtgctctcagcagagccctgggcatgctgctctgggtgctgctcatttg

SEQ ID NO: 85220 - DNA, 352 bp, Chicken  19866894383792_1
tacttattattactgtgcctacactgaagtaatgctattagtattcaatgtcacctcagaaagccctcctcatgaataaacaatcaaagagcacgctgtagcagtagctaaaatccagtagcaaaaatcttccagtaacaaaaagaaggaaggaagctctttgtctgaaggagtattaacactgacaagagtctatgatacaatttagcttcttaaatacaactgtcatcatcattttcatgtctttcataaagcaataacgaaccgagtaccccagaagctgcagttagatcaaagtaygctatattttcagctctctatttgaatattcagaagtataatccctattact

SEQ ID NO: 85221 - DNA, 600 bp, Chicken  19866894383795_1
cctcttgacatatttaccattttttcagtattccacgtcaagctcctgttacaccactaaaatacacaccttgctaactgctctgtcacatgccatccatttaacaggaaatgctccttctatctaatctcggacacgtggttatctaagccataacgtggaaggtctgacagagttcattttatattaaaggtttcttacatttgtctcacagccaaaatctactgaaccaccccctgccctatcctgacacaagcattttttttcccccccctttctttttgtgaaggaaaaaataasttttatttggaatgaaaaggaagcacgtgaggtaacactgtacagtgtacagaaacaagtcactctcagaaatctggaatgggaatatgtaagtcttgggttattgccaaaagaaatcagattctttgtattatatcacaatgcttataaatgaaaaccattctgaaacattttccaacactaggaagataaaatacgtttatgtcataaggcgaatgcttactattttccctacatcaaagacaaacgcacagaatatttttaatgttatttctaaagcatctcaatttagaattacaa

SEQ ID NO: 85222 - DNA, 586 bp, Chicken  19866894383796_1
gtgtccctctagcacaagaacacgctgacaaaaatatggaaggaagccatgtattttgccttcaaaaggcaagtgtaaatgttgtcatagcaactcaggaaagcagaatgatactttataaagttggtggtggggaaataagggagggagggagaattaggtttttacagaacaggcgaaaaatagcagtgcacaaaaagaacatgacacgtgacttcttcagctagctgcagagaagtttgcttgtgtctgaaacacaagcagttgcagtgcagtaggtagcatatctaaacaaatcgractgtgttcacctcttgtgtcttgacagacactcgataagccaaggccagacagacccggagcttacacagccctattcctggaaaagagaggctgatgaatcacagcccctttactttttgtaagcagcttgtgtcatcccacagcgctgtcaagatttgagaggctccactgaaactgcgagatattacagagattgtgaaggcagagagctagaggggcagatactagtgtcagtctccgccttcattctgaagccttttcgtctgatttatttccttctctg

SEQ ID NO: 85223 - DNA, 538 bp, Chicken  19866894383798_1
atccaaccaccccatctctccaccagtccctccctctatccaaccatcccacctctccatccgcccgcaaaggctctgacactcgccagctggcggcggcaatccccagaggctctctgagcgctctctaagcagcacgacctcagcctccagccctccccttccttaccttcaggtctccgctgtccgcctcccgcagcttctgcagcctgaagtccccctcgcaggggttgagcgccgaggggggggccacgcaggcgcacttgcagccgggccccgaggtgatggtctccacggtgrcggaaggagccctggttgatgcgctggcaggcgccgcgtcccaggggtctcaccaggcacttgcagcggcagtcggagccctcggacaccgccttcaccttgtcgtagtcgcctagcagctgagcacggcaccgtcactgccctgccgggatgcccgacctccccgccggctttaaggacccttcggacatcccgaacctcgtagaatcctaaccgaacaaccctacgagcagcgtaa

SEQ ID NO: 85224 - DNA, 600 bp, Chicken  19866894383800_1
agctaaattccattttcattcaagcaacagaataaaatcgaattatacagtaagatcccagagtctttggaaacttttctcttaaaaatgttttccccatattcaaagactagggaaataaacttttgcagacaagaaagagaagtaagagcagatagaaattctgtacaatgatcttctagctgtagaggaataaaaaggggtgttataaaagagattcagttcaacataaagacttagtaactttgaaaaggtacatacaaacattttgatatagcgtagatgtgatgagaaaaatcraaatcattcctttgtattaagaaccgaggattttggaatatgaagattgttagtctgcaggcatatgtgcattactactataataaggaactattgatttccttttaaagtagtttggaagaatagcttactagagacttcaaagaggaagggggaaaaaggaagttaaaaagcctacatctctgagagaaattgagagtgatggtattcaaagtgaattgaggattattttttaaatatgactggaatatgtaagttaggagagcggaaaaagtccttctttttatgtacaatcacagc

SEQ ID NO: 85225 - DNA, 600 bp, Chicken  19866894383803_1
gggaaacattcagtgtgggccaggagaacacatacctgccagtgagttacacaagcatttgctgagacagcaatggaatgtcagcaaacaggatctttgggtctaaccccagctttggaggcagcgagcggcctaagttgtcacaaacaagagacccaaccacatgagcatgcagatttgttttcagcagatgatgaacctccctgctttaaaagctgtggtcttattctctactctgcatgcagcccgcttgctagtagattatctgcaaagcaggtgaatgaccttggcccccctacrggaaggataactgccttttaagagtacagacgccagcagaagcagtggagcatgtgggactagacatcatggacttctgggcattggtaaacactattacatttctccccctgtactgtttcstcttgtcattctgtgggaagcagagctgtgaaatgggtcagaacaacctacagcacatgacacttgtgagccttaaccttgtggcccatagagtgatagtcaagtgtagcacacagaccaaccctggaagcaatgaagacccaacccaggccacaaaggactgcaggacaagtccca

SEQ ID NO: 85226 - DNA, 600 bp, Chicken  19866894383803_2
gcgagcggcctaagttgtcacaaacaagagacccaaccacatgagcatgcagatttgttttcagcagatgatgaacctccctgctttaaaagctgtggtcttattctctactctgcatgcagcccgcttgctagtagattatctgcaaagcaggtgaatgaccttggcccccctacrggaaggataactgccttttaagagtacagacgccagcagaagcagtggagcatgtgggactagacatcatggacttctgggcattggtaaacactattacatttctccccctgtactgtttcstcttgtcattctgtgggaagcagagctgtgaaatgggtcagaacaacctacagcacatgacacttgtgagccttaaccttgtggcccatagagtgatagtcaagtgtagcacacagaccaaccctggaagcaatgaagacccaacccaggccacaaaggactgcaggacaagtcccagttatttgtttcttctgcctttttttttttttttcctaagttggaaaaagcaaactaataacaatcaaagcttttgaattctctgccatgtatagtcattctctcatatccgtgcactgcatg

SEQ ID NO: 85227 - DNA, 600 bp, Chicken  19866894383811_1
ctagaatatcacagcaggttttttactcatttttggctcttgaatggactggtgacatactggtgcttttaagttgtaccagtgtgagagggctacatgggaaccccttattttatcctcttctactgcctgaggtaggctgaggcacaggtgctgggcggcagccatcagcgctctgccacgcatgggcgtctgctgctgtggaggtgctgggagctgctgggctcagtcctgtccaggataagtggtgtgtttacttccatctaactgtcgctgaacacggacgtctagaagtccctktcggagcaaatgaagcagaaaaaggtgctccccaaaatcagtggagacaaatacctcccctctgctttctgaagagatgccagttcctcctgtgtatgcacctggatgagcagtaccattcaaaagaacatctcaatctcccatggcaccgagcccagaagctgacctgccagccccagcctggttaagtgctagcaggcagcggggcctcctgaagggcgagaggaaacgatttctgccgcgctgtggacaactctcacatggtcgctctggagctgcatccctctgacctctgaggta

SEQ ID NO: 85228 - DNA, 600 bp, Chicken  19866894383813_1
gtcatgggcacagccagagtagaccatgcatttttatagtttccctgaaaaccttctgacctatttcagagcactgagcttagaatgacttagaatatttcatgttacatacagacataagtgaaaccttgcttttctccatcatgcagtgcagccgggaggctgtacaaccaacagagacctgattaactttgaccaaacatttcagcttttgacgggatgttaaacatcactggtgtgtaattctgtaagagggatgccctggaagaatctgcatttctatcactttcccttatactrtggtccatcttctaccatgctctattcacaatcctatatcttttccaactactacttggtccacttccatctctgtcttttcattcctctccagtactccctagtatggtacaaacagaacagtatcatcctcttccttttgaaattctctctgttgggaaaacacagtgtatgaaactgaaacctattgttaagctgatacttcagctcctgatagttctgtatgtggatgttacacagatgaatgaggtcatgtacaggttcaataataggatagaggttagcttttgtacaattttg

SEQ ID NO: 85229 - DNA, 600 bp, Chicken  19866894383817_1
gaaaatgtatacatacttttgaaaagggatatatttaattttataaaagagggaaaaatgtgaagttgttacacaagaacaatgtacaacagtatcatcgaactaaaataatgcattaaatctgtggaaaataagcatcacttcttcaagattttgtttccaacttatttagtcacatcagtgagaagataggtgaaattttctttagataaaaaactcctacagggattttaaaaaacattcaaataaaattaatgaatggaggaaaaatgattcatttagacatcacagaacagcagraaatattgcctataatactgaaaagtcctttgagagaaaatgaaatccaaacttttacttgggcttgtttctaagtacagtgacaagtcataggcattattagttgtaaatgacagaaaacacattgctgtctgattttattattttaccttctttaccaagacagttatgatcaaatatatctttaaaagcaaaggcaaagaagaactatttttttaatagtggagtttttataattttgtgttcaggggaagaaatgagaagccactgtatggcagttacatttttataccattcttg

SEQ ID NO: 85230 - DNA, 600 bp, Chicken  19866894383825_1
attatttcaaaaggattttaaaccacacaccagatctgggctaggcagaagcacatactgaaaataaggagtcctgtaagagtcgagaggctttatggatgaaagaaggtacaagccctccttctgaatgaggataatcacagcggttataacatcagataaacttcagagctcaatcttgccctcaaatatacatccaggattaaagtttcttcaatcttcagtattttaagtagatcattagattgtattaagtgagaaaagagaaactcatcacttgcatcagttcttaccaaagaygttgtctcaggccccagtaagtggacaaaaggggagtcatatgaaaaaaagcagcatgacagaaagctactaccagctgccacagctgctcttagccacgatacttaaagaggaattgcaaacctatgctaattggatagcatgttcagtgcaactgaagctcacagactgccctgaaccagacatgaaggctgtttcccttgaccgttccccatctgaatagttgctcctatgcctacttctgatttatgctcacaggttcaaagcacgctacacacttgcaggctgaagagtcttgtt

SEQ ID NO: 85231 - DNA, 600 bp, Chicken  19866894383825_2
cagcactgctggaaaacaaaaccaaaagaaacacacgacattgtatacacctcaaaaattgagctggtttgctaaatgctgcatatcttcattttcccctttaacaaccaaattaacaaccctactcttaacatgcaaactaaacagcttcaagtgtacagcaatacaagttttacatccagaacgctaaagaaggtcaacatgaagaagtatgcacaccaaataggaggaacatttgctgagacaaactactgaatataaaaagcaatgtgccacatcaaataaaagagacaggattaygtatcactaaattagctatcaaaacctttgcagtattgcagtaagtggtttggaagcccaaaaccatgaaaagcaatcactttgtaaaaatagagatgcagaatccttccactaataccaggcaaaatcccagagaaaaataaagcggcttcttactaatgctatactgaacatacaatagcagcaaattcagcagcaattaagttgtagctcctttgtatgttacacaagctgcagagtactctgaattctactttaaaattttctaacagtcaacatataatttgtgtaatcatattg

SEQ ID NO: 85232 - DNA, 600 bp, Chicken  19866894383829_1
gcccaacctaagcgatttggaacagcactgtgagtgaccacagctggcgtagggtgctcagcacaacccaagacctccagagtgtctgaaaagacattgtatcagtaaaatatcactggtggaagtctaatgacacatttagaaaagctgtgtaatgaagcagtcactttctcctcaactttcaatcttcatatcatctgtagaaaagaaagaatcacatgctgaattgctgaaagcacaatattattaataagaggaagaagcaatgaacaagatctacttaaaatttcttaccaaaayaaaaaaaaaaaagcatacttaacaatgttaataattatgttttccttgagatgtatatataatgtactacagtggatctgtaccacagactatactactatagagactttgaaactaaattgtgataaatcactttaacacaaatatgatttttatttgcttacacagcataaaccaggtgcaacaacccagacaatccaactatctactgaagattatgcatatatgggtataaatcttttagaactactataataacggagctcaactatgtatctttcttaaaaacaaacctgacag

SEQ ID NO: 85233 - DNA, 600 bp, Chicken  19866894383829_2; identical to SEQ ID NO: 85232

SEQ ID NO: 85234 - DNA, 599 bp, Chicken  19866894383841_1
  misc_feature (1)..(160): n is any nucleotide
nnnnnnnnnnnnnnnnnnnnnnnnnnnnnnnnnnnnnnnnnnnnnnnnnnnnnnnnnnnnnnnnnnnnnnnnnnnnnnnnnnnnnnnnnnnnnnnnnnnnnnnnnnnnnnnnnnnnnnnnnnnnnnnnnnnnnnnnnnnnnnnnnnnnnnnnnnnnnnnncagaaaaatcttgtaagttgagaaagttaataaagaaaaaaaataaatgaaatcttgtcactaccttgataaagcagtgtagtaaagtttcattcagaagatctaaaaaacgtcatcttttaatgtgtagaggtttgggkttttttttgcttacaagttatgtgaattagcacgagagaagggagagcagcctcattgtttgtggatggattttgatctttgtatgctatcttgcagcaaattctggatctagctggaggactgtgtacatgtagaagaaatgaggtgtgctttcatactactccttcctattacaaagccgtggtactgagttccagaaccacctgccacacatggaaggagcacactaaaactgttctagattcgtgtctttgggccagaccacgtgtagctagccacgtagctataacaagctgat

SEQ ID NO: 85235 - DNA, 600 bp, Chicken  19866894383850_1
cacctttctttcatttgcagaactgtcttacagatgacattggaatatctacgtggaaaaaacaggttttcctgtcacatagtgccttgctggcaaagagctgccaggctgcaatggaactagcaaagcatagcgctgagatgcaggatatggcatttcggtatgggaagcacatgtccatgagtcataaggtacacctttttctttcactctgtgattttaaaattaaaaaaacttgcaagatgtgttgatcttgagctctgttctgtaacaccactatgccacagacctttgtcagcrggttaatggtactgactaatttgaccactgcctggtataatgtttgcagaaactgctgttatgcactgtgcttatgaactggcaaaatcacacttctggctgtgtggtttatttcatttgaggctctgttaaaagtctctctagttcgtctgtctgtagcagcttaagcttcactttctgtgctcatgtgttctccctgaagccacagtcccagcagcaggaattgcagggggaagcaggtgttgggtgccaaggtgcctctacctgagttcagcttcgtgcagcaacacatgaggctga

SEQ ID NO: 85236 - DNA, 600 bp, Chicken  19866894383854_1
gctaaataagtgcatctggccccgtctccacagcacgtttgtgttgccgctgctggtgtttttgcaaacagttctgctcacctgtgcttgaggcggtggttttggttgacctttttttgtgctgtgtgagctgtgggttctgaaaccagccgtgcacaaatggccacaacaggacacagacatctcactgctgctcctcactggcagcagccacagcttcacccgttgcactggttctgtacactgggggtacacatgagagtatctgggggggttgtttgctgcaggcatctacagaaygggctatttgagtgcagccagtctgcttgcacagagctctgcagacgacttttgcacctgtaggcagcgtgggctagcctggaggatttccttggctttagagaaggcctggagctcagctggcccaattattttttgcaggtggcatattttccaagatatcatacaagtgggygactgtacgcatctgccagcagttctgggatggttggcaagtttcccttccggatgatgatgtttggcttcatagccccaggtgaggatgtgcacaagctgctgagaagcagatctgggactggt

SEQ ID NO: 85237 - DNA, 600 bp, Chicken  19866894383854_2
acagacatctcactgctgctcctcactggcagcagccacagcttcacccgttgcactggttctgtacactgggggtacacatgagagtatctgggggggttgtttgctgcaggcatctacagaaygggctatttgagtgcagccagtctgcttgcacagagctctgcagacgacttttgcacctgtaggcagcgtgggctagcctggaggatttccttggctttagagaaggcctggagctcagctggcccaattattttttgcaggtggcatattttccaagatatcatacaagtgggygactgtacgcatctgccagcagttctgggatggttggcaagtttcccttccggatgatgatgtttggcttcatagccccaggtgaggatgtgcacaagctgctgagaagcagatctgggactggtggcattgatttgggattagttgggaatcattgattggttttgaaccactgatcatctggaatccatttaattcctgccagggagagggagaacagagtgctccaattagctgatgctcattttcaaccatgtcagttaattagtccaagaccgaccagatgggaaaagattgatc

SEQ ID NO: 85238 - DNA, 600 bp, Chicken  19866894383868_1
atgacagactggcattctctttcctagagagcacactggagcaatttagttctttactgttgcaattatctcttgtgttccccgtggtgcttcctggtcatgtttaatgcatggcaaaagttgttctatctcatttttttctgtgttacatggaactttttcttttttgttaagttattgcttattctgcttgccatgtttcacactatcaagaggagcaacctctgtctgcactgagtgccagcacagagatgcatgcaggagttgctggtgccagtaaatgaacaaggcagctcttamatgcttcctacccacaggactaaatctcccaggacctggggttttaatgctgaaactgctctttaaaatggaaacagacacactgttattactgatggtaacaagtagttatcccgtgtaataaaatgcagttcccatctgttcattactgcctatatcaagagccctttccctggaaggagaacgttttcctcttagtgtctgcaggagtagtactccacttagcttaaatgtgacagagtccagaacaaggaggtattaacgtcattcatttagtttgattttaattccagtaaggta

SEQ ID NO: 85239 - DNA, 600 bp, Chicken  19866894383875_1
ataacaatttgggcttagttgacataatgaaaatcatttgattatactgtttggatttgaagatttttgtgcattataatacccctgtaatactctctttcagcactatttcctaccttcaagctagcatcgggaccttcatctcatgtattatattaggataccaggaaaaaaatacaatgcaaaataactgctgaagctattatcttagattttacattttgtacagacatggaacatcgtgctacatgaactctgtcactcaagacatacttccattcacattcattttgctctcayatatgactaagctttctcactttcttcaccacacagaatacatatgaatacatcacacagactcattcttttacaatcttcttacaccagcttggctgacaaatcaactcagcattccagttaattttgtaagacaacatatgtttctttgagaccgaacaaggttctcactgagacggatggtatatctactaatcactttgaggggtggtatatcagattttttcttagttcttttcacacatgcatagagtacttggaatacaaaaagagctacctatacaataaaataactagcac

SEQ ID NO: 85240 - DNA, 600 bp, Chicken  19866894383877_1
ataagtttgtttaagattacataagattttgtcagatgaaaaaaaaaaaaagatttttcccctttatgcccataaatatcatggtaatagggaaggaaatgtgaggtcatgaaatgacacatgctcctttcatatttcattaagcttcctagtttgtttagctggaagaattaattcatgaattacccgcaccttttaccctgaaaataggaacttacctatttcatttgcaactgaccatcagaatgacaatctgatgaaatgtgcttcttgcaaaccacactgattccttcagctgamgagattttttttgtgtggttggtttttcttttgaaaatgtaacagcattacctgtacttattgtggaataaattcagaaatgaatggcataacaaacaaaagagattagtcacaaagcactcaatcacatcgtttattcatttatacactgtttatcttctggtatatgccacaagaagcagtcatttaaataaacaacttctttagtaggtaataaagtgttattgagtttccagtctcacaacatgtgctacagctataaatcaaacttactctaaacttgtgctaatttgcagcact

SEQ ID NO: 85241 - DNA, 599 bp, Chicken  19866894383881_1
  misc_feature (1)..(92): n is any nucleotide
nnnnnnnnnnnnnnnnnnnnnnnnnnnnnnnnnnnnnnnnnnnnnnnnnnnnnnnnnnnnnnnnnnnnnnnnnnnnnnnnnnnnnnnnnnnntgcaatattatttctgttatttcctattattcagttcgcagctattcagttttaaagtgtttcccctacttccccaaaatttctagcaaaatgataacaaaagaatctaagcattataaagagttaattatggatggaaagaaaatctcagaaccttcactggaagctaataatgtgtttccattgcctcgaagtgtgctgggatgtrctacagaggaaactgggtgagggactagagtgtagttaaagctggttttgttctatccacactgcagatgaataagtcagtgcctctctgtacctccatctataaatctccgagaatagcacctcctttgcatgcctggtccactcagatactaagcgttttggagcagaggctgtatttaagtctttgtacagcacagcagggtatcagagcagagtgctggcaagctctgtacagtaatatccaaatgctatagacaaagctgttactacagcaacttttgtttttaaaaaaagtac

SEQ ID NO: 85242 - DNA, 600 bp, Chicken  19866894383895_1
tcactgctcgagtgacagcattcatagcactcttcccattgctcagtgcatataacaaacccaggtgcagagatgagtctcccaggcttccctttgaagaatgtcagatcagctctgtttcttttaaaaccgctcccttggaccagctgacatttatgcaagccacacaacaccgaggaatcaggatttcaggcaactgataccactctggggacacacaaactgtaatctagatgcaagctacaaagcaaaaaattaacaatacatgcaactggatgtcactggggtaggaaagcacaytgtgccattaagagagttaaggacaaagcaggtatcaaagaggtgaaataattcacattgagcagtaatcttattggcctttaaacttgccacagaacatcaatattgcattaatctatggttctgtgcaagctgtaccaaagacaaaatggggaatttgcaatggcgtaaagaaaagaaatacgcctacctacttttgaacactcaaacacgagtctcatcaccttgggttctgtctacagcaaatgaggagtgacagaagcacctccaggggttgcttctaccctctcgaggtctgaa

SEQ ID NO: 85243 - DNA, 600 bp, Chicken  19866894383896_1
agagtgtagggaacatcagcagtccaggaggtagagacctgtaaattggcaggtatccagttaaagacaagtccaggcacaagaaaaaaaaaaagaaagaaatactttaaagaggcatttaacaaggaaaagagaaggcttgcacatgcacaaattcttcctaaaacccctaaaactaacggtagcctgacgtaaaaggattgttattaatggacttccagtttttcatttaaaaagtataagctgtaactctcatgtctggactttgtaagtacttttataaaggggcctgccggtgayctgggttcttctgcagtcagcatgggtgcttcctcatcaggaaagttcatcatttggttttaggtttctcagtggaggggtgaagattaaccttttgggaatggtggaatcttatatgtacctttggcaacctgaaggattttgttcttacccgtgctcatatcagagcctcagctgtgctttcattttacatgctcttgaaaattgtcactgctgtgacaaacattatttaattaaaataaaagatgaagaaagggttaaatgcagaagaatagcaagttttagtctcacaacaagcat

SEQ ID NO: 85244 - DNA, 600 bp, Chicken  19866894383908_1
gacgctgaattttggaagagcgaactttaagctcttcaaggaattgttggccaagatctcctcagatgttgtccctaaagacaaagatgttgaggaatgctggctactcttccaggatgcctttctgagagcacaagagctctctgttcctctgaataagaaagcgagctgaggaggcaggaaaccagcacggctcagcaagaatctgctgtgcaaactgagggcaaagaaaggtgcatacaagctctggaaacaaggctgtgtcacctgggaagaatatagggatcccatccagacttkcacacatgggatcagaaaatccaaggcacaggcagaactgaacttgttgagggaggtgaaaaacaatatgaagacattctacaggtacattggccagaagagacaggccaaagtgagtgtacctcatttggtaaatgtaaaaggagaactggcttcaacggatgaagaaaaggctgaggtactgaatgagttctttgccttggtcttcactggtagccaggattctgatatttctccagtccctgagtcctgcatccctaatcctctgggtggaaaccactgttagggcaaagcaagtcc

SEQ ID NO: 85245 - DNA, 600 bp, Chicken  19866894383915_1
ctaacactagcaactgactttgtagaagtcttctctggtttgagcttaatctgtatttagagactgtgtacagggaccgctggtatgacaagtaccagtctgggagattcattgaaatcaaacaggaaacaatgtcttttatgaagtgtaaatcatacaaaaaaacaaacaaacaaacaaaaacaattacattcattctaaaatgtgccatgcaatcttttgcataacaatctagtgatgagagcagatgcatagaaattggaaagaattaaaaccccctaagtcacatggattgagtawattgaccgactcacaggctatcaaatcatttaactagaataggacagccttacatctctgttcatgcctaarttttttcatgaaaactgtgttttcatgctagacacatcttggaaatatctgtagtgtagctttgtgccttggaaatatttatggttcatgagactatcacatcaagacctatgtcaactccatctagactaacagtagtcctgcccttatgatcaccgaattttgaaaaacaaaaatcagatggctgttctgaaatggtacacaaggtaggcatgtatacaggactca

SEQ ID NO: 85246 - DNA, 600 bp, Chicken  19866894383915_2
gggaccgctggtatgacaagtaccagtctgggagattcattgaaatcaaacaggaaacaatgtcttttatgaagtgtaaatcatacaaaaaaacaaacaaacaaacaaaaacaattacattcattctaaaatgtgccatgcaatcttttgcataacaatctagtgatgagagcagatgcatagaaattggaaagaattaaaaccccctaagtcacatggattgagtawattgaccgactcacaggctatcaaatcatttaactagaataggacagccttacatctctgttcatgcctaarttttttcatgaaaactgtgttttcatgctagacacatcttggaaatatctgtagtgtagctttgtgccttggaaatatttatggttcatgagactatcacatcaagacctatgtcaactccatctagactaacagtagtcctgcccttatgatcaccgaattttgaaaaacaaaaatcagatggctgttctgaaatggtacacaaggtaggcatgtatacaggactcaatcatgattttgaaaaatattcagtgatgaagaatctactgcttctaatggctgtttaagtctggagttata

SEQ ID NO: 85247 - DNA, 357 bp, Chicken  19866894383915_3
gaattttgaaaaacaaaaatcagatggctgttctgaaatggtacacaaggtaggcatgtatacaggactcaatcatgattttgaaaaatattcagtgatgaagaatctactgcttctaatggctgtttaagtctggagttataaatcttctttatctttagtatttgaatttatctggattgaatttccagtgcttgattcttgttacacgtttctctttttcattaataaaggctctagcattttctacccaagaaagcatttatgcactgtaattagacctggcaggtaaattatttyctatctcacaaatggcttttgtcattttgaaaaatttaggagaataatttcacagaa

SEQ ID NO: 85248 - DNA, 599 bp, Chicken  19866894383925_1
  misc_feature (1)..(106): n is any nucleotide
nnnnnnnnnnnnnnnnnnnnnnnnnnnnnnnnnnnnnnnnnnnnnnnnnnnnnnnnnnnnnnnnnnnnnnnnnnnnnnnnnnnnnnnnnnnnnnnnnnnnnnnnnncggcgacgacccggcagaccccatggcggtgacaccggtcggccatacaatccctgtagtacgtttcggggtgcaccgccccgtggcagagccggaagggcccgtccttatccagcaacaccccgcactcctcacccttctctcccttcttcccttccccctccccacatcccgacccgtcctcgcacccctcytcgcccccgactctccaccccctccccggcgacagatcgttacgggggtccccatcgaagtccccgcagagcccgcagagttggccgccgtaggagctctccacctggacgctcaccctcccgtgctgcccatcgtaggcgactctcagccccgagggggtccgcagctccacctcccaccccctcctctccacggtcagggcggagtgcttcgacgtgtggggcagggagatgggctcgccgtgcagctggtgggggggagagaacacccgttgtgcccttctggatcccatttcatc

SEQ ID NO: 85249 - DNA, 600 bp, Chicken  19866894383926_1
aactggttaaaatttcttcagctaattggaaaagctctctcaattattattagaaatctgttctgttaaagatgataggtatagcttctgttagaaagatggttaaaaactgctcaatgaacagttagtggtgggagtgtctgaaggcataccctatttgttttatgatttactgcaatcccaacttcacctgctgctctctgtgaggtctcacaggcacacagttgctattacaacatttctccgactcttatacagcttctgaaattgggttctgaatagaaacagcgaggcacgaaytgctgtaccgaatcaaggtctgtttctaaacagtgggtttaattggagatattatcattattcatatttgtttwtacgggaatatttaattctctctctgacctcctgcaatgatttcaaaggcctgttcccactgacagctgtgcgcttatataagctaccctttgggtcactccaaaagtaacgcctcacaatttattcccatggaaactacaacagacacaaagagcacaacaatactatttcatagagctaattctcagctacaaaccactatttttcaacatagtcaccaccatt

SEQ ID NO: 85250 - DNA, 600 bp, Chicken  19866894383926_2
ataggtatagcttctgttagaaagatggttaaaaactgctcaatgaacagttagtggtgggagtgtctgaaggcataccctatttgttttatgatttactgcaatcccaacttcacctgctgctctctgtgaggtctcacaggcacacagttgctattacaacatttctccgactcttatacagcttctgaaattgggttctgaatagaaacagcgaggcacgaaytgctgtaccgaatcaaggtctgtttctaaacagtgggtttaattggagatattatcattattcatatttgtttwtacgggaatatttaattctctctctgacctcctgcaatgatttcaaaggcctgttcccactgacagctgtgcgcttatataagctaccctttgggtcactccaaaagtaacgcctcacaatttattcccatggaaactacaacagacacaaagagcacaacaatactatttcatagagctaattctcagctacaaaccactatttttcaacatagtcaccaccattagctatgcactttttgctagcaatgaasaagaacctgcttgccatgcttgtaaaaacctgcaccagaggaggtg

SEQ ID NO: 85251 - DNA, 600 bp, Chicken  19866894383926_3
aacagtgggtttaattggagatattatcattattcatatttgtttwtacgggaatatttaattctctctctgacctcctgcaatgatttcaaaggcctgttcccactgacagctgtgcgcttatataagctaccctttgggtcactccaaaagtaacgcctcacaatttattcccatggaaactacaacagacacaaagagcacaacaatactatttcatagagctaattctcagctacaaaccactatttttcaacatagtcaccaccattagctatgcactttttgctagcaatgaasaagaacctgcttgccatgcttgtaaaaacctgcaccagaggaggtgacccactgtcactactgttgaaatgcaccacccactgcctcacatccacaggttcattggttggtctccctaagtgttcagcaagcaccaattgtcaactgtttaccataaaaccatgacatcaatgaatgccaatgggagcaatattttctgcatagaggaatttaatgacattcctttgcttcatccatacttccatgcaagatgctattgtgtcagactgcccctctgctgccatctttcacatgacaaca

SEQ ID NO: 85252 - DNA, 600 bp, Chicken  19866894383933_1
gacccttttatgtatcaaacgcttttgggttccaattaagcaaagtatagaaatggaggaaatggccccaaataacctttgtgcaagataatgctaacacgccaggagcatgaaaagccatataagctacttaaacctatattttttttgtccatttgcactaacagctatcaccacatgctatgtctcagcggcctgacttgtcacagggtgaagcctgctattagccaacgagcagcatgctttcatgcccctcagagcttacttagcgctgctttcacagggaaatttgtacatatrgacaacacacgcatttcagaacattactggaacacctggtacactttgaacttatacattattcacgttttactgcagtgctgggtcctgttgtgaatatttagcattaagtgtaattattttaatttattgagactatcccaagctctagatgtctgtacatgatttatttaagaagaaatccatacagatttccgtatgtactggtataagttttagttccaaagcgctgtcagtccaggcaacctttccagagtgcctatatcccagtatctcttctagggaggaccaaattccaag

SEQ ID NO: 85253 - DNA, 600 bp, Chicken  19866894383938_1
agtgcaacaatccagccaattcctcatttatgggagtggtccacacaccagatccatatctctgcagcttagagacaaggatgtcattcaggacagtgttaaatgctttgtacaagtccagatagcatcatagaatcatagaatcaccaaggttggaaaagacctctaagacaatccattccaaccgcctacatatcaccaatatttcccactaaaccatgtctctcagtacaacatctaaatgtttcttgaacacctccagggataatgactccaccaccttcctgagcagcctgtgcmagttccagwycactctcttggagaataagtatttcctaatgtctaacctgaatctcctctgatgcaacttgagaccaatccctctagtcctatttctagttacatgggagaataggctgactcctacctcaccacaacctcctttcaggatgttgtggagagtgataaggtcatctctgagcctccttttctccagactaaacaaactcagattcctcagctgctcctcataagacttgtgctccagactcctcaccagttttgttgcccttctctggacacgtttcagggcctcgacgt

SEQ ID NO: 85254 - DNA, 600 bp, Chicken  19866894383938_2
atccagccaattcctcatttatgggagtggtccacacaccagatccatatctctgcagcttagagacaaggatgtcattcaggacagtgttaaatgctttgtacaagtccagatagcatcatagaatcatagaatcaccaaggttggaaaagacctctaagacaatccattccaaccgcctacatatcaccaatatttcccactaaaccatgtctctcagtacaacatctaaatgtttcttgaacacctccagggataatgactccaccaccttcctgagcagcctgtgcmagttccagwycactctcttggagaataagtatttcctaatgtctaacctgaatctcctctgatgcaacttgagaccaatccctctagtcctatttctagttacatgggagaataggctgactcctacctcaccacaacctcctttcaggatgttgtggagagtgataaggtcatctctgagcctccttttctccagactaaacaaactcagattcctcagctgctcctcataagacttgtgctccagactcctcaccagttttgttgcccttctctggacacgtttcagggcctcgacgtctttcttgt

SEQ ID NO: 85255 - DNA, 600 bp, Chicken  19866894383938_3
tccagccaattcctcatttatgggagtggtccacacaccagatccatatctctgcagcttagagacaaggatgtcattcaggacagtgttaaatgctttgtacaagtccagatagcatcatagaatcatagaatcaccaaggttggaaaagacctctaagacaatccattccaaccgcctacatatcaccaatatttcccactaaaccatgtctctcagtacaacatctaaatgtttcttgaacacctccagggataatgactccaccaccttcctgagcagcctgtgcmagttccagwycactctcttggagaataagtatttcctaatgtctaacctgaatctcctctgatgcaacttgagaccaatccctctagtcctatttctagttacatgggagaataggctgactcctacctcaccacaacctcctttcaggatgttgtggagagtgataaggtcatctctgagcctccttttctccagactaaacaaactcagattcctcagctgctcctcataagacttgtgctccagactcctcaccagttttgttgcccttctctggacacgtttcagggcctcgacgtctttcttgtc

SEQ ID NO: 85256 - DNA, 600 bp, Chicken  19866894383939_1
gagttacctgagggggaaaatgaaattttgtgaactaagtgttagtggtgtgaagatgttttttataagctgtatgtaagaggaatatttaagggtctgaaatttatttaactgaagtgttttccataagtttatttagagaaatggaggcatactgttttatagcttgtaggtgactagtatacactaaatgcttgtacctcattatgagaaaatgatagttatacttcaattggtacaatacatcctgaacacaagtttattgatcttttggacacagagacttaacccttttattcstgtggtagwcctgaaaagttgtttgagatacaatgattaaataagttttctcactgcccctgctttacctcatcactgaatggaactgagggcttatcttcaattgtcaatctgatttagaaggtgttgaaaagcaaagctgttattggtatcctggtttaaggttctgcagaagtttggctgttgttaaagaatcaaaaacttgagagttacaaaggtaattaaaaagtctctcactgactgcatggtggtgaggcagaatcttgccctgtttgctaaacattaaacaagagctattcc

SEQ ID NO: 85257 - DNA, 600 bp, Chicken  19866894383939_2
gagggggaaaatgaaattttgtgaactaagtgttagtggtgtgaagatgttttttataagctgtatgtaagaggaatatttaagggtctgaaatttatttaactgaagtgttttccataagtttatttagagaaatggaggcatactgttttatagcttgtaggtgactagtatacactaaatgcttgtacctcattatgagaaaatgatagttatacttcaattggtacaatacatcctgaacacaagtttattgatcttttggacacagagacttaacccttttattcstgtggtagwcctgaaaagttgtttgagatacaatgattaaataagttttctcactgcccctgctttacctcatcactgaatggaactgagggcttatcttcaattgtcaatctgatttagaaggtgttgaaaagcaaagctgttattggtatcctggtttaaggttctgcagaagtttggctgttgttaaagaatcaaaaacttgagagttacaaaggtaattaaaaagtctctcactgactgcatggtggtgaggcagaatcttgccctgtttgctaaacattaaacaagagctattcctgtctaaat

SEQ ID NO: 85258 - DNA, 600 bp, Chicken  19866894383946_1
agggaactctgcctacaaagcagagcaaaagataaagttgtactaattagatttgcactgaaaggacatgaggatcagcaaaacacaccagcatgtgtatgtattgtgttaatcaaatcaggttttgagaacactgtaaatgattcctttatccagaaggaattttgtattgaaaattgagaagcaaacgtttattaagcaattggactgcctgaacaatggactttaacctggaaaatactaaacaaatgaaaaattctgtcaaacccaattctaaccccaagatttttgtcacaccaygcagtatttgaataaggttaaatacacaattcattgtgtagagaaagttcttccatctcagattgggagttgagtcagaggcccaayttgacaaaggatttcaaggttatttaggttaatttaaccttgtattgcaactcttccagtttgcataaaggaattaaatattcatggcctggagagggagagaagaagggaatatgactttacagtccacttattygaactggtttcaaaaccaagagctgtttcttttatttaacaattgtcaaccttcagatcaggctccaaccggcccgt

SEQ ID NO: 85259 - DNA, 600 bp, Chicken  19866894383946_2
ccagcatgtgtatgtattgtgttaatcaaatcaggttttgagaacactgtaaatgattcctttatccagaaggaattttgtattgaaaattgagaagcaaacgtttattaagcaattggactgcctgaacaatggactttaacctggaaaatactaaacaaatgaaaaattctgtcaaacccaattctaaccccaagatttttgtcacaccaygcagtatttgaataaggttaaatacacaattcattgtgtagagaaagttcttccatctcagattgggagttgagtcagaggcccaayttgacaaaggatttcaaggttatttaggttaatttaaccttgtattgcaactcttccagtttgcataaaggaattaaatattcatggcctggagagggagagaagaagggaatatgactttacagtccacttattygaactggtttcaaaaccaagagctgtttcttttatttaacaattgtcaaccttcagatcaggctccaaccggcccgtagacccactgagttacagttggttccttttccacgtgctctttccttgcttagtcttctattgggaattagcttcagcatcactttg

SEQ ID NO: 85260 - DNA, 534 bp, Chicken  19866894383946_3
ctttaacctggaaaatactaaacaaatgaaaaattctgtcaaacccaattctaaccccaagatttttgtcacaccaygcagtatttgaataaggttaaatacacaattcattgtgtagagaaagttcttccatctcagattgggagttgagtcagaggcccaayttgacaaaggatttcaaggttatttaggttaatttaaccttgtattgcaactcttccagtttgcataaaggaattaaatattcatggcctggagagggagagaagaagggaatatgactttacagtccacttattygaactggtttcaaaaccaagagctgtttcttttatttaacaattgtcaaccttcagatcaggctccaaccggcccgtagacccactgagttacagttggttccttttccacgtgctctttccttgcttagtcttctattgggaattagcttcagcatcactttgcctgatggtgagaaatgagcgtcacgcttttatgtaggcagcagagtttggatctcctgaatgaagagtg

SEQ ID NO: 85261 - DNA, 600 bp, Chicken  19866894383951_1
tattctgcctacccgtggtcagtttgaccaacccgtttgcaccccggcatcctgaagcttgctgctcttagggggggcagcagtgatatgggtcaggtgggtcccagaagcaccataaaggggggacaccatgacctggggctttcctaggtctgcaatccgtcctgcaaaatcccagtgggggaaacagctttcctcccccccccccccaacaacaaactctttgtgcagctttgtttgcttttcagaccagtttccagacggacgtattcttgaaacagcccacgataattttgacaygactttccccagggaattcagcgtgctgccttatcagcaacgtgcaagtttgctttccaagtcatttggaaacctatcacccccagggcctccccttctgcttgtgggcagccascattagtgcctacttaaattcgtatttattacatctatatccttcagagtgagtgaggcacccttatttaattagttcctattaacagctctctcgggaaaatgaagtcaggcccctctgcagggaagtgyccatcaataccaggccccccataaaaggtgctgagggcactggagccgatgcat

SEQ ID NO: 85262 - DNA, 600 bp, Chicken  19866894383951_2
taaaggggggacaccatgacctggggctttcctaggtctgcaatccgtcctgcaaaatcccagtgggggaaacagctttcctcccccccccccccaacaacaaactctttgtgcagctttgtttgcttttcagaccagtttccagacggacgtattcttgaaacagcccacgataattttgacaygactttccccagggaattcagcgtgctgccttatcagcaacgtgcaagtttgctttccaagtcatttggaaacctatcacccccagggcctccccttctgcttgtgggcagccascattagtgcctacttaaattcgtatttattacatctatatccttcagagtgagtgaggcacccttatttaattagttcctattaacagctctctcgggaaaatgaagtcaggcccctctgcagggaagtgyccatcaataccaggccccccataaaaggtgctgagggcactggagccgatgcatcaggatgggaagctgggagcaaagcatggctatagctgtatgratgtcgtgtagtatgatggtacagggacrggttatgctcttgtgagcaccttcccagcttgctggtgggaag

SEQ ID NO: 85263 - DNA, 600 bp, Chicken  19866894383951_3
agaccagtttccagacggacgtattcttgaaacagcccacgataattttgacaygactttccccagggaattcagcgtgctgccttatcagcaacgtgcaagtttgctttccaagtcatttggaaacctatcacccccagggcctccccttctgcttgtgggcagccascattagtgcctacttaaattcgtatttattacatctatatccttcagagtgagtgaggcacccttatttaattagttcctattaacagctctctcgggaaaatgaagtcaggcccctctgcagggaagtgyccatcaataccaggccccccataaaaggtgctgagggcactggagccgatgcatcaggatgggaagctgggagcaaagcatggctatagctgtatgratgtcgtgtagtatgatggtacagggacrggttatgctcttgtgagcaccttcccagcttgctggtgggaaggaccgtgcagagggataaaacagggcctgtgcagccaccagccagagcttcccttcggtgcgaaggaggcagtgctgctggatgcgctcaggttgaggtgagaagcacgttgttgcttctggcttacgctc

SEQ ID NO: 85264 - DNA, 600 bp, Chicken  19866894383951_4
gcaagtttgctttccaagtcatttggaaacctatcacccccagggcctccccttctgcttgtgggcagccascattagtgcctacttaaattcgtatttattacatctatatccttcagagtgagtgaggcacccttatttaattagttcctattaacagctctctcgggaaaatgaagtcaggcccctctgcagggaagtgyccatcaataccaggccccccataaaaggtgctgagggcactggagccgatgcatcaggatgggaagctgggagcaaagcatggctatagctgtatgratgtcgtgtagtatgatggtacagggacrggttatgctcttgtgagcaccttcccagcttgctggtgggaaggaccgtgcagagggataaaacagggcctgtgcagccaccagccagagcttcccttcggtgcgaaggaggcagtgctgctggatgcgctcaggttgaggtgagaagcacgttgttgcttctggcttacgctcttcggtttgcattaggactttggcccttaccatgcacttatttgctctttaatcttggtcaccttatcagaagcctttgaacaacaaaatacatctc

SEQ ID NO: 85265 - DNA, 600 bp, Chicken  19866894383951_5
cctatcacccccagggcctccccttctgcttgtgggcagccascattagtgcctacttaaattcgtatttattacatctatatccttcagagtgagtgaggcacccttatttaattagttcctattaacagctctctcgggaaaatgaagtcaggcccctctgcagggaagtgyccatcaataccaggccccccataaaaggtgctgagggcactggagccgatgcatcaggatgggaagctgggagcaaagcatggctatagctgtatgratgtcgtgtagtatgatggtacagggacrggttatgctcttgtgagcaccttcccagcttgctggtgggaaggaccgtgcagagggataaaacagggcctgtgcagccaccagccagagcttcccttcggtgcgaaggaggcagtgctgctggatgcgctcaggttgaggtgagaagcacgttgttgcttctggcttacgctcttcggtttgcattaggactttggcccttaccatgcacttatttgctctttaatcttggtcaccttatcagaagcctttgaacaacaaaatacatctctgctcaccttgggaacaggctctgcgatt

SEQ ID NO: 85266 - DNA, 600 bp, Chicken  19866894383952_1
ttccccttgtgcttttaaaagatttctgctgcttggcaacttcagtagtcattgtgctgccttgaggaactgtttgtgagtgtatgatccagatgttaaggaggaaagctcagattttgccacggttttacgaatctttctttgatggtaaactgaacacaaatctcattaacttgatttcaaatgatgcctctgaagccggagccgtggctcagtgcctccatattaagagactttcagttgaatgtattttcctgctttttcctaatacggtttctcagtcaacagctgtgtgcaaaraactgaggaaaataggaaaaaacatctgcttttctacagccataccttttgaggtctctgccttccattctgagctgatgtgacgaagtttctgctataatttggtctgtcacacgcactgcaaacagccctgaatctamaaaacagacaaagctgtaaggaaactacatatagtgtccctaagcatctacttgccttgcacttggatatctagcctatagtgctcttttagaatacacagatatggctttgctttgcatatcctgtaaagcactctttgtataaagagaaaattaccca

SEQ ID NO: 85267 - DNA, 600 bp, Chicken  19866894383952_2
tttgatggtaaactgaacacaaatctcattaacttgatttcaaatgatgcctctgaagccggagccgtggctcagtgcctccatattaagagactttcagttgaatgtattttcctgctttttcctaatacggtttctcagtcaacagctgtgtgcaaaraactgaggaaaataggaaaaaacatctgcttttctacagccataccttttgaggtctctgccttccattctgagctgatgtgacgaagtttctgctataatttggtctgtcacacgcactgcaaacagccctgaatctamaaaacagacaaagctgtaaggaaactacatatagtgtccctaagcatctacttgccttgcacttggatatctagcctatagtgctcttttagaatacacagatatggctttgctttgcatatcctgtaaagcactctttgtataaagagaaaattacccataaggaatttagtagacactgtatagtttaaaatgtgaaaatattcctaggggttaatgtatatttttaacttggaaatattttttcatcatgtgtaataaatctgcctgtgtaagttttgtcccctttatgatgggggt

SEQ ID NO: 85268 - DNA, 599 bp, Chicken  19866894383954_1
  misc_feature (1)..(90): n is any nucleotide
nnnnnnnnnnnnnnnnnnnnnnnnnnnnnnnnnnnnnnnnnnnnnnnnnnnnnnnnnnnnnnnnnnnnnnnnnnnnnnnnnnnnnnnnnncctgcaggcagcaactgatggcactgtctgctgtttgagctttgcctttgctccaggagtggcactgatgagatcacgtggaggatgggctgatcttgacgacgtttttgactcctttttgcagtgaggctctgtcaccttttgctggctcgtaataatacgtgcacgtttggtgagtaaatacactgatgttagctgtaccacttgggygtgggagagctctcggtttttgtgaggccgggatctgtagcagggctggatctcagctcagggcctgcctgcccttcacgtggtgcagrrtcagagctgcgagcagcccgggccccrcagacaccgtctgccacagctgccactaaaccacaaggagttctttgcagtcgcacaaaggtgcgtgtttacagtgcgtggcacggccttaaacggcgtgggttcccctcrctgccgtgaggtttggctccggttaccgaacgcctggactgggtccagaagggatgcagcttttaaagcca

SEQ ID NO: 85269 - DNA, 599 bp, Chicken  19866894383954_2
  misc_feature (1)..(1): n is any nucleotide
ncctgcaggcagcaactgatggcactgtctgctgtttgagctttgcctttgctccaggagtggcactgatgagatcacgtggaggatgggctgatcttgacgacgtttttgactcctttttgcagtgaggctctgtcaccttttgctggctcgtaataatacgtgcacgtttggtgagtaaatacactgatgttagctgtaccacttgggygtgggagagctctcggtttttgtgaggccgggatctgtagcagggctggatctcagctcagggcctgcctgcccttcacgtggtgcagrrtcagagctgcgagcagcccgggccccrcagacaccgtctgccacagctgccactaaaccacaaggagttctttgcagtcgcacaaaggtgcgtgtttacagtgcgtggcacggccttaaacggcgtgggttcccctcrctgccgtgaggtttggctccggttaccgaacgcctggactgggtccagaagggatgcagcttttaaagccaacttcatcagaccgagggccgttcccgtagcctggagcacggatgcagtgatgttgcccacattaggtctgaggcaaactcagtgccta

SEQ ID NO: 85270 - DNA, 600 bp, Chicken  19866894383954_3
cctgcaggcagcaactgatggcactgtctgctgtttgagctttgcctttgctccaggagtggcactgatgagatcacgtggaggatgggctgatcttgacgacgtttttgactcctttttgcagtgaggctctgtcaccttttgctggctcgtaataatacgtgcacgtttggtgagtaaatacactgatgttagctgtaccacttgggygtgggagagctctcggtttttgtgaggccgggatctgtagcagggctggatctcagctcagggcctgcctgcccttcacgtggtgcagrrtcagagctgcgagcagcccgggccccrcagacaccgtctgccacagctgccactaaaccacaaggagttctttgcagtcgcacaaaggtgcgtgtttacagtgcgtggcacggccttaaacggcgtgggttcccctcrctgccgtgaggtttggctccggttaccgaacgcctggactgggtccagaagggatgcagcttttaaagccaacttcatcagaccgagggccgttcccgtagcctggagcacggatgcagtgatgttgcccacattaggtctgaggcaaactcagtgcctatc

SEQ ID NO: 85271 - DNA, 600 bp, Chicken  19866894383954_4
ctgctgtttgagctttgcctttgctccaggagtggcactgatgagatcacgtggaggatgggctgatcttgacgacgtttttgactcctttttgcagtgaggctctgtcaccttttgctggctcgtaataatacgtgcacgtttggtgagtaaatacactgatgttagctgtaccacttgggygtgggagagctctcggtttttgtgaggccgggatctgtagcagggctggatctcagctcagggcctgcctgcccttcacgtggtgcagrrtcagagctgcgagcagcccgggccccrcagacaccgtctgccacagctgccactaaaccacaaggagttctttgcagtcgcacaaaggtgcgtgtttacagtgcgtggcacggccttaaacggcgtgggttcccctcrctgccgtgaggtttggctccggttaccgaacgcctggactgggtccagaagggatgcagcttttaaagccaacttcatcagaccgagggccgttcccgtagcctggagcacggatgcagtgatgttgcccacattaggtctgaggcaaactcagtgcctatccaaactgtgtctggggctgatacagag

SEQ ID NO: 85272 - DNA, 586 bp, Chicken  19866894383954_5
cttttgctggctcgtaataatacgtgcacgtttggtgagtaaatacactgatgttagctgtaccacttgggygtgggagagctctcggtttttgtgaggccgggatctgtagcagggctggatctcagctcagggcctgcctgcccttcacgtggtgcagrrtcagagctgcgagcagcccgggccccrcagacaccgtctgccacagctgccactaaaccacaaggagttctttgcagtcgcacaaaggtgcgtgtttacagtgcgtggcacggccttaaacggcgtgggttcccctcrctgccgtgaggtttggctccggttaccgaacgcctggactgggtccagaagggatgcagcttttaaagccaacttcatcagaccgagggccgttcccgtagcctggagcacggatgcagtgatgttgcccacattaggtctgaggcaaactcagtgcctatccaaactgtgtctggggctgatacagagctgccttctctcattgctcgcactattctgttcctagctgggaacacaggaagtattttcctctggcgttacgtactctgaaagcaagaggtatatg

SEQ ID NO: 85273 - DNA, 600 bp, Chicken  19866894383957_1
agccaaaaggttggatacagacaccataagtaaccttcagttttattgtaacccagaatattcttcaatgctggtgttcccaaatccacaaaatattcattatacctcaacaatcagtaaatctcaataaattccattgagatctgattcaatactcattgtagcacctcagacacatctgtctctgagaaaacagagacaaacatcatttcaattatcactgaaaaaattagtttattttccttttgtaaatttagctattgttaccagagcaccagtaagtacccaattgaccgttcyaatgtacagagcaggcaaggaaggttcatcatttattgacagcggatagataagttagcataaaatatatgattcccttattaaaaatgttttctttattaaaaaacataactaaacatggaaagtatacacactgattctgttaaaacagggtttaatttctaaatatattttgctatgcaggagtattattgatataaggatgtgttctgctgatctgctactgtctttcagaggtcccagtaaactcaagttagtgctgtagtaaatgaatcaagctaattctaccaaaaataaytg

SEQ ID NO: 85274 - DNA, 600 bp, Chicken  19866894383957_2
cyaatgtacagagcaggcaaggaaggttcatcatttattgacagcggatagataagttagcataaaatatatgattcccttattaaaaatgttttctttattaaaaaacataactaaacatggaaagtatacacactgattctgttaaaacagggtttaatttctaaatatattttgctatgcaggagtattattgatataaggatgtgttctgctgatctgctactgtctttcagaggtcccagtaaactcaagttagtgctgtagtaaatgaatcaagctaattctaccaaaaataaytgcttaatattgtatagcactgttataaaataacaaataataataaaaataaagcaactttctagattctatagtgcagtctcattccccatgatgggtcagattagctacttttgaggtgagataatgaagtgtttcagtatttccctatgaaacaaacgaccttgataaattttggagaaataaccatttgctttctctgctcaagtgtttttctccttttcccaaatgaaaaaatattcagagactttcaaagtcacacttaataaatcacaaagaaaaatctttataaataaagtt

SEQ ID NO: 85275 - DNA, 600 bp, Chicken  19866894383958_1
cctgtctgacttgctcatctattacctagagaggatgaaagtgaagttcttacatgttatgtaacctgatttctatgcatgaaaccacattgcaagtgcttgagtgtgaaaaaaaacttgggaaagagctatagtaaatgaggaggaactgaacacataggttggattccatcaggaaatcttagcgtaactatccacagtacacggcacaaaatgtcacacaatcaattcctgtttaatttatgcaacaattcattatgggtatgagagaggatgaacaacctgaacagaattaggcarttcccttgcggataggctgtttgctcaaacaactatgggctgaaccagtactccagaattaaactgagttttaaatttcctcatctagcagagaaatgacttttttccatttttactcttttgcctggagtaactggaaaatttggaagggtcagcaggcaaagaaaacattttgaagctgaaaagcaatgatttaatatgctaaacatcaagagagacctcatttttccatgctctagtcagcatgcatctatttacttacctcagggctaacaagtaaaagcgttactaaatgagggc

SEQ ID NO: 85276 - DNA, 600 bp, Chicken  19866894383964_1
tgagtacaagcagtatttcataatgtatttcaatacattatttgaaaaacaaataattttagtttatttgaacatctctgaaaagctcatttttggaactcagtaatttaaaaaccccactgtgttttaaatgtttagaaatacctaggttttccaagtatttacctcctttcagaatcaacaacctacttccagcttcttaaataggtaagagtagaagttattacagtgcttaaatgatgtctaataattcactattaattagtatgtaagaaatattacaacaaaccattcatttcraacaacaccaagacagcaattatctgatagacttctatgggattatatatgatttttttttgtttctgttttttttaacttcataacactacaaagaaaagaacttgcttcaattgcagaggcagttttctgacatccatttcaaactataatggcatctttaccaaggacaaagataatggacataaaagacacataggtaactgcagttctgcatgaacatgcaagtcttaacaaaaccagttatgctgcagatgtgtatatgcagttattagaattgccagcacttacttctgccaa

SEQ ID NO: 85277 - DNA, 600 bp, Chicken  19866894383965_1
gggagacaacagtgcagtgagattgaaggaagccttctggtttctgaaggcagtaactgggtttgtcccgtgcctggcactgatgagttcttcagatcagagctgcttgacacatggtcagagccaacactgtactcggaccactgccagagcagagggaaagcaccttctcgcttccccctgaagatgtgaggaaggctgagactgcagctcattgcctggagaggtattccagatggcaccttactggggggttggttcttgcgtaccggggtgctcacagccgccttggggtgactkccagccagatgctgctcgtgtggtatgagagatggagagggaggcagctgggctgtgggatgttcacaacagtttgtcagaggtcagagtgagggtgacagtgccacttcttctccctagctgactgccaccgctcttgcaaggacacacagcttggtgatgcctgaactgtgctgtttgtagtgcttcacagaagcctaataacccagacatcacaaaaagctattcctgctgtcagtgcacgtccacttgtacgaaaggtctttgccctaactcagagagaagagcctcatcaataaa

SEQ ID NO: 85278 - DNA, 599 bp, Chicken  19866894383966_1
  misc_feature (1)..(138): n is any nucleotide
nnnnnnnnnnnnnnnnnnnnnnnnnnnnnnnnnnnnnnnnnnnnnnnnnnnnnnnnnnnnnnnnnnnnnnnnnnnnnnnnnnnnnnnnnnnnnnnnnnnnnnnnnnnnnnnnnnnnnnnnnnnnnnnnnnnnnnnnnngagttttgtgctgtgccgctctttgccttctacccactgcccactccgtctctttggttaccttccaacttccaatgagttcacgatgcaaattaaaactggctgctgaaacaatttgcaaatgcaaatctgcattttctctccgagctgtggttgtgtttyccccccactgtgggcatcagcagacaccagtatgcaccagcgccaagctgggtgagagatggagtccccaccccctcaccattggctgcatggagcatgcaatgaacgtgatacaaactccttcccttcccaccagcgtccagcgtcatgtctcagcaacgagtgagaaatcccaacttcaggagaggaaatctttttttttttttgcctgaatccaaaagtagcatcgggatccttaaatatacgagctgaaagttttcgtccgacgtccttggctactactggtgtgtgtgcaatag

SEQ ID NO: 85279 - DNA, 600 bp, Chicken  19866894383970_1
tgctgctgctgggacattctactccattaccaatgacacaaggtcattgaggtggagaagggtaagatcagtaacacatgaagctggtttgggcatcttatggtcaagtctaatttcacaactacttctgtgattgggtgcaaccacaaactcaaactccatgctagagcactgctcccagcaatgttttggacatatcctttctggccaggtagaaaacaaaaaattctgaaaaaattcataacatatttgaaatacttttaagcttttgttgacacaagagccctgatgtcatgtgcrcaraaggccttgtaattgccacagagaacctcagaaagctttgttccaaagtgaatggttttctccacactctattgtgcacagctgctcagaatccacttctcagaaatactgcagatgttagtatggcaaacattaatgacagatttcctagctttgctgtagtttgctgaactcttcgctgtcctcttcattttctaacaacttcctttgagtagaggaggtgagcagaaacctaatatattctcatctttcaattgatttcagtctttcatctttccttatgaagacgaatcacag

SEQ ID NO: 85280 - DNA, 600 bp, Chicken  19866894383970_2
tgctgctgggacattctactccattaccaatgacacaaggtcattgaggtggagaagggtaagatcagtaacacatgaagctggtttgggcatcttatggtcaagtctaatttcacaactacttctgtgattgggtgcaaccacaaactcaaactccatgctagagcactgctcccagcaatgttttggacatatcctttctggccaggtagaaaacaaaaaattctgaaaaaattcataacatatttgaaatacttttaagcttttgttgacacaagagccctgatgtcatgtgcrcaraaggccttgtaattgccacagagaacctcagaaagctttgttccaaagtgaatggttttctccacactctattgtgcacagctgctcagaatccacttctcagaaatactgcagatgttagtatggcaaacattaatgacagatttcctagctttgctgtagtttgctgaactcttcgctgtcctcttcattttctaacaacttcctttgagtagaggaggtgagcagaaacctaatatattctcatctttcaattgatttcagtctttcatctttccttatgaagacgaatcacagatt

SEQ ID NO: 85281 - DNA, 599 bp, Chicken  19866894383975_1
  misc_feature (1)..(106): n is any nucleotide
nnnnnnnnnnnnnnnnnnnnnnnnnnnnnnnnnnnnnnnnnnnnnnnnnnnnnnnnnnnnnnnnnnnnnnnnnnnnnnnnnnnnnnnnnnnnnnnnnnnnnnnnnntccccgtttggatagcctttgcaaacagaaaattgaaaatggcattaaaaacagcatatcgttatcttgctaatttaattattttttgatagcacacagagccactgcaaaataatctttgatgtgtctctgtaggacttgtccactggctgagagtttagagaagttttgatgtactgtgtttaaaagaaaaraaaaaaaacacccaacttttattgttattttaacctggatttcttcactatgtacagctgcataagttgccaatgtacagctgcacttatttgtttgggttgtgagaaatgaggtggctgcatctctgagaaaacatatcatagaactacacccagttttctcctaagcaaataatcataacctaatgataataaaaaccacagctagatgtttgttcttgagtgtcagaaagaaagaaacagaatgatacattatcttattagttcctatgttacatttctgttattgaaatatatgt

SEQ ID NO: 85282 - DNA, 600 bp, Chicken  19866894383976_1
ctcaatcccaagggctcctaatacaacattactctcaaactcacattacagagaatctttttttccccccttttaaaagtagagccttcaagagcattaatggaggatttcatttgaaagccaacaatacaaagcctcaaagcttttggaagggtctgagaacgcaccatgtgcaccattggccatacacagcccgcagccaaccgcacagctctgctgtgataagcaactgctctgcatatgcagacaggagaaagtggctgcatcaccttgagaactcatatggagtttcgtgtctcycatctcctgctctgctcccattctccactttatgcatccagagcacgcaaagccttctttgcccaactcctgtttccaaacccccaatgcctgctccatggcatccagactccaaactggagcatttcagagaaaacgatactgcgcattgtcacctcctgggctgccaaacacagagaggctacaggggaacaaagcagcccctgtgctctcttccttcccagagctgcactaaggctgcaggcagcagcatgatccccatgcatcaaaaaacagcaaatcaggaacaaggctgcccaa

SEQ ID NO: 85283 - DNA, 600 bp, Chicken  19866894383977_1
agctgccacccaacgcggtgcagccgctgccgtgccggctgctttccaacctggcatcgcggcgctggctgcacaacgggacccccgtcaatgcctcctacctggtgctgcccgagggggctctcatcctggtgggcagcccggagcgcgcgggcacatatgagtgctggtcactggaggagggcttccgcaagctgatggccagctactgcgtggctgtgcaggagcccggcgggaggggcttcaccgcgcccggagaccgtcagcacctcgcggagcacttcggccgtgggcagcatygcggcgcggctggacggcaagacctactggaccgagttcctggtgatgtccgggctgttcgccgccgccatgctcgtgctgatcctcttcctcctgcaccgccactgcgayggcgtgaaggcgctggtggagcccggggacgccggccggcaccagaaggcgccccgtaagccggtggagagcctgcccctgaacggcagcaacctgcccaatgccgcgcccgagcacaagggctaccaggcgctgcaggacaactacatcgtcagcacccccgtgcatgagccgccgggcaccacgcgt

SEQ ID NO: 85284 - DNA, 600 bp, Chicken  19866894383977_2
ccgagggggctctcatcctggtgggcagcccggagcgcgcgggcacatatgagtgctggtcactggaggagggcttccgcaagctgatggccagctactgcgtggctgtgcaggagcccggcgggaggggcttcaccgcgcccggagaccgtcagcacctcgcggagcacttcggccgtgggcagcatygcggcgcggctggacggcaagacctactggaccgagttcctggtgatgtccgggctgttcgccgccgccatgctcgtgctgatcctcttcctcctgcaccgccactgcgayggcgtgaaggcgctggtggagcccggggacgccggccggcaccagaaggcgccccgtaagccggtggagagcctgcccctgaacggcagcaacctgcccaatgccgcgcccgagcacaagggctaccaggcgctgcaggacaactacatcgtcagcacccccgtgcatgagccgccgggcaccacgcgtgccttctccgagtcggagaagcggcccctccacgtgcgggacagctttgtggaggtgtcccccgcctgccaaagaccccgcgtgcgcctgggctccgagatccaggactcg

SEQ ID NO: 85285 - DNA, 600 bp, Chicken  19866894383982_1
tgtatttttaatgtctgtatttctaataggccattttgataagaagcgaaatcaatgttgaagatgtttattgatgtcatcataaaggaaggcaaaagtaccatgtcaagtttttacattaatccttcctctgtattgcttatacaaagggggctgcttttagcatctctacttacatacagcattttcacattgtttatgaggtgcagcagtgatctaagtactcaccccgtttcagcagtactcaccccgtttcagctgtatctatatgtgctagtaaggctcagatgctagagaatmctcagctcacacagaaaaacccaaggaaattatcagactaatgatccatttagtcaaatgttctgtctccaacaatagtcgatactagatgcttcagaagaaaatataaaattgcatagtagataaatatgcaattacatgtctaagggaggactttcttcatgaactcaggggtgatgtcactacttgactttcttttatattttgattgctttcaaaatataaaccctttgcatcaacatggtgtagcaaatattcttatctgtaggttaatatgtgctctcttagataactttttca

SEQ ID NO: 85286 - DNA, 600 bp, Chicken  19866894383990_1
tgctctattattaaaaaaaactattaattatatgtctaaaagtgtcaaaatgcagaagtttaaaatattgtgtgggatatactattaccttgcagtaaaaacaccattgttattataatgacagctaaaagtacacagaaggtgacttttgcattagctgaatctgtacagagcactctattgagtgaattcagtaaatattccaaaacccttttaataaacatttttcaagactagtattagaatacccgatgacaaataattctaaaaataagtcaaactctcactttcagtgatgckagagacagtaacacattgctttcatgtattcattactgtctttcttctttagttcagacacctgcagatgttttagaattattaacttagcattttatcatttggttttggaagtcaacattaaagcaaatcctgacttgaaacagtttgccgtttaatcaaaaccaagtgagcaccatttcagaatgtatatattctcaaaagaactggtttctattcattattaattctttttatttcatacattaaaacatttctttcaartgtcattagtgtttttccattttttccaagggcttc

SEQ ID NO: 85287 - DNA, 600 bp, Chicken  19866894383990_2
ctaaaaataagtcaaactctcactttcagtgatgckagagacagtaacacattgctttcatgtattcattactgtctttcttctttagttcagacacctgcagatgttttagaattattaacttagcattttatcatttggttttggaagtcaacattaaagcaaatcctgacttgaaacagtttgccgtttaatcaaaaccaagtgagcaccatttcagaatgtatatattctcaaaagaactggtttctattcattattaattctttttatttcatacattaaaacatttctttcaartgtcattagtgtttttccattttttccaagggcttctaagggtttctttttaatgtacatttatgtttgttctttcccttttaaggctgctgttcacttgtccctagttttagtaagccacaaagttgtcatgcacatatcactaaaacacaaagacatcagtggccttatcatactggttaatctacagccctcaagtttaatatacaaaaatgcaacaagaagaaatgttacaagctgagattatatctgaaacacaggcttggaaatactgaatacatacattccagtctagtaagt

SEQ ID NO: 85288 - DNA, 560 bp, Chicken  19866894383994_1
ggatgatgggtttctctttttgagtgatttccagaggtgtactgataattcaaacaaacatgtaattgttaaaacacttgttccctgtgccctaatgcaaacagcagcacgacagcaacagcttatgaaccctgtttgtggcagggatgtggcagtggttagctgccatgtgtcacactgctggagcgtgctcgcaggctgcccatgctgcagctgcaatggctctggagctctgggaacatggggagccacctgcctgtgcacagtgtggggtgggcagtgcctggcacagagcattgygttgttagcacactccttggcctcatttcagctcatcctaatagaactttcacaggtggtacatgagtgggatatagggactcatcccagtggggctctggctggggtgagggcttctggggagaaagagggtgagttctgctacgtggaaacttggcaagctgtgccgttttccctcatggaatgttctttgccctgtttcgtttaagttgctgcatgaataggtgctgtggggagcagctgccaagcacaggccaacc

SEQ ID NO: 85289 - DNA, 600 bp, Chicken  19866894384001_1
gccatacctaacattgaaaagtgtagcatttctctcagttcttcacccttaatatgtgagatttccttgtgtcagccatgtcagacaaggaaacactgtttgcttttcccactgggaacttgaaggtaagggtgatttctgcaatacttgaaacacataagtctggattagactttttgaatgtcatgctccaaaattttaaatgaatattagaactttctctctgttcaatttttatgactttattttgaagtgctctaaattcattttgctaatccttatttttaatgcctatcaacwattttcaatgccaataaattgctagtgttcattcttggttggtgcttatatacatttataatagtaagtttattgttgatttaagatggtaagtgatcacacaagatatttatcatgtttgaaaatgaatgcaaaaacaactggtaaatacaaatgttagaagagcaaatctgtcacttctgatacaaaggttgcccaaataatctttttttcttccccttcctgtctctttgataagctctatgaggagtcatcactagaagtttcctatttgcttaggaataaatccaagcataaaag

SEQ ID NO: 85290 - DNA, 600 bp, Chicken  19866894384003_1
tttcctgatcccctttttaacagaatataacattatataaataaggcttatgttgtactcacacctgtgaatgaagttgacaaaagctgtgactagctctgtaaagttctactgttgttacgcattatgaaaaacagatcatttaaaattcagtcataaatttaagtcaaattgttgacttaaatttcatgtgccttaaattgccatctgtaaactgcttgttacataacctctgtttactgaacagggcttttgtaaagatagatggattaatatttttgaggtttttcagtagtatasgaaaaattgttatggtagtgttcccaagggaaaaggtaattatttcttcagtgcttggattgttcactaggtatagaacctagggctacactatgaataatgagaaataaagagacaaataaataaaaattgaatacatactcattagaagagcactgtccagcctatgcacagaaagggacaaaggtcatgttggaagttcagtggttggtcacggagcaaaatatgggatatgttaataaagacaaataataacaccaggaactgaactgaggctctccaaaccacagtagctgccat

SEQ ID NO: 85291 - DNA, 600 bp, Chicken  19866894384003_2
agtgttcccaagggaaaaggtaattatttcttcagtgcttggattgttcactaggtatagaacctagggctacactatgaataatgagaaataaagagacaaataaataaaaattgaatacatactcattagaagagcactgtccagcctatgcacagaaagggacaaaggtcatgttggaagttcagtggttggtcacggagcaaaatatgggatatgttaataaagacaaataataacaccaggaactgaactgaggctctccaaaccacagtagctgccatttcctaacagaaagtkamactaacttaaaaacctggtaaatttgtttcagcgttggttttgtgtaaaatttcagaaatagataaattatctgaagaagactggttttactyatgcagaattgttctattaataatgcatgatggcactaataaataaaatcccayagtacaccataaaaatattgttaaaataacttcttttaatagtgtaattgaagttaattcctcttgaagaaactgattcaaactatatagcccttgtgacagtgaatagttctggcatgttcctgctctactgtccatctgtttatgagaa

SEQ ID NO: 85292 - DNA, 600 bp, Chicken  19866894384003_3
tgttcccaagggaaaaggtaattatttcttcagtgcttggattgttcactaggtatagaacctagggctacactatgaataatgagaaataaagagacaaataaataaaaattgaatacatactcattagaagagcactgtccagcctatgcacagaaagggacaaaggtcatgttggaagttcagtggttggtcacggagcaaaatatgggatatgttaataaagacaaataataacaccaggaactgaactgaggctctccaaaccacagtagctgccatttcctaacagaaagtkamactaacttaaaaacctggtaaatttgtttcagcgttggttttgtgtaaaatttcagaaatagataaattatctgaagaagactggttttactyatgcagaattgttctattaataatgcatgatggcactaataaataaaatcccayagtacaccataaaaatattgttaaaataacttcttttaatagtgtaattgaagttaattcctcttgaagaaactgattcaaactatatagcccttgtgacagtgaatagttctggcatgttcctgctctactgtccatctgtttatgagaaat

SEQ ID NO: 85293 - DNA, 600 bp, Chicken  19866894384003_4
gagacaaataaataaaaattgaatacatactcattagaagagcactgtccagcctatgcacagaaagggacaaaggtcatgttggaagttcagtggttggtcacggagcaaaatatgggatatgttaataaagacaaataataacaccaggaactgaactgaggctctccaaaccacagtagctgccatttcctaacagaaagtkamactaacttaaaaacctggtaaatttgtttcagcgttggttttgtgtaaaatttcagaaatagataaattatctgaagaagactggttttactyatgcagaattgttctattaataatgcatgatggcactaataaataaaatcccayagtacaccataaaaatattgttaaaataacttcttttaatagtgtaattgaagttaattcctcttgaagaaactgattcaaactatatagcccttgtgacagtgaatagttctggcatgttcctgctctactgtccatctgtttatgagaaataataaaattactgtaatcaaattgtatatattatggtgtttcagatgctattatgtgtagtaattactggcaagtatcaacccataaaaatga

SEQ ID NO: 85294 - DNA, 600 bp, Chicken  19866894384003_5
tatgcacagaaagggacaaaggtcatgttggaagttcagtggttggtcacggagcaaaatatgggatatgttaataaagacaaataataacaccaggaactgaactgaggctctccaaaccacagtagctgccatttcctaacagaaagtkamactaacttaaaaacctggtaaatttgtttcagcgttggttttgtgtaaaatttcagaaatagataaattatctgaagaagactggttttactyatgcagaattgttctattaataatgcatgatggcactaataaataaaatcccayagtacaccataaaaatattgttaaaataacttcttttaatagtgtaattgaagttaattcctcttgaagaaactgattcaaactatatagcccttgtgacagtgaatagttctggcatgttcctgctctactgtccatctgtttatgagaaataataaaattactgtaatcaaattgtatatattatggtgtttcagatgctattatgtgtagtaattactggcaagtatcaacccataaaaatgagatactgcatttttggtatctaaatgagaacaaaaacatatgatcaatgattta

SEQ ID NO: 85295 - DNA, 600 bp, Chicken  19866894384013_1
taccatcccaaattccatttgctaaagtaactggaaaaattaccactgctctccaaatacaatgggatttatttattcattcttacaaaactgccattagaaaagacttgcacagtatttatttcagttttcacagttacaagtaattgaggaaaagcttttgctttctgcttatatattttcaaagatgaatgaaagaaaactcaccataactgaaacacataagtggcatagcatgtttatgcaggaataaattgctccaagttttctcagcaaggcagcagccacataagctacttwcatgcttgccatttgcagaactagcctgaatacttttttcacacttactgtagcttactatctcctttttagtagccagataataacgtattaattgtgaaagtgggaaatgatttagcaggtgtataaaacaaagggagaaataatgaaggagaccgatcatgcgtgagcatctaattaactgatatttgaatgcccaggaagttcatgtctgagtctcccaaaagttcccatataaagactcaattagctcttgcttgagtgttcaactgcagcccaattcacacatgaatgtccaac

SEQ ID NO: 85296 - DNA, 600 bp, Chicken  19866894384015_1
gataaacagtaaaaacgtaaagcaaaatagataaaattggaaaaataacaaaaacaaacaaaaaacccccatcaaattacagcacttagttgctgcagaagaaaactgctatgaattatggaaacactttaaagcttctcaaaagctacaaagatatttctataaagaaaatagctaggtaaacaatgtactggtaagtggttgttaatagttactggagcatttttatccaagcatagaatgttataataccacagtgtctgtaagtttaaaaagatgcattttaaatttgatggcagrgaactgtacaggctgcaaacatttggattttcaaagctttgattattaktactgtcaatgcctgtacctaagaagtgttcattacaaattcttcccatattcacagaaaggtttggtttggaagggacctttaagatcatccaattccagcctcctgctatattcattccaaattgatcagtgtctatagtatccagtgaattttacatcaactccacataaaaatcaggcactgcaaacacagtgaaaaacaaaccatgcttgagaaaacatacagagcctttacttaccttgccagac

SEQ ID NO: 85297 - DNA, 600 bp, Chicken  19866894384015_2
aaaaacaaacaaaaaacccccatcaaattacagcacttagttgctgcagaagaaaactgctatgaattatggaaacactttaaagcttctcaaaagctacaaagatatttctataaagaaaatagctaggtaaacaatgtactggtaagtggttgttaatagttactggagcatttttatccaagcatagaatgttataataccacagtgtctgtaagtttaaaaagatgcattttaaatttgatggcagrgaactgtacaggctgcaaacatttggattttcaaagctttgattattaktactgtcaatgcctgtacctaagaagtgttcattacaaattcttcccatattcacagaaaggtttggtttggaagggacctttaagatcatccaattccagcctcctgctatattcattccaaattgatcagtgtctatagtatccagtgaattttacatcaactccacataaaaatcaggcactgcaaacacagtgaaaaacaaaccatgcttgagaaaacatacagagcctttacttaccttgccagacacaatcttctcataaatttgaatggggttgatctgcaaagaatggggga

SEQ ID NO: 85298 - DNA, 600 bp, Chicken  19866894384020_1
acaagacgaaaggaggttagaaacttgtcaggcataacctgtctgctcaggggaggtaaaagctcagtttctttgaaacgcacatatataacgttcaggaacatctgtacatccactgttaaaaaaatatatgaaatcttgccattgtttttgctctgtgctcacagtaacctcagcatcagctttgactgctaagcttcatgcaaagcttttgtggtggaatgtcagtgttgatatgtttgtgatcttgcaggccgttactgggaaatggtacaaaggctgaaaataaatcagttttayggagcacctacagctatacgcttgctgttgaattatggagacaagtgggtgaagaaatacgacagatcatccctgaagacgctgggatcaggtagggagcataaaactttcctgtggtaaagatacagggttatagctgatgagagtgaagataccagaagaatatggttataaacagctgataaagtggactccccttctggattttcagttattgtctcagcagaaggggaaacaaactggagacactgagcctgcatgtgattgtccacttcctagcttatagtgcagaattgtatt

SEQ ID NO: 85299 - DNA, 600 bp, Chicken  19866894384027_1
tgagggcacttgagtgttgtctggcagcacccatgcttctgaacaacttaagcagaagcatcatctcaatttctgctggcatcatctagacacctctaccaaatttccaagctggcctctgttctgccatcctaggcagatgctgaatgccacctacatgtgagcctacccaggatctgtggcaagacatgggaccatttcctgaatgaatggtaagaagtactggatgtaatgaagcattgtctccaacaaagacatgggcattgtttaatgattgacgctatggggagaagaatgttsgtagctctgctgagcacttctactgatgcatttgcaattactaatgaggttgaactaatattctggaaataataaacagggagaattgtgttatctggaaacagctgattctcccatccttcaacagcttagatttagttaaaataaccaacaattcttcctctytttctaagtgaaagggccagactcaagttagtgtagctttatttctgactgaactttttggacaatggaaatcttaactctagcatagctaggtgtgaattagttcatgaagatctgtgtagttagtgaccttag

SEQ ID NO: 85300 - DNA, 600 bp, Chicken  19866894384027_2
ctacccaggatctgtggcaagacatgggaccatttcctgaatgaatggtaagaagtactggatgtaatgaagcattgtctccaacaaagacatgggcattgtttaatgattgacgctatggggagaagaatgttsgtagctctgctgagcacttctactgatgcatttgcaattactaatgaggttgaactaatattctggaaataataaacagggagaattgtgttatctggaaacagctgattctcccatccttcaacagcttagatttagttaaaataaccaacaattcttcctctytttctaagtgaaagggccagactcaagttagtgtagctttatttctgactgaactttttggacaatggaaatcttaactctagcatagctaggtgtgaattagttcatgaagatctgtgtagttagtgaccttagtaaattattccttaattatataaagatttgaagagaacacttcctgagctcacacagtaccattacacttggtaaattatattgtatctttatttaaatgaactgttaactctattaggccagtgtctattcctattttgactcattagcaaaatcacaatcagt

SEQ ID NO: 85301 - DNA, 600 bp, Chicken  19866894384029_1
cgacttgttttcccagtggaagtaaattttctcaaagaaaaatatgttcacacagctattgaagaatttatctggtcacagtaaattattcattaaatacatttggatgtgtaatattaacatacgattcatgctttgatttcattatttatttaaaatgaataatgtgtgggttattctcaatgggaaagacagttctcttcatctccaccctggtcacatgcactgtcccaatccattgtgccagtaccatcactgaagtgggaagctgcctgaggaaacgggtctacctgaaagctrttgaacttgagtacaagtctcaggaacaaaccaccagttcaggaagcagaccacattcacatcagttttaagccacmtctgccactgttgttaggcagtgatttaaggacctgtccatgcacttttgtgtacataaaggatatgcttatacttggaaataaaaaaatatgcaacattctgcagtcaatctatttgtcatctctttcttcagaatgctaaactctctcactggtaaagaaaatgcttggactggactagcagtacttacatgagaagctcaatagctcaatcttaactgaa

SEQ ID NO: 85302 - DNA, 600 bp, Chicken  19866894384029_2
acagtaaattattcattaaatacatttggatgtgtaatattaacatacgattcatgctttgatttcattatttatttaaaatgaataatgtgtgggttattctcaatgggaaagacagttctcttcatctccaccctggtcacatgcactgtcccaatccattgtgccagtaccatcactgaagtgggaagctgcctgaggaaacgggtctacctgaaagctrttgaacttgagtacaagtctcaggaacaaaccaccagttcaggaagcagaccacattcacatcagttttaagccacmtctgccactgttgttaggcagtgatttaaggacctgtccatgcacttttgtgtacataaaggatatgcttatacttggaaataaaaaaatatgcaacattctgcagtcaatctatttgtcatctctttcttcagaatgctaaactctctcactggtaaagaaaatgcttggactggactagcagtacttacatgagaagctcaatagctcaatcttaactgaagcaaattttctacaattaagacctagaggcttttgtttgtttgttcatttgtttttttgtttgctagaacttagtgg

SEQ ID NO: 85303 - DNA, 460 bp, Chicken  19866894384033_1
actggatctggtggagcagagagctcctaaaagggtttagggttaagagcaagaaggtaacaggagagttcatgtttgattaggctggagaagcaaaggttctgaaggcatctaatgtctgttttcagccatctaattgtggttatccacagagcatgactgcccagagaggccatgaagactcagtttctggagacattcaaaactcagctttatcagagatcttaaaaactttatctaacttcaaagttagaacacacagagcagatgggatgtccagatgactcttccaactttttwttttcttctatatttttacatgcagacataaagcatgccactctggaaagcttcccaagagtccagatagcagttaagtaggtgttttaaggattacagtatggttatttgactactgcaaactggtccggctcagatctgcataccgtagtgcaaagaa

SEQ ID NO: 85304 - DNA, 599 bp, Chicken  19866894384036_1
  misc_feature (1)..(1): n is any nucleotide
naatactaacttcattctggctttcagattcagcagttcagcagtcctttatgaaggacaaaggagaatagcccagacacggttaacaaggagcaaagcccatttcactagcaaatagcacaaaacttctgacaatgctctggaacaaaatttgatgacacatctatggatataggtttgtccagaaataaactggagacataccgttaataggaagctttgagagacaccttcattcaattcaggtaaccccaaatccaatctatatgaagcaggagaaggcaaagaagttttagagargaagatggtgatgtaggtgtgagttagcatgctactcaaactatagactatacacaaactataaactatacagctgaacattaacctggacaacagaaagatttttataaatatatattcttagatttcctataaaaggaaccagaacagctctgctggcgtagaataatcacattctaggggaaaactaaaagactgaatgccaggtgtaagagttcagaaatccccgagcatcttctctgcatgctcctacagcagttttgtgctttggaattcaaacagtatcctaagtgttcaag

SEQ ID NO: 85305 - DNA, 600 bp, Chicken  19866894384039_1
caagcattgccacatccccgcgtcctgccgtacggctctgtgagagcggcaccaaaggatcctcaactcaaattacacagaaatcggagggcaaaggcaaaactcgccggtggggagagctgaggctgagttttgcgtccgcgtgtccttccagttcatagcagagggacttcggtgagaatgagctctgagctcgggcagggatggaacgggggtccccctggctcccacctcccgggtctgctcctcggtggctttgagtccgagatcattttggggggaggatatgcaccgggcagrggggaggacacacaaagcaaccccccgtgctcagcggctgaagccggagccgctcycggggctgctggcttttcggggccgctcccgttcccggttccccgccgcccccgttacctccgctccgctgggcgctgggcagggcgagcccagcagtgccgctccgtgccgcgctgtcgctccgcgccgctctgcccgcccggccctggccccgccgttttatggccgggaaagctgcgagcgccttcccccggcggccccggacccgcctcgcctccgccttctctccccgccttctcccgt

SEQ ID NO: 85306 - DNA, 600 bp, Chicken  19866894384039_2
ggatcctcaactcaaattacacagaaatcggagggcaaaggcaaaactcgccggtggggagagctgaggctgagttttgcgtccgcgtgtccttccagttcatagcagagggacttcggtgagaatgagctctgagctcgggcagggatggaacgggggtccccctggctcccacctcccgggtctgctcctcggtggctttgagtccgagatcattttggggggaggatatgcaccgggcagrggggaggacacacaaagcaaccccccgtgctcagcggctgaagccggagccgctcycggggctgctggcttttcggggccgctcccgttcccggttccccgccgcccccgttacctccgctccgctgggcgctgggcagggcgagcccagcagtgccgctccgtgccgcgctgtcgctccgcgccgctctgcccgcccggccctggccccgccgttttatggccgggaaagctgcgagcgccttcccccggcggccccggacccgcctcgcctccgccttctctccccgccttctcccgtcgctgcgaaccctcccggcactggggagctcgggatgggagataccgagcgggtgt

SEQ ID NO: 85307 - DNA, 600 bp, Chicken  19866894384042_1
ttatgtgaggaactctgtggtccgtgttaaatttataatgaggattttatttttaggtcaacgctccaggtgcagagtaaagctgttagtggaatgttgatggccaggtagcactgctgtcagctgggagggagggaggaggacaagaaaaagggataaagcacgaaatacctctttatccttgggatactcatcgagctctgagggagaatacacttttgtttcttgagtgttgagtgtctcctcccatctatctctatgtagttggccaagttgtggtggatttctttttatgcaggraaagtagttagcarttgcttgccttctccacgttgaaatgcagtggttggtaaatgcatttaaaatttccaaagcacccccctgaaaataactgcttaatgtgagaggtctgtacttatcttaattaaagagaacaaagccatgtgctttgtggtggcctgacgtatacaatcagtgcctgaattctgttattttccaccactgtagctgccttatcagagctcgtggtaggactgtcagtgacttttattagtagcttgcattactaatgcttggctcttttaccatctcatagaagcc

SEQ ID NO: 85308 - DNA, 600 bp, Chicken  19866894384042_2
ctgtggtccgtgttaaatttataatgaggattttatttttaggtcaacgctccaggtgcagagtaaagctgttagtggaatgttgatggccaggtagcactgctgtcagctgggagggagggaggaggacaagaaaaagggataaagcacgaaatacctctttatccttgggatactcatcgagctctgagggagaatacacttttgtttcttgagtgttgagtgtctcctcccatctatctctatgtagttggccaagttgtggtggatttctttttatgcaggraaagtagttagcarttgcttgccttctccacgttgaaatgcagtggttggtaaatgcatttaaaatttccaaagcacccccctgaaaataactgcttaatgtgagaggtctgtacttatcttaattaaagagaacaaagccatgtgctttgtggtggcctgacgtatacaatcagtgcctgaattctgttattttccaccactgtagctgccttatcagagctcgtggtaggactgtcagtgacttttattagtagcttgcattactaatgcttggctcttttaccatctcatagaagccagctgttccttcaa

SEQ ID NO: 85309 - DNA, 600 bp, Chicken  19866894384046_1
taatggtaaaaaataagcacagtttggcccacacttcttacatcaataatactttcagcacatgtcatttcctacatgtattttcatgccattaatacccaacgttttcagactttcaacttctgttagcactggtaactaatcatttctatcagtaacagacttggggctcttctcactgtggttgtagaatagagaaaaattaaccatatactttgggggtatgtgccatttatttcatgattggctcttacattagctatgcagctctactgtgaatttctgtattcctttatttayttatactgtgctacactttggaagaaaggcaaaatgagaagaaataggccatgtggcgtgttctggggaatgccttctgaaataagggttatcattgaacacaggacagtaaaatacagtaatttgcctttagcattctgtgaatgcattttctccttttcactttcttcttaaatcaatacagagcaatcagagcaatacatttcattactttgaagagcaatacatttcagtgccatgattctgcatatgcaagataagtgtacttagagaaaacaaaactgataatatttgtaaagg

SEQ ID NO: 85310 - DNA, 599 bp, Chicken  19866894384053_1
  misc_feature (1)..(108): n is any nucleotide
nnnnnnnnnnnnnnnnnnnnnnnnnnnnnnnnnnnnnnnnnnnnnnnnnnnnnnnnnnnnnnnnnnnnnnnnnnnnnnnnnnnnnnnnnnnnnnnnnnnnnnnnnnnntttcttccttagtcaacctattggaattataaggtaaaccacctttcttagggatcaatacacatctgttcttcatttaagaattaatcttcagtttcactagtctttcctatggattagggagaaaatgcaccttttctaactgtatatctagttacattccattttttttgtcaggataggggcatcacrgggaagctgtcacttgaaactgagcagactaartatactcgactgaatgactccagcactgtcaacatgatccactagtgtaattaagaaaggagatatctcaaagctttacagtattcaagaagtatcagatcatgctcattgaaaagggatggaaacattcttttttcccagcacagacacaagttttatgtttcgcccagggctgcttaccctggagctcagcacatcccaagagctgcactccgttgctatcatcattgctgaattgcaacctctttggaagagtcattcaaatc

SEQ ID NO: 85311 - DNA, 599 bp, Chicken  19866894384053_2
  misc_feature (1)..(75): n is any nucleotide
nnnnnnnnnnnnnnnnnnnnnnnnnnnnnnnnnnnnnnnnnnnnnnnnnnnnnnnnnnnnnnnnnnnnnnnnnnntttcttccttagtcaacctattggaattataaggtaaaccacctttcttagggatcaatacacatctgttcttcatttaagaattaatcttcagtttcactagtctttcctatggattagggagaaaatgcaccttttctaactgtatatctagttacattccattttttttgtcaggataggggcatcacrgggaagctgtcacttgaaactgagcagactaartatactcgactgaatgactccagcactgtcaacatgatccactagtgtaattaagaaaggagatatctcaaagctttacagtattcaagaagtatcagatcatgctcattgaaaagggatggaaacattcttttttcccagcacagacacaagttttatgtttcgcccagggctgcttaccctggagctcagcacatcccaagagctgcactccgttgctatcatcattgctgaattgcaacctctttggaagagtcattcaaatcgtttcatacaattccagaccttcccttttgtca

SEQ ID NO: 85312 - DNA, 600 bp, Chicken  19866894384054_1
agaatttgtgggttttacagagttgtggagatctcaggtattgcattctacctgtcttaactgtacctgtgcaagttctgaaatgcatccatcactttaggatttcatactcgcggtcccacagcaggagcttcctgtgcattctgatttatgtaaaaagccctttcagaccaaaagttttttataccatcctggggttggaaagcaaatggaaggtacttaggttctacttctagattgaagctcgtcgctttcctttttaccaccgcctttagattcattttgttaccagtatcgccrtgtagacgtgaactgaatcttcagtgataccaaatagttgattattcttttgggttttccatggttgactagcttagcccagaaaaaaagctacattttaaacataagagtaattatatccatatgtaatacgcatcacaacttgcaggctctgacttccactccgttatctgtcgtgttcccacctcagaattcataaataaccactgtataacaggaaaagggtggagaccctgcacactgcatgttggttgtaacttctgtcttcaggtttccaacttcaagatgaccacgtttacg

SEQ ID NO: 85313 - DNA, 600 bp, Chicken  19866894384059_1
aaataaataaaagttgggcttagcttatttttgccttcttttttttcgctaactaagggtaaaaagctaccactacaagtcatattctagaggtgaaaactgtgttgcctgtattaacaattacagttacacttccaaacttagctaactgactttatttctttgaaaacagaattgtccattcgtgatcaaaacaatgccaggagttgaccctttgttctagcttccctttttgtcatatggaggccatacacagatgctgtactacaagggcaggctccaggaaagaccttttttgcmctagaaggattaaggaaattttttgcactagaagaagtgtgtgcagcatgtctgctttatgatactttgttatataagaaacttagagcctggtgacactcattcactaatggtagaaaagtgctggtaaacctgaaatagaaagtgctattgaaatgcaatattacttaggaggatatttacgtaaccctttgcttttattggtcagtaaaccttttttaccgtgccacattgccagagtaatacatctttgcttttcttcactcatgtttccagtttaatagtaacgtgycctacagc

SEQ ID NO: 85314 - DNA, 600 bp, Chicken  19866894384059_2
tttttgcmctagaaggattaaggaaattttttgcactagaagaagtgtgtgcagcatgtctgctttatgatactttgttatataagaaacttagagcctggtgacactcattcactaatggtagaaaagtgctggtaaacctgaaatagaaagtgctattgaaatgcaatattacttaggaggatatttacgtaaccctttgcttttattggtcagtaaaccttttttaccgtgccacattgccagagtaatacatctttgcttttcttcactcatgtttccagtttaatagtaacgtgycctacagcagtgactacactcctcatcgtctgagcttggactggttttctctagaataacattcctggaagatccttccatgagaactgaattttgaaggcagttataaagctttggtcaattcctgtttcttaatactgacaaatgcaaaagcagactcagaagatcatcgtcacattcctttccacagcaataaaaggtaatacaaggcaacgagaacaggaattgggttcccaacatgaaatttacaccattaataactgcagaagttgcttgggaactattactattaaattccta

SEQ ID NO: 85315 - DNA, 600 bp, Chicken  19866894384061_1
cacagaagtttggagaaaggctccagagaaatttctatgataaattttcagttccacactcaaacgttctcagataacaaccacaaggccataataaatgcaagagatagatacaggatgtgcagttgatgtatgaataaggtacatggaaattttaatccagcctgagactaactcccctttcaagaacgaaaaagagcattggagaactcactgacatgcttttgtaaatgaattattcaattaagagactctcttatcaccttcttctgtagttggatgaaatacttgaatacacaytgacgaatgagtattccttgattattttttatttttaaagaaatgtcacactaagctcatgccccccctttctaccctcttagaatacccccacctattctatcataaaataatcatttgctgcttgatctaatgatatgactgatttcaggaatcaaagctgcttgttcagaactgagacaagatcaggcgtattttctcttactgtccaagttataaaggatttaaagacaaccagatggaagatcaggcatataaatcagatgacctttggcctatttcagaaaacagggactcaat

SEQ ID NO: 85316 - DNA, 600 bp, Chicken  19866894384074_1
gcagaggaacgggctggttctatagaggtgtgacctgactttccaacctgcgtggtgacttggctgtcaggttattctggcagagatttctccctgtctggggtctaggaagcattccaactgccagtgcagcatttgtggctgaggcatgctgtgctcgtgcccttggtttggtcctgctggaggtgaccttcctaggcaccgtgctgctgtacaccacgctgatgagccacgtgttttaatatcccataagatctggtgtgttatccaatgcatggcatgccttctttacataaggasaagacwgaaggagaatagctggtctgtgtgtttaacttgctgttggaatatgtcactgggtgtctcatgtttttgagatattttctcttagtgccctctgggctaaaataacaagggtctgtccaggagtcagaagtcagcctgctggctcagacctcggtaggattcagatatgattcctaatttgggaaattcctgctccaagaagtccctggaggagaatggctgaggaattccctgattcttattttaaagcgtgaatcactgaggtccagagtaaggctagtgagctgaccaaag

SEQ ID NO: 85317 - DNA, 600 bp, Chicken  19866894384074_2
gaacgggctggttctatagaggtgtgacctgactttccaacctgcgtggtgacttggctgtcaggttattctggcagagatttctccctgtctggggtctaggaagcattccaactgccagtgcagcatttgtggctgaggcatgctgtgctcgtgcccttggtttggtcctgctggaggtgaccttcctaggcaccgtgctgctgtacaccacgctgatgagccacgtgttttaatatcccataagatctggtgtgttatccaatgcatggcatgccttctttacataaggasaagacwgaaggagaatagctggtctgtgtgtttaacttgctgttggaatatgtcactgggtgtctcatgtttttgagatattttctcttagtgccctctgggctaaaataacaagggtctgtccaggagtcagaagtcagcctgctggctcagacctcggtaggattcagatatgattcctaatttgggaaattcctgctccaagaagtccctggaggagaatggctgaggaattccctgattcttattttaaagcgtgaatcactgaggtccagagtaaggctagtgagctgaccaaaggcacaa

SEQ ID NO: 85318 - DNA, 600 bp, Chicken  19866894384090_1
taaaacatactccaagcagttttttcttactaaacttaatactctttccttctgtcctcctccccgtactttgtcataagactaactgatatgggggaaaagggagtagcctaaaagttagtgcaagtattacttgcatttgagtgttaacctttccttgtcgtgggaatccttataaaatgagcctctaccttcctatcactaataatcccaggggggaaaaatggtgactgtaataacgtatgaaacagtaagtgttagtggctcttttgccctgtattaatgatagggtttgggccragtaagcttctgtaaggttagctgtaggagtggtggttttgagtagaaacagtgctggatgcatccctgcacaactgcamttgagtgagaaacttcttacgaggagaggagttcagtttttcaagagtcactgtaggttttctgtggtgcacttgtgggttacacttgctctactgtaaatatggttaagaatcagtgttttctttgcacttattatgtcattagtatcccttttcacatttgtaatagcactcttccttctctcgatccatatgtttaactaatgcyraaacaatagcc

SEQ ID NO: 85319 - DNA, 600 bp, Chicken  19866894384090_2
actaactgatatgggggaaaagggagtagcctaaaagttagtgcaagtattacttgcatttgagtgttaacctttccttgtcgtgggaatccttataaaatgagcctctaccttcctatcactaataatcccaggggggaaaaatggtgactgtaataacgtatgaaacagtaagtgttagtggctcttttgccctgtattaatgatagggtttgggccragtaagcttctgtaaggttagctgtaggagtggtggttttgagtagaaacagtgctggatgcatccctgcacaactgcamttgagtgagaaacttcttacgaggagaggagttcagtttttcaagagtcactgtaggttttctgtggtgcacttgtgggttacacttgctctactgtaaatatggttaagaatcagtgttttctttgcacttattatgtcattagtatcccttttcacatttgtaatagcactcttccttctctcgatccatatgtttaactaatgcyraaacaatagccctgtttttatcttaatgccttgataccagatacttggaacaaaagtaggtaatttgtaccctgaccgtatttccaacata

SEQ ID NO: 85320 - DNA, 434 bp, Chicken  19866894384090_3
gggtttgggccragtaagcttctgtaaggttagctgtaggagtggtggttttgagtagaaacagtgctggatgcatccctgcacaactgcamttgagtgagaaacttcttacgaggagaggagttcagtttttcaagagtcactgtaggttttctgtggtgcacttgtgggttacacttgctctactgtaaatatggttaagaatcagtgttttctttgcacttattatgtcattagtatcccttttcacatttgtaatagcactcttccttctctcgatccatatgtttaactaatgcyraaacaatagccctgtttttatcttaatgccttgataccagatacttggaacaaaagtaggtaatttgtaccctgaccgtatttccaacatacataatgaggcagcaaagccttttaaatttaatgaaatttgg

SEQ ID NO: 85321 - DNA, 433 bp, Chicken  19866894384090_4
ggtttgggccragtaagcttctgtaaggttagctgtaggagtggtggttttgagtagaaacagtgctggatgcatccctgcacaactgcamttgagtgagaaacttcttacgaggagaggagttcagtttttcaagagtcactgtaggttttctgtggtgcacttgtgggttacacttgctctactgtaaatatggttaagaatcagtgttttctttgcacttattatgtcattagtatcccttttcacatttgtaatagcactcttccttctctcgatccatatgtttaactaatgcyraaacaatagccctgtttttatcttaatgccttgataccagatacttggaacaaaagtaggtaatttgtaccctgaccgtatttccaacatacataatgaggcagcaaagccttttaaatttaatgaaatttgg

SEQ ID NO: 85322 - DNA, 600 bp, Chicken  19866894384093_1
agacgcctgccatgaacccaacactgagcagccagcagtcctggaggcagcagcaggtgtcctcctgcacctcctcgctggagggccgaagggggagaacttaccattgaaggcaactatctgatctgtgctgttgcggagctccaacaggacattagtgtaggaaggatggaaaaggtacagcttctgtagaggagcagctgatatctgtaaccaacacgacatgctcagttatcccaaatagcaggctcagccattacctcatgttcaacagagtgcatgcagtcggatatctgtgcrtggccaacctatcccacctgacgccaccagcaccggtgctgggattttactgactgcttggtgccttactctccagcccgaccttcctgcaaacaacaggcctgtctgctgtgtgaaggagacagatttgccccagggctgacagactcagcaagaaaagcacaggaagttcagctggtgttcaggcatcctccaagacacaaactgtcacttaacactgccagccactgctccagcagggctgtcacacagctgagcaacacatcatggccatcagacactgccctggagcacagrgag

SEQ ID NO: 85323 - DNA, 600 bp, Chicken  19866894384093_2
gcrtggccaacctatcccacctgacgccaccagcaccggtgctgggattttactgactgcttggtgccttactctccagcccgaccttcctgcaaacaacaggcctgtctgctgtgtgaaggagacagatttgccccagggctgacagactcagcaagaaaagcacaggaagttcagctggtgttcaggcatcctccaagacacaaactgtcacttaacactgccagccactgctccagcagggctgtcacacagctgagcaacacatcatggccatcagacactgccctggagcacagrgaggatattactgtggccatgagaaatcactgcgtgcagtactgctgcagaggctccaggtcaaacagcagcagattcagaggtgctaacccagcagcctctcaactccaacacagcagcacactgaggcaagcctatggacaatccagtgcctttgctcatacagacagtaagtccattttctctacgcagccaggctgaggatggtgaatgttgctggtgccacrcactagctgccagcagggacattgcaatggacactgtgaggaccttgtacagacaagaccacatgcctgctgc

SEQ ID NO: 85324 - DNA, 600 bp, Chicken  19866894384093_3
ccactgctccagcagggctgtcacacagctgagcaacacatcatggccatcagacactgccctggagcacagrgaggatattactgtggccatgagaaatcactgcgtgcagtactgctgcagaggctccaggtcaaacagcagcagattcagaggtgctaacccagcagcctctcaactccaacacagcagcacactgaggcaagcctatggacaatccagtgcctttgctcatacagacagtaagtccattttctctacgcagccaggctgaggatggtgaatgttgctggtgccacrcactagctgccagcagggacattgcaatggacactgtgaggaccttgtacagacaagaccacatgcctgctgcacgcagaccggactgatcagagacgtgtggatactccacaccctgcacagaacgatgccgtgttagtggaacacatggaactgaatgtgaacactgagaaaacggtgtggctccagacaattctgactctgagtgtagaaaaaagcaaccatkcagcagcactactcaccgtttcatttcctgctacttggtattcaccccagatgaggaaggtggaccggtgatca

SEQ ID NO: 85325 - DNA, 468 bp, Chicken  19866894384093_4
tttgctcatacagacagtaagtccattttctctacgcagccaggctgaggatggtgaatgttgctggtgccacrcactagctgccagcagggacattgcaatggacactgtgaggaccttgtacagacaagaccacatgcctgctgcacgcagaccggactgatcagagacgtgtggatactccacaccctgcacagaacgatgccgtgttagtggaacacatggaactgaatgtgaacactgagaaaacggtgtggctccagacaattctgactctgagtgtagaaaaaagcaaccatkcagcagcactactcaccgtttcatttcctgctacttggtattcaccccagatgaggaaggtggaccggtgatcagcagtagaaagtgtggctggcctggggctctctgctctagagttcagcttcaggtcccattggactgctccagatccaccctcaacaatcataa

SEQ ID NO: 85326 - DNA, 599 bp, Chicken  19866894384098_1
  misc_feature (1)..(29): n is any nucleotide
nnnnnnnnnnnnnnnnnnnnnnnnnnnnnaaggaggtgctggctggcgatggcagtgcgtcccgcctccccgcctctgcctcgccggggggagccgagccctgcgtcccccgcacgcagccacgccagccccccgcggtgcctggggacgggaggtggggatggtggctttacgggcacacgggtgcgaggctccacgcagagcctcgggcaaccccggagtcaatggggggatacgggaacacccacctctaccccaacctctgtctcatccccgtgctccagggatgccccagtcccrgccaaacctcaccagctgaaggatgcccagctcccagacccctcctggtccctctccccgggaggagccagcaaccwgagagcccctccactgcccccacartgggctgacacagcctggcatgagtaggcaggggttaaactgccctccccatctgcatgtagccaaaggaaatacaaagtgccagagtcatcaaccccaatatgtcagcacgccagccaagcgttcagcctgccctcctcccgcctgcacccgcaccactgcccttgtcctgctgctgcgggcggcttcccaagcta

SEQ ID NO: 85327 - DNA, 600 bp, Chicken  19866894384098_2
gcctcgccggggggagccgagccctgcgtcccccgcacgcagccacgccagccccccgcggtgcctggggacgggaggtggggatggtggctttacgggcacacgggtgcgaggctccacgcagagcctcgggcaaccccggagtcaatggggggatacgggaacacccacctctaccccaacctctgtctcatccccgtgctccagggatgccccagtcccrgccaaacctcaccagctgaaggatgcccagctcccagacccctcctggtccctctccccgggaggagccagcaaccwgagagcccctccactgcccccacartgggctgacacagcctggcatgagtaggcaggggttaaactgccctccccatctgcatgtagccaaaggaaatacaaagtgccagagtcatcaaccccaatatgtcagcacgccagccaagcgttcagcctgccctcctcccgcctgcacccgcaccactgcccttgtcctgctgctgcgggcggcttcccaagctactgccctcagccacatcctgccctgcatgggggatgggctcagcccaggtgatggggacagctgggagctgtgtggga

SEQ ID NO: 85328 - DNA, 600 bp, Chicken  19866894384098_3
gcgtcccccgcacgcagccacgccagccccccgcggtgcctggggacgggaggtggggatggtggctttacgggcacacgggtgcgaggctccacgcagagcctcgggcaaccccggagtcaatggggggatacgggaacacccacctctaccccaacctctgtctcatccccgtgctccagggatgccccagtcccrgccaaacctcaccagctgaaggatgcccagctcccagacccctcctggtccctctccccgggaggagccagcaaccwgagagcccctccactgcccccacartgggctgacacagcctggcatgagtaggcaggggttaaactgccctccccatctgcatgtagccaaaggaaatacaaagtgccagagtcatcaaccccaatatgtcagcacgccagccaagcgttcagcctgccctcctcccgcctgcacccgcaccactgcccttgtcctgctgctgcgggcggcttcccaagctactgccctcagccacatcctgccctgcatgggggatgggctcagcccaggtgatggggacagctgggagctgtgtgggagggacgatgccatgcaggacaggtg

SEQ ID NO: 85329 - DNA, 600 bp, Chicken  19866894384099_1
accgggcttaagactttcttttagtcagggctcatgaaacaatccatgtgtacatattaagtggattctagggtgcattttcaccattgcttactgtaaataaacaaattaacattaaaatatggtaatagcagcaccaaagttttaagatgttttttttttcccccacactgtaactcatttcttctggtatgtgtacaccatattgcacagtttgtttttagaagtcattgtgtttgctgtatctggaaggttgcatctagcaaatgcctgcacttctagcactgaccaaattaagtkttcccaatagcatcttactggagttggttctttgcctacacccatgcagagtacacatttaatacagtgagaacctaacttggaaggatgttctgatctgttatgcccaaaagtaacaactacactattaaggaagtgtgcaaaaacatagaaaagcataatgttatacaagatatttgtatttgttacttctagtttgcttgtcaaaagactgacatattctacaggggatttcacaaggcagccagagcaaccaaaattttaattgacagccaaaatatcactcatgtcaacttcctt

SEQ ID NO: 85330 - DNA, 600 bp, Chicken  19866894384099_2
gagcaaccaaaattttaattgacagccaaaatatcactcatgtcaacttcctttgtatttcagaagagttaatataggaaatatttgtgcaaggataggaaactctacaacttcccttgttgtgtttatcatccactgtaaaaatcctttgcagttcatccctcctgtctcaccgatgttctgatgttggtgtcattagcaagatccactgaaactgatagttcaacagaaatatttgggaacaaaaaaaaaaccaaaactctgcataggaaagcaatcaaacacaagtacactggcaarctcagcatgacataagttgagatgaaacttcataaagggacgaactatttcttgtttgagaagtagaagcagtgttatgatgtgctttgtagtcttgattattaaaataattttgaagtgtaaccctaacataaaagcaatgttaacactaatcaaattcaaatttgttgtataaatagttatttactttacaggacatacaaggaagctgtgcaactggctattgtttatgccaaaggacttgaaaggtgcaggaaagcaagtaacaggagaatgttgaaggagaaaatagtatcaacc

SEQ ID NO: 85331 - DNA, 600 bp, Chicken  19866894384102_1
acaagcagaaaaccataacacaccactggcaataacaaatttcaagtaaaatcttagccaactacttaaaatgaaaaacgaacaagtcaaagcagttctgcagacatctatttctgtatagaaaaatggagtcccattgacaacttgtactagaattttcctttttctttaaatgtacaggtatcagtctctcaacattaaataacaatatcaagttaaatatgaaaattcacttaatgaagcaaagtacaaagtacaaaatcttaacagaaaaaaaaatcttcaatagattcttcttcrtttttttttttttttttttggtaaaatgactgctcaaagaccatggggatataatgtggaagaaaagccttttcataatattaaatgttatttaaataaatgtcaaagggttggaaaacaactcctgccactggagctgcagatcttgcatattcagaaagaatcagaaagtttctctagaaaaggaccaccatgctaaacaattccattttaaaaattaaaaaccataactagacactctgcatcattattatcaaatgctggcaaatctagagctatatacagttagaatttcacatc

SEQ ID NO: 85332 - DNA, 600 bp, Chicken  19866894384106_1
atgaccttttctttgttattaattatgactatatttaaccaataaatgaatcactttatctttttaggcttgtaagtatagaagtatttctaagttaattattatcactgagttattaaaattatataacaaaacaaaaacaaaaaacaaacaaacaaaaaacatttgaagttaatttatgctaagcaaacaacaaactttaaggtttggaacttccagcttctcaaactgtgcattaaattgtaaaaatattcattttctataaaaatattaccttctttacactgcaagactgatggkttttttttcggtaaatgagtaaatattcacataaatcacttctgcatttgagcagagatatctcaatttgcacaatatagaacactggctaaggattccacttgtatgacttaatattttattcttagaggacattgattaattggcttttatataaagcatggccagtggtggcactactatatagttatttcatctactttccagaatcccattctcaattcttcattttctgttgaaaagattcaacacgtttcatgcatatgtatacagctactgtactagctaggaaagtaggat

SEQ ID NO: 85333 - DNA, 600 bp, Chicken  19866894384107_1
acacgtcaaagccttcatgtccaactgtcagctatgcgctggtttcatgaaatatttatcccgagggaaaaacaaaatctgcccacaaacagcgccccgtcacctccacaagccaatgctgggcggtgcgctgggaatgctgccccgaccacagccacactgtgacccacgtcccggccggtacccggagcactggggcatggcacacagctgtgaacacagcgaccacgggcagtgctgcatgtccctggcaccggctgtggagagaaagtttggatgcgggccacattcttgggcagyggcacagaaaaactgggtcagagccggagcagtgcccgggcaatgcccacagtgctgcagaccttcagcactgggaaatggctgtaaagctcagctgtcctgggcaaacagtggaggagagggtgctcggtgggtgccccatccctggagctgctcgaggccatgggtgagccctgggcagcctgagctggggggcagccaacccacagcaggggtggcacgaggtgggcttcgaggtcccttccaaccaaccatcccaacccaaccatgctgtggctccatggtcctatgttcgctgtg

SEQ ID NO: 85334 - DNA, 600 bp, Chicken  19866894384110_1
actgagttttattttaaggccggaggactgaggaaccattccaccatcccagcacgttgttcacattctgaagtcttctcctttccactggctgctgttgcaatagccccatttcactgaataaattaatgagaaggcaagatttgttgcatatgagaaaacaaaagagggtcacactttggtgaagctgctggaggtggtggttagtccttatttttccctctatgggtgaaacggttacacgaacctctgctattgttgcaagaaaaagtggcttcctgtgatataaagtaatttttwtaaataggaaacatatggctgggccctaacaacaaagtgatattcaggtgctgatggcatgtgcctccagtcgtattgcaggaagctatcttggaaatctggtggcagaggcttgcacactaatgttcaggaagtgcagtgggggaggaaagctgaaaccaacatcagaaatacatttacatttttaatttcactgaaagttctttgctgttcttcttttcaaagtcactgagattcactcccagttggcagtaatgaacggatgctgtgttaggactgcactgctccatttaacgctca

SEQ ID NO: 85335 - DNA, 600 bp, Chicken  19866894384110_2
gttcttagctgcaggctcgggttgggtgtgtgaccctgcattatgttggtcagcaggacccaatgggaccagaggtgtgccgtctgtggatggcagctgttggaggcacagctccctttggctctgagagctgcctgtgttgggtgtaagacagcatcaagccacaaaacttggccattgttttatcttcagtcacagaaccctgcacttgcaattgttcagtctttgcaccatcccctcctcctgccttcattattgttcccttacccacacctgcagtgtcctcacctacaaacgtgmcattgccttaacccttcggtgggccacagctggggaaatgtgaagatgtgagaaattccaaacgcttctggatttggggtgacttctgtgtaaagaagggacatttcaatttgttttatccatgtattttcactggaacagattgtccagtgtggctgtgaatgtcccctctctgtaagcattcaaggccaggctggatggggctgtgagcagcctggtctagagggaggtgtccctgcatatagcaggggggttggaactgcatgatattaaaggtcccttccaacccaaaccattctg

SEQ ID NO: 85336 - DNA, 600 bp, Chicken  19866894384110_3
agaaattccaaacgcttctggatttggggtgacttctgtgtaaagaagggacatttcaatttgttttatccatgtattttcactggaacagattgtccagtgtggctgtgaatgtcccctctctgtaagcattcaaggccaggctggatggggctgtgagcagcctggtctagagggaggtgtccctgcatatagcaggggggttggaactgcatgatattaaaggtcccttccaacccaaaccattctgtggttctatgactttgggagttgtcagtggagcaaagcttggatgcttaytatttggtgaagagctctaagaagggacaggtggcactrtggagtgccttaactttcagcatgagacaatacgtagacaagcaagagttccaagattttccagtaaaaaccttggcttgtgtaggaatttccatcagaggtgcagcaaggtgcagrgagcccaaccagctcagcaggattggttgtgggtgtacagtgtgcgactgaggaggtgccatcrgtgatgagaaatgaggtcaagtagcacgtctgctagaaatgtagcctttctgaatggaaaaaaatgcacgctgcaattta

SEQ ID NO: 85337 - DNA, 600 bp, Chicken  19866894384110_4
gtaaagaagggacatttcaatttgttttatccatgtattttcactggaacagattgtccagtgtggctgtgaatgtcccctctctgtaagcattcaaggccaggctggatggggctgtgagcagcctggtctagagggaggtgtccctgcatatagcaggggggttggaactgcatgatattaaaggtcccttccaacccaaaccattctgtggttctatgactttgggagttgtcagtggagcaaagcttggatgcttaytatttggtgaagagctctaagaagggacaggtggcactrtggagtgccttaactttcagcatgagacaatacgtagacaagcaagagttccaagattttccagtaaaaaccttggcttgtgtaggaatttccatcagaggtgcagcaaggtgcagrgagcccaaccagctcagcaggattggttgtgggtgtacagtgtgcgactgaggaggtgccatcrgtgatgagaaatgaggtcaagtagcacgtctgctagaaatgtagcctttctgaatggaaaaaaatgcacgctgcaatttattgtcaatgaagactcatcagcaggagagagtgaacctc

SEQ ID NO: 85338 - DNA, 600 bp, Chicken  19866894384110_5
tgagcagcctggtctagagggaggtgtccctgcatatagcaggggggttggaactgcatgatattaaaggtcccttccaacccaaaccattctgtggttctatgactttgggagttgtcagtggagcaaagcttggatgcttaytatttggtgaagagctctaagaagggacaggtggcactrtggagtgccttaactttcagcatgagacaatacgtagacaagcaagagttccaagattttccagtaaaaaccttggcttgtgtaggaatttccatcagaggtgcagcaaggtgcagrgagcccaaccagctcagcaggattggttgtgggtgtacagtgtgcgactgaggaggtgccatcrgtgatgagaaatgaggtcaagtagcacgtctgctagaaatgtagcctttctgaatggaaaaaaatgcacgctgcaatttattgtcaatgaagactcatcagcaggagagagtgaacctcattcatcccaattaattaggtgtgggacttaagccttggtcttccacagctctagccatggagccaggcagcatctccgaggactccgactgcaaaatcttagaaagaatgttaatt

SEQ ID NO: 85339 - DNA, 600 bp, Chicken  19866894384110_6
taaaggtcccttccaacccaaaccattctgtggttctatgactttgggagttgtcagtggagcaaagcttggatgcttaytatttggtgaagagctctaagaagggacaggtggcactrtggagtgccttaactttcagcatgagacaatacgtagacaagcaagagttccaagattttccagtaaaaaccttggcttgtgtaggaatttccatcagaggtgcagcaaggtgcagrgagcccaaccagctcagcaggattggttgtgggtgtacagtgtgcgactgaggaggtgccatcrgtgatgagaaatgaggtcaagtagcacgtctgctagaaatgtagcctttctgaatggaaaaaaatgcacgctgcaatttattgtcaatgaagactcatcagcaggagagagtgaacctcattcatcccaattaattaggtgtgggacttaagccttggtcttccacagctctagccatggagccaggcagcatctccgaggactccgactgcaaaatcttagaaagaatgttaattgattggttccaacgtctgctggaacaataacaactacagccttctgaacacggggatgccaccg

SEQ ID NO: 85340 - DNA, 600 bp, Chicken  19866894384113_1
gatttctggtgttggaaggagcggcctggaaagggcatcatctcatgccaaagatgaagacaaaggcatttgggaggcaggaagtgatgaaagcacagggcacattgcagggcacccggcactgccgatgggtggcagagccccagcacagcagcaaggatggaggtgacaaacgggacaggaagggacgggggctgcagggccacctcagggctggccgtggtgcgggagggctcaggggacaccgctgccatgctgtcacgtaccaacgtgagccaggaggctgcgagcagtcgcagygctcgagctgcgctccgtgctgctggcttccaccccgcttggcttttccagcatctgatgtgactgtttgtttgcttgcagtgctttcagttgttttctattttagcccgtgactccgagagcctgggctggggcaggcaggcaccgtttgaaagccgccacttggcggcaacaactgctcgagccacagagcagcacccatctaacccctcttttcacacactcggagcttcccaaacattaacctttggattaaaattttccatgcttggtctctccccagatgcgacgtctgagctt

SEQ ID NO: 85341 - DNA, 600 bp, Chicken  19866894384123_1
taaggcagagtgaagttaagacatgggtagttatatccagacattctatttatagtgtagcccttggcatttttccttgcagagccctattccactgatctttctgaagattgccttttaagtgttgtattgacgtaacctttgcatcttacttcttctgctattaaatagggctagaaacacgtctccctatgtgcgatagcatgagacctgagtagatttgccaacagtgaggttcctgcccttgtgggagttgtataagcagtctttctgtgacaaattagttgaaagtatatgcayaggaacagtactytgtcatttctyagtgaaggacgcctcatgtattttctgctcggttcttactgagatgtttattggtgcctgccgctcttctcacagcaaggctccttttctccacctacaaatctgctctgcagacaggagaggtcttcctttcaagtaacgggttcttggcaaataagacattatacaaccaatcttgactgctgggagtgataacgttaaatactgctggagtgagtgtgttgtgaawatgtgtgaagaaaatggaaaataaggttacacagcaatttgactata

SEQ ID NO: 85342 - DNA, 600 bp, Chicken  19866894384123_2
agttaagacatgggtagttatatccagacattctatttatagtgtagcccttggcatttttccttgcagagccctattccactgatctttctgaagattgccttttaagtgttgtattgacgtaacctttgcatcttacttcttctgctattaaatagggctagaaacacgtctccctatgtgcgatagcatgagacctgagtagatttgccaacagtgaggttcctgcccttgtgggagttgtataagcagtctttctgtgacaaattagttgaaagtatatgcayaggaacagtactytgtcatttctyagtgaaggacgcctcatgtattttctgctcggttcttactgagatgtttattggtgcctgccgctcttctcacagcaaggctccttttctccacctacaaatctgctctgcagacaggagaggtcttcctttcaagtaacgggttcttggcaaataagacattatacaaccaatcttgactgctgggagtgataacgttaaatactgctggagtgagtgtgttgtgaawatgtgtgaagaaaatggaaaataaggttacacagcaatttgactatagttggtctgagaa

SEQ ID NO: 85343 - DNA, 600 bp, Chicken  19866894384123_3
gggtagttatatccagacattctatttatagtgtagcccttggcatttttccttgcagagccctattccactgatctttctgaagattgccttttaagtgttgtattgacgtaacctttgcatcttacttcttctgctattaaatagggctagaaacacgtctccctatgtgcgatagcatgagacctgagtagatttgccaacagtgaggttcctgcccttgtgggagttgtataagcagtctttctgtgacaaattagttgaaagtatatgcayaggaacagtactytgtcatttctyagtgaaggacgcctcatgtattttctgctcggttcttactgagatgtttattggtgcctgccgctcttctcacagcaaggctccttttctccacctacaaatctgctctgcagacaggagaggtcttcctttcaagtaacgggttcttggcaaataagacattatacaaccaatcttgactgctgggagtgataacgttaaatactgctggagtgagtgtgttgtgaawatgtgtgaagaaaatggaaaataaggttacacagcaatttgactatagttggtctgagaaagtatttgtgg

SEQ ID NO: 85344 - DNA, 600 bp, Chicken  19866894384123_4
ttgtataagcagtctttctgtgacaaattagttgaaagtatatgcayaggaacagtactytgtcatttctyagtgaaggacgcctcatgtattttctgctcggttcttactgagatgtttattggtgcctgccgctcttctcacagcaaggctccttttctccacctacaaatctgctctgcagacaggagaggtcttcctttcaagtaacgggttcttggcaaataagacattatacaaccaatcttgactgctgggagtgataacgttaaatactgctggagtgagtgtgttgtgaawatgtgtgaagaaaatggaaaataaggttacacagcaatttgactatagttggtctgagaaagtatttgtggaagtactgttggaggaaattacacttctccttttatagtactgtgctaggtaaagctttagttttcaaaaagttagcaatagcttttttatttcttgtatgcatccagagtctctctgaatggtttatagcttttacagaagcctcctcttaggtamgaattcactgcttagcgtttcagagttgaaaagcaatttacaggatttgtttgcttgtttttttattagttg

SEQ ID NO: 85345 - DNA, 521 bp, Chicken  19866894384123_5
gacattatacaaccaatcttgactgctgggagtgataacgttaaatactgctggagtgagtgtgttgtgaawatgtgtgaagaaaatggaaaataaggttacacagcaatttgactatagttggtctgagaaagtatttgtggaagtactgttggaggaaattacacttctccttttatagtactgtgctaggtaaagctttagttttcaaaaagttagcaatagcttttttatttcttgtatgcatccagagtctctctgaatggtttatagcttttacagaagcctcctcttaggtamgaattcactgcttagcgtttcagagttgaaaagcaatttacaggatttgtttgcttgtttttttattagttgtacagcaatagaataagcttaaaaaaaagtccatggctcaaaacttgtttttttttttagttttaatgcttttgttacagtttttaattacatcagaatctgtatataatgagatgtttacaatgctctggtactgatgaattgcagaa

SEQ ID NO: 85346 - DNA, 600 bp, Chicken  19866894384124_1
cttataccaacaaaattttagcatggcagtctgtaatttcccatattcatgctgtatatatcttatcacatgcttcaaaagcgttgcttacaatgctttatggaacctaactatacttaaactgttcaatacatacagattttcagcagacgatgcgcaaggactgtcactggattatatgcagaggtaactttttattagaaaccaatcataaattacaggttgtatcacataaacagaaatactttgtctcttcaagatgtagagatggattcccaagctagaggggaaatgcattcwggactggctaagagaagtttgttgttttcttatgcctgctagtttttattttattattattattgataggcagaaaktctatcagcttatagatctatcagcttatttgatatcactaattggagatagattggaatgctttaaagcacaaagaggatactctgaaagagtgggatgaggtagaacaaatataagaacatgaatgtgttttttgtattaaaaagtatagttaatttgcatagattaaattctaaatgaggacatttagcttcagtgttttttattttaacattatcagga

SEQ ID NO: 85347 - DNA, 600 bp, Chicken  19866894384124_2
aaagcgttgcttacaatgctttatggaacctaactatacttaaactgttcaatacatacagattttcagcagacgatgcgcaaggactgtcactggattatatgcagaggtaactttttattagaaaccaatcataaattacaggttgtatcacataaacagaaatactttgtctcttcaagatgtagagatggattcccaagctagaggggaaatgcattcwggactggctaagagaagtttgttgttttcttatgcctgctagtttttattttattattattattgataggcagaaaktctatcagcttatagatctatcagcttatttgatatcactaattggagatagattggaatgctttaaagcacaaagaggatactctgaaagagtgggatgaggtagaacaaatataagaacatgaatgtgttttttgtattaaaaagtatagttaatttgcatagattaaattctaaatgaggacatttagcttcagtgttttttattttaacattatcaggaaagagacaaaaaaatctagagactatggtccatctgtgaaacttktgagaccctgacattacttctttgtcaatact

SEQ ID NO: 85348 - DNA, 600 bp, Chicken  19866894384124_3
ttattttattattattattgataggcagaaaktctatcagcttatagatctatcagcttatttgatatcactaattggagatagattggaatgctttaaagcacaaagaggatactctgaaagagtgggatgaggtagaacaaatataagaacatgaatgtgttttttgtattaaaaagtatagttaatttgcatagattaaattctaaatgaggacatttagcttcagtgttttttattttaacattatcaggaaagagacaaaaaaatctagagactatggtccatctgtgaaacttktgagaccctgacattacttctttgtcaatacttagccaatagggagctttttaaaaacaattttaaaaatttatttactgaggtagataaagattttcagaaggtgtaaagtccagttgccatttcatattaaatgtagcaaaatcaaaccttttcaacagaaagcacagatagtgttttccaagcaaagatacagattgggtggagaatggcttgtgagcagctctcaggagaaggatttggggtttaggttaatgaaagactcaacgtgagctggcaatgtgtgcttgcaactcagaa

SEQ ID NO: 85349 - DNA, 600 bp, Chicken  19866894384127_1
gtgtttccacatgcaaatacaaaagtatacagcattacaggtcagtacttttctccttacataaccttcctgtcagcttctgcactcttccatacacacgtactcatttttctccatctatatttgtacttttaaaattattatttatttacctaatatagttaatgcctacctcccactatagtgttttcagcatcagggaacgtttaaaagcagtatcagcattattgaatgcatccaaccacgttagtccatttggccgaacaaatgcatccaaaatatgatttgataccttagtcycctggcaacacagagcaggccaggcttccaaactgcatgcccacccttcacagtagcttggtggaagtgagttcatcatcacatctgtgatgggacaggtatcaaggaactgtcaacaagttgtttgctaaaaggtaatagcatctgtagcctcgttttaaaaatgagacctgtagcaatattttacttttatgattaagaaaacaatttgcttactcatccaaaratgtacatgtgcaagaaagaatgagttagcataatatcataaagtggtgactaaactctcagtaatagactcat

SEQ ID NO: 85350 - DNA, 551 bp, Chicken  19866894384127_2
attgaatgcatccaaccacgttagtccatttggccgaacaaatgcatccaaaatatgatttgataccttagtcycctggcaacacagagcaggccaggcttccaaactgcatgcccacccttcacagtagcttggtggaagtgagttcatcatcacatctgtgatgggacaggtatcaaggaactgtcaacaagttgtttgctaaaaggtaatagcatctgtagcctcgttttaaaaatgagacctgtagcaatattttacttttatgattaagaaaacaatttgcttactcatccaaaratgtacatgtgcaagaaagaatgagttagcataatatcataaagtggtgactaaactctcagtaatagactcatgcccaacccaaaaatcagtactcaaggtattttctaaaagtgactctccctgaactgaatacaagagaatacaagacagtctgatagttattcaaacacctccagaaacctacaataaaacaaaaacacattcttgctagggttttcaaaattactttcaaaaaaaaaaaaaatctt

SEQ ID NO: 85351 - DNA, 600 bp, Chicken  19866894384128_1
tgcttgaactagagaattccatctgttctattaaggaccagtgacaattgtgaaagtattccatatagtttttgtaaaatctaaaagcccaagttgttatattattattaattttttgttttttcttttctcattcaaccagaatagctttaatcagcaattggctgaagaaaactccatgggacttagcggtagcaaggctcattaaattacatgaggagcattctgcacattcaactgatggtgaaaggtacgtgctgttagagcagtgaattgcctttgacattacagcagaacttsctatgtgctggattttgaagtgtattctattagggtacaagcagaaggagatgatgtaaataatttctgaagaaatagcaaacatatccacagagcattcaaaatcacgtattataataaaaacttacaactgtaggacctcaatgtaaaaaacttctacttaattcttctgaactatgttccatttttttcactattccaagctaaattctaaattctcatttcagtattactttttcttatatactaacttcaaaaaagactgtaaatcagtaaaccctagaaaattctgtcacccaa

SEQ ID NO: 85352 - DNA, 600 bp, Chicken  19866894384137_1
ctctgagcgcacagcaatccaagttcccataccatgatggctgatccatcccagccttgtagagaaagagctgtggtggtggcataacgatttgatgtgggagatgtcgccagacctgaacttcaaaagatacccctgagagaaactgctcttcacaagcacagaaatgaggaagacaaacccctcaaacaactgggtaaagccacttcgcaaatcatggagcagcatggtcacctccaagggaactgcactcctgcagctggcagcagcccggctgtgctgtgctccctgcagcactcygtgcatgcttgtgctcatcagactccaaagtctcatcgtcagacctratccaaaatgctgagaggctcttcctttcaacaagggctgtcaaatgtctatattaatcacagctgacaaatattttaatttggggactttggagggggctacgtgccttgttccatatgaggagatgacaactcagacctgcagygcgtgattaatattttatggttgccatccactgggtatgcagcgtgatgctggtgctcgctttgctcaatgttcagtgcatctccagtgcttatttgtgacagttct

SEQ ID NO: 85353 - DNA, 600 bp, Chicken  19866894384137_2
atcccagccttgtagagaaagagctgtggtggtggcataacgatttgatgtgggagatgtcgccagacctgaacttcaaaagatacccctgagagaaactgctcttcacaagcacagaaatgaggaagacaaacccctcaaacaactgggtaaagccacttcgcaaatcatggagcagcatggtcacctccaagggaactgcactcctgcagctggcagcagcccggctgtgctgtgctccctgcagcactcygtgcatgcttgtgctcatcagactccaaagtctcatcgtcagacctratccaaaatgctgagaggctcttcctttcaacaagggctgtcaaatgtctatattaatcacagctgacaaatattttaatttggggactttggagggggctacgtgccttgttccatatgaggagatgacaactcagacctgcagygcgtgattaatattttatggttgccatccactgggtatgcagcgtgatgctggtgctcgctttgctcaatgttcagtgcatctccagtgcttatttgtgacagttctgtggaacagaagctcaaggaggcttcattccagcaggacagtgctgg

SEQ ID NO: 85354 - DNA, 600 bp, Chicken  19866894384137_3
tgggtaaagccacttcgcaaatcatggagcagcatggtcacctccaagggaactgcactcctgcagctggcagcagcccggctgtgctgtgctccctgcagcactcygtgcatgcttgtgctcatcagactccaaagtctcatcgtcagacctratccaaaatgctgagaggctcttcctttcaacaagggctgtcaaatgtctatattaatcacagctgacaaatattttaatttggggactttggagggggctacgtgccttgttccatatgaggagatgacaactcagacctgcagygcgtgattaatattttatggttgccatccactgggtatgcagcgtgatgctggtgctcgctttgctcaatgttcagtgcatctccagtgcttatttgtgacagttctgtggaacagaagctcaaggaggcttcattccagcaggacagtgctggccgacctctctcgttgcctcacgtaattcagagggagcaaccattaaactggaactgaaagtgcttttcaacttttaaaggaagaaaaaaaaaaatggtaccgcagatttacatatagatagcatctcggagaagaatgatgctga

SEQ ID NO: 85355 - DNA, 599 bp, Chicken  19866894384140_1
  misc_feature (1)..(134): n is any nucleotide
nnnnnnnnnnnnnnnnnnnnnnnnnnnnnnnnnnnnnnnnnnnnnnnnnnnnnnnnnnnnnnnnnnnnnnnnnnnnnnnnnnnnnnnnnnnnnnnnnnnnnnnnnnnnnnnnnnnnnnnnnnnnnnnnnnnnnnaaatattcaagctgttctgtcactggatggctctgtcatacggcattagaccaaggctcaaagtccaagttcaattcatcatgccattgtagcgcttctttcaagaccccaggtatggccactttggaactcacgctcctaactacaaattaggaataatactacwcctacaaatgcatttgaagtttgtgaagcatgcctgtaagaagcttgtgggtcttgcacgtatgccatacaggaaaaaaaaaaacccaattaacatgttgcatcatcttttccaacaccaccaacagctctaaccaagctaccacagactaattaaatcccccagggaatgcttccacagctgctgaagtcagttaaaagtacagcctgctggcaggtcccagcttctccctatcccgtgcgctttctcaggcttgatccctaagggagctggttcatgacatgcaactagaagaaact

SEQ ID NO: 85356 - DNA, 600 bp, Chicken  19866894384148_1
ctattcttgtcactcccctctgggctctcccatctgcctacatcttttttacagagttcgcttctcattttggtcacagcatttaaaaccttactgaagtcaggatgtatcatgtgtaatgccacaacagagagcaagataagctcttgtttttgatgtggcatctcaaaccagtgaggttaacctcctgcattcaaagatggagtttctccgcaggcagcagccctgtctgagactcataagcaaatggacagaaattgcatgcagctccaccaactatttttactcttgaggtttccycccrccaaaaaataaagtcagcttagctttgcaraacaggttagatcgtgtatttggggagaagagcccaactctttcaaaaacagagrcagcactgcttcaagactctctgacttgcatgagccttctcaggatgcacttgctttgttactgcacatcgtggtttgcagatgaaatatcataagctttactagcaaatattcagagtacatctacacactgagcatacatttatcagaaaacccaaggtaaataaatgctccagaagaaataaactgagctcgacgtttctaatgggta

SEQ ID NO: 85357 - DNA, 600 bp, Chicken  19866894384148_2
tcttgtcactcccctctgggctctcccatctgcctacatcttttttacagagttcgcttctcattttggtcacagcatttaaaaccttactgaagtcaggatgtatcatgtgtaatgccacaacagagagcaagataagctcttgtttttgatgtggcatctcaaaccagtgaggttaacctcctgcattcaaagatggagtttctccgcaggcagcagccctgtctgagactcataagcaaatggacagaaattgcatgcagctccaccaactatttttactcttgaggtttccycccrccaaaaaataaagtcagcttagctttgcaraacaggttagatcgtgtatttggggagaagagcccaactctttcaaaaacagagrcagcactgcttcaagactctctgacttgcatgagccttctcaggatgcacttgctttgttactgcacatcgtggtttgcagatgaaatatcataagctttactagcaaatattcagagtacatctacacactgagcatacatttatcagaaaacccaaggtaaataaatgctccagaagaaataaactgagctcgacgtttctaatgggtacata

SEQ ID NO: 85358 - DNA, 600 bp, Chicken  19866894384148_3
tgcctacatcttttttacagagttcgcttctcattttggtcacagcatttaaaaccttactgaagtcaggatgtatcatgtgtaatgccacaacagagagcaagataagctcttgtttttgatgtggcatctcaaaccagtgaggttaacctcctgcattcaaagatggagtttctccgcaggcagcagccctgtctgagactcataagcaaatggacagaaattgcatgcagctccaccaactatttttactcttgaggtttccycccrccaaaaaataaagtcagcttagctttgcaraacaggttagatcgtgtatttggggagaagagcccaactctttcaaaaacagagrcagcactgcttcaagactctctgacttgcatgagccttctcaggatgcacttgctttgttactgcacatcgtggtttgcagatgaaatatcataagctttactagcaaatattcagagtacatctacacactgagcatacatttatcagaaaacccaaggtaaataaatgctccagaagaaataaactgagctcgacgtttctaatgggtacataagatgggtggtacattgctcaacatctctc

SEQ ID NO: 85359 - DNA, 600 bp, Chicken  19866894384148_4
cttactgaagtcaggatgtatcatgtgtaatgccacaacagagagcaagataagctcttgtttttgatgtggcatctcaaaccagtgaggttaacctcctgcattcaaagatggagtttctccgcaggcagcagccctgtctgagactcataagcaaatggacagaaattgcatgcagctccaccaactatttttactcttgaggtttccycccrccaaaaaataaagtcagcttagctttgcaraacaggttagatcgtgtatttggggagaagagcccaactctttcaaaaacagagrcagcactgcttcaagactctctgacttgcatgagccttctcaggatgcacttgctttgttactgcacatcgtggtttgcagatgaaatatcataagctttactagcaaatattcagagtacatctacacactgagcatacatttatcagaaaacccaaggtaaataaatgctccagaagaaataaactgagctcgacgtttctaatgggtacataagatgggtggtacattgctcaacatctctcttaagccaaagagctgttaagggtcatctgtcttcctgcctcaacccttggatta

SEQ ID NO: 85360 - DNA, 599 bp, Chicken  19866894384152_1
  misc_feature (1)..(39): n is any nucleotide
nnnnnnnnnnnnnnnnnnnnnnnnnnnnnnnnnnnnnnntctggactcccatgctttaaaactggacttatataaacacatacatttaatgtattaagtaagtaactacaggcacctataaattcatttgtaacacacaagctataaagtaaccaaatctctcacttaagctacaattgtttattatagtaggataaaatatacaatgaatgtaaaaccaaaagatttctcctttctccctttatagaacagatcagaactcaaaggagagcagttctgggcacatcatcagttcacaaycaaagaccaaatgttaaccacttcactgaagtataaacagcccaacacattctgattctctacaaataataggaattctatctaaatactataacttttcaacaactataaagcagcagcattaatctagacaaggctgagagaacaaaaatcaaaagctgaagaccttaatttatttttctataattcttataagaggaaaatgagatgtcagcctgaacagctgcaaaaaaacttcaaagcattcatagaagtttacgattttattttacttgggaagttcaagtctacaaatcatt

SEQ ID NO: 85361 - DNA, 599 bp, Chicken  19866894384155_1
  misc_feature (1)..(8): n is any nucleotide
nnnnnnnncacagatggggggcttcaggccctgcagcatctttgttccccttgctggactctctccagtgtgtctctcctgtactggggccccaaaactgggtttagcactccaggtgtggcctcatcagagtagagattattcttggttatacagggagtaactggattaaatggtatgaaagtatctaatattagcctttgaaaaggtttccacaccaagttacagcaatctccaagaagccgctggggatagggagctgcttgttctgagtattggtcaattcctttggtatgtccycagcccagtcctgtgcagacttctgtgaagtccctccagcatgagatgggcacctgcttccttgtgtacagacacatakmtatgtgcacttccttcctgatccacctgactcacttcataccagccctatcgtggagataacaactgtgggctgagcccgcctctcctgcctgacacaggcactgtgaatgcggctctgcagttaggctgggccgtgggagctctggggtgtgcgtgtggggaagaaggaaggcaacagaggtaatagctacattgagaaaatgaatgcattaataaat

SEQ ID NO: 85362 - DNA, 600 bp, Chicken  19866894384155_2
tgtactggggccccaaaactgggtttagcactccaggtgtggcctcatcagagtagagattattcttggttatacagggagtaactggattaaatggtatgaaagtatctaatattagcctttgaaaaggtttccacaccaagttacagcaatctccaagaagccgctggggatagggagctgcttgttctgagtattggtcaattcctttggtatgtccycagcccagtcctgtgcagacttctgtgaagtccctccagcatgagatgggcacctgcttccttgtgtacagacacatakmtatgtgcacttccttcctgatccacctgactcacttcataccagccctatcgtggagataacaactgtgggctgagcccgcctctcctgcctgacacaggcactgtgaatgcggctctgcagttaggctgggccgtgggagctctggggtgtgcgtgtggggaagaaggaaggcaacagaggtaatagctacattgagaaaatgaatgcattaataaattaatgtagtctggaagcctctcagtccaccatgagcataccgaagtgctgtggggccttgctgtagtaggaaaagaaacc

SEQ ID NO: 85363 - DNA, 600 bp, Chicken  19866894384155_3
gtactggggccccaaaactgggtttagcactccaggtgtggcctcatcagagtagagattattcttggttatacagggagtaactggattaaatggtatgaaagtatctaatattagcctttgaaaaggtttccacaccaagttacagcaatctccaagaagccgctggggatagggagctgcttgttctgagtattggtcaattcctttggtatgtccycagcccagtcctgtgcagacttctgtgaagtccctccagcatgagatgggcacctgcttccttgtgtacagacacatakmtatgtgcacttccttcctgatccacctgactcacttcataccagccctatcgtggagataacaactgtgggctgagcccgcctctcctgcctgacacaggcactgtgaatgcggctctgcagttaggctgggccgtgggagctctggggtgtgcgtgtggggaagaaggaaggcaacagaggtaatagctacattgagaaaatgaatgcattaataaattaatgtagtctggaagcctctcagtccaccatgagcataccgaagtgctgtggggccttgctgtagtaggaaaagaaacca

SEQ ID NO: 85364 - DNA, 600 bp, Chicken  19866894384162_1
tttataagatcataactatacgtttaaatttctttcagcattgttacattttagaacatcaaaactggtagaacgcaagatttgaactgatctctccagctataagttactttcctttaataagacatataacctaggaagatttgaattactgtcttgtacaaaagtgcatagatttgtgaccttagctaaaagaagaatgagggtgctcttgcctggctttgtgacttctcctgtgaataccatttatatgtaagtcacagtacaatgtgagttggagcactggagctgctgaagttkttttttggactcagattactcactcttggaattttaacagttgtggatcttagttgctagttgttattccacaatagatacaacagcagatgaatggacagctgctgcacagacttaaggtgtgctctgcagtaaggatatcgataagtgtcagacttyacagatctgatgactgctatagcatacttgtaaaggcaagaaaatactctaaacatgccaaatgtgaacatyttactgtttcttgaagcttaaactcaggagtgttatagttagtgtttagtaacrctgaagtaaggaatc

SEQ ID NO: 85365 - DNA, 600 bp, Chicken  19866894384162_2
tacaaaagtgcatagatttgtgaccttagctaaaagaagaatgagggtgctcttgcctggctttgtgacttctcctgtgaataccatttatatgtaagtcacagtacaatgtgagttggagcactggagctgctgaagttkttttttggactcagattactcactcttggaattttaacagttgtggatcttagttgctagttgttattccacaatagatacaacagcagatgaatggacagctgctgcacagacttaaggtgtgctctgcagtaaggatatcgataagtgtcagacttyacagatctgatgactgctatagcatacttgtaaaggcaagaaaatactctaaacatgccaaatgtgaacatyttactgtttcttgaagcttaaactcaggagtgttatagttagtgtttagtaacrctgaagtaaggaatcatatttctagttcttaactktattgatgattaattagtgacatctatgtaaactagttaaagaggacttgagagtgttgaagtgccttgcttgccaggactcttaccttacggctgcagaatgtaattaattccccctgtccctccctcaccccagctt

SEQ ID NO: 85366 - DNA, 600 bp, Chicken  19866894384162_3
tcctgtgaataccatttatatgtaagtcacagtacaatgtgagttggagcactggagctgctgaagttkttttttggactcagattactcactcttggaattttaacagttgtggatcttagttgctagttgttattccacaatagatacaacagcagatgaatggacagctgctgcacagacttaaggtgtgctctgcagtaaggatatcgataagtgtcagacttyacagatctgatgactgctatagcatacttgtaaaggcaagaaaatactctaaacatgccaaatgtgaacatyttactgtttcttgaagcttaaactcaggagtgttatagttagtgtttagtaacrctgaagtaaggaatcatatttctagttcttaactktattgatgattaattagtgacatctatgtaaactagttaaagaggacttgagagtgttgaagtgccttgcttgccaggactcttaccttacggctgcagaatgtaattaattccccctgtccctccctcaccccagctttgtttgaagctgatctttctcctatctctgagtggcaacctgaaacttccttgctgattggcaaacacaagg

SEQ ID NO: 85367 - DNA, 550 bp, Chicken  19866894384162_4
gagctgctgaagttkttttttggactcagattactcactcttggaattttaacagttgtggatcttagttgctagttgttattccacaatagatacaacagcagatgaatggacagctgctgcacagacttaaggtgtgctctgcagtaaggatatcgataagtgtcagacttyacagatctgatgactgctatagcatacttgtaaaggcaagaaaatactctaaacatgccaaatgtgaacatyttactgtttcttgaagcttaaactcaggagtgttatagttagtgtttagtaacrctgaagtaaggaatcatatttctagttcttaactktattgatgattaattagtgacatctatgtaaactagttaaagaggacttgagagtgttgaagtgccttgcttgccaggactcttaccttacggctgcagaatgtaattaattccccctgtccctccctcaccccagctttgtttgaagctgatctttctcctatctctgagtggcaacctgaaacttccttgctgattggcaaacacaaggtgtg

SEQ ID NO: 85368 - DNA, 515 bp, Chicken  19866894384162_5
cactcttggaattttaacagttgtggatcttagttgctagttgttattccacaatagatacaacagcagatgaatggacagctgctgcacagacttaaggtgtgctctgcagtaaggatatcgataagtgtcagacttyacagatctgatgactgctatagcatacttgtaaaggcaagaaaatactctaaacatgccaaatgtgaacatyttactgtttcttgaagcttaaactcaggagtgttatagttagtgtttagtaacrctgaagtaaggaatcatatttctagttcttaactktattgatgattaattagtgacatctatgtaaactagttaaagaggacttgagagtgttgaagtgccttgcttgccaggactcttaccttacggctgcagaatgtaattaattccccctgtccctccctcaccccagctttgtttgaagctgatctttctcctatctctgagtggcaacctgaaacttccttgctgattggcaaacacaaggtgtg

SEQ ID NO: 85369 - DNA, 600 bp, Chicken  19866894384173_1
gcaatggttattctatcctactttcaagaatgctgaacaatgtcaaatcttgtgcaaaaatgtgatatgatcaagtgatttaaggacttaagtcactttttaaaagggactttggctctaaactcctgaaagtatttgggttggaaatgggcttctaattgagaaggagttctctcttttaataatgtttaagcccaaattatttttggcttacaaagaaaattatactatggtttttatttttctttctttttctgtaccatgcattaaccctgacaggtctcacaatcgtggttcttsattatgtgctggcaaaaagaactggctatggttatatctgatatacttggaacagaaaatagccaaggcctttgaaccttaatatgtctagttctgttgttctgtatatttcactgtatttatgtcattgctgtatgtcctaaagttttcaaagttcagtgaacagttagaggttgtctcattctcattttcagtgtaatgctggcagacttgctagctttgtaagaagagcttacagaatcttgcagtgctgatctttaattattagacttttctaataactgcagatattggctgcag

SEQ ID NO: 85370 - DNA, 600 bp, Chicken  19866894384173_2
aaaagaactggctatggttatatctgatatacttggaacagaaaatagccaaggcctttgaaccttaatatgtctagttctgttgttctgtatatttcactgtatttatgtcattgctgtatgtcctaaagttttcaaagttcagtgaacagttagaggttgtctcattctcattttcagtgtaatgctggcagacttgctagctttgtaagaagagcttacagaatcttgcagtgctgatctttaattattagacttttctaataactgcagatattggctgcagcttcaattgctggmctgtcctttggaaactggcactctggatatcctgttgacaagaagtttagaagtcatgactgtgaaacaagggactgtcttwattcttttcttttcagaatcttccatgtatatgagatttctcaaatacagagtgaactgtcttactgacaaaaatgtggaattggtgtaattggagtcagttgttaatgtgtatttgattggtgaagggagattgtaatttcaaatccaactgtrttatgttattgccatttggaacaggagtggctggatgaatttgacttgtgctataaagaagat

SEQ ID NO: 85371 - DNA, 600 bp, Chicken  19866894384173_3
ttgttctgtatatttcactgtatttatgtcattgctgtatgtcctaaagttttcaaagttcagtgaacagttagaggttgtctcattctcattttcagtgtaatgctggcagacttgctagctttgtaagaagagcttacagaatcttgcagtgctgatctttaattattagacttttctaataactgcagatattggctgcagcttcaattgctggmctgtcctttggaaactggcactctggatatcctgttgacaagaagtttagaagtcatgactgtgaaacaagggactgtcttwattcttttcttttcagaatcttccatgtatatgagatttctcaaatacagagtgaactgtcttactgacaaaaatgtggaattggtgtaattggagtcagttgttaatgtgtatttgattggtgaagggagattgtaatttcaaatccaactgtrttatgttattgccatttggaacaggagtggctggatgaatttgacttgtgctataaagaagattctgatttaattctaattgactcccccaccacatacacacctctgcattgtttttaaatgactccaagccctccttcaactt

SEQ ID NO: 85372 - DNA, 600 bp, Chicken  19866894384173_4
tgatctttaattattagacttttctaataactgcagatattggctgcagcttcaattgctggmctgtcctttggaaactggcactctggatatcctgttgacaagaagtttagaagtcatgactgtgaaacaagggactgtcttwattcttttcttttcagaatcttccatgtatatgagatttctcaaatacagagtgaactgtcttactgacaaaaatgtggaattggtgtaattggagtcagttgttaatgtgtatttgattggtgaagggagattgtaatttcaaatccaactgtrttatgttattgccatttggaacaggagtggctggatgaatttgacttgtgctataaagaagattctgatttaattctaattgactcccccaccacatacacacctctgcattgtttttaaatgactccaagccctccttcaacttcttttatatctgaaggagcgtggttgacagctgtaccttgtagctgtaagaaatgtgagataagaaggcatacctggtacagcagcaagtctagccttttttctcattttctttccttttcttttcttttttttttcttttgagaaaatgagaaa

SEQ ID NO: 85373 - DNA, 600 bp, Chicken  19866894384177_1
ccttggtttgtttacagcatgcagggatttactatgacttgcattcaaggactgtgtcgattagattttctttataaagagggggaagaagaaatcaaacagctttaattcctcatacacttattttttaagtttgctctccttccacgcgtctcactaaagttatttggactgaccagctaaaagcacaggattatatttcaataatcatatatttcaataatcaggaatatatttcaataatgtttcaatagcagacctggtgctgaaggaatagggttagaacagctgaaaatcttrtaggaggaaagactgaatatggaaaaataccaccagaacctcagcacagcttcgctgttatacatcacaatgctacctctgctttactgtctggacaggacaggtgattgtttgttgcagaagtaacctgaattacagcatcagtaatttggtttccaacttctgagcataaagttagcgsaggaaaggaggaacgacagtggatgctgtgatcagcagagagacatccaccacatcagttcatgtgagtgtgtatttcattgtaatgctgccgggattttttttaagtgaatgaacacc

SEQ ID NO: 85374 - DNA, 458 bp, Chicken  19866894384177_2
aaaagcacaggattatatttcaataatcatatatttcaataatcaggaatatatttcaataatgtttcaatagcagacctggtgctgaaggaatagggttagaacagctgaaaatcttrtaggaggaaagactgaatatggaaaaataccaccagaacctcagcacagcttcgctgttatacatcacaatgctacctctgctttactgtctggacaggacaggtgattgtttgttgcagaagtaacctgaattacagcatcagtaatttggtttccaacttctgagcataaagttagcgsaggaaaggaggaacgacagtggatgctgtgatcagcagagagacatccaccacatcagttcatgtgagtgtgtatttcattgtaatgctgccgggattttttttaagtgaatgaacaccaaattgctgtaatgactactcatactcattctttctcat

SEQ ID NO: 85375 - DNA, 600 bp, Chicken  19866894384189_1
taaaccacaaagaggttttcaatatctgttccatgaccttcagagtcctcgcctgggcagagctactgtttggtgcaattcactactaagctaccctccagtaaagcagaatcatcagttcctactttcattttacttcaagagaatagtgccacctccctgtctagtcaaaaatcatactgtcagactccaccaagtatctgaatagatgttttatataaagaccaaccaagcatttgtttatattccagagtccacttttaatattgcactagccttttcacctcttcccttagaaaygtaaaaatcactaagaaccactaaagcttgcaaaccacaagataaaagagacagatttattatctgaagagtgaatgattgcaatctttctacatgtaaagcaagtaaaactgacatctwcaacatcctactctttcagataaagataaaacaagcaagcattctcacctcttccttcttaaaaaaaaaataacaatcatcacctggctctgaaataactaaaaccccacctgaacaactcaggcatgtgccagattgaaagattaatgagaaatattaatttgaacacaattcctgaaa

SEQ ID NO: 85376 - DNA, 600 bp, Chicken  19866894384189_2
cctactttcattttacttcaagagaatagtgccacctccctgtctagtcaaaaatcatactgtcagactccaccaagtatctgaatagatgttttatataaagaccaaccaagcatttgtttatattccagagtccacttttaatattgcactagccttttcacctcttcccttagaaaygtaaaaatcactaagaaccactaaagcttgcaaaccacaagataaaagagacagatttattatctgaagagtgaatgattgcaatctttctacatgtaaagcaagtaaaactgacatctwcaacatcctactctttcagataaagataaaacaagcaagcattctcacctcttccttcttaaaaaaaaaataacaatcatcacctggctctgaaataactaaaaccccacctgaacaactcaggcatgtgccagattgaaagattaatgagaaatattaatttgaacacaattcctgaaatagaaaactaacacattgtatttcttaatctatacatacgaaaagactattgtactcttccttttagaaagtttttgaagagaacaggctgtcctaaggccccttttgaagaggcaccat

SEQ ID NO: 85377 - DNA, 600 bp, Chicken  19866894384201_1
gtggttttaaactaggtctatgcccatttatcccaaacaggctaaatagccatctgaacagtttgttacacgtggtatttccatctatcatcttccaagaaagccatgcaggaattacctcttgcgctgctgagtggtttgaggtacaatgctaattcttccacacattttttgctctcctcgtaatgcttggtatcttcagctccactacatatagtaattggctgctgctcaggaacctgggaagagatgacatacatttatgacaaatgcacagaaataactggcagccatgcttayaartaccaaattaagtttgttaatcccaagcatttcctgttttgttctcttctgcatttttctccattagcaattttttcagccttagtaaacaaactgcaaaaagctaccagttaaaaacatgattaaacatatgcagaaaatttacgattatagtatcagatttcttttatttggtggctgacaggaaacagaagcatgacaaaagatatcaccattttttgcaattataatttctttgctgaagtcgtgtgcatattgagacatccccaaagctggatgaccaaatatagaacagat

SEQ ID NO: 85378 - DNA, 600 bp, Chicken  19866894384201_2
gttttaaactaggtctatgcccatttatcccaaacaggctaaatagccatctgaacagtttgttacacgtggtatttccatctatcatcttccaagaaagccatgcaggaattacctcttgcgctgctgagtggtttgaggtacaatgctaattcttccacacattttttgctctcctcgtaatgcttggtatcttcagctccactacatatagtaattggctgctgctcaggaacctgggaagagatgacatacatttatgacaaatgcacagaaataactggcagccatgcttayaartaccaaattaagtttgttaatcccaagcatttcctgttttgttctcttctgcatttttctccattagcaattttttcagccttagtaaacaaactgcaaaaagctaccagttaaaaacatgattaaacatatgcagaaaatttacgattatagtatcagatttcttttatttggtggctgacaggaaacagaagcatgacaaaagatatcaccattttttgcaattataatttctttgctgaagtcgtgtgcatattgagacatccccaaagctggatgaccaaatatagaacagatcag

SEQ ID NO: 85379 - DNA, 600 bp, Chicken  19866894384201_3
cagttaaaaacatgattaaacatatgcagaaaatttacgattatagtatcagatttcttttatttggtggctgacaggaaacagaagcatgacaaaagatatcaccattttttgcaattataatttctttgctgaagtcgtgtgcatattgagacatccccaaagctggatgaccaaatatagaacagatcagatgaacaccggtttacgggaaagtgcagattcgtatccagggcctcacagctctacagtcatcctgggataagcaatctgagctacttggattactgggagaaagayttagcagcaaatacactacgccactcctgcagtgtattttgcccagacccaattcatcaagcagtaagaggacattatcccacacagcttgtatgaacacaaagtccaagtattaaactgacatcacaggccatgcttggttttgtttttacatttatttacatttagcatttatctctttatccaggtattcaccagaaaccaacatttttcaaaggtatattggatcctcatccccgaagttattttttgttgctgctttctccagttaaattcttacagctttaagcaagtttggag

SEQ ID NO: 85380 - DNA, 553 bp, Chicken  19866894384208_1
gcattttggggggtgcctctccccccaccaggccggcttctcctcaagcatgatgctaacaaggcttgggatgcggtggctgcagcaatgtcctgacatagactaagtggaacccgaaacatcatgagaagagagggaagaagaagatggcaggcccaagaggatgatccttggagaatatggcagcaaccgtgtcatacagcagacctggttgtagccctttgggtgttcacagatttttcactagtttaaacaatctaaaaattattcaagtgacagctgctatggcctatatatgaratatataaaaaatcatcccctccccaaggcctcaaacctccaacacaggaaaagaccagccwagtagcagagcctgtagaaaaaaaaaataaaaaaggcaaaaatgccagcattcgtgagcacttcactgaaagaaaacgccaagggcaagactgcaattcggcatcttgctctgaatgaggtcaccatgaagcagcaccatcctctgggaaataagctcaagaaaagagcacacagtgacacaggaggagga

SEQ ID NO: 85381 - DNA, 491 bp, Chicken  19866894384208_2
ggcttgggatgcggtggctgcagcaatgtcctgacatagactaagtggaacccgaaacatcatgagaagagagggaagaagaagatggcaggcccaagaggatgatccttggagaatatggcagcaaccgtgtcatacagcagacctggttgtagccctttgggtgttcacagatttttcactagtttaaacaatctaaaaattattcaagtgacagctgctatggcctatatatgaratatataaaaaatcatcccctccccaaggcctcaaacctccaacacaggaaaagaccagccwagtagcagagcctgtagaaaaaaaaaataaaaaaggcaaaaatgccagcattcgtgagcacttcactgaaagaaaacgccaagggcaagactgcaattcggcatcttgctctgaatgaggtcaccatgaagcagcaccatcctctgggaaataagctcaagaaaagagcacacagtgacacaggaggagga

SEQ ID NO: 85382 - DNA, 600 bp, Chicken  19866894384210_1
ttggctgttacaactgctatcaaatattgagcagatgaatatggaaatcattcttaatgttactgtgtttttagcacagttataagatgctgcttgctgtcccttttctaaatgtgtttttgttgttgctgttttttgtattggcagatgaattgatagttttcctcttgacaacaaaggcatgagagagaatgaactccgtggtgaaagttagctataataaaacacacaatctgtttgacttcactttaaggaaggcagttgtttaaagcagctggtaaagcacacagatgttctggwtgagggygttccaatattaaaatggcataatgtgccaacaaattttcattttaaaatgaatagctgacaaaaaaaagtattcagttaagcaccctacccttaattatagtagggtgtattttgcttccagaagcgtgtgttcaaaaggtgcttaacaacagatccttctttctagcaaaaaatgctgtgttgcatttcctcatgaaagaaacgatgcatttactggcttattagacccagttcctccccgagacttctgtgtaagtctgcaagtgaaacggtggtggctatgcaaaaaga

SEQ ID NO: 85383 - DNA, 600 bp, Chicken  19866894384210_2
ttacaactgctatcaaatattgagcagatgaatatggaaatcattcttaatgttactgtgtttttagcacagttataagatgctgcttgctgtcccttttctaaatgtgtttttgttgttgctgttttttgtattggcagatgaattgatagttttcctcttgacaacaaaggcatgagagagaatgaactccgtggtgaaagttagctataataaaacacacaatctgtttgacttcactttaaggaaggcagttgtttaaagcagctggtaaagcacacagatgttctggwtgagggygttccaatattaaaatggcataatgtgccaacaaattttcattttaaaatgaatagctgacaaaaaaaagtattcagttaagcaccctacccttaattatagtagggtgtattttgcttccagaagcgtgtgttcaaaaggtgcttaacaacagatccttctttctagcaaaaaatgctgtgttgcatttcctcatgaaagaaacgatgcatttactggcttattagacccagttcctccccgagacttctgtgtaagtctgcaagtgaaacggtggtggctatgcaaaaagattttaag

SEQ ID NO: 85384 - DNA, 561 bp, Chicken  19866894384210_3
actgcaacctccagaattagaagctcttcttagcctgccctgaaggtacaaagaccagggcagttttgtgttgccttggcccagagatgatagctcctcacagaaagcacccaaagccctgaaggaaagagaggactatggacactggagtagttgaagcaattatgttttcccatcttcactgctagctacccagtttgctggtgtgtcttgaataaagacctaatctttctttctagccagaattcgatgataagtggcatgaaaagtttagtacttctgatgctgggaaatcattcyatctcttattctgtggcctctcctgtcttagcctgtaaaatttcttcctttgattgagatgatctctaattctgcctaaagctctctcagctatcgctttatgacttttagcccctggactttcatttctgcctcccttctctgcccatcaactttctatcattgacttcaaaagtgctagtgagacctgaagttagtcagctgatccacctatcactgggggatatggtggcctacataccagtagatttttgtctaatg

SEQ ID NO: 85385 - DNA, 599 bp, Chicken  19866894384211_1
  misc_feature (1)..(36): n is any nucleotide
nnnnnnnnnnnnnnnnnnnnnnnnnnnnnnnnnnnntgtgttcgatggcaaggagaagttcccccactccctatgatagacaggtctatgcatatagatgcataaaaatacgtatttaataaacgtatgtgtgtagatgaacacacttaaagaataaaaatgtccttctcacatacatatattgtttatattatgatataatgtttatattcagtgaaatggtgggatgaactatggagtataattacagctcacaggagtaaatctggaaagaggaatgtatattcatgtattattcartaattatcgatgaagtcaatgtttttatgtgtattgctatattgcctaggagatctggttgataggattgagcttcattttgtgctgtgcaaactcaacaaatgaattcctgccatcctgctcagacctgtatgataaacatcagccttagtcacgtgcaatcagtatttagtttatcaaggtgtagatagtaattgaatattcatacatgctcagagcttggggtaacaaaaataagctgttgtcttttcagtttttccttagattgggtattttcttcataggctcacagctattac

SEQ ID NO: 85386 - DNA, 600 bp, Chicken  19866894384215_1
tcaacactgcactttattactgcgctacattttcaggttgcataaataattgtacacatattctgcggctgcactaagccactgtgacaactatgaccttattgtgacaacaaaatgacaagaaatccccagagacctcaccacattctgacaccacaatcctgcagctatctccacaagcaattaaatgaaaatgctgccctgcctcctgctacatcccagaaagctgcagctggcagttcatcctgcctaagaaaacactgaacatgtacaaccagtggctgacagctgccaatcagycccagcttactccgtgcagcttcttgaagcggtccagatagacttacaagaaaaattgtatgctgtattcctccgaagatgttaaaaaaaattgttccacatgggttaattttcatgaaaaggacactkagattctttcatggggggaaaaaaaaggagaagtggagctgcagaagatgccagattgctttctatgccagcccttcctgtaaccccagcacgtgcacagaaactgggacacgctgcgctgaacacagcagcagtcaccaggaacatcccaaaggggaaacacgcaggtga

SEQ ID NO: 85387 - DNA, 600 bp, Chicken  19866894384215_2
cagagacctcaccacattctgacaccacaatcctgcagctatctccacaagcaattaaatgaaaatgctgccctgcctcctgctacatcccagaaagctgcagctggcagttcatcctgcctaagaaaacactgaacatgtacaaccagtggctgacagctgccaatcagycccagcttactccgtgcagcttcttgaagcggtccagatagacttacaagaaaaattgtatgctgtattcctccgaagatgttaaaaaaaattgttccacatgggttaattttcatgaaaaggacactkagattctttcatggggggaaaaaaaaggagaagtggagctgcagaagatgccagattgctttctatgccagcccttcctgtaaccccagcacgtgcacagaaactgggacacgctgcgctgaacacagcagcagtcaccaggaacatcccaaaggggaaacacgcaggtgaggctggccggcctgctgcgtgcagtgtcttgcttggctggcagcacggggagactcgcagcccgctaaaacctgttggtgatgccatataaaaaagtgctggggagaacaagaatgcagatgtttctca

SEQ ID NO: 85388 - DNA, 501 bp, Chicken  19866894384215_3
aaaaggagaagtggagctgcagaagatgccagattgctttctatgccagcccttcctgtaaccccagcacgtgcacagaaactgggacacgctgcgctgaacacagcagcagtcaccaggaacatcccaaaggggaaacacgcaggtgaggctggccggcctgctgcgtgcagtgtcttgcttggctggcagcacggggagactcgcagcccgctaaaacctgttggtgatgccatataaaaaagtgctggggagaacaagaatgcagatgtttctcagggagtaaaggaaaaaaagtcrttaaaacagatggccttggattaagcgtgtaaagaaataataagtgaaatcagaaggagttacttgaatgtagaagagagcagcaaggaaaaagcatacagaacagaaagaggaacagaggaaagcaagagtaaaagaggctgcagaaagttctgccagaaaacagtgccttctgttttccttggtgccccagtagtacca

SEQ ID NO: 85389 - DNA, 599 bp, Chicken  19866894384222_1
  misc_feature (1)..(41): n is any nucleotide
nnnnnnnnnnnnnnnnnnnnnnnnnnnnnnnnnnnnnnnnngaactttgttaggtgtacctttgctgacccagacttacataacccccctcccacacacaggagctgcagagaccgagaggacctttagagcacagtggcactgagtcagtgacctcagcccactatcagcacggggctgttctcagcatgagatcaggggaacagcatgaacaccgactgaacatcacaggtgtcacagcttcctgcaagccaccagcagtccttcagcctccaggatgccttgagcaatagcttaagwgttcccctaacaaaacctacttgcttttggaggcagtgagcaaagctgagcagctgaagcccagcagctgcagagctgccacctgcctcctccaggcaggtacctgrgtctgtgaggttgtgaatctcaagctgcctgaccccaccagagccatgaaatgctctggtgtaattccccagcccggygcaaaggagggaagtggtgaggctgtctcagacgctcatttctcagcattgtgattacaccgattgcagaggctgacatttgatgagaagtccaaagaccagcagggattgtca

SEQ ID NO: 85390 - DNA, 600 bp, Chicken  19866894384222_2
cagagaccgagaggacctttagagcacagtggcactgagtcagtgacctcagcccactatcagcacggggctgttctcagcatgagatcaggggaacagcatgaacaccgactgaacatcacaggtgtcacagcttcctgcaagccaccagcagtccttcagcctccaggatgccttgagcaatagcttaagwgttcccctaacaaaacctacttgcttttggaggcagtgagcaaagctgagcagctgaagcccagcagctgcagagctgccacctgcctcctccaggcaggtacctgrgtctgtgaggttgtgaatctcaagctgcctgaccccaccagagccatgaaatgctctggtgtaattccccagcccggygcaaaggagggaagtggtgaggctgtctcagacgctcatttctcagcattgtgattacaccgattgcagaggctgacatttgatgagaagtccaaagaccagcagggattgtcaccacccacacacatctgactgtgtaaatgcaaatgtgagattaatgctccgttgaggagaccaatagcagtttgctaactaacatgcagagtctgctgcaagacaaga

SEQ ID NO: 85391 - DNA, 600 bp, Chicken  19866894384222_3
agcatgagatcaggggaacagcatgaacaccgactgaacatcacaggtgtcacagcttcctgcaagccaccagcagtccttcagcctccaggatgccttgagcaatagcttaagwgttcccctaacaaaacctacttgcttttggaggcagtgagcaaagctgagcagctgaagcccagcagctgcagagctgccacctgcctcctccaggcaggtacctgrgtctgtgaggttgtgaatctcaagctgcctgaccccaccagagccatgaaatgctctggtgtaattccccagcccggygcaaaggagggaagtggtgaggctgtctcagacgctcatttctcagcattgtgattacaccgattgcagaggctgacatttgatgagaagtccaaagaccagcagggattgtcaccacccacacacatctgactgtgtaaatgcaaatgtgagattaatgctccgttgaggagaccaatagcagtttgctaactaacatgcagagtctgctgcaagacaagaaaaaagagaacaagatgaaagcagaggctgggaaactgacttcagactccatggcagagaaccaagagaagaacaagc

SEQ ID NO: 85392 - DNA, 600 bp, Chicken  19866894384227_1
tgttctaacatctgctagaattcacatatggacgtcttggtaaaaataaacttttaagttcacaagtacatttcctgttactcaacagacacaaaaggatctgcacagattatcatatataaatagaagtcaaacaaccctttagcaaggagagaggctgtatgaagattctccctgttatccagtaactaggtattgaaggtcttgggcttctcctcatacatagtttgctagattaacccctgtgctttgtctcctgtcttgctgtagaacttgctcttcaggcaggaccagcactcrcttaggaaagctgacttacacatttgacagtggaattgtgtgcatactcagtaagttgccaacagccccacactgcatggtgaggtcaacacaccggagggaagtgacaacccaggatgacgtcaacagactcaagagatggacccatgtgaaccttatggagttcagaagggccaagtaaatggattgggacaatcccaaacacaataccggctgggcagaaaactgattgagagcaatcttcacagagaaggacttgtgagttttagtcgatgagaagctcagtatgagccaacagtg

SEQ ID NO: 85393 - DNA, 539 bp, Chicken  19866894384230_1
ggccacatgttaacagtttttctttatttactgcctccatttcctctttgttccaggaacttgtcctccaacttcaagccgctcatgattaggcaaaaaggcctctaatctccccgatctgatttaccgtcactgagagcaggcgcttcccgttactggccctggacctgggagcagagccggccgcactctgccggctccccgcgcctctcctccccgaggctcccctgccgcacacgctgccttcccagcagcttcctcttccagtaagcatggggcagccccagggccggggagcgyggccgtggctgtgggcaggggaccgcgtcgcgccctactgctgctcctggcacgtggcagctccatggcagccgctgcacggcgaggctccttggcaggagcccctggggctctgcttgtgatgctctgcggcccccggtacctggagaccctgggaggaaggttcacggccacatgcggggatgagccaaggccacaggcacgcgggcagtggggggaccgctggcgcctggcgggtg

SEQ ID NO: 85394 - DNA, 600 bp, Chicken  19866894384232_1
tcagatgagggtaaagattacctttcctttagagaaaaataacaagttaattcatatgtatttctggagatgtcagtactgactgtgttttgagacaaaattctcttattaaacccacgtttttgcctcacatggcatgtctcatctccattcagttctcagacatgaaagcgtcatatttggcctttgtatttcagacgtaccgtgtctgtgcaaggccagggtgtagagcaacgaagccaataatgtaccttaaccttttaagttcaaatttagcctttctagtactgaccttccaawctggatagcagctgggtgataagttttactgaacgtacctgcactgcagctgtccgttcagttctgggcagggagcttctcacggctcaaggcttgggaaggatgctactcctttttttatctaaaacaaaacacatgaaggagtgcatgtaatgtttaagcaacgttttatgtgttcataaataccggccaaatcagcgttggtctcagcggctgtaagtaagggatacaactgcccgctaacagtgcagggaggtttggaaccagcggatgggccgggagcattcggcagccgcggga

SEQ ID NO: 85395 - DNA, 600 bp, Chicken  19866894384250_1
aaaatcctaaaaatattttaatgaaacaacatcaaggtatccagtcacccaggatccttcccaagatcaaaaatccactcaatcaaaaatcattcagatttttgtagtcacagctctccttattttctcttccgcgagcagagaattctctgctaagtaagggtgaaagcaacttcagcagcaggacaaaaacttatcgctattctcctgagctacttttggaccagaaagaaatagaggggttagaatctttccttgcttcatccaaaatcacatatgatcggaaatagttttgcccaktctttgtaagttggcttttgtaaggctttcagtttataagaatgcaaagttagaataagattggatggagggagccattgggatgtagaggaagaagtatttcctttccctagtaaaagtatattatgattctcattaaattcctcttaaartgctccacttcactacatcagactgcagataacaagatgcaaatatgattgtttaaggcaaacaggcacgtatgtgaaactatcagtttcttaacttgcttttcatcttttccctgtctgagagaactgaaagaaactcagccttggc

SEQ ID NO: 85396 - DNA, 600 bp, Chicken  19866894384250_2
ctaagtaagggtgaaagcaacttcagcagcaggacaaaaacttatcgctattctcctgagctacttttggaccagaaagaaatagaggggttagaatctttccttgcttcatccaaaatcacatatgatcggaaatagttttgcccaktctttgtaagttggcttttgtaaggctttcagtttataagaatgcaaagttagaataagattggatggagggagccattgggatgtagaggaagaagtatttcctttccctagtaaaagtatattatgattctcattaaattcctcttaaartgctccacttcactacatcagactgcagataacaagatgcaaatatgattgtttaaggcaaacaggcacgtatgtgaaactatcagtttcttaacttgcttttcatcttttccctgtctgagagaactgaaagaaactcagccttggcatggcaactggaattgcaccagtgccaaaacatgagttgtggatcttcatttcttagttctcttccaactccaagtggctttccatgcagtgataggtgagcaggcaccacagaaaggaaatatcagtcctcctcgctaataacatgaacct

SEQ ID NO: 85397 - DNA, 599 bp, Chicken  19866894384272_1
  misc_feature (1)..(183): n is any nucleotide
nnnnnnnnnnnnnnnnnnnnnnnnnnnnnnnnnnnnnnnnnnnnnnnnnnnnnnnnnnnnnnnnnnnnnnnnnnnnnnnnnnnnnnnnnnnnnnnnnnnnnnnnnnnnnnnnnnnnnnnnnnnnnnnnnnnnnnnnnnnnnnnnnnnnnnnnnnnnnnnnnnnnnnnnnnnnnnnnnnnnnnntatgttttctccacaaactttaacagttcagctaagatgacagagggaaacaaatttaattaccatcaccacaagcttaatacttaaggaagaactatcctatgttgagtaccaggrtgctgaacgtgccactaactccagccagggctcaggacagaagcacaagctcagagccagccccatgctaggtgcaggcaccaaaccacgctggcagggtgcttgcagcgagagctctgcaggagtgggcaggaggaacctgccgtgtgccaggagcacaccagccagagcccgtgttgcctgaaccagctgagtttataaagcctctgtataagcaataaagtggtaaacaccaaaatacagagataatcaaacatacacccaaacctggccatgccaggaaagacgcgagaggggca

SEQ ID NO: 85398 - DNA, 599 bp, Chicken  19866894384277_1
  misc_feature (1)..(189): n is any nucleotide
nnnnnnnnnnnnnnnnnnnnnnnnnnnnnnnnnnnnnnnnnnnnnnnnnnnnnnnnnnnnnnnnnnnnnnnnnnnnnnnnnnnnnnnnnnnnnnnnnnnnnnnnnnnnnnnnnnnnnnnnnnnnnnnnnnnnnnnnnnnnnnnnnnnnnnnnnnnnnnnnnnnnnnnnnnnnnnnnnnnnnnnnnnnnncagtatcaagacaacttttgcaacaggcaatctgatgaaggaatggaactaacacttcctgaaagcaaacgggtcatttctatcactgcgtgaattcagttcccagggggkctctaaagaaagcctcaccattttctatctatgcagccacagacgatcttgcacgtaaatgcagcaaagcacaacagccagcatatgacttcatattgtgtgtttgctcagctgttttcctaaaaacgaattttctcagctgttcctgacaataatctcttggatacaaaacatgtatcttcccgttgtgctaatagaaattcagacactttctaaacagccacattaaataaataaagcagtcaccagtgccaaactccctggaattcgctgattcactcccagcacttggcctctga

SEQ ID NO: 85399 - DNA, 600 bp, Chicken  19866894384294_1
gtatccttgttacaatctctgattctgttcctgagggtctgacttaagtaacatcatctgtctcaattcttaaatccagcactttagctacgttatttttattagatagttttcttactagttcctagctggcaggaaggtgccaggttcaaggaggccaagttacacaggaaggctgtgcttctcaaagtcaagctgctaatccttcctggcttctctgtcaccgttctctgtcaccgttcacaagttaactcagaacaggaatgaatgagaaaatgagacatttcctggggggtggcrtttttactgtcctaggaaagcatattgcctgtcagttccccatgggatccctgtgtgtaccttaacacaccgtgacagacactggccaccctgcagcccttctactggcaggcagatctcttgggagctttgaccagcacaggactgggacagctggagctgttcctgtttgttgccttggaaaggactggacacctctgtcagtggcaagataaaggcagttactctcatttttgaaaggcatactcaacttgctgaaattaggaattcagcaaaggagttggatagcacttgtgtcag

SEQ ID NO: 85400 - DNA, 600 bp, Chicken  19866894384294_2
gttaaacagaagcttgtgttttagctaaaccagtagttactggcttgatacaggaatggttttgatgtgcattctgtaaggtatcagaggagatcataatagtcctttatgtccttaaatatacactgatgaacatgtgatgcactctatagtgagcactctggaagcagaggccatctaaaccataggtaaaacaagagtaatgtatttgtaaattccattgtagtactgacatctttctccatttttgtaagcttcttgaatttcctctctctatttgggcctcttaatttgattaastgtgtaagaactgttgtagtagttacaaaaaagcaagttgtgtcttggaacctgctgctaggtaatatgcacatgaagggcttaaaagcattgtcagctttgcactggggctgctgcttcrtggtggcttacatttctggggctgccagyggacatcattcctaagatgtcagtgtttttcacctcatgcagacttttgaagacttcaagaatgacaagcaagctgtggaatatcaacagcgcattgtggacatacttctgaaagtgagtgtgcctaaaaattaacctgtgcttacatct

SEQ ID NO: 85401 - DNA, 600 bp, Chicken  19866894384294_3
tacactgatgaacatgtgatgcactctatagtgagcactctggaagcagaggccatctaaaccataggtaaaacaagagtaatgtatttgtaaattccattgtagtactgacatctttctccatttttgtaagcttcttgaatttcctctctctatttgggcctcttaatttgattaastgtgtaagaactgttgtagtagttacaaaaaagcaagttgtgtcttggaacctgctgctaggtaatatgcacatgaagggcttaaaagcattgtcagctttgcactggggctgctgcttcrtggtggcttacatttctggggctgccagyggacatcattcctaagatgtcagtgtttttcacctcatgcagacttttgaagacttcaagaatgacaagcaagctgtggaatatcaacagcgcattgtggacatacttctgaaagtgagtgtgcctaaaaattaacctgtgcttacatctgactkattgtatataactgcartaaagcctgtaacatagatgaaggctttccagtccctcactgggtgacaccactgagtcaatgggcttggattcaccgtagccaaggcttgttggttgt

SEQ ID NO: 85402 - DNA, 600 bp, Chicken  19866894384294_4
agtgagcactctggaagcagaggccatctaaaccataggtaaaacaagagtaatgtatttgtaaattccattgtagtactgacatctttctccatttttgtaagcttcttgaatttcctctctctatttgggcctcttaatttgattaastgtgtaagaactgttgtagtagttacaaaaaagcaagttgtgtcttggaacctgctgctaggtaatatgcacatgaagggcttaaaagcattgtcagctttgcactggggctgctgcttcrtggtggcttacatttctggggctgccagyggacatcattcctaagatgtcagtgtttttcacctcatgcagacttttgaagacttcaagaatgacaagcaagctgtggaatatcaacagcgcattgtggacatacttctgaaagtgagtgtgcctaaaaattaacctgtgcttacatctgactkattgtatataactgcartaaagcctgtaacatagatgaaggctttccagtccctcactgggtgacaccactgagtcaatgggcttggattcaccgtagccaaggcttgttggttgtgtgtttcggagtgaagctacatgacatta

SEQ ID NO: 85403 - DNA, 487 bp, Chicken  19866894384294_5
aagaactgttgtagtagttacaaaaaagcaagttgtgtcttggaacctgctgctaggtaatatgcacatgaagggcttaaaagcattgtcagctttgcactggggctgctgcttcrtggtggcttacatttctggggctgccagyggacatcattcctaagatgtcagtgtttttcacctcatgcagacttttgaagacttcaagaatgacaagcaagctgtggaatatcaacagcgcattgtggacatacttctgaaagtgagtgtgcctaaaaattaacctgtgcttacatctgactkattgtatataactgcartaaagcctgtaacatagatgaaggctttccagtccctcactgggtgacaccactgagtcaatgggcttggattcaccgtagccaaggcttgttggttgtgtgtttcggagtgaagctacatgacattaaatgatacagagaggtctctatcctatctgtgattacacctg

SEQ ID NO: 85404 - DNA, 470 bp, Chicken  19866894384294_6
ttacaaaaaagcaagttgtgtcttggaacctgctgctaggtaatatgcacatgaagggcttaaaagcattgtcagctttgcactggggctgctgcttcrtggtggcttacatttctggggctgccagyggacatcattcctaagatgtcagtgtttttcacctcatgcagacttttgaagacttcaagaatgacaagcaagctgtggaatatcaacagcgcattgtggacatacttctgaaagtgagtgtgcctaaaaattaacctgtgcttacatctgactkattgtatataactgcartaaagcctgtaacatagatgaaggctttccagtccctcactgggtgacaccactgagtcaatgggcttggattcaccgtagccaaggcttgttggttgtgtgtttcggagtgaagctacatgacattaaatgatacagagaggtctctatcctatctgtgattacacctg

SEQ ID NO: 85405 - DNA, 599 bp, Chicken  19866894384299_1
  misc_feature (1)..(160): n is any nucleotide
nnnnnnnnnnnnnnnnnnnnnnnnnnnnnnnnnnnnnnnnnnnnnnnnnnnnnnnnnnnnnnnnnnnnnnnnnnnnnnnnnnnnnnnnnnnnnnnnnnnnnnnnnnnnnnnnnnnnnnnnnnnnnnnnnnnnnnnnnnnnnnnnnnnnnnnnnnnnnnnnatgccagctgtaccactgaagactggatctctctggaaggatgaattggttgttgcctgtacattcctgtctgataaaacagggccctgattttcaccttgatgagtctacaagactacaatcacactattaagaagtgyccaaatgccccttataaccagactactggtacacccaccttctggaggccttctccagggatgctacagttgagtcaataattatatatatatgaccccttcttagtgggaagccaagatgcrcatcatcaggatactatttactttgaaaagtagaacctacagagaaacagatggccatggccatcaaacacactgctgtttgaggtgaccaaagcagttcccctctcctgaagctgatgagcagcgtgagactgctgctacccccactaggcctttcctagcctgggctcagctct

SEQ ID NO: 85406 - DNA, 599 bp, Chicken  19866894384299_2
  misc_feature (1)..(37): n is any nucleotide
nnnnnnnnnnnnnnnnnnnnnnnnnnnnnnnnnnnnnatgccagctgtaccactgaagactggatctctctggaaggatgaattggttgttgcctgtacattcctgtctgataaaacagggccctgattttcaccttgatgagtctacaagactacaatcacactattaagaagtgyccaaatgccccttataaccagactactggtacacccaccttctggaggccttctccagggatgctacagttgagtcaataattatatatatatgaccccttcttagtgggaagccaagatgcrcatcatcaggatactatttactttgaaaagtagaacctacagagaaacagatggccatggccatcaaacacactgctgtttgaggtgaccaaagcagttcccctctcctgaagctgatgagcagcgtgagactgctgctacccccactaggcctttcctagcctgggctcagctctcagatgtgactgtgatgccaaagagtagctgctaccagtggcagcaggcaggaatgtgcagatagccagctggccaaagtacccaaattgtcacctaactcaggggtgactgcagtttcagac

SEQ ID NO: 85407 - DNA, 600 bp, Chicken  19866894384300_1
catggcaaaaattactttggagtactagtattaatttaaataaataatacagttatccttagctgcaaggtttccataatatcatcagataaggatttcattgaggtaagaataatagttcattttaagtgccgtctgtaattaaactcttgttacaagcattttgtttgtccttctatatatccttatatatattatatccttttatatatctcacacactgattgctttttttgagtcccaattgatagacttcatcctctcgagcttctgtatgtaaaaaggaaggataagtttgaytgcataatgttgtcacaactacactgcttcttttgggattgatagtccagcctccctctccctcctaagctgacgtaccgctgatgaaatgaaggaaatgttcctattctgaagtgcagagtaagagaaactaagacaagcagattacgtctggatttaacagtaaaaagattaagagaataaaaccgaggctccactgaatttgactggagaagactcccaccggtttcagtagccagaccatttcacctgctggtgtgcataatctcatagagatcttacttttcataccataaatat

SEQ ID NO: 85408 - DNA, 600 bp, Chicken  19866894384300_2
cacgtaattaaaaaaaaaaccctcctgatagataaaagccaaatatcaaaatttgaggtggccaacttgtgatttaatgaaactatttaaatatcacaacatttttcaactgaaaccgcaagagctaaaagctttcctctctgttttccttctttctcagttggcagtatgtattgctacaatgctcatacacttactcctacatctgatcctcattatgagtggaatcaaccctcagtcatggttctcataaccgcgctctgaatagctgctccatcgcgagccattaagcggcattcracagtggttcagagagatctgttgttgagacttattgtcaacaaaacagcactttcttagtcatggcagaactacgtatagagctggaaggatgagtcacggtaaatgaagtatacgacaaatttagctctacttcatgtttatgctttttttcacagaaagcaattacattttacaaaactgttcatcatttgagactatctgctcaaataaaatttgaatttggactttgtcatgtagtggtttgccattattcatactatttgggacttcttacccagtacgataacgatatacatt

SEQ ID NO: 85409 - DNA, 600 bp, Chicken  19866894384302_1
gatttttgcacaaaacacaaacaccactctcacacaaataaagattttcaagattaaaaggtaacaagatgactagaaaccttattttaaggataagaaggtaagaaaaacttttagctcatcaagaaaatactacatatgaaaaatatcttctgacaatacaaggatgaagatgcaactgttgaacctttaggaacatctccgccccaactgtgtgtgcaacagttacctgtttaatctttaagtaacattctgttttactgctaacattctgttctgtaatctgcacaaacaacccamgcaagtatccaatatgctgagaacatagtaagaacaagaggggaaaaaaccacaggccaccagggatgagtaaccaaggcaaatgagacaagtttctgtggtgttatttatattacatgtaatccatgcttattccaaatagtgtgtgcacagaaatgagaagtatcataaatataacaatcaaagcaaacctaaatatcttaggttaacaggatatttaatagtcaactcattttaaacctaagggttgtaggcagcagccaatatcccaacataccaggttttaaaacattcccacat

SEQ ID NO: 85410 - DNA, 600 bp, Chicken  19866894384306_1
acactgctggcattacatgtgggaacacctgaagcaacaacatcaaactgaagataaaatggcaaagtccctgtctgtgggactaactggtctgcccacgggaagaaccgtatagaatccagctatccacatcctggtttaccatttcttcccagataacagcatgaagatagaatgctgattgcaaggagagaaatattttacacagattttgtttttttccatcctgataaaaggtgtcgtttggaaaaggataattcaaaactggtgcattgattcactcatctaatccagacaggyaaaccaaacacagctgtgattgggcactccgtgtttaatggcaaaagagaactggaggaggtgctcaggatgggacgacgtagcgacctaagaggccaagaaagaaaatggttatttctttggccatttacatctctgctcttggattcaaaaataatctttaatttcacattttgctttctgtacacacacacaccagcttgcaaatccatttgtttttagctttggtttaaatgtgtttttccacaggaatacatattcttgaggagtcaaaaggaaaacctctttgaacaagtgtta

SEQ ID NO: 85411 - DNA, 600 bp, Chicken  19866894384310_1
ttttcttttgtttgtgttaaatgctgaaaattcattgcccatcttgaaatcatttgcattttctccttagtctttcccttcaagacaagaggtattttccaagtggtatgtcatactacaaaacccatgtttgtgtccatgctcacctagttttgaccccctatcgatcttaaacagtattattacattaaaataactggcacagagtgtaatttttttatattgaaatattacagagaaatcatacattcttttgacaatggtaacagacaccagtggaaaatgtttttcatttgctcmtggattccctctgatctacgtatgaagatacaaacaccagtcctaataaatagcgtttagagagccattttgaatagtcaccatttttcatccataatttacaaagtaaatacttcaagacaacaattgcaccacctggttaagcataagttccagtgatgcttgatttcctcagcagcttccttggaaaatatgtacaatcatataattaaaaatacaaggaaaactacacttctagtaatatcccataattcttaatttaactccacattatattagcattgcttagtcaaaaccctg

SEQ ID NO: 85412 - DNA, 600 bp, Chicken  19866894384310_2
tttcttttgtttgtgttaaatgctgaaaattcattgcccatcttgaaatcatttgcattttctccttagtctttcccttcaagacaagaggtattttccaagtggtatgtcatactacaaaacccatgtttgtgtccatgctcacctagttttgaccccctatcgatcttaaacagtattattacattaaaataactggcacagagtgtaatttttttatattgaaatattacagagaaatcatacattcttttgacaatggtaacagacaccagtggaaaatgtttttcatttgctcmmggattccctctgatctacgtatgaagatacaaacaccagtcctaataaatagcgtttagagagccattttgaatagtcaccatttttcatccataatttacaaagtaaatacttcaagacaacaattgcaccacctggttaagcataagttccagtgatgcttgatttcctcagcagcttccttggaaaatatgtacaatcatataattaaaaatacaaggaaaactacacttctagtaatatcccataattcttaatttaactccacattatattagcattgcttagtcaaaaccctgt

SEQ ID NO: 85413 - DNA, 600 bp, Chicken  19866894384310_3
ttcttttgtttgtgttaaatgctgaaaattcattgcccatcttgaaatcatttgcattttctccttagtctttcccttcaagacaagaggtattttccaagtggtatgtcatactacaaaacccatgtttgtgtccatgctcacctagttttgaccccctatcgatcttaaacagtattattacattaaaataactggcacagagtgtaatttttttatattgaaatattacagagaaatcatacattcttttgacaatggtaacagacaccagtggaaaatgtttttcatttgctcmtmgattccctctgatctacgtatgaagatacaaacaccagtcctaataaatagcgtttagagagccattttgaatagtcaccatttttcatccataatttacaaagtaaatacttcaagacaacaattgcaccacctggttaagcataagttccagtgatgcttgatttcctcagcagcttccttggaaaatatgtacaatcatataattaaaaatacaaggaaaactacacttctagtaatatcccataattcttaatttaactccacattatattagcattgcttagtcaaaaccctgtt

SEQ ID NO: 85414 - DNA, 600 bp, Chicken  19866894384310_4
tcttttgtttgtgttaaatgctgaaaattcattgcccatcttgaaatcatttgcattttctccttagtctttcccttcaagacaagaggtattttccaagtggtatgtcatactacaaaacccatgtttgtgtccatgctcacctagttttgaccccctatcgatcttaaacagtattattacattaaaataactggcacagagtgtaatttttttatattgaaatattacagagaaatcatacattcttttgacaatggtaacagacaccagtggaaaatgtttttcatttgctcmtgmattccctctgatctacgtatgaagatacaaacaccagtcctaataaatagcgtttagagagccattttgaatagtcaccatttttcatccataatttacaaagtaaatacttcaagacaacaattgcaccacctggttaagcataagttccagtgatgcttgatttcctcagcagcttccttggaaaatatgtacaatcatataattaaaaatacaaggaaaactacacttctagtaatatcccataattcttaatttaactccacattatattagcattgcttagtcaaaaccctgttg

SEQ ID NO: 85415 - DNA, 600 bp, Chicken  19866894384314_1
aaagtctgtgcaaggatggtggttgcatccctccaccgtgcaaggctgctcactgcatcttcatctatgcaaggattctggctgcatgcctccatccacgcaaggatgcaagctgcgtgctttcatccatgcagtgacgccagctgcatgtctccatctgtacaaagatgctggctgcatgctccatccatgcaataatgcttgttgcatccctgatctattgcaagggtgccgactgcatgactccatccatgcaaggctgctcgctgcattgccgtgctggcatccacgctcccctaygttggtccccaaccccgtctgtctccgtccccccggcagctgcagctggtggagagcctgagccgcaagctggcggtgctgcgggaggcgcagcggggactgcaggaggacatcagcgccaacggggctctgggygaggaggtggcagcccgcctgcaggcgctctgcacgccgggcgagttcgacaagtaccgcctcttcgtgggggacctggacaaggtggtcaacctgctgctgtccctgtcgggccgcctggcgcgggtggagaacgcgctgagcgctctggggccgcacgccgcc

SEQ ID NO: 85416 - DNA, 600 bp, Chicken  19866894384314_2
gacgccagctgcatgtctccatctgtacaaagatgctggctgcatgctccatccatgcaataatgcttgttgcatccctgatctattgcaagggtgccgactgcatgactccatccatgcaaggctgctcgctgcattgccgtgctggcatccacgctcccctaygttggtccccaaccccgtctgtctccgtccccccggcagctgcagctggtggagagcctgagccgcaagctggcggtgctgcgggaggcgcagcggggactgcaggaggacatcagcgccaacggggctctgggygaggaggtggcagcccgcctgcaggcgctctgcacgccgggcgagttcgacaagtaccgcctcttcgtgggggacctggacaaggtggtcaacctgctgctgtccctgtcgggccgcctggcgcgggtggagaacgcgctgagcgctctggggccgcacgccgcctccgaggataaggtgtgcagtgggaacggcgggggcgtatggggtcgggctgcagcggggccgtgggacccatgtcctgggtgtsgtctgcaggtggccctgcgggagaagcagcggctgctggcggcgcagctg

SEQ ID NO: 85417 - DNA, 600 bp, Chicken  19866894384314_3
aggcgcagcggggactgcaggaggacatcagcgccaacggggctctgggygaggaggtggcagcccgcctgcaggcgctctgcacgccgggcgagttcgacaagtaccgcctcttcgtgggggacctggacaaggtggtcaacctgctgctgtccctgtcgggccgcctggcgcgggtggagaacgcgctgagcgctctggggccgcacgccgcctccgaggataaggtgtgcagtgggaacggcgggggcgtatggggtcgggctgcagcggggccgtgggacccatgtcctgggtgtsgtctgcaggtggccctgcgggagaagcagcggctgctggcggcgcagctggaggacgccaaggagctgcgggagcacgtggggcggcgggaggaggcggtgggcgccatggtggcccgctatctgccccccgagcagctgcaggactaccggcacttcgtcaagatgaagtcggcgctgacggccgagcagcgcgagctggacgagaagatcaagctggggcaggagcagctgcgctgcctgcgggagagcctcggccaggcgcccaccagctgctagccccatccatctgtccatccat

SEQ ID NO: 85418 - DNA, 599 bp, Chicken  19866894384319_1
  misc_feature (1)..(8): n is any nucleotide
nnnnnnnncactagcactttttgtagcctgaaaaaaaaatcagccgtgttataagcaaaaacattacaggtgtctttgttcaccatgtttttcatggatcctcccacgtaaaatggacttcttactcttatgttttgcttttgtttatagttttcttttagtaaaaatatttgtattatatatattaaaacttttgacaacatattataaaaatatatattttgggaattagtgctatttaaacataccactcttatggtgaataaaatcaaattgcctctgtttaaaaaaaaaaaaaakaataaaaatatatatattagtggaagtactatgaactctaacaaattatataaataaattggaatgacagtgtacttagcacaagctcacaaatcacgttttccatgggaaaaaatgtagaattgtaaagttctgtgactggatgtggaatcacatgtagttttccaacaactcttaattgcttttaagtgttctccagcattttacagtttctgagtttgatatagcagtaaattttgataaactcaggcatactaatgggttcatcataatggatccaaagctgcagtgtctacaag

SEQ ID NO: 85419 - DNA, 600 bp, Chicken  19866894384319_2
aatatatatattagtggaagtactatgaactctaacaaattatataaataaattggaatgacagtgtacttagcacaagctcacaaatcacgttttccatgggaaaaaatgtagaattgtaaagttctgtgactggatgtggaatcacatgtagttttccaacaactcttaattgcttttaagtgttctccagcattttacagtttctgagtttgatatagcagtaaattttgataaactcaggcatactaatgggttcatcataatggatccaaagctgcagtgtctacaagcaataayaaactacctaggatacactgtaattcaattttagtgcttgttaattagtttatgtaagaaaccataaattattattacataactgtaatttttgcaagtgctattttaagcagttgatgtggaattgggtgcatgtgacacagccagtatgacagagtgctagagttattctgtttacaataaacaatctgaatttaacatttggagttcttaatttcttttctttttttcttcttttcttttcttttctttttttttctttttcttttctttttttctttttgcatactggtaatgtta

SEQ ID NO: 85420 - DNA, 600 bp, Chicken  19866894384322_1
gaagacttctgtgaaagcttccaagtaattagaaggattaaattaagctacttaataaatagatagatagagcgcagctgcaaatgctgaatagcagctataagtagaccttacctatttccattgtgcaactttgtagttttcaatgtaaaaatgaataaagaaatgaacaacaaacaaataaatttcatctttaaaacaaagagttatcctacccgcagccactgtttctctgtgagagcatcactgtagtccacatccctgcgttgacgggatcctcttccaaatatcttttcttcytcttcttcacacgtgagcctttcaacttcagcatcatccttaataatccacgatggcaactcatcctcctccatcaagcggggcttgcgcttggggtttctggcatcttctctacgacggtccatgtccatacgctgaaatggtagatgggaaaggataaaacagttgtaaaggcaactaaaataaatcattggaattcctgccatgtaaaaatacttgaaactttaaaccaagttcttcgcaagtacttctcttcctctagcccaatacttgtataatgcagctatacaaagaagtagt

SEQ ID NO: 85421 - DNA, 600 bp, Chicken  19866894384324_1
gcatttatatgacagcttatttgctgtctcctgtttattatatcacatacttccacggtgtaccttccaaagatcccactcttgaccttgcacaaaggttttcattgctctgaacttcttcccccacagtccagagccgctgtctctcttgcatcttttttgaagtggaatgatgaaaatataaaacagataatgtactgagcaactgctatagtagcataactttttaaatgctatcatagtgtaacctgttcctgaaacagacatggaacgctgacattccaactcctctttgcacaytttttctcactaatacctgttacctgtagttacactcagtttagaataaagcagtatggtgaataaactttgtaagtagacaataaagtaagaattctagtacctttacagaagttgaaagtggtggcagacctgaatctgtagcagtgaccgtcaaggaattatacaggggaaaagcctgtttatttaagtctcttgttaatgtgagtactcctgaggtactggaaagattaaagaggccttctgagttcccatctgaaaagggaaaaaacaacagagaccagtgactgaattatatgc

SEQ ID NO: 85422 - DNA, 599 bp, Chicken  19866894384331_1
  misc_feature (1)..(94): n is any nucleotide
nnnnnnnnnnnnnnnnnnnnnnnnnnnnnnnnnnnnnnnnnnnnnnnnnnnnnnnnnnnnnnnnnnnnnnnnnnnnnnnnnnnnnnnnnnnnnntcacataagagacgcctcataagaggaatcaatgtttcaccatgagagatcatgagcaacatttaccttccatactgcacaggcacaaaatctattaatccagtctgacctgccttcagcacatcatacatcttgcctctgttctaccactagacagtacttacatatcgtccaattaaataaggggaaaaaaagcaggataacaytttgttggcaatatccttgcaacaaaaatattagaaatactgctaatcacagcagacaattctgttccacctttaagcgccattttcatctgtaattaacataagcaatgagtttgttttttttaaagcattaaacatagaaaattacattaaaactttacattaaaaacctatgacaatactgtaacgtcctgctgctcattagagctccttctctttccttagtatactgggaactgtacagtaggcaagtacctccaattaatcatggaagttcctgcagaaatgaaatgctccaa

SEQ ID NO: 85423 - DNA, 599 bp, Chicken  19866894384336_1
  misc_feature (1)..(192): n is any nucleotide
nnnnnnnnnnnnnnnnnnnnnnnnnnnnnnnnnnnnnnnnnnnnnnnnnnnnnnnnnnnnnnnnnnnnnnnnnnnnnnnnnnnnnnnnnnnnnnnnnnnnnnnnnnnnnnnnnnnnnnnnnnnnnnnnnnnnnnnnnnnnnnnnnnnnnnnnnnnnnnnnnnnnnnnnnnnnnnnnnnnnnnnnnnnnnnnnatacgcaagcagtgtgccataatttttccctggaaaacagtcgaattcattttaagcatcctcccatgaaaatcaggcacaggtactctgggtttcatgctgtatttytgtatatattaatggatgtatattatccctcttatttttttcttttttttccaagttgtggaaaagaatgtgcccctacagcgagacaaagcaaagtagacttcaatgtttatctgaagtttctagttgccagcatataggatgaaaaataattggagacgtcatcagctgttataggtcatactaaaaactagagtagctatcacagagtcttacatttcttatgtacatacaagctatcaggagcacaaataaaatcaaactttagccaagctccctccacagccagaagcttggtt

SEQ ID NO: 85424 - DNA, 600 bp, Chicken  19866894384336_2
ttatttttttcttttttttccaagttgtggaaaagaatgtgcccctacagcgagacaaagcaaagtagacttcaatgtttatctgaagtttctagttgccagcatataggatgaaaaataattggagacgtcatcagctgttataggtcatactaaaaactagagtagctatcacagagtcttacatttcttatgtacatacaagctatcaggagcacaaataaaatcaaactttagccaagctccctccacagccagaagcttggttccagttaaaaccactaagctaaatgttacctytcaagaattcctctagaacttaagcccagacatacactacaacataacatttttgtctctcttttaaagcatactttacatgcagtggtcaggatgaggacatgagggccaccaggcttcaggacagcagctttcacggtgaggtgggtgggagctagcaaaagggccatgcaggctgaggtaggagcagccactatggctgtcgtgggagaggaagcactgaaacaccgtgaatttttttctgtgatttccaagagactgttttctaagagaagagttcacatgtattctactccatct

SEQ ID NO: 85425 - DNA, 600 bp, Chicken  19866894384340_1
aggtggttttgaacatgcatgcatccttctgctccacccactgctgcaaaaaaacaagagtgcaatggttcagaagtgcttatgtgtaagaaaccattccctgactaatcccccggcacccctcatcttttccatcagctgttttacagagaattgccaggatgcagccagggctgaccactgcagaccattacagatacagtatctaaaaagcctgcttaacacaactttctgtaagccatcttagaacagtgctgttcaactttcaaatactcagtgtatttgcaatttctgctccartgtggtcaagaaaaattaacycccaaacctttatgcatgtgtgtctggcagcccctcccatggcagaacagcatgttacaaaccatggttcctatggagtgacacagtctgggtgctgctggaggggctgcagaaagagtcagcatcactggaggaggcccaggcagggattgggctcctcaccttccctgagagtgcmgggctgtgtyggcaggaggcagacaggactggcaagtccctgcagtatcctctgagtttgtttccatggagttttgccctacaaagagcctaaaattttaa

SEQ ID NO: 85426 - DNA, 600 bp, Chicken  19866894384340_2
catccttctgctccacccactgctgcaaaaaaacaagagtgcaatggttcagaagtgcttatgtgtaagaaaccattccctgactaatcccccggcacccctcatcttttccatcagctgttttacagagaattgccaggatgcagccagggctgaccactgcagaccattacagatacagtatctaaaaagcctgcttaacacaactttctgtaagccatcttagaacagtgctgttcaactttcaaatactcagtgtatttgcaatttctgctccartgtggtcaagaaaaattaacycccaaacctttatgcatgtgtgtctggcagcccctcccatggcagaacagcatgttacaaaccatggttcctatggagtgacacagtctgggtgctgctggaggggctgcagaaagagtcagcatcactggaggaggcccaggcagggattgggctcctcaccttccctgagagtgcmgggctgtgtyggcaggaggcagacaggactggcaagtccctgcagtatcctctgagtttgtttccatggagttttgccctacaaagagcctaaaattttaatgccgatgcacattaatgcag

SEQ ID NO: 85427 - DNA, 600 bp, Chicken  19866894384340_3
cagtatctaaaaagcctgcttaacacaactttctgtaagccatcttagaacagtgctgttcaactttcaaatactcagtgtatttgcaatttctgctccartgtggtcaagaaaaattaacycccaaacctttatgcatgtgtgtctggcagcccctcccatggcagaacagcatgttacaaaccatggttcctatggagtgacacagtctgggtgctgctggaggggctgcagaaagagtcagcatcactggaggaggcccaggcagggattgggctcctcaccttccctgagagtgcmgggctgtgtyggcaggaggcagacaggactggcaagtccctgcagtatcctctgagtttgtttccatggagttttgccctacaaagagcctaaaattttaatgccgatgcacattaatgcagagggctggagcaggcttcccagagagatagatggctgatgcctcatggctctcagtgctcaggaagcaatgacctcaataacaggctttaagttttggtcagcactgtaacggtcaagcagttagactggggtgatctttataggtcgcttccaactgctctgctctgctctgctctg

SEQ ID NO: 85428 - DNA, 600 bp, Chicken  19866894384340_4
aaagcctgcttaacacaactttctgtaagccatcttagaacagtgctgttcaactttcaaatactcagtgtatttgcaatttctgctccartgtggtcaagaaaaattaacycccaaacctttatgcatgtgtgtctggcagcccctcccatggcagaacagcatgttacaaaccatggttcctatggagtgacacagtctgggtgctgctggaggggctgcagaaagagtcagcatcactggaggaggcccaggcagggattgggctcctcaccttccctgagagtgcmgggctgtgtyggcaggaggcagacaggactggcaagtccctgcagtatcctctgagtttgtttccatggagttttgccctacaaagagcctaaaattttaatgccgatgcacattaatgcagagggctggagcaggcttcccagagagatagatggctgatgcctcatggctctcagtgctcaggaagcaatgacctcaataacaggctttaagttttggtcagcactgtaacggtcaagcagttagactggggtgatctttataggtcgcttccaactgctctgctctgctctgctctgctctgctctg

SEQ ID NO: 85429 - DNA, 599 bp, Chicken  19866894384363_1
  misc_feature (1)..(279): n is any nucleotide
nnnnnnnnnnnnnnnnnnnnnnnnnnnnnnnnnnnnnnnnnnnnnnnnnnnnnnnnnnnnnnnnnnnnnnnnnnnnnnnnnnnnnnnnnnnnnnnnnnnnnnnnnnnnnnnnnnnnnnnnnnnnnnnnnnnnnnnnnnnnnnnnnnnnnnnnnnnnnnnnnnnnnnnnnnnnnnnnnnnnnnnnnnnnnnnnnnnnnnnnnnnnnnnnnnnnnnnnnnnnnnnnnnnnnnnnnnnnnnnnnnnnnnnnnnnnnnnnnnnnnnnnnnnnnnnnnnnnnnntgattatcacgtgtttaaaawaaaagattcatagagtagaagtcatattgcaaactccttagtaagcagtgacttgcatagtgactttctttggttgcgttactcatgcatactgttgctaaattagaataagctcacagtatggctcctggtttcataaggaggacatagcagtgttagaaataaaaattgctcaaaatcctttaaatcaagccagacactgttgtcttgctttgytttttttcctaatgttataatagtttgcttgatgttgtagttccaaacaaaattrtagaattgctaatatttttctagatctg

SEQ ID NO: 85430 - DNA, 599 bp, Chicken  19866894384363_2
  misc_feature (1)..(63): n is any nucleotide
nnnnnnnnnnnnnnnnnnnnnnnnnnnnnnnnnnnnnnnnnnnnnnnnnnnnnnnnnnnnnnntgattatcacgtgtttaaaawaaaagattcatagagtagaagtcatattgcaaactccttagtaagcagtgacttgcatagtgactttctttggttgcgttactcatgcatactgttgctaaattagaataagctcacagtatggctcctggtttcataaggaggacatagcagtgttagaaataaaaattgctcaaaatcctttaaatcaagccagacactgttgtcttgctttgytttttttcctaatgttataatagtttgcttgatgttgtagttccaaacaaaattrtagaattgctaatatttttctagatctgaactttcagatcctgacctctgactcacccaatgacaatgaatacagtttaaaactggtgcagtccccatcatctcagcatctcttttgtcaaggaaaaatctcacctcccacagatattattccaaatgaagtttcagatcctggaggacaagttgaggtcagattagtttttcttgctacaacagtttgaattcatgatgcctttactataaat

SEQ ID NO: 85431 - DNA, 599 bp, Chicken  19866894384363_3
  misc_feature (1)..(8): n is any nucleotide
nnnnnnnntgattatcacgtgtttaaaawaaaagattcatagagtagaagtcatattgcaaactccttagtaagcagtgacttgcatagtgactttctttggttgcgttactcatgcatactgttgctaaattagaataagctcacagtatggctcctggtttcataaggaggacatagcagtgttagaaataaaaattgctcaaaatcctttaaatcaagccagacactgttgtcttgctttgytttttttcctaatgttataatagtttgcttgatgttgtagttccaaacaaaattrtagaattgctaatatttttctagatctgaactttcagatcctgacctctgactcacccaatgacaatgaatacagtttaaaactggtgcagtccccatcatctcagcatctcttttgtcaaggaaaaatctcacctcccacagatattattccaaatgaagtttcagatcctggaggacaagttgaggtcagattagtttttcttgctacaacagtttgaattcatgatgcctttactataaataaagtataaaattgcagctctgagattaacactccctctccattcagagccttag

SEQ ID NO: 85432 - DNA, 600 bp, Chicken  19866894384363_4
cttctatgaagacttgtcactgttttctggtgataggtgatttttggttgttttttgttgttgttgtttgttttgttttttgaggcagtttttaagtctgtacaactctggtccattttaatagatgcactcattaatgaggaatatattctattaataattaaacataactgtgctgtgagctgcaatttgcatttgttaaagccaaacaaaatgtctctggccccttaggaataagcagggaaaaacttcatgtgtatgaagtaggagtgtggaatcaaagtaacaaaataaagtgartgaggtctgagagaacaattggataactacagttagagattactttgaaattacacatgttaacaggtgaaaatgcaaaataacatttttgcttggagcactctgagcagtttgatggtaacctccttttaagtaacaattttctaaagtcaagaagtgtttcatgccaggcagtatttctttgctaacaaggggagataatagtcatgccagtgaccgtcattcttatagaatagaatcatagaatcttcaaggttggaaaagacctccaagatcatccagtccaaccattcacctatc

SEQ ID NO: 85433 - DNA, 599 bp, Chicken  19866894384364_1
  misc_feature (1)..(68): n is any nucleotide
nnnnnnnnnnnnnnnnnnnnnnnnnnnnnnnnnnnnnnnnnnnnnnnnnnnnnnnnnnnnnnnnnnnntgaaagcccttgagagcaagcctgaacaagatttcactagaaatcatgcatgtcattacaactattcttcttcagaataggttcgctccatttaaaatgttgatcactctaatactatttccaatgaaaagtgtatgttagcatctagcacctgaaaaagcgaaagaaactagattttaaaggcagcgtattttgaagaaagcagcgtgtgacctcaccttaaatccttccytggcctatccttattgtgtgtcataaatttcttcartgatgtaattacaagagagacaagatgggcagaagaggagatgaggagraggagaaggaagaggaaaatcatgaaagatatttaagaaaactctggccaaagggagaacggagatgtccaagatgtaatacagaagtgtgtaggttgctcagggacagaagcagtgtttctaaagggcattagttaccttgagcacctctagcacycatgggaagctgtaatatcactgactacttacatcctcttttcttttccctttattt

SEQ ID NO: 85434 - DNA, 599 bp, Chicken  19866894384364_2
  misc_feature (1)..(32): n is any nucleotide
nnnnnnnnnnnnnnnnnnnnnnnnnnnnnnnntgaaagcccttgagagcaagcctgaacaagatttcactagaaatcatgcatgtcattacaactattcttcttcagaataggttcgctccatttaaaatgttgatcactctaatactatttccaatgaaaagtgtatgttagcatctagcacctgaaaaagcgaaagaaactagattttaaaggcagcgtattttgaagaaagcagcgtgtgacctcaccttaaatccttccytggcctatccttattgtgtgtcataaatttcttcartgatgtaattacaagagagacaagatgggcagaagaggagatgaggagraggagaaggaagaggaaaatcatgaaagatatttaagaaaactctggccaaagggagaacggagatgtccaagatgtaatacagaagtgtgtaggttgctcagggacagaagcagtgtttctaaagggcattagttaccttgagcacctctagcacycatgggaagctgtaatatcactgactacttacatcctcttttcttttccctttattttaaaattgatttttcatttttatttttgttaatcag

SEQ ID NO: 85435 - DNA, 600 bp, Chicken  19866894384364_3
aagcctgaacaagatttcactagaaatcatgcatgtcattacaactattcttcttcagaataggttcgctccatttaaaatgttgatcactctaatactatttccaatgaaaagtgtatgttagcatctagcacctgaaaaagcgaaagaaactagattttaaaggcagcgtattttgaagaaagcagcgtgtgacctcaccttaaatccttccytggcctatccttattgtgtgtcataaatttcttcartgatgtaattacaagagagacaagatgggcagaagaggagatgaggagraggagaaggaagaggaaaatcatgaaagatatttaagaaaactctggccaaagggagaacggagatgtccaagatgtaatacagaagtgtgtaggttgctcagggacagaagcagtgtttctaaagggcattagttaccttgagcacctctagcacycatgggaagctgtaatatcactgactacttacatcctcttttcttttccctttattttaaaattgatttttcatttttatttttgttaatcagctggttttagccaccttatcagcaggactttggctatcccatacyttcca

SEQ ID NO: 85436 - DNA, 600 bp, Chicken  19866894384364_4
ttttaaaggcagcgtattttgaagaaagcagcgtgtgacctcaccttaaatccttccytggcctatccttattgtgtgtcataaatttcttcartgatgtaattacaagagagacaagatgggcagaagaggagatgaggagraggagaaggaagaggaaaatcatgaaagatatttaagaaaactctggccaaagggagaacggagatgtccaagatgtaatacagaagtgtgtaggttgctcagggacagaagcagtgtttctaaagggcattagttaccttgagcacctctagcacycatgggaagctgtaatatcactgactacttacatcctcttttcttttccctttattttaaaattgatttttcatttttatttttgttaatcagctggttttagccaccttatcagcaggactttggctatcccatacyttccacaggtcactttgcctttcggagtaccctttccatgctcaagaactttgcataacagcttaaaatcaaatttgctttaccacagagtctcaaaggtggcatttcttcaagtttatatgaactaaaaaatgtgtcccatacaaaaacacatgctccata

SEQ ID NO: 85437 - DNA, 600 bp, Chicken  19866894384364_5
ggagraggagaaggaagaggaaaatcatgaaagatatttaagaaaactctggccaaagggagaacggagatgtccaagatgtaatacagaagtgtgtaggttgctcagggacagaagcagtgtttctaaagggcattagttaccttgagcacctctagcacycatgggaagctgtaatatcactgactacttacatcctcttttcttttccctttattttaaaattgatttttcatttttatttttgttaatcagctggttttagccaccttatcagcaggactttggctatcccatacyttccacaggtcactttgcctttcggagtaccctttccatgctcaagaactttgcataacagcttaaaatcaaatttgctttaccacagagtctcaaaggtggcatttcttcaagtttatatgaactaaaaaatgtgtcccatacaaaaacacatgctccatatatatgcctctgtacatattgaggaaaaactaatgcccttaccattcactagccatcagggattcaattgttggggggagagagtggaaatctgacatcactacttctaaatctaagtaactgctagttaatggtggg

SEQ ID NO: 85438 - DNA, 600 bp, Chicken  19866894384372_1
tctaccaggacagcttctaccaggagagctgcatgtttggaagcacctgactacgtcccagcaaagcacagcagccacccacatctgtgggaacccacagaggcacggcattggagtctgcacatcccatagggcttaaggcaccacagcaccttcagatacatcctgccactgacacaagaagaggatgctgaggctctgttgtgctgaaccctgagaagagctacaccaaatagccatgaccagtagccaacttccttttcgttacacagctctggaaaacaggatttggaccaggtyccatctccaaaccaagggtccatgtgcagttccttgaacacacctgagtcacacccacccttaacccctgcacgccgcagccccgcagcctgcccaatgtgctcggtgaccgaggagctcgctgccagctacaacacactgctgtgcactgcgcgtttcgcttacctttttggctctggattcggctgggatttggaatctttcctttttttggactcctttttggaatccttttttgtctccacttcagcagcggagggctgagacactttgcccccctcgccgtctgtgcttggctgt

SEQ ID NO: 85439 - DNA, 600 bp, Chicken  19866894384376_1
aatgtttatttgaacttaaaagttaaaaatgtaaagagttgaactgagacatgctgttgggaatttggctgttgctgaacaaccagcctctgtggcacttccttgttaggaatcttcaatatgagcaaaaattcttctctgattcatccttgctgcctttcccttagttgagaatttttaacaaatcctttaaataagttccttagaccctcttgtaaagtcaaatgcccttgctattgtacacctggaataaatgttgccccttatacatagccccaagagtgtggctcagagaaatayagatgcatcataaagctcccaggagtcacttcccctggtaaagacttatttgtgggtatgatcatttaagcacaaacacagaactatacctagcgtccagtggaaattaatcgaacaacacgatttccagcacaactacatgtcatgagtctcttatttttgttgtctcagacttttctcttttccttcacatcttcagagatttgtgtttttcacagaaacacttaaattgacttttaaatctcatgttgcagatccagtccccctctcctgggttgcctttccctccttggtgacact

SEQ ID NO: 85440 - DNA, 599 bp, Chicken  19866894384377_1
  misc_feature (1)..(121): n is any nucleotide
nnnnnnnnnnnnnnnnnnnnnnnnnnnnnnnnnnnnnnnnnnnnnnnnnnnnnnnnnnnnnnnnnnnnnnnnnnnnnnnnnnnnnnnnnnnnnnnnnnnnnnnnnnnnnnnnnnnnnnnnntacatcttgccagttccctgtactttgtgaggtcgtgatcttttaagtcaatgtggcgtgattttgcagacaaattttcaataagggccattgatcagcagcaacctatacccctaacttggaaaacagaaccaaccttatttgggtagatcaatggcccttaacagaggaaaagttgstgcatttacatgagctaattcaagaaccgctaggctgctggtcacatagtgcctactaccagcccttggaatactccagtctttgttatcctcaagaagagtcaaaaatggaggcttttacaggacctgtgcactgtcaacgctgtaattgagcccatgggggtgttgcagcctggtcttccttcrccttcaatgttaccttcaaattggccaatagcagtcattgatttcaaagacttaccattcaacttcatccaaaagacgcaccatgattcactttctcagtgccctccatcaac

SEQ ID NO: 85441 - DNA, 600 bp, Chicken  19866894384377_2
gcagacaaattttcaataagggccattgatcagcagcaacctatacccctaacttggaaaacagaaccaaccttatttgggtagatcaatggcccttaacagaggaaaagttgstgcatttacatgagctaattcaagaaccgctaggctgctggtcacatagtgcctactaccagcccttggaatactccagtctttgttatcctcaagaagagtcaaaaatggaggcttttacaggacctgtgcactgtcaacgctgtaattgagcccatgggggtgttgcagcctggtcttccttcrccttcaatgttaccttcaaattggccaatagcagtcattgatttcaaagacttaccattcaacttcatccaaaagacgcaccatgattcactttctcagtgccctccatcaaccaacaaagccctgctcagcagtatcattggaccgtgttaccacatggaatgcttagtagtccaacaatatgtcatttgactgtagcaagtgcattacaaccagtacaaaatgctagacctcgcgtccttctttatcattacgtggacgatatattagtagcagcagaacaagaagagagtctaaagg

SEQ ID NO: 85442 - DNA, 600 bp, Chicken  19866894384377_3
taactaccctgctttgtttgcacagctccagcgagttttacgttatctctcaccgtactcttccttattttattatgcatattcgatcacacagcaaattgcctggtcctttaactgagggcaaccgtaaggctgatcaagccacagttgcctttgctacccctcaattatttcagcaagcgtgactctcccattattttttccattagaataggagagccttacagaaacaattccaactgacagtggatcaagcccataacattattctaacatgcccagactgccaggcaattgccyctttgcctcaaactgggacaaatccccrtggcacagcacctcttcaactgtggcagacagatgttactcatgctcctgaatttggccatctaagatatgtacatgtaacaatagattctcattcttcttacatgtttgccacagcacatacaggcaaatgcagtcgtgatgcatgtaaacactggytatctgcttacgctgctatggggatcccacatactataaagacagataatggacctgagtatacttgtaaggccactcagactttcctccaagaatggggyggttaggcatatt

SEQ ID NO: 85443 - DNA, 600 bp, Chicken  19866894384377_4
cagcgagttttacgttatctctcaccgtactcttccttattttattatgcatattcgatcacacagcaaattgcctggtcctttaactgagggcaaccgtaaggctgatcaagccacagttgcctttgctacccctcaattatttcagcaagcgtgactctcccattattttttccattagaataggagagccttacagaaacaattccaactgacagtggatcaagcccataacattattctaacatgcccagactgccaggcaattgccyctttgcctcaaactgggacaaatccccrtggcacagcacctcttcaactgtggcagacagatgttactcatgctcctgaatttggccatctaagatatgtacatgtaacaatagattctcattcttcttacatgtttgccacagcacatacaggcaaatgcagtcgtgatgcatgtaaacactggytatctgcttacgctgctatggggatcccacatactataaagacagataatggacctgagtatacttgtaaggccactcagactttcctccaagaatggggyggttaggcatattacaggcattcctcattctcccaccggac

SEQ ID NO: 85444 - DNA, 600 bp, Chicken  19866894384377_5
tctcccattattttttccattagaataggagagccttacagaaacaattccaactgacagtggatcaagcccataacattattctaacatgcccagactgccaggcaattgccyctttgcctcaaactgggacaaatccccrtggcacagcacctcttcaactgtggcagacagatgttactcatgctcctgaatttggccatctaagatatgtacatgtaacaatagattctcattcttcttacatgtttgccacagcacatacaggcaaatgcagtcgtgatgcatgtaaacactggytatctgcttacgctgctatggggatcccacatactataaagacagataatggacctgagtatacttgtaaggccactcagactttcctccaagaatggggyggttaggcatattacaggcattcctcattctcccaccggacaagctatcactgagcgtactcaccaaacattgaaatccattcttaataaacaaaaaaaaaggggactatgggagacacgccacaagaaagattatatagggctttgcttgtgctgaattttttgaatcgtgatcatacagatataacttgggtggatc

SEQ ID NO: 85445 - DNA, 600 bp, Chicken  19866894384377_6
caggcaattgccyctttgcctcaaactgggacaaatccccrtggcacagcacctcttcaactgtggcagacagatgttactcatgctcctgaatttggccatctaagatatgtacatgtaacaatagattctcattcttcttacatgtttgccacagcacatacaggcaaatgcagtcgtgatgcatgtaaacactggytatctgcttacgctgctatggggatcccacatactataaagacagataatggacctgagtatacttgtaaggccactcagactttcctccaagaatggggyggttaggcatattacaggcattcctcattctcccaccggacaagctatcactgagcgtactcaccaaacattgaaatccattcttaataaacaaaaaaaaaggggactatgggagacacgccacaagaaagattatatagggctttgcttgtgctgaattttttgaatcgtgatcatacagatataacttgggtggatcgtcattttgggacctccccagtgctcaaggaacagcctattggttaacgttcggaatatggccacagagtcccttaccactgataacttggggtcgtggat

SEQ ID NO: 85446 - DNA, 600 bp, Chicken  19866894384379_1
aatgccttgtatgcaccgttaccatgcagcattactgaaataattattcatcttttagaagcattagaggtagcagggtcatgaatcattgaatcatagaatggtttgggttggaagggaccattaagatcacctagttccaaccccctgctataggcagggacaccaccctctagaccaggctgctcaaagccccatccagcccggacttgaatgcctcaggcaggcacattcacaacatcacttggcaacctgttgaggataggccttgttgtgcaaagactgggatcattccttctrcataagtaggaaactaggcagtctatttgtaaccacaaaatttatattaatattgcaaggacttattttcttttttagatattcctctttgaagtggaaagagtaaaaactaacaaaaaactggtagagtatatccagaagagcagggatttaaattgatagcctgaatctctttcacttcaccacagacaaatattttcccaaagtagcttaactaaaatctattgtaaggtatgccagaagaataaaaaagatttaattcacggtttattttgtccaccagtgaacagaacttatcac

SEQ ID NO: 85447 - DNA, 600 bp, Chicken  19866894384386_1
ctcttctgctgtccatgaggattccatgggtgccttgcgtttctgccagttcccagtttaatacactgctttattgcattttgtttgggattctctgcaacagatgcatttcatttcataaggtactttcatgactttttcctccaacttagtgaagctgctaaaattaagctgtttaaatacataatttggataaaatacttaacagaaggtcaatgcttacattttggactgtggtctctgagatcaaatgtggtgctataaggcttgtgctataaaagggaactgaggttccaatakwagtactaatagaaaacaggaaggtaaaactcattttcatccttcacttcaacgtggaacctcagcgctgcaygaatatgcattttgcattttctgtatataatcacaagtttgtaaggtgccttgggacttttgaagaaggcatagaataaatgaaaatcactttaattaaaagcaaattaaagggcctcctaatccaagcagcagcaccaagtccactgagactttttcagaatatagatcctggaaattacattgcttataaccctccctacttccagcctccttccctcacttccc

SEQ ID NO: 85448 - DNA, 600 bp, Chicken  19866894384386_2
tcttctgctgtccatgaggattccatgggtgccttgcgtttctgccagttcccagtttaatacactgctttattgcattttgtttgggattctctgcaacagatgcatttcatttcataaggtactttcatgactttttcctccaacttagtgaagctgctaaaattaagctgtttaaatacataatttggataaaatacttaacagaaggtcaatgcttacattttggactgtggtctctgagatcaaatgtggtgctataaggcttgtgctataaaagggaactgaggttccaatakwagtactaatagaaaacaggaaggtaaaactcattttcatccttcacttcaacgtggaacctcagcgctgcaygaatatgcattttgcattttctgtatataatcacaagtttgtaaggtgccttgggacttttgaagaaggcatagaataaatgaaaatcactttaattaaaagcaaattaaagggcctcctaatccaagcagcagcaccaagtccactgagactttttcagaatatagatcctggaaattacattgcttataaccctccctacttccagcctccttccctcacttcccc

SEQ ID NO: 85449 - DNA, 600 bp, Chicken  19866894384386_3
ttgcattttgtttgggattctctgcaacagatgcatttcatttcataaggtactttcatgactttttcctccaacttagtgaagctgctaaaattaagctgtttaaatacataatttggataaaatacttaacagaaggtcaatgcttacattttggactgtggtctctgagatcaaatgtggtgctataaggcttgtgctataaaagggaactgaggttccaatakwagtactaatagaaaacaggaaggtaaaactcattttcatccttcacttcaacgtggaacctcagcgctgcaygaatatgcattttgcattttctgtatataatcacaagtttgtaaggtgccttgggacttttgaagaaggcatagaataaatgaaaatcactttaattaaaagcaaattaaagggcctcctaatccaagcagcagcaccaagtccactgagactttttcagaatatagatcctggaaattacattgcttataaccctccctacttccagcctccttccctcacttccccctaaagaggctctcagtctgtaggagatcaggtttattatgaaaattctgctctagtttctaaaaaaaggtt

SEQ ID NO: 85450 - DNA, 599 bp, Chicken  19866894384394_1
  misc_feature (1)..(177): n is any nucleotide
nnnnnnnnnnnnnnnnnnnnnnnnnnnnnnnnnnnnnnnnnnnnnnnnnnnnnnnnnnnnnnnnnnnnnnnnnnnnnnnnnnnnnnnnnnnnnnnnnnnnnnnnnnnnnnnnnnnnnnnnnnnnnnnnnnnnnnnnnnnnnnnnnnnnnnnnnnnnnnnnnnnnnnnnnnnnnnnnnattagggaattgggaggtgaggaggaggtctggccagtggtctcagctgaaacagatatgtatttgccactgcctgtgtatggctgtgatagagtaagtagcatgtttggtgagtttcttctyaaaaaaaaaaagaatgaaaacaagtgaataaagttaaaaactgatttcataatcagtaccataacatacgtttttatatattattatttatatatttacttttatataacctagtggaatacctcacaacgtctcataaaacaaacattttccaaggaaacagcagtctcccaaaagagaacaacaagcaaaccttggatcagttactcagatttacctacgttcttactccacccacactatcaagtgaatcattcagttccttgatgcttctgaaggagactggtggccattatcca

SEQ ID NO: 85451 - DNA, 599 bp, Chicken  19866894384394_2
  misc_feature (1)..(176): n is any nucleotide
nnnnnnnnnnnnnnnnnnnnnnnnnnnnnnnnnnnnnnnnnnnnnnnnnnnnnnnnnnnnnnnnnnnnnnnnnnnnnnnnnnnnnnnnnnnnnnnnnnnnnnnnnnnnnnnnnnnnnnnnnnnnnnnnnnnnnnnnnnnnnnnnnnnnnnnnnnnnnnnnnnnnnnnnnnnnnnnnattagggaattgggaggtgaggaggaggtctggccagtggtctcagctgaaacagatatgtatttgccactgcctgtgtatggctgtgatagagtaagtagcatgtttggtgagtttcttctayaaaaaaaaaagaatgaaaacaagtgaataaagttaaaaactgatttcataatcagtaccataacatacgtttttatatattattatttatatatttacttttatataacctagtggaatacctcacaacgtctcataaaacaaacattttccaaggaaacagcagtctcccaaaagagaacaacaagcaaaccttggatcagttactcagatttacctacgttcttactccacccacactatcaagtgaatcattcagttccttgatgcttctgaaggagactggtggccattatccag

SEQ ID NO: 85452 - DNA, 599 bp, Chicken  19866894384394_3
  misc_feature (1)..(175): n is any nucleotide
nnnnnnnnnnnnnnnnnnnnnnnnnnnnnnnnnnnnnnnnnnnnnnnnnnnnnnnnnnnnnnnnnnnnnnnnnnnnnnnnnnnnnnnnnnnnnnnnnnnnnnnnnnnnnnnnnnnnnnnnnnnnnnnnnnnnnnnnnnnnnnnnnnnnnnnnnnnnnnnnnnnnnnnnnnnnnnnattagggaattgggaggtgaggaggaggtctggccagtggtctcagctgaaacagatatgtatttgccactgcctgtgtatggctgtgatagagtaagtagcatgtttggtgagtttcttctaayaaaaaaaaagaatgaaaacaagtgaataaagttaaaaactgatttcataatcagtaccataacatacgtttttatatattattatttatatatttacttttatataacctagtggaatacctcacaacgtctcataaaacaaacattttccaaggaaacagcagtctcccaaaagagaacaacaagcaaaccttggatcagttactcagatttacctacgttcttactccacccacactatcaagtgaatcattcagttccttgatgcttctgaaggagactggtggccattatccaga

SEQ ID NO: 85453 - DNA, 600 bp, Chicken  19866894384394_4
gaataaagttaaaaactgatttcataatcagtaccataacatacgtttttatatattattatttatatatttacttttatataacctagtggaatacctcacaacgtctcataaaacaaacattttccaaggaaacagcagtctcccaaaagagaacaacaagcaaaccttggatcagttactcagatttacctacgttcttactccacccacactatcaagtgaatcattcagttccttgatgcttctgaaggagactggtggccattatccagacctgcagacatttagaaatacacrtacactgctaatgagtagaaatgccaataactgagcatagcgtaatgagattacctgaagagatctggtgagaacactgaactaaactgatctgaaggtagtaaaaactcactctgggttaacctacttaatatatgaacatttctgtgttgttcatccaagagtttgtcatgagccattttagacccttcaaaggaaaactagaacatgaaaacccttacaggttaaaaaaaaaaaaaaaatcacttatgacttcaacagagttacagtacattaaatttaatatgagataaaacaatc

SEQ ID NO: 85454 - DNA, 599 bp, Chicken  19866894384400_1
  misc_feature (1)..(192): n is any nucleotide
nnnnnnnnnnnnnnnnnnnnnnnnnnnnnnnnnnnnnnnnnnnnnnnnnnnnnnnnnnnnnnnnnnnnnnnnnnnnnnnnnnnnnnnnnnnnnnnnnnnnnnnnnnnnnnnnnnnnnnnnnnnnnnnnnnnnnnnnnnnnnnnnnnnnnnnnnnnnnnnnnnnnnnnnnnnnnnnnnnnnnnnnnnnnnnnntctctctccgaaagccccatccgagcccacgtgttagggctgctggggtacggcaggcagcgcccatcgaggagccctcagcccctccgactggtttgccccgggacycccagcccatctccacagcagtcctgccgaccccatactgggccgatcccagcgcgaatccttcggccccatcgggatcagtcacccccgcgcgtgcccacggagccgcgtccccgcactgctcccccagcccggggcgggcacggcgcggggggtccgatggcagagatacgcccgcagcagcaccgcctcctgctgcagccaacccttcctctgcccctcgggaaacgccgagagatggaacctgtatttccagtcccgtaactgctccggccgagcgggggggacttagaagttct

SEQ ID NO: 85455 - DNA, 600 bp, Chicken  19866894384408_1
gcataataagacactagagagaaaaatgtaagccagcagcgtcagggaggattaggggtatgagtgctttgctctattagtatgtattggtgcagccagccatgtttgaattacaatttgatataatttgggaacgcattgcattgtaacaacattagactgtgttctgtgcatttgaagagaatttaaaggaatcaggcacttcagtgctattgaaattcagtgagccatctgtggtgctttgtaaactgtggggattgcttatcttttccataggtctctatcaagtactatcctagygtcttcagcatgcatcgtacccactcaaactagagctgtacatgattytttccccagtattatcagcagttgaaattatcactgggcaatatactctgaaaccagtcatttaatgccaatatgtaccagtaatgcaactttacctgggttttcacaaacatttgctataatgcctgcaggctctgttgttattacatctattatatcaattayctggcattgagagtttatcatttaccttatcactagttgagatacatgtctttgcttggtccctcattctgataggatcaaacaaaa

SEQ ID NO: 85456 - DNA, 600 bp, Chicken  19866894384408_2
ggattaggggtatgagtgctttgctctattagtatgtattggtgcagccagccatgtttgaattacaatttgatataatttgggaacgcattgcattgtaacaacattagactgtgttctgtgcatttgaagagaatttaaaggaatcaggcacttcagtgctattgaaattcagtgagccatctgtggtgctttgtaaactgtggggattgcttatcttttccataggtctctatcaagtactatcctagygtcttcagcatgcatcgtacccactcaaactagagctgtacatgattytttccccagtattatcagcagttgaaattatcactgggcaatatactctgaaaccagtcatttaatgccaatatgtaccagtaatgcaactttacctgggttttcacaaacatttgctataatgcctgcaggctctgttgttattacatctattatatcaattayctggcattgagagtttatcatttaccttatcactagttgagatacatgtctttgcttggtccctcattctgataggatcaaacaaaaatcaggtgttttcaagtactccacagcatctcccaatcccattttatg

SEQ ID NO: 85457 - DNA, 600 bp, Chicken  19866894384408_3
tgaaattcagtgagccatctgtggtgctttgtaaactgtggggattgcttatcttttccataggtctctatcaagtactatcctagygtcttcagcatgcatcgtacccactcaaactagagctgtacatgattytttccccagtattatcagcagttgaaattatcactgggcaatatactctgaaaccagtcatttaatgccaatatgtaccagtaatgcaactttacctgggttttcacaaacatttgctataatgcctgcaggctctgttgttattacatctattatatcaattayctggcattgagagtttatcatttaccttatcactagttgagatacatgtctttgcttggtccctcattctgataggatcaaacaaaaatcaggtgttttcaagtactccacagcatctcccaatcccattttatgcttttattagagtagcaaagtatcacagtgaatcagactgcagacttgtctttttattttttatagtattcttctactttctcatgcgtttctctgattttggtgattccttatagacagatacaaaagcattttagtattttatcttcataaatctttctttta

SEQ ID NO: 85458 - DNA, 600 bp, Chicken  19866894384422_1
ttcacaacagtgtcactttccaacagatgaatgttgggatcgttcctcatgcgtttctgtatgtaccagttgtagcagatcacagtcgtgttccctcccccacctccattttcatttctgttatacttctgagcaggcaagcagcctgggcatgttacttactgccctgttttcaaaggcatagaaatcctgcctcacgtctcagatttgctggacacgtggcaccaggtgactgctgcccttctcgtcttggggaaagagaaaggaaaaagagagatcaattccagatttgcttgaatkggtcacaccatcgttaccacacaatgccaagtatttttagtgaacggaaactgcaagctgtctaatccctctgagacagttacagtgagcttatcattgtaagtagggaccaattctcctttcccttgcgacctccaattagcatccctctgactactcccatgtagagcattactatttctagccctgggagtgactatgcctgtgtttggagccttcccgcacctgccctgagaagtggcagctttgtcttccatgtcctccgtgctgggtggctgtccagcagcaaagctttagtgt

SEQ ID NO: 85459 - DNA, 600 bp, Chicken  19866894384422_2
ctaccgcggcgcgaggagaagcagcgcagcgcctcgagccgcaccgccatggcggcggaggggcggcccggccgtgagcagctcgcccacgtggcggcagctccggagccggacggacggttcggccccgccagagggagccggagaccgccaagcccgcggctgaggtaaggagaggtcgtcgtgcggaggagacggtggcggagccccgggcgctggcagcggggtattcccgtccgtgtcacgctgccccggggcggctcagccgcagcccgtccctgcgggcctggcgtgggcttytggggtctgtaatgaagctgcgacggccagctcaggtccccgctctgcagctcgcgatctgcaatttgtataattcgatgtgacagtaattccacggtcattatgtttattttcgagatgccctgcgaggcgctgagtccccrctcggttattttcccggctttcccrgtcatgctgtggtaactggctgggtgattcctgggcacggccctgtgccggagctcctgaggtgctctcgtttgtgcccggacggagtgtgggcygtgctcacccccgcatccccactgcagccctacctga

SEQ ID NO: 85460 - DNA, 600 bp, Chicken  19866894384422_3
gagaccgccaagcccgcggctgaggtaaggagaggtcgtcgtgcggaggagacggtggcggagccccgggcgctggcagcggggtattcccgtccgtgtcacgctgccccggggcggctcagccgcagcccgtccctgcgggcctggcgtgggcttytggggtctgtaatgaagctgcgacggccagctcaggtccccgctctgcagctcgcgatctgcaatttgtataattcgatgtgacagtaattccacggtcattatgtttattttcgagatgccctgcgaggcgctgagtccccrctcggttattttcccggctttcccrgtcatgctgtggtaactggctgggtgattcctgggcacggccctgtgccggagctcctgaggtgctctcgtttgtgcccggacggagtgtgggcygtgctcacccccgcatccccactgcagccctacctgacgtctcctcagagattctaatgccacaggtgtttgctgcttctgttctatgtttgcaacttttttgttgttgttgttttaattgctgtgtttaccttcaggtgcttgttaatttctgaggaaggcaagtgcagcttcattatg

SEQ ID NO: 85461 - DNA, 600 bp, Chicken  19866894384422_4
taaggagaggtcgtcgtgcggaggagacggtggcggagccccgggcgctggcagcggggtattcccgtccgtgtcacgctgccccggggcggctcagccgcagcccgtccctgcgggcctggcgtgggcttytggggtctgtaatgaagctgcgacggccagctcaggtccccgctctgcagctcgcgatctgcaatttgtataattcgatgtgacagtaattccacggtcattatgtttattttcgagatgccctgcgaggcgctgagtccccrctcggttattttcccggctttcccrgtcatgctgtggtaactggctgggtgattcctgggcacggccctgtgccggagctcctgaggtgctctcgtttgtgcccggacggagtgtgggcygtgctcacccccgcatccccactgcagccctacctgacgtctcctcagagattctaatgccacaggtgtttgctgcttctgttctatgtttgcaacttttttgttgttgttgttttaattgctgtgtttaccttcaggtgcttgttaatttctgaggaaggcaagtgcagcttcattatgtcattttctgagagctagttaccaa

SEQ ID NO: 85462 - DNA, 600 bp, Chicken  19866894384422_5
agccgcagcccgtccctgcgggcctggcgtgggcttytggggtctgtaatgaagctgcgacggccagctcaggtccccgctctgcagctcgcgatctgcaatttgtataattcgatgtgacagtaattccacggtcattatgtttattttcgagatgccctgcgaggcgctgagtccccrctcggttattttcccggctttcccrgtcatgctgtggtaactggctgggtgattcctgggcacggccctgtgccggagctcctgaggtgctctcgtttgtgcccggacggagtgtgggcygtgctcacccccgcatccccactgcagccctacctgacgtctcctcagagattctaatgccacaggtgtttgctgcttctgttctatgtttgcaacttttttgttgttgttgttttaattgctgtgtttaccttcaggtgcttgttaatttctgaggaaggcaagtgcagcttcattatgtcattttctgagagctagttaccaaaaacagctcggcacagtgaagtgtggtactgttaaatgccaggaaatgttaatcgcagctgtccttgagctgtatctgaatcttggattaaaccc

SEQ ID NO: 85463 - DNA, 600 bp, Chicken  19866894384423_1
ccagctccatgcttaaagactgcctcctccagaaaagaaaggagggtgatagtcataggtgacttccctctgagaggaacagagggcccaatatggcagcctgaccctaccattagggaggcgtgctgcctccctgaggctcggtcaggggtatttctagaaaactttccagtctgatccacccttctgattaccatcctttattgatagttcagactggcagtgatgaggtcactgacagaagcctgaggactataaaaaatgattttaggggactgggaaggttagttcatggagcakgcatacragtagcatttgcctgtattcttacagtaatagggaaggacactgctatgaccaggaaaacccatctcataaacacatggctgagaggcttgtgcaaacgcaagaattttgggttctttgatcatggggctgtctactcagcacctagcctgaggtctgccgatgggtatcacctatctcaaagggaggtcttttcccaggaaacagatccttgcccagaaggtggcaggacttgtcaagagggctttaaactagatatgaaaggggaaggggataaaaccaggcctgctagag

SEQ ID NO: 85464 - DNA, 600 bp, Chicken  19866894384423_2
catgcttaaagactgcctcctccagaaaagaaaggagggtgatagtcataggtgacttccctctgagaggaacagagggcccaatatggcagcctgaccctaccattagggaggcgtgctgcctccctgaggctcggtcaggggtatttctagaaaactttccagtctgatccacccttctgattaccatcctttattgatagttcagactggcagtgatgaggtcactgacagaagcctgaggactataaaaaatgattttaggggactgggaaggttagttcatggagcakgcatacragtagcatttgcctgtattcttacagtaatagggaaggacactgctatgaccaggaaaacccatctcataaacacatggctgagaggcttgtgcaaacgcaagaattttgggttctttgatcatggggctgtctactcagcacctagcctgaggtctgccgatgggtatcacctatctcaaagggaggtcttttcccaggaaacagatccttgcccagaaggtggcaggacttgtcaagagggctttaaactagatatgaaaggggaaggggataaaaccaggcctgctagagatgagcc

SEQ ID NO: 85465 - DNA, 600 bp, Chicken  19866894384423_3
aggaaaacccatctcataaacacatggctgagaggcttgtgcaaacgcaagaattttgggttctttgatcatggggctgtctactcagcacctagcctgaggtctgccgatgggtatcacctatctcaaagggaggtcttttcccaggaaacagatccttgcccagaaggtggcaggacttgtcaagagggctttaaactagatatgaaaggggaaggggataaaaccaggcctgctagagatgagcctgggggagtggtaatgggattaggggtgaggcaaggggctcagctgcagtgygtctacatcagtgcacacagcatgggcaacaaacaagaagagctggaagccattgtgcggcaggcaagctatgacctagttgccattatggaaacgtggtgggaccattcccattactgaagtgctgcaatggatggctgcaaagtcttcaggaaggataggcaaagaaggaggggtgacagtgtggctctctatgttagagtgctttgatgttactgagcttatggatggggatgataaggttgaatccctatgggtaaagatcaggggaagagctgacaaagcagacatcctggtggg

SEQ ID NO: 85466 - DNA, 599 bp, Chicken  19866894384447_1
  misc_feature (1)..(97): n is any nucleotide
nnnnnnnnnnnnnnnnnnnnnnnnnnnnnnnnnnnnnnnnnnnnnnnnnnnnnnnnnnnnnnnnnnnnnnnnnnnnnnnnnnnnnnnnnnnnnnnnnaacagaaaactaagcaaaagggatggagtttcaatattgtgaaaaattttatactgctggatgcatagtgaaaaccttccatccagaacagtatttatctaacccagttgttttgtacaaaaacttggttccatttgtttacatgaggatttaaatgtgtgtgatgttttaaaagctaccagtttactgtcctctagacaaarctatgmaagaaaattctggcctgggcatgcccaatgaatttgttcaaagcaagtaactagcattttaactacttacacactcctgccttgattctgctgtctggtgactgaaacatatgatccacataaaatgactactaggatgcaaacaactggagcagcccctctgctgcctgtgacatacagtttagtcttaatcattcattaaatctgattaaaaaaatatcatgcaagtattttttcaataccattataaaacattggttttgcaagcaacaaatattaaattgtacaatctg

SEQ ID NO: 85467 - DNA, 599 bp, Chicken  19866894384447_2
  misc_feature (1)..(91): n is any nucleotide
nnnnnnnnnnnnnnnnnnnnnnnnnnnnnnnnnnnnnnnnnnnnnnnnnnnnnnnnnnnnnnnnnnnnnnnnnnnnnnnnnnnnnnnnnnnaacagaaaactaagcaaaagggatggagtttcaatattgtgaaaaattttatactgctggatgcatagtgaaaaccttccatccagaacagtatttatctaacccagttgttttgtacaaaaacttggttccatttgtttacatgaggatttaaatgtgtgtgatgttttaaaagctaccagtttactgtcctctagacaaarctatgmaagaaaattctggcctgggcatgcccaatgaatttgttcaaagcaagtaactagcattttaactacttacacactcctgccttgattctgctgtctggtgactgaaacatatgatccacataaaatgactactaggatgcaaacaactggagcagcccctctgctgcctgtgacatacagtttagtcttaatcattcattaaatctgattaaaaaaatatcatgcaagtattttttcaataccattataaaacattggttttgcaagcaacaaatattaaattgtacaatctgcagaaa

SEQ ID NO: 85468 - DNA, 600 bp, Chicken  19866894384447_3
ttttaactacttacacactcctgccttgattctgctgtctggtgactgaaacatatgatccacataaaatgactactaggatgcaaacaactggagcagcccctctgctgcctgtgacatacagtttagtcttaatcattcattaaatctgattaaaaaaatatcatgcaagtattttttcaataccattataaaacattggttttgcaagcaacaaatattaaattgtacaatctgcagaaaaaattaaacaggaaagaatagggaataaaaacaaaatatgctatcaaaaaagagtgkttttttttcttccttaataatatggttaatggaattgtataagattgtttggctttgtttggctacaaatctgaaaaaaaacaacaacaacagcaaaacccccacctttctttagcagctcatccttcaccagtgataaagaattcagctaaaacaaaattatcctccagycaggctttcttagaaaagccaagatacttcaaaatattgacatttttaatgctgaaatactgcaggatatttcctatgttccacagatacttactttgtaccctgtgacaaggaaaatactaaacaatg

SEQ ID NO: 85469 - DNA, 600 bp, Chicken  19866894384447_4
gtattttttcaataccattataaaacattggttttgcaagcaacaaatattaaattgtacaatctgcagaaaaaattaaacaggaaagaatagggaataaaaacaaaatatgctatcaaaaaagagtgkttttttttcttccttaataatatggttaatggaattgtataagattgtttggctttgtttggctacaaatctgaaaaaaaacaacaacaacagcaaaacccccacctttctttagcagctcatccttcaccagtgataaagaattcagctaaaacaaaattatcctccagycaggctttcttagaaaagccaagatacttcaaaatattgacatttttaatgctgaaatactgcaggatatttcctatgttccacagatacttactttgtaccctgtgacaaggaaaatactaaacaatggcaacagctagtgagttgtttccaaagactaattcctctcttgagtaatttactatttctcaatacacagttccctggcagtacagtacaattccctggcatcttaggggggaagaatgtggcactctatattagatagcattaatattttaaacaacccctgattctagc

SEQ ID NO: 85470 - DNA, 490 bp, Chicken  19866894384450_1
tgtagtatggacaacatgagaaagaagatagcagagctagagcccagggaagagagttgcagatttttcaagttgtactatagcaaaatcttaatattttgaaattgtcctggattcctatagaagaaaatagttcctcttgccgctacatagcatgggaagtgccaaaattatgccacttaacagttttaagggatctgggaattaccagccaggcagtaattactatgtgaacagaaacaaacaattcctgtgtgaacaaatggtgtaattctttaatccaaagattgactggacttmcygtttataggggaggctgtgcagatcccacagtctctgtctttgccataataaagtcagaggtgcagtattatattttttggtttacttttcatttcaccaatggaatctttggctttgctgacaattcaggtcaaacaagaatcaaacacataaaatataaaaaatattgaattaaacagccaacagc

SEQ ID NO: 85471 - DNA, 488 bp, Chicken  19866894384450_2
tagtatggacaacatgagaaagaagatagcagagctagagcccagggaagagagttgcagatttttcaagttgtactatagcaaaatcttaatattttgaaattgtcctggattcctatagaagaaaatagttcctcttgccgctacatagcatgggaagtgccaaaattatgccacttaacagttttaagggatctgggaattaccagccaggcagtaattactatgtgaacagaaacaaacaattcctgtgtgaacaaatggtgtaattctttaatccaaagattgactggacttmcygtttataggggaggctgtgcagatcccacagtctctgtctttgccataataaagtcagaggtgcagtattatattttttggtttacttttcatttcaccaatggaatctttggctttgctgacaattcaggtcaaacaagaatcaaacacataaaatataaaaaatattgaattaaacagccaacagc

SEQ ID NO: 85472 - DNA, 600 bp, Chicken  19866894384456_1
caaatttatgaactatttttaaaatgtctattaatagaataatctgatttttcctagaagccggctaatcaaacatttatgtagccataccatataactgaaataaagatgcagtatctggagacactaataatcttagatttccccttgtttctgtcttatttaccagcacgataagatgaggaacacaataggctgatggcttgagtctgtgcagtaacaaacctgggcatttgcaaatctttttaaaaaaactgcacagtgacatcagttatactgtgaacggctcagatattctcrgtatatattcagtatatactcagtatacattttaggcatttctcagctcaaataagcctggagaatctatggtataccatatgtcattacacttacaggtagcccgtttctcatttctcacgttgccatttcctgtacttaagaaaagtacatttagcaatgaggcttaagcagatagcatacaacaaaaatgtacttgtagaataaaatttaattcactaatgtatatattactatattctcagtgctttcctcttagaagaagaaataatagaagaaataattttaaaatgttatcct

SEQ ID NO: 85473 - DNA, 599 bp, Chicken  19866894384459_1
  misc_feature (1)..(18): n is any nucleotide
nnnnnnnnnnnnnnnnnntgtttctagagcaaactgcatttatctgactctttgcaagtctgtagaagtattttaaaagattatctagtttgctgtaggtatctaaaaagaaattgtacctttaatgttctagttggagcccagccagtgccatcaattgaatgttctctcaataaactgaaaaaaaagaaacatattatacagtgtaacttctagttagagaaactttgtcagaagtcttctcagaaagtttcaacaactttggaagaaatggcaatgttagtattacatccctcttgyactaaaagcaccaaaatctgtatgctgccctagaattacattcttcacacagctcagytttgtcaaaaatcaagttattttaagtatatgaagtgtgacagcggtcctcatgacagtcccaacaccragcctttatttacccctgagtgcacagacayacacacatgcttcatttcagaacatgctcatctgtggtgagcaggcaggccttgcagcatgtcctgcctcctaccacatctggcatatctcaatccctctaagaggatattttttgaagggatatctatttatcagagagg

SEQ ID NO: 85474 - DNA, 600 bp, Chicken  19866894384459_2
tctgtagaagtattttaaaagattatctagtttgctgtaggtatctaaaaagaaattgtacctttaatgttctagttggagcccagccagtgccatcaattgaatgttctctcaataaactgaaaaaaaagaaacatattatacagtgtaacttctagttagagaaactttgtcagaagtcttctcagaaagtttcaacaactttggaagaaatggcaatgttagtattacatccctcttgyactaaaagcaccaaaatctgtatgctgccctagaattacattcttcacacagctcagytttgtcaaaaatcaagttattttaagtatatgaagtgtgacagcggtcctcatgacagtcccaacaccragcctttatttacccctgagtgcacagacayacacacatgcttcatttcagaacatgctcatctgtggtgagcaggcaggccttgcagcatgtcctgcctcctaccacatctggcatatctcaatccctctaagaggatattttttgaagggatatctatttatcagagaggattatcatcatcctctcttctgtacaacgactgcagcttcttaaaatcaggggtaggaa

SEQ ID NO: 85475 - DNA, 600 bp, Chicken  19866894384459_3
ttctagttggagcccagccagtgccatcaattgaatgttctctcaataaactgaaaaaaaagaaacatattatacagtgtaacttctagttagagaaactttgtcagaagtcttctcagaaagtttcaacaactttggaagaaatggcaatgttagtattacatccctcttgyactaaaagcaccaaaatctgtatgctgccctagaattacattcttcacacagctcagytttgtcaaaaatcaagttattttaagtatatgaagtgtgacagcggtcctcatgacagtcccaacaccragcctttatttacccctgagtgcacagacayacacacatgcttcatttcagaacatgctcatctgtggtgagcaggcaggccttgcagcatgtcctgcctcctaccacatctggcatatctcaatccctctaagaggatattttttgaagggatatctatttatcagagaggattatcatcatcctctcttctgtacaacgactgcagcttcttaaaatcaggggtaggaaaatgaaatagctctggtccatatgctcaggaaggttctgcaacagacacaacatcaatggatgtatctc

SEQ ID NO: 85476 - DNA, 600 bp, Chicken  19866894384459_4
tgaatgttctctcaataaactgaaaaaaaagaaacatattatacagtgtaacttctagttagagaaactttgtcagaagtcttctcagaaagtttcaacaactttggaagaaatggcaatgttagtattacatccctcttgyactaaaagcaccaaaatctgtatgctgccctagaattacattcttcacacagctcagytttgtcaaaaatcaagttattttaagtatatgaagtgtgacagcggtcctcatgacagtcccaacaccragcctttatttacccctgagtgcacagacayacacacatgcttcatttcagaacatgctcatctgtggtgagcaggcaggccttgcagcatgtcctgcctcctaccacatctggcatatctcaatccctctaagaggatattttttgaagggatatctatttatcagagaggattatcatcatcctctcttctgtacaacgactgcagcttcttaaaatcaggggtaggaaaatgaaatagctctggtccatatgctcaggaaggttctgcaacagacacaacatcaatggatgtatctcaaaccttcagggactcagagcagcaaagtct

SEQ ID NO: 85477 - DNA, 600 bp, Chicken  19866894384459_5
tccaggaggtgagccacgctgcatgcagagcattaccaggctttacagacaaactcaactccacacattcccagctggatatcacaaagctcagatggaacactgggcaaaacagactgctacaggaagaaagagttcctgacaaatggtcgtatacgctctcaattttaatacaaatacttacactggtataaataattaaaataaagactttcctacatgcccacgtatgaattttacctgacctgcatactgtgctacatcataaggccgctgaaactgttgacccatttacaagaygaaggagttgaggtgtgttcagttggtcggacactcctggagctctcaggtaaaaccatcagcagacgtgaggaacaaaagtattggagactaaagcataactaagaaacaccayaagtgttgaaaaactgagaaaagcagaagtctcactcgtgcttgaaagcaaagttaataatctgaggaagagtctgggaaactcctgtaagcatcatttcacaactgagttcctctgctaagaagcaatctaaaactgaaaactcacacagcaaagtaacaaagcacaagaatttatcagcagca

SEQ ID NO: 85478 - DNA, 600 bp, Chicken  19866894384459_6
actgctacaggaagaaagagttcctgacaaatggtcgtatacgctctcaattttaatacaaatacttacactggtataaataattaaaataaagactttcctacatgcccacgtatgaattttacctgacctgcatactgtgctacatcataaggccgctgaaactgttgacccatttacaagaygaaggagttgaggtgtgttcagttggtcggacactcctggagctctcaggtaaaaccatcagcagacgtgaggaacaaaagtattggagactaaagcataactaagaaacaccayaagtgttgaaaaactgagaaaagcagaagtctcactcgtgcttgaaagcaaagttaataatctgaggaagagtctgggaaactcctgtaagcatcatttcacaactgagttcctctgctaagaagcaatctaaaactgaaaactcacacagcaaagtaacaaagcacaagaatttatcagcagcaatagcttctactgccaatatgatagggttaaggtgaaatactctaaagttattcattttgcagggttttttttgcagtactgctccatgttccctttaagagtctaggaagagga

SEQ ID NO: 85479 - DNA, 599 bp, Chicken  19866894384464_1
  misc_feature (1)..(71): n is any nucleotide
nnnnnnnnnnnnnnnnnnnnnnnnnnnnnnnnnnnnnnnnnnnnnnnnnnnnnnnnnnnnnnnnnnnnnnnacccctcctcgatgtactgtaactgaaagctgaagctcttccttccagaaggagcttaccaaagttgtggcgtatctttaacgtgtggatcattttgttcccacatccaagcaatgcattggagtttgcattctcactgcaaggctgagaaaccagctacttcccacgttctaaaagcgtgagcagattctgagttgctgcaccaagagatgctcagtgtgcttcaggracaggtgagcttattgaaattgctcttctcgagcagtaggacttcctattcactgcctcagtgtgaatccgtggccgagcagccagggatctgcaatgggctgatttgctagggcatgtagcatgctgctgagatcttcctatgttttagtccgagaaggctttttcttttttcacatcagggatgaagactgtaaataaaccattcatagaacctgcggcggctccgtcatagtcacgtcatttctgttggactgcctttttgctttctgtctgaagacatgaggctgcaaggatgac

SEQ ID NO: 85480 - DNA, 600 bp, Chicken  19866894384469_1
tgcttgtaattaaattactgttcccaaagctatcacacaagaatctccaagctgaatatttctcccacatcaactggtaacagcgtatgtatgccctgctcttaaatatcctgtatgaaagctgagtacaatttacaaccacctctgttgtacttcatcattagaatggagaaggctgccagttaaatcattgtaaggctttacgtttaggtgaatagaggctttacatagatgtaacatctctgtaaaagaaagttcttaggcatttctgatttgttacagtcatttaaaaacatttaygagaccttacaaagtggaactagaaaaacaaaaacattcacagtgttctattatagtttggtcttagraggcttcttgccaatcttcagtgccattgacttttctgtttttaaaaacccgatgaagagatttctgcagaagaacgatgcatgctatttcaactcaacagcatccttaacaagcctaaacccacacataatgctgggtttctgtccttttcttctttcagcaccagcgtgctggcatttctttgaacgcaacaaaacacsgggcaacatgaagagagacttttttttaagt

SEQ ID NO: 85481 - DNA, 600 bp, Chicken  19866894384469_2
atcaactggtaacagcgtatgtatgccctgctcttaaatatcctgtatgaaagctgagtacaatttacaaccacctctgttgtacttcatcattagaatggagaaggctgccagttaaatcattgtaaggctttacgtttaggtgaatagaggctttacatagatgtaacatctctgtaaaagaaagttcttaggcatttctgatttgttacagtcatttaaaaacatttaygagaccttacaaagtggaactagaaaaacaaaaacattcacagtgttctattatagtttggtcttagraggcttcttgccaatcttcagtgccattgacttttctgtttttaaaaacccgatgaagagatttctgcagaagaacgatgcatgctatttcaactcaacagcatccttaacaagcctaaacccacacataatgctgggtttctgtccttttcttctttcagcaccagcgtgctggcatttctttgaacgcaacaaaacacsgggcaacatgaagagagacttttttttaagtccggagggatttcaacaaactattcttatctaaatagcctctgtgtcttttatctggttgaagaggca

SEQ ID NO: 85482 - DNA, 520 bp, Chicken  19866894384469_3
tgatttgttacagtcatttaaaaacatttaygagaccttacaaagtggaactagaaaaacaaaaacattcacagtgttctattatagtttggtcttagraggcttcttgccaatcttcagtgccattgacttttctgtttttaaaaacccgatgaagagatttctgcagaagaacgatgcatgctatttcaactcaacagcatccttaacaagcctaaacccacacataatgctgggtttctgtccttttcttctttcagcaccagcgtgctggcatttctttgaacgcaacaaaacacsgggcaacatgaagagagacttttttttaagtccggagggatttcaacaaactattcttatctaaatagcctctgtgtcttttatctggttgaagaggcaagatgaaagacgagagtctattcataagatttaatactaatggttatttagctttcagcatcatcaataacaagtcccattagtccaccgtgtttcatgcttactgcgtacgcaacacagt

SEQ ID NO: 85483 - DNA, 557 bp, Chicken  19866894384470_1
tagaattagctggctggtggctcatgatggggcctatctcatcatagggaactggtacagatgagttcatacgtgataaagaatctacttgggactgtttaactagtaaaaacagcaacattctgagttcctgtgtgtttttaaaaggaatagaaagcaagctgcgttcttcacttctgcaggagcttctacagacctcagacagatccatagaaacttaacaaccaaaccaaaaaaaaaaacccaaaccaaccttttttttttctcagtgttgatttctggagttgtagcatgaagtcratttcaattaatgttccaaaaatatttttgaagatataccagaaagctgagcgttggtgcagcgcactgcagcgtcacggcgccttattaacacaagctaatttgcctttaggtgatagctgttctttttgttatgctggcacaggattctgctatgtaatttagaaatgcctaaatatatttaccaaaccacagataattctttacattttgaaagattttataagaaattaagtactgttcgttctagtaacgca

SEQ ID NO: 85484 - DNA, 559 bp, Chicken  19866894384487_1
tgtgcctactattgttgcaaaaatgttgtctcatcatctactttaaatacaagacaaaaaacacctgtgcttgtcattaagtctccggctgcactttctaaatgattcaaggacctcaggtctcttttgccctcatacatcatagtcattctgcctctgattgagggttttcagtacatattagaaaaatatgttaatatggaatttgttagatgatgcagtatacaactagaaagagatgactggggtaatatgcagtcatagaatggtttctattggaacagacctttaagatcatayagttcaaatccccctgttataggcagggatacctcccactagaccaggttgctggccccatccagcctggccttgcatacttccacggaggaggcatccacaacctctctgggcaacctgttccagtgtctcaccacactcacagtacagaatttcttcctaatatctagtctaaatctactcacttccagtttaaagccctttcctctcatcctgtcactacgtgcccttttaaaaaagtctctccccagattttctg

SEQ ID NO: 85485 - DNA, 599 bp, Chicken  19866894384488_1
  misc_feature (1)..(49): n is any nucleotide
nnnnnnnnnnnnnnnnnnnnnnnnnnnnnnnnnnnnnnnnnnnnnnnnntaatgaagatgtatttttatttctgaaaggcagcaggtagtacatgaggttctaaatttgttttctattattctggaaattcgtggttttttgtgtgtgagtcccgagtctttaatgcatgatcaataatagtgatgataaagtggtctatgaaatctattctttcttctccacatgcatacgctttcaaagtgccatatatttccagtttctaaggcctctcacgtgttcctattccatgttgtttaccygggtgattaaggcagttttagacgaatatctccctgggcttcagaagggaacgctgtggttgtgcagaagtctcccctctgagccaagtgtcagcaactttggatctattttgtttcctatgcgagcratgctcactcgctgtgaaactgggcttcagttcaattgctgggaattctgaggccttagcatgggacaggatttctcccataaaatacattgttcttacattcccactcgtatctgtatttgcttcctgtgttgatttgaaggctgttttttcagtggtgagatcaaagtg

SEQ ID NO: 85486 - DNA, 600 bp, Chicken  19866894384488_2
ttcgtggttttttgtgtgtgagtcccgagtctttaatgcatgatcaataatagtgatgataaagtggtctatgaaatctattctttcttctccacatgcatacgctttcaaagtgccatatatttccagtttctaaggcctctcacgtgttcctattccatgttgtttaccygggtgattaaggcagttttagacgaatatctccctgggcttcagaagggaacgctgtggttgtgcagaagtctcccctctgagccaagtgtcagcaactttggatctattttgtttcctatgcgagcratgctcactcgctgtgaaactgggcttcagttcaattgctgggaattctgaggccttagcatgggacaggatttctcccataaaatacattgttcttacattcccactcgtatctgtatttgcttcctgtgttgatttgaaggctgttttttcagtggtgagatcaaagtgccaaagtacgaggagctattctatcctcgtagactggttttcaccaagggaggctacgtttaaaggcatttcattgcttcaaggcatgctctgaaggagctcataactcccctgcacgtctcccatggg

SEQ ID NO: 85487 - DNA, 600 bp, Chicken  19866894384494_1
gcagctctcacacattttacactacctaggctgtatttttcccataataccaatagtcacgaaacgcattatctttctgacaatggagaaatgaaatatcagccttttactttcttgaccatgtcaaatgtcagagcaatttgtgaatgcttgtccttcaaatactcatccctcctgctaagattaaatatcaatagctctcacattcagctacagaatgaactaatattgcacacacctctcagatctaaagttcactgcgtccattacctgtgatgtgattctgtctcccaagtcctwcctcttgtccacgtcctaatggctgagaaatgcactgcaacgtcagatgctgcattgagggttatctggagcacgaggtgaaacgatgggtgggggtttctcacaaggtgttaagaagagttacaaagggagtgggagaaagaatgaggggttaatagggcaagagccttcattttgccatccatttcagaggacttgcagacagcgtgccaatgggatgctgctgggaatttctagcacaacagatgtgcttgaagcacggggaaagatctcgttatctttttgatgatggagaaacaa

SEQ ID NO: 85488 - DNA, 600 bp, Chicken  19866894384499_1
cacatcgtctcctgcattcctttttgaagatatgtatctactgacaaactgttttacatcaacctgtagtaggagagttgaatacatgaactcacagttactctgtacttcactgttgtctgctctgaatgatatcactttaaagaaatataagctaaagctaaacaaaagcagcaatgaatacctcaaaaggattttttcacttgttggggaaaaaagcaatgactgcaaaagcagcagtggtctcatctgagcaacacattaaatgtttccatgtgccattttaatatatatttgagkttttcatgctttaaagtgcctccctgacaagaggagctctttaagacttggttgaaagcccacggattgactatgacatgtttttgcagggagtgggaggcctggtccatccagcatacattctaatacagcattggctgtagaaatgtgttaattaaagctaagagtactgattcatgttacagcatctgtctaaatcttactgccttggagtttacgagcacgtattggttttctttggcagcctactttgtctttactttaaactcaacaatatcaatctgtttgcatctcttgcag

SEQ ID NO: 85489 - DNA, 599 bp, Chicken  19866894384502_1
  misc_feature (1)..(69): n is any nucleotide
nnnnnnnnnnnnnnnnnnnnnnnnnnnnnnnnnnnnnnnnnnnnnnnnnnnnnnnnnnnnnnnnnnnnnaatgatggctagacagggaggagtgataagatcccaaaggagatcaagagagaaaacaaggaaggatggatctcagaaggaagaggcaagaggaaagcagagaatggttcaatttgtaagtagacaagttcaacacaggcttcaagagaaaaaaaattcagcagactccagctgtgaatatagctaaaggtttgtacttacatttcttcaggcaagctattcagtaccttsctatgtttaattgaaatagtagtccaaaacaaagagagaaatgaagctctcccatctggcccctatttgaaaacgttttgatgtaaggaagaaaggtgcctcctaaaggaaaaggtaagtttaatgcacgtgtgtcacagctactctaacaggtttgaaactcgcttcacagttcactyactatacagttatgagcatcttaaatatttccttcagcagccacttgctaagaaagcctcgagtttcctaaaaagtcratctttgtgggcaattttagttcaaaaaagcaaactgaaact

SEQ ID NO: 85490 - DNA, 600 bp, Chicken  19866894384502_2
aatttgtaagtagacaagttcaacacaggcttcaagagaaaaaaaattcagcagactccagctgtgaatatagctaaaggtttgtacttacatttcttcaggcaagctattcagtaccttsctatgtttaattgaaatagtagtccaaaacaaagagagaaatgaagctctcccatctggcccctatttgaaaacgttttgatgtaaggaagaaaggtgcctcctaaaggaaaaggtaagtttaatgcacgtgtgtcacagctactctaacaggtttgaaactcgcttcacagttcactyactatacagttatgagcatcttaaatatttccttcagcagccacttgctaagaaagcctcgagtttcctaaaaagtcratctttgtgggcaattttagttcaaaaaagcaaactgaaacttacaattattrtggtaccgtacttgatggaacagattagctgctataaaacagcacaggcagtaacaattcattatgattacaagaaccagaagcactctgaagccaacatcatcagatgtctctgggtccatcaggcatccttctagcaggtgagcaatgctgctccagctgtcagcta

SEQ ID NO: 85491 - DNA, 563 bp, Chicken  19866894384502_3
ggtttgtacttacatttcttcaggcaagctattcagtaccttsctatgtttaattgaaatagtagtccaaaacaaagagagaaatgaagctctcccatctggcccctatttgaaaacgttttgatgtaaggaagaaaggtgcctcctaaaggaaaaggtaagtttaatgcacgtgtgtcacagctactctaacaggtttgaaactcgcttcacagttcactyactatacagttatgagcatcttaaatatttccttcagcagccacttgctaagaaagcctcgagtttcctaaaaagtcratctttgtgggcaattttagttcaaaaaagcaaactgaaacttacaattattrtggtaccgtacttgatggaacagattagctgctataaaacagcacaggcagtaacaattcattatgattacaagaaccagaagcactctgaagccaacatcatcagatgtctctgggtccatcaggcatccttctagcaggtgagcaatgctgctccagctgtcagctaacatctcctggtctggcagttgagccagcaaggtctcagtt

SEQ ID NO: 85492 - DNA, 510 bp, Chicken  19866894384502_4
ttgaaatagtagtccaaaacaaagagagaaatgaagctctcccatctggcccctatttgaaaacgttttgatgtaaggaagaaaggtgcctcctaaaggaaaaggtaagtttaatgcacgtgtgtcacagctactctaacaggtttgaaactcgcttcacagttcactyactatacagttatgagcatcttaaatatttccttcagcagccacttgctaagaaagcctcgagtttcctaaaaagtcratctttgtgggcaattttagttcaaaaaagcaaactgaaacttacaattattrtggtaccgtacttgatggaacagattagctgctataaaacagcacaggcagtaacaattcattatgattacaagaaccagaagcactctgaagccaacatcatcagatgtctctgggtccatcaggcatccttctagcaggtgagcaatgctgctccagctgtcagctaacatctcctggtctggcagttgagccagcaaggtctcagtt

SEQ ID NO: 85493 - DNA, 599 bp, Chicken  19866894384506_1
  misc_feature (1)..(44): n is any nucleotide
nnnnnnnnnnnnnnnnnnnnnnnnnnnnnnnnnnnnnnnnnnnnatgcctggacttctgggcctttaggctaaagtctacttgcatgtttttaagacatttatacattgctcttgtgtataaaatcactgcaaaaaaacaacaaagttgaaagagccagaccttttttgcagcatacaactttccctctgttttgtattctgtttcattttctcttcaaaatgtctgctttaatattcaccttagctgaaaaacatgaactaaacctattgttcagtagtagcatgctagcaataatcaygaaaagatatatataatwtatatactatatatataatatatactatactactatatattatattattatatatattatatatagtactatatactatatatatactactaatatatattatatactataatatgtacgtaatatataatatattatatatatacagacacaaggaagaaaataaagctaatttgcaggtagaactgagaagatggtgctactgatgaatcgttttgcactatatgaagtatcacatgctcatccaaatctcctgagttttcaaagtaggttataaatgt

SEQ ID NO: 85494 - DNA, 599 bp, Chicken  19866894384506_2
  misc_feature (1)..(26): n is any nucleotide
nnnnnnnnnnnnnnnnnnnnnnnnnnatgcctggacttctgggcctttaggctaaagtctacttgcatgtttttaagacatttatacattgctcttgtgtataaaatcactgcaaaaaaacaacaaagttgaaagagccagaccttttttgcagcatacaactttccctctgttttgtattctgtttcattttctcttcaaaatgtctgctttaatattcaccttagctgaaaaacatgaactaaacctattgttcagtagtagcatgctagcaataatcaygaaaagatatatataatwtatatactatatatataatatatactatactactatatattatattattatatatattatatatagtactatatactatatatatactactaatatatattatatactataatatgtacgtaatatataatatattatatatatacagacacaaggaagaaaataaagctaatttgcaggtagaactgagaagatggtgctactgatgaatcgttttgcactatatgaagtatcacatgctcatccaaatctcctgagttttcaaagtaggttataaatgtcttgtgggagaagagttt

SEQ ID NO: 85495 - DNA, 600 bp, Chicken  19866894384507_1
gtgtcttgtgtctgaggtccttgtgtgttgcagggagttaggagagtattcctggaactgctgctaaacaaggcattgtccaggcagtgtaaatgaggccagggtgtcccagtgactttttggtgtgctcagtctttctgcacgttttttttcagtgaggttggctctgtttgtgctgatcagctgaattctgttgagaggaacctgatctaaaatgcctttcagggctcaatgcagagcacttctgagctagggttgattgctctgaaagacttgcaaagggtgggcgagggcctagtragctttggtctgccattgcttaacctactatgatgttctgaatctcaagctgctggagtagctgtaacttcgcagtgttcaaatgtgccacaacagactgtttgtcttactctattgtggaccattccttgctcacttaccccaggctgaccctgagtagccagtgcagctgtgtatcaagcagccagtgcagttatgtttgtagtatacttgggactctccctatttttgaggcttgtcaagtgatgtttgcactgttgctttgcagtgagtgttgttgcaatagaagattttttaaag

SEQ ID NO: 85496 - DNA, 599 bp, Chicken  19866894384515_1
  misc_feature (1)..(19): n is any nucleotide
nnnnnnnnnnnnnnnnnnnactcaaactcgttggaatgaaaacccctcagacgtgtgttggtgcacaaaataaatctctctgtaatacagttgagtagtgtccaggagccattgcctttttctagttcgtgtcctaagggtgatgtataggtaggtgtctctgctgtagcagggaggctgggactaaatggtcttaaaggtcccttccaagccaaaccattctatgattctgtgtattaaaagtgatacaaagcatagtccaaattctaaggaatatagaggatactgttctaagtcatyttgagtcaacatattatgctgacaattttctgacaatccactgtgattgagtgtctaggcaatcaggaaagcatggacattgccactttctttgattcaatcttccatgaacagtgagagcataacttggagatcttgaataccctttgctgtttgccacacaattcctctcattgctactcggaggagagaaagatgattgtgtacctctccaaagctcctaaatgggcatggcaaacgtggagccactgaacgacatgatttttgtagccctgtttgctcaaagggtctgctggtcc

SEQ ID NO: 85497 - DNA, 441 bp, Chicken  19866894384515_2
caacatattatgctgacaattttctgacaatccactgtgattgagtgtctaggcaatcaggaaagcatggacattgccactttctttgattcaatcttccatgaacagtgagagcataacttggagatcttgaataccctttgctgtttgccacacaattcctctcattgctactcggaggagagaaagatgattgtgtacctctccaaagctcctaaatgggcatggcaaacgtggagccactgaacgacatgatttttgtagccctgtttgctcaaagggtctgctggtccacttctrctcctatgagcagtatcrttcctgttcctgaagagatggtgcaaatgcagtcgatgtgcataacttagggggtttgtggtctgaaatactgatcaaatctcaagattgtgatcagtttattttcgaattgcagtaggaggt

SEQ ID NO: 85498 - DNA, 423 bp, Chicken  19866894384515_3
attttctgacaatccactgtgattgagtgtctaggcaatcaggaaagcatggacattgccactttctttgattcaatcttccatgaacagtgagagcataacttggagatcttgaataccctttgctgtttgccacacaattcctctcattgctactcggaggagagaaagatgattgtgtacctctccaaagctcctaaatgggcatggcaaacgtggagccactgaacgacatgatttttgtagccctgtttgctcaaagggtctgctggtccacttctrctcctatgagcagtatcrttcctgttcctgaagagatggtgcaaatgcagtcgatgtgcataacttagggggtttgtggtctgaaatactgatcaaatctcaagattgtgatcagtttattttcgaattgcagtaggaggt

SEQ ID NO: 85499 - DNA, 600 bp, Chicken  19866894384519_1
acccaatattaagcctcactgcatctcaacttcctcacaaaccgcccaccccctacttgcaaatatatataatttttttttaatcacactcatttttacttaatccactgaagcttcttttttctactaatagctagtcatatctgctagctacaggtgagtaaagtcaaagaaataatttggttttctcattatgattaaaagatttgattatcaaatcttctgcagttcagaggccacggtgcattagtctcagcactaaaagttgagaatgaagtgcaacacagcatcaaaagctaytgacagtgtctgctggttgcatttacactcatcagttgcacactaagagaaagagtcccccaaccctcagtgctccagagaaaagccactgtgagagacagctccagactcagtgtggcatgccaggcacagctcaggcctgcacttactactttcagctgaaccaacagcttgtagacatctgccatgtccgccagaatcagcagccgagtcactgcagacagcagggcacgtgccgctcgcaccatgttgccacgcttcaccgaggagcaggggtcatcagcaaactcccccgaggca

SEQ ID NO: 85500 - DNA, 600 bp, Chicken  19866894384521_1
aaaaaaacacatcacaatgtcaacatcaaattacaaatgcaaaatagccattactgtatttactcagtattcttttagtttactagctcatgaggttttcagttgaaaaatgcctattttcagcatccaatctatgctagcacatcattttataagccactttcatcagattctatacttcaagaaaggcagcctgagtccacatttgtttatatttattcaaaatacttgtcatacatttacatagctcctttgatccaggaaaatccccaaacactcataaagttctgctttaaaagkccacttccttccctctgaatggaaaccatgttgggactgaaagatggcagcagataaaaaaaaaaacacatacaaatacagaaacatagaatagaataattaaggtgggaaaaagatcctcaaattcaacagtccacctaccactactatcacccactaaaccacatccttcaataccacatccccacagttcttgaacacctccagggatggtgaccccaccacctccctgggcagctgtgccactgcatcaccgctctttcagagaagaaatatttcctggtacccaacctgaacttc

SEQ ID NO: 85501 - DNA, 599 bp, Chicken  19866894384534_1
  misc_feature (1)..(135): n is any nucleotide
nnnnnnnnnnnnnnnnnnnnnnnnnnnnnnnnnnnnnnnnnnnnnnnnnnnnnnnnnnnnnnnnnnnnnnnnnnnnnnnnnnnnnnnnnnnnnnnnnnnnnnnnnnnnnnnnnnnnnnnnnnnnnnnnnnnnnnntcctcccacagcaaattgatatgttgatattttattatgtaggttaataataatctctgattttaaaacacatcgtaattcattatgtaaaatatttctaaaggaaaatggaaattagtccccagaagtactatgaaatctcccattcacagaaagaagagacakttttgccacagataacctgaattcccattcccaccagaatgagggtcatgttcatttgcaagcttagttctttaagcaagctggaagcctttaagatgcaagtttctctacgagtatgagttgacaatattgcaacattcatcttccactaaaaatttaggtctaattaccctttaaattacagagcatcttgaagcacaaccamagcctgcacraattattttcagagatgcatcttgtaatatacagacacaatatcatctaagggccagaccaactcataaacaaagaaaccctgc

SEQ ID NO: 85502 - DNA, 600 bp, Chicken  19866894384534_2
catcgtaattcattatgtaaaatatttctaaaggaaaatggaaattagtccccagaagtactatgaaatctcccattcacagaaagaagagacakttttgccacagataacctgaattcccattcccaccagaatgagggtcatgttcatttgcaagcttagttctttaagcaagctggaagcctttaagatgcaagtttctctacgagtatgagttgacaatattgcaacattcatcttccactaaaaatttaggtctaattaccctttaaattacagagcatcttgaagcacaaccamagcctgcacraattattttcagagatgcatcttgtaatatacagacacaatatcatctaagggccagaccaactcataaacaaagaaaccctgcatcrtcttcccacagactactctgtaacccaaaagaatttcactyggttgtcctgtgacattttcaggacrtaaatccctcagacactactgagcccatttcagaacagaattttatgtgattatgcatttcaagwtctgcattgagggaggagtctcagactgccttgcattacaatcacactgcaaattggctgcaacaaaact

SEQ ID NO: 85503 - DNA, 600 bp, Chicken  19866894384534_3
cattatgtaaaatatttctaaaggaaaatggaaattagtccccagaagtactatgaaatctcccattcacagaaagaagagacakttttgccacagataacctgaattcccattcccaccagaatgagggtcatgttcatttgcaagcttagttctttaagcaagctggaagcctttaagatgcaagtttctctacgagtatgagttgacaatattgcaacattcatcttccactaaaaatttaggtctaattaccctttaaattacagagcatcttgaagcacaaccamagcctgcacraattattttcagagatgcatcttgtaatatacagacacaatatcatctaagggccagaccaactcataaacaaagaaaccctgcatcrtcttcccacagactactctgtaacccaaaagaatttcactyggttgtcctgtgacattttcaggacrtaaatccctcagacactactgagcccatttcagaacagaattttatgtgattatgcatttcaagwtctgcattgagggaggagtctcagactgccttgcattacaatcacactgcaaattggctgcaacaaaactgttaattttg

SEQ ID NO: 85504 - DNA, 600 bp, Chicken  19866894384534_4
tgccacagataacctgaattcccattcccaccagaatgagggtcatgttcatttgcaagcttagttctttaagcaagctggaagcctttaagatgcaagtttctctacgagtatgagttgacaatattgcaacattcatcttccactaaaaatttaggtctaattaccctttaaattacagagcatcttgaagcacaaccamagcctgcacraattattttcagagatgcatcttgtaatatacagacacaatatcatctaagggccagaccaactcataaacaaagaaaccctgcatcrtcttcccacagactactctgtaacccaaaagaatttcactyggttgtcctgtgacattttcaggacrtaaatccctcagacactactgagcccatttcagaacagaattttatgtgattatgcatttcaagwtctgcattgagggaggagtctcagactgccttgcattacaatcacactgcaaattggctgcaacaaaactgttaattttgaaggctgtatttccctacttcaatgaagctgttctttgcagtgaaagtataacttccacacttacagtgacacaatatctcccatact

SEQ ID NO: 85505 - DNA, 600 bp, Chicken  19866894384534_5
gtcatgttcatttgcaagcttagttctttaagcaagctggaagcctttaagatgcaagtttctctacgagtatgagttgacaatattgcaacattcatcttccactaaaaatttaggtctaattaccctttaaattacagagcatcttgaagcacaaccamagcctgcacraattattttcagagatgcatcttgtaatatacagacacaatatcatctaagggccagaccaactcataaacaaagaaaccctgcatcrtcttcccacagactactctgtaacccaaaagaatttcactyggttgtcctgtgacattttcaggacrtaaatccctcagacactactgagcccatttcagaacagaattttatgtgattatgcatttcaagwtctgcattgagggaggagtctcagactgccttgcattacaatcacactgcaaattggctgcaacaaaactgttaattttgaaggctgtatttccctacttcaatgaagctgttctttgcagtgaaagtataacttccacacttacagtgacacaatatctcccatactgcttttgccatgttagaaagtaagcacagtgttaaccttcc

SEQ ID NO: 85506 - DNA, 600 bp, Chicken  19866894384534_6
tttaagcaagctggaagcctttaagatgcaagtttctctacgagtatgagttgacaatattgcaacattcatcttccactaaaaatttaggtctaattaccctttaaattacagagcatcttgaagcacaaccamagcctgcacraattattttcagagatgcatcttgtaatatacagacacaatatcatctaagggccagaccaactcataaacaaagaaaccctgcatcrtcttcccacagactactctgtaacccaaaagaatttcactyggttgtcctgtgacattttcaggacrtaaatccctcagacactactgagcccatttcagaacagaattttatgtgattatgcatttcaagwtctgcattgagggaggagtctcagactgccttgcattacaatcacactgcaaattggctgcaacaaaactgttaattttgaaggctgtatttccctacttcaatgaagctgttctttgcagtgaaagtataacttccacacttacagtgacacaatatctcccatactgcttttgccatgttagaaagtaagcacagtgttaaccttcctgtcccaatttttctcattcactatc

SEQ ID NO: 85507 - DNA, 600 bp, Chicken  19866894384534_7
cattcatcttccactaaaaatttaggtctaattaccctttaaattacagagcatcttgaagcacaaccamagcctgcacraattattttcagagatgcatcttgtaatatacagacacaatatcatctaagggccagaccaactcataaacaaagaaaccctgcatcrtcttcccacagactactctgtaacccaaaagaatttcactyggttgtcctgtgacattttcaggacrtaaatccctcagacactactgagcccatttcagaacagaattttatgtgattatgcatttcaagwtctgcattgagggaggagtctcagactgccttgcattacaatcacactgcaaattggctgcaacaaaactgttaattttgaaggctgtatttccctacttcaatgaagctgttctttgcagtgaaagtataacttccacacttacagtgacacaatatctcccatactgcttttgccatgttagaaagtaagcacagtgttaaccttcctgtcccaatttttctcattcactatcagatttatgtccaagaccagcaaccaccaaaaatatatcatgaaaaaaaaaaaaatctgtctgta

SEQ ID NO: 85508 - DNA, 600 bp, Chicken  19866894384536_1
ggagcccgtgtcttcattaacgatgaataaatataacatttaaatagctgaaacacaccagataacctcacgccttaaataaaaaaataaaatagatgtttatagatctctctgttttagaaatcagtgctgctagaagcttctaaattacaaagctggaggctggcaaatacacaggacagaaaatgacatgaaaatacaatgctatcttacagacacagcctctacaccctggctgaggcctagctcagactttgtcattttgggcaatggcagcaagagaagtcaccaattgtaggrccgagtaaaacagccaaggggaagaatatgggggtggtccactatatcccctaaaaagcaaggtatgatagtgccaatcaaagagaaccagactgccatacccatttgcctagtatgggatcatttaggctgccagcctcagaacagcgtaccacatacaaaaataaagggcaattctctaaaacaatatattttttcctcaagaaccccttgatatgaggtttatagatgcagtacacaggccaccactgggacagatttaggtaatccttccattactccttaggctttatcacatgc

SEQ ID NO: 85509 - DNA, 600 bp, Chicken  19866894384541_1
cctcagaaaatttcaccaaaaaggatcattgtttgttacatttccctaggtggatagcttctgatacatgtccaacttgggaactcttttatttatttatttatttatttaaatttgcttatttatctattttgtgatgcaaagcgaatcctggtggtttttctcaatcttttccaacatggaaattgtaaaagcagtcccagataccagatccctccttcagacactactgctgtgcattctatgacctgtgcaagctgttgcagcttgtctttctttggccatcccatcatttcatcygccgcttctgaccatcctggcttctgccaagccctccagcagccgctatgcctctctccctgctgcccccttctatccattgctatgccctgaatttcacatatgcaggacttgcagctatcagtactgcacataatactgtaggttcatgctgcctggctccttataagcaggcaaggtccccacagttggcctctggcctttgctttctaccccattttcctctcatcctgtggttggaagccttcgctccctttctgctcccaaagggcccttaacagctcagaacctacagctgca

SEQ ID NO: 85510 - DNA, 557 bp, Chicken  19866894384543_1
ctgctgattggggtgagcagagattggcagaatgaaacccgtgactacttctgtgcggatacacagctgttttatttttttctccttccagcaccatgatcttctttccagcagaataattctctgccgcctttgaaggtctgcatgttttttcttttccggttcctagttggtattttgcagttgagcagtattcccaggggacaaattttgaggaggtttgtgagaggagaaatagagatgtctgaaaactgacagaatcctggcacacatggaattaaaatatttcgcttttgtggyggtgctcttgtcaacgcaagactgacatccgagcataacctggaaattgagacctcattaggcttctctgaataggtgtgatgggatgtatctctttcaagcagatacacgtatttctctgtgtgactgtatgtagcttctgtgtgccgctgactggttcatctacaggtccctctctctatacttacacacaggactgcagctgatgtcatactggcattgctacttcaccacgagcattttccccattggtctca

SEQ ID NO: 85511 - DNA, 600 bp, Chicken  19866894384545_1
actgtgagtcacttaaaagcagtgaaatactctatgaggatttaaaattatttgtgcgtgtctgcttataaattacagctggcggcaactttttacttctcttgcccatagaaaccagggaaactgagagctgccctcactgagtttgtgagtgtgtcttttttaagaagacttctacagctttttacagatatactgcccactccgtctcttctagaccttgttaactttcctgattgcagtcttcttctaataagcagcaccaatcagatccagatctttcgctatgagcactgcagmgtttttaaatggtgactcattcacagtttwaaaaaaaaaaaggttccaaagaagtcatagattactatatttttctcaattaatcagaaatagaaataagctaatttatttttccagacatagagtaagtataaactgctgtttgattgaatcagtatggggaaagaacacagaatctcagaagccaaactgtaccttcgatgacaagtgcatgtctcctatccaggccagtagaaacttaactccacccatacatctgtgaatatgtttaacacattgcctctgttggaaagtagcagt

SEQ ID NO: 85512 - DNA, 600 bp, Chicken  19866894384545_2
tctatgaggatttaaaattatttgtgcgtgtctgcttataaattacagctggcggcaactttttacttctcttgcccatagaaaccagggaaactgagagctgccctcactgagtttgtgagtgtgtcttttttaagaagacttctacagctttttacagatatactgcccactccgtctcttctagaccttgttaactttcctgattgcagtcttcttctaataagcagcaccaatcagatccagatctttcgctatgagcactgcagmgtttttaaatggtgactcattcacagtttwaaaaaaaaaaaggttccaaagaagtcatagattactatatttttctcaattaatcagaaatagaaataagctaatttatttttccagacatagagtaagtataaactgctgtttgattgaatcagtatggggaaagaacacagaatctcagaagccaaactgtaccttcgatgacaagtgcatgtctcctatccaggccagtagaaacttaactccacccatacatctgtgaatatgtttaacacattgcctctgttggaaagtagcagtaaaatgtgcttggaggtaggaaaatgaaag

SEQ ID NO: 85513 - DNA, 600 bp, Chicken  19866894384551_1
attattcagtttaagtcaaattcctcctagagtcacattagacagcctcattactttttatgcaggaatgggaagtaacctcattcttgactgttagcatgtttttaatcaaagcagcagagaatgtggccctcagggcttatgtagatactgtagaagagtgcaattgtaaatcacatcagctaatttctgtaaaataaaaattttaactactactttaaaatacacatgcacaaagatgaaggtagttaaatagtttagtcttgggtaaataccatcattgtctacacttcactattrtatagcacacagaagcctacgttgcaccaaatggaaagaaacaattcaccatttaagtattgataactctccaagctsattcggcctggtcatatacacactgtataaaatatatacatactgtacaaagtacatccatttgtatattttttacttagtggtatttgcatatgtgcatatatgtctctaatagcttgggttctgatatctgaatatctgtatttgtgaattttaaaaaataaacaatatgcataggcaattttcatacagaaagttctctttacctgaaaattaattcca

SEQ ID NO: 85514 - DNA, 600 bp, Chicken  19866894384551_2
cctcattcttgactgttagcatgtttttaatcaaagcagcagagaatgtggccctcagggcttatgtagatactgtagaagagtgcaattgtaaatcacatcagctaatttctgtaaaataaaaattttaactactactttaaaatacacatgcacaaagatgaaggtagttaaatagtttagtcttgggtaaataccatcattgtctacacttcactattrtatagcacacagaagcctacgttgcaccaaatggaaagaaacaattcaccatttaagtattgataactctccaagctsattcggcctggtcatatacacactgtataaaatatatacatactgtacaaagtacatccatttgtatattttttacttagtggtatttgcatatgtgcatatatgtctctaatagcttgggttctgatatctgaatatctgtatttgtgaattttaaaaaataaacaatatgcataggcaattttcatacagaaagttctctttacctgaaaattaattccaatgcaaatgcttttgtttgaagcactttctagttcttacagtgttcaggttccagtatgctgagcactaaatactact

SEQ ID NO: 85515 - DNA, 600 bp, Chicken  19866894384560_1
ggagtcacttcaaatttgcaggatgtgaatttaatacttgtacaaatgcctgcacaaaataaggtattatgacagaacaagtaattctgagagcagagaggaaatagcaaattaattctgaatctcagctatccctacctttagaaccacaaagagccatgataaggggactgttgctcttgtccagttctctgagacaggcactgccagcatgatctctgataacagagagctctttaagtattaaggcctaaaatccaagaacatagagatttggtattagtaaaaaaaagtcatacscaaacaatgtactaccacttgccaacaataccttcagcagcaaacaggaactagaagtagaattaagagaaataagcctagaatttgctcttgttaaagttgcaacttctaacttgtggaacttcccagtttgcagcaaaataatcctttgttgggttaaggcagcggtagctggrgacattacaacctcttcttagcagcaccagcttaagctagttaaagcaagtactaagctaagctgtactatgtgaaagattaccacaaagtagtaattttggaacgctctaacaatatgcaaca

SEQ ID NO: 85516 - DNA, 600 bp, Chicken  19866894384560_2
gagtcacttcaaatttgcaggatgtgaatttaatacttgtacaaatgcctgcacaaaataaggtattatgacagaacaagtaattctgagagcagagaggaaatagcaaattaattctgaatctcagctatccctacctttagaaccacaaagagccatgataaggggactgttgctcttgtccagttctctgagacaggcactgccagcatgatctctgataacagagagctctttaagtattaaggcctaaaatccaagaacatagagatttggtattagtaaaaaaaagtcatacasaaacaatgtactaccacttgccaacaataccttcagcagcaaacaggaactagaagtagaattaagagaaataagcctagaatttgctcttgttaaagttgcaacttctaacttgtggaacttcccagtttgcagcaaaataatcctttgttgggttaaggcagcggtagctggrgacattacaacctcttcttagcagcaccagcttaagctagttaaagcaagtactaagctaagctgtactatgtgaaagattaccacaaagtagtaattttggaacgctctaacaatatgcaacat

SEQ ID NO: 85517 - DNA, 600 bp, Chicken  19866894384560_3
ctcttgtccagttctctgagacaggcactgccagcatgatctctgataacagagagctctttaagtattaaggcctaaaatccaagaacatagagatttggtattagtaaaaaaaagtcatacacaaacaatgtactaccacttgccaacaataccttcagcagcaaacaggaactagaagtagaattaagagaaataagcctagaatttgctcttgttaaagttgcaacttctaacttgtggaacttcccagtttgcagcaaaataatcctttgttgggttaaggcagcggtagctggrgacattacaacctcttcttagcagcaccagcttaagctagttaaagcaagtactaagctaagctgtactatgtgaaagattaccacaaagtagtaattttggaacgctctaacaatatgcaacattaatatctgatttttataaacattaactgtatcaaaaactaaggtctcttgagaagaggaaaggcatacaacacagcaagacttctttcaggcaaactctaactagacaaatgtggaagtacttcacagtgtgggttttcctgtttttgtttttcctcttacatttactcgctta

SEQ ID NO: 85518 - DNA, 599 bp, Chicken  19866894384567_1
  misc_feature (1)..(89): n is any nucleotide
nnnnnnnnnnnnnnnnnnnnnnnnnnnnnnnnnnnnnnnnnnnnnnnnnnnnnnnnnnnnnnnnnnnnnnnnnnnnnnnnnnnnnnnnngaaatagcaagttcagcagtcaatggtttaaatcacttaaagttttagcattgtggcgttctccagttcgttaactaagagacctgatgcttctgatgaataatatattttacatacaaaaaacatttgccttgtgatgtacaactagcatgtgaaaaacttagctataagatactataaagattaaaaatttatcgagacttgagatatstgaatatttaagtggataattagaatactcaatattacaatagtataggggctgctccacaaacagaaatgtaggcagtggtataaattcttctctcttaaacagtgaataaaccaygaataaatagcttaatatagaaaaaagagagtgcaacatacataattgaaaatcacagagtgttttctaycttcttctaaagtaactggcattgatcagagagcagaaaaagaaagtgcgctaggcagatcagcayagctgaaagaaacatttgcaagagcaaatgctagagttacaggatt

SEQ ID NO: 85519 - DNA, 600 bp, Chicken  19866894384567_2
taaatcacttaaagttttagcattgtggcgttctccagttcgttaactaagagacctgatgcttctgatgaataatatattttacatacaaaaaacatttgccttgtgatgtacaactagcatgtgaaaaacttagctataagatactataaagattaaaaatttatcgagacttgagatatstgaatatttaagtggataattagaatactcaatattacaatagtataggggctgctccacaaacagaaatgtaggcagtggtataaattcttctctcttaaacagtgaataaaccaygaataaatagcttaatatagaaaaaagagagtgcaacatacataattgaaaatcacagagtgttttctaycttcttctaaagtaactggcattgatcagagagcagaaaaagaaagtgcgctaggcagatcagcayagctgaaagaaacatttgcaagagcaaatgctagagttacaggatttcagaacatgactaaaagatatcactcatacatgctctttgttggttactaagcttgttctgaaacttcactagttctgaaaaacatacactaggtatgggctgaaaacaaattccat

SEQ ID NO: 85520 - DNA, 600 bp, Chicken  19866894384567_3
aataatatattttacatacaaaaaacatttgccttgtgatgtacaactagcatgtgaaaaacttagctataagatactataaagattaaaaatttatcgagacttgagatatstgaatatttaagtggataattagaatactcaatattacaatagtataggggctgctccacaaacagaaatgtaggcagtggtataaattcttctctcttaaacagtgaataaaccaygaataaatagcttaatatagaaaaaagagagtgcaacatacataattgaaaatcacagagtgttttctaycttcttctaaagtaactggcattgatcagagagcagaaaaagaaagtgcgctaggcagatcagcayagctgaaagaaacatttgcaagagcaaatgctagagttacaggatttcagaacatgactaaaagatatcactcatacatgctctttgttggttactaagcttgttctgaaacttcactagttctgaaaaacatacactaggtatgggctgaaaacaaattccattttcattcttttcctagtgtgaattaaaaaatgttttctttacatgtttcaatttcttccactttcttct

SEQ ID NO: 85521 - DNA, 600 bp, Chicken  19866894384567_4
ctataagatactataaagattaaaaatttatcgagacttgagatatstgaatatttaagtggataattagaatactcaatattacaatagtataggggctgctccacaaacagaaatgtaggcagtggtataaattcttctctcttaaacagtgaataaaccaygaataaatagcttaatatagaaaaaagagagtgcaacatacataattgaaaatcacagagtgttttctaycttcttctaaagtaactggcattgatcagagagcagaaaaagaaagtgcgctaggcagatcagcayagctgaaagaaacatttgcaagagcaaatgctagagttacaggatttcagaacatgactaaaagatatcactcatacatgctctttgttggttactaagcttgttctgaaacttcactagttctgaaaaacatacactaggtatgggctgaaaacaaattccattttcattcttttcctagtgtgaattaaaaaatgttttctttacatgtttcaatttcttccactttcttctctcttgttccctcatcttgctctatcaccaccatctccagtcaaaaggtcataaggatggtggtct

SEQ ID NO: 85522 - DNA, 600 bp, Chicken  19866894384567_5
gcaagagcaaatgctagagttacaggatttcagaacatgactaaaagatatcactcatacatgctctttgttggttactaagcttgttctgaaacttcactagttctgaaaaacatacactaggtatgggctgaaaacaaattccattttcattcttttcctagtgtgaattaaaaaatgttttctttacatgtttcaatttcttccactttcttctctcttgttccctcatcttgctctatcaccaccatctccagtcaaaaggtcataaggatggtggtctgcaatgcagaaatcatygctggtctataatatgggcatggtatagacagggaggcagattgtgcaatactttgacaaagagatacactagactgtcatcaagatgccaggcgggtttggtttaagaattagctaaatgccagacattctatcaacctaatttagaatcaatcttgctttttagtgatgataataaacttgtacaaacatgagattcatttgtatattttagcattttatgtcagtcccagaatgcaaaacctgacattggaatcagtttgatttttttggtgattgaagatattaagcactagaaga

SEQ ID NO: 85523 - DNA, 599 bp, Chicken  19866894384571_1
  misc_feature (1)..(152): n is any nucleotide
nnnnnnnnnnnnnnnnnnnnnnnnnnnnnnnnnnnnnnnnnnnnnnnnnnnnnnnnnnnnnnnnnnnnnnnnnnnnnnnnnnnnnnnnnnnnnnnnnnnnnnnnnnnnnnnnnnnnnnnnnnnnnnnnnnnnnnnnnnnnnnnnnnnnnnnnataaagacatactctgacacttcctttccaacatgagcaaacatgaaggaatagtatggtgcatagagaactcaccccaaatatccaagaaatgtctggtttctcctctgctgggcccagttgctcactaactgttcctagacagtcraattttgtctctcttaagggggacaagaaatttgttatttgtaaatcagttactagtcaacaactgattagctgaacgtgtacacaaaaaccctccttaaacaggaaagcaaatgacagaatagaagaaattaatggttttgacatgttgtaacagtaagtgtctcaaaaccatacaaggtaccttttattcctgtcttttgtgcacaatgctgctcatgtctttttctctctgtaaagcagctgtggtacttgtgaaaaggctgtcatcagtgccagagagagaaaagaggcagtgga

SEQ ID NO: 85524 - DNA, 600 bp, Chicken  19866894384588_1
agaacattaatcacccacacctacatgcagactttgagacaagaaatctatgaagggcagctcagggtggtattacaggatcagtatctaaaaagtggacggaggagagggttgcacataacatagagaaagatgtcagtgggtaacgtctctcttttaaccttcaggggcctatgggaggggtgcatctgggggaatttctttagatccattgccattaacagcctgagggtaacataaaattgtgagttgtggaatgactttccttccaagcgccatcagtttggggctcatggcacrtgaacctacrggagagagactatacatttgttcagaaatattttcctgtgggaataattatgtaaaacctctcaaacagcatgtttgtctgcagtgcagcatgaagaggagctggagttactttgtgcaacaggaaactgaaaccttttttatttcgagctccctcaggtatggtatggccacggtacagctgcggccatttttgccatggatcaaggaatgacccggcttacacctgcagtttaatttttggcacaagccttcactatgccttcccaggaagaatatgytcactgtgag

SEQ ID NO: 85525 - DNA, 600 bp, Chicken  19866894384588_2
tcacccacacctacatgcagactttgagacaagaaatctatgaagggcagctcagggtggtattacaggatcagtatctaaaaagtggacggaggagagggttgcacataacatagagaaagatgtcagtgggtaacgtctctcttttaaccttcaggggcctatgggaggggtgcatctgggggaatttctttagatccattgccattaacagcctgagggtaacataaaattgtgagttgtggaatgactttccttccaagcgccatcagtttggggctcatggcacrtgaacctacrggagagagactatacatttgttcagaaatattttcctgtgggaataattatgtaaaacctctcaaacagcatgtttgtctgcagtgcagcatgaagaggagctggagttactttgtgcaacaggaaactgaaaccttttttatttcgagctccctcaggtatggtatggccacggtacagctgcggccatttttgccatggatcaaggaatgacccggcttacacctgcagtttaatttttggcacaagccttcactatgccttcccaggaagaatatgytcactgtgagagagcacctc

SEQ ID NO: 85526 - DNA, 600 bp, Chicken  19866894384588_3
tcatggcacrtgaacctacrggagagagactatacatttgttcagaaatattttcctgtgggaataattatgtaaaacctctcaaacagcatgtttgtctgcagtgcagcatgaagaggagctggagttactttgtgcaacaggaaactgaaaccttttttatttcgagctccctcaggtatggtatggccacggtacagctgcggccatttttgccatggatcaaggaatgacccggcttacacctgcagtttaatttttggcacaagccttcactatgccttcccaggaagaatatgytcactgtgagagagcacctcagaaagaaaggaagaaaagagcaagctggaaaactgggagtcgtatttccctatgctgctttagaacaagatgcacccagaagtcatagttgctgctgtttctcaaccattatgctgttcctcagctacttcaacagcctacgtacatcctatgcattgcagaagttgctgttatcactcctctgtctcatacgaggtagcagagatgtgagagtttttgtatgagtagctattttaggctgaaaaccccacagctctctgccaggtttgggttgttttc

SEQ ID NO: 85527 - DNA, 600 bp, Chicken  19866894384592_1
aacagaaagttacttcaggatggataatggaagctctgggcctgctggtagcttcccaagcagagctccttgcacattcggcacaagcagcgctttgctcgcacccaaaagccactccgagccccagatgagggcaggatactgagttttactacacattcccctcagaggagacacttacagctgctgcgccttcacactgctcccatcgtctcctcacaccacgcggcatcagctactccggcggttctcctctgacccaccgggaacggcagaacacacacgaccgaccaggctcckcatcgttccacaggagcgcctcgcgctctcaccgcgtgcagccgggcccggggccgcgatgctgcggggaaggtcgccgcgcgggcggcacggccgggctcgagcgcggccgtctccgaactaaccgtcgttggcgagcgggcagcgccatgagcgggcagcccccgcagcgaccgctctacttccctcatttccacgaccgccccgagcccgacggcggcggcccgcggaacgccttgggggccgcgtgtaggccgcggcagcccccgcctcccgccggagttccccgctggcccgcgg

SEQ ID NO: 85528 - DNA, 600 bp, Chicken  19866894384594_1
aactgcctaaacagcagttctttacttcagaattctttggcttgtcagccagaagcaaataggtcagagcctccaacctgaacatggatttcccggaagctttgaaaggaaggcagtataaatttcatcacagaacaatcccatgaatgggttttcagacctcacaccctgaatccctaagctaggctccatcttaagtaaaaatcactacagatgttggtattatgctattattactactactaaatgcagacaatgtaagcaggctgctgaacggtaaattcaaagggtagcatactrctgcctaaaaccagaacacactactccagtgaagacatactraagtcttaaagmctttttgttttcccatacataaaacctgacagataggacataaaattctcagcataagaaccatgcagygtatgcrgtggcatcaggctgaccgtataatctggattgctagcatatgctacttcagtctgcttgattagactcagagaaacagagctctctgcttcgctgacctccgctccccgttctcgtgtacactggcagcttcctcgcaatttcagcaagaatttgcctctgcacctctgg

SEQ ID NO: 85529 - DNA, 600 bp, Chicken  19866894384594_2
tgtcagccagaagcaaataggtcagagcctccaacctgaacatggatttcccggaagctttgaaaggaaggcagtataaatttcatcacagaacaatcccatgaatgggttttcagacctcacaccctgaatccctaagctaggctccatcttaagtaaaaatcactacagatgttggtattatgctattattactactactaaatgcagacaatgtaagcaggctgctgaacggtaaattcaaagggtagcatactrctgcctaaaaccagaacacactactccagtgaagacatactraagtcttaaagmctttttgttttcccatacataaaacctgacagataggacataaaattctcagcataagaaccatgcagygtatgcrgtggcatcaggctgaccgtataatctggattgctagcatatgctacttcagtctgcttgattagactcagagaaacagagctctctgcttcgctgacctccgctccccgttctcgtgtacactggcagcttcctcgcaatttcagcaagaatttgcctctgcacctctggcctttcttcgttttcatagcgttctttgtcagcgtaggacat

SEQ ID NO: 85530 - DNA, 600 bp, Chicken  19866894384594_3
gcaaataggtcagagcctccaacctgaacatggatttcccggaagctttgaaaggaaggcagtataaatttcatcacagaacaatcccatgaatgggttttcagacctcacaccctgaatccctaagctaggctccatcttaagtaaaaatcactacagatgttggtattatgctattattactactactaaatgcagacaatgtaagcaggctgctgaacggtaaattcaaagggtagcatactrctgcctaaaaccagaacacactactccagtgaagacatactraagtcttaaagmctttttgttttcccatacataaaacctgacagataggacataaaattctcagcataagaaccatgcagygtatgcrgtggcatcaggctgaccgtataatctggattgctagcatatgctacttcagtctgcttgattagactcagagaaacagagctctctgcttcgctgacctccgctccccgttctcgtgtacactggcagcttcctcgcaatttcagcaagaatttgcctctgcacctctggcctttcttcgttttcatagcgttctttgtcagcgtaggacatatggtactggaa

SEQ ID NO: 85531 - DNA, 600 bp, Chicken  19866894384594_4
ttcatcacagaacaatcccatgaatgggttttcagacctcacaccctgaatccctaagctaggctccatcttaagtaaaaatcactacagatgttggtattatgctattattactactactaaatgcagacaatgtaagcaggctgctgaacggtaaattcaaagggtagcatactrctgcctaaaaccagaacacactactccagtgaagacatactraagtcttaaagmctttttgttttcccatacataaaacctgacagataggacataaaattctcagcataagaaccatgcagygtatgcrgtggcatcaggctgaccgtataatctggattgctagcatatgctacttcagtctgcttgattagactcagagaaacagagctctctgcttcgctgacctccgctccccgttctcgtgtacactggcagcttcctcgcaatttcagcaagaatttgcctctgcacctctggcctttcttcgttttcatagcgttctttgtcagcgtaggacatatggtactggaagcagaagtcatgagagaagcagttactcacagggagtggagacagtttttcatatacaggcaagactgg

SEQ ID NO: 85532 - DNA, 600 bp, Chicken  19866894384594_5
cagaacaatcccatgaatgggttttcagacctcacaccctgaatccctaagctaggctccatcttaagtaaaaatcactacagatgttggtattatgctattattactactactaaatgcagacaatgtaagcaggctgctgaacggtaaattcaaagggtagcatactrctgcctaaaaccagaacacactactccagtgaagacatactraagtcttaaagmctttttgttttcccatacataaaacctgacagataggacataaaattctcagcataagaaccatgcagygtatgcrgtggcatcaggctgaccgtataatctggattgctagcatatgctacttcagtctgcttgattagactcagagaaacagagctctctgcttcgctgacctccgctccccgttctcgtgtacactggcagcttcctcgcaatttcagcaagaatttgcctctgcacctctggcctttcttcgttttcatagcgttctttgtcagcgtaggacatatggtactggaagcagaagtcatgagagaagcagttactcacagggagtggagacagtttttcatatacaggcaagactggaaacatt

SEQ ID NO: 85533 - DNA, 599 bp, Chicken  19866894384609_1
  misc_feature (1)..(141): n is any nucleotide
nnnnnnnnnnnnnnnnnnnnnnnnnnnnnnnnnnnnnnnnnnnnnnnnnnnnnnnnnnnnnnnnnnnnnnnnnnnnnnnnnnnnnnnnnnnnnnnnnnnnnnnnnnnnnnnnnnnnnnnnnnnnnnnnnnnnnnnnnnnnntggcagtgatggtgagaactcccctcacccctcccaccccccatgccatctgacccccaccatcatcaggtcctttcattttgctgcatgttatatgggttggactccaccacctctaatagccacctccccagaccttgcggttcttggacagggccrgctgccctgctgtaatttagctcttaatcataacttaaaccaccctgtgaggggggagaggcctgaaattgcaggcagctccgcatccaagagaaaggttgcaaatccagctggccaggagcagcaggatgcatgggtgaggggtcccactgagctttgtttgcaagcagaaagggaacactgaatggtgaataggtccccttgttcctataccatccctgaagcatcccactggggatggtgtcctgtgcaggaggtagaggggggcttaattcctaaatattttataaggtggacta

SEQ ID NO: 85534 - DNA, 600 bp, Chicken  19866894384612_1
cactctgggaaataaaagttaggaactgattccaactcattttcctgaaggtgacccttggcctcccagctgagataacaacgctaatatttatggatgggccattcctgcctctgggcacagagcaaaaataactcaaatcacaacttggtagacctctaacagaactgaaaagaaaccctcacatccaacacagccataataaactatctcgcccaccaatgtgcaaaaaaaaaaaaaaaaatagcaccacccacaacctcacattcaaaccaaacagaaatggtctggggttacaaygtgatgagtgggcaccaagtgtgactcatccagaaggagccgacctgaggcaacacagcgctcagatggccgcgcttcattcgctcattcattgtagcgtgataaaaggtgctcagaccacgctaatgcaagctggcaaacttgttgacttccttttctctccaggctcgcttttctgcactcttttcagtctgtgtgcatttggttctgctgcacaaacaacacttgtttcaaactgggagaagtctgaagagaattcctgctgtctgcctgcacttaaccagactcagttggaggaga

SEQ ID NO: 85535 - DNA, 599 bp, Chicken  19866894384613_1
  misc_feature (1)..(35): n is any nucleotide
nnnnnnnnnnnnnnnnnnnnnnnnnnnnnnnnnnntaggcacagaagttcatttctaagatccgagtcaatgcaaatacttcagagatgccttttgaatgacacgttaagtagtcgtctccagttgctgtctgggttagacttttcaacagaagcagggaaaattttactagcaatttcccactctcgttaacttatcctgtgaagattcagtttctgaatattcaagctcacagcatcttcaactaatttgaatgggaggaggatcaactggcaagtctggtggtattcagagacctgytctgtcactgaaaagagctctgcacaaggtcatgaattcgagctctgatgttggttcagggtttgacctgaacagtcttaggatggaattaacttcacagaactttatgtatcatgtctagctcaccctacctcttagctctgcctcagcaacccctgaaaaagagatcagcacctccaggccaggggataagtcttcctacctctacccagaggtaggcaaaaagggatagggttcagaagtacctgtgactcacacatgaagacagacyggcagcaggaaaggagaggtaaagatta

SEQ ID NO: 85536 - DNA, 571 bp, Chicken  19866894384613_2
ggcaagtctggtggtattcagagacctgytctgtcactgaaaagagctctgcacaaggtcatgaattcgagctctgatgttggttcagggtttgacctgaacagtcttaggatggaattaacttcacagaactttatgtatcatgtctagctcaccctacctcttagctctgcctcagcaacccctgaaaaagagatcagcacctccaggccaggggataagtcttcctacctctacccagaggtaggcaaaaagggatagggttcagaagtacctgtgactcacacatgaagacagacyggcagcaggaaaggagaggtaaagattagcttaggcagcagacaaacacagccttcaaatctaacacagggtggtgatttcagaaccctaatccaaaaacacacacaggtaaagaaacctggctgtgacatttagtctgcacgtgtaattcacgagtgtcaactcctggaacagagcaaaaacccttctagtggacgtatgaaataagctgaccgcagaaagcttgttcacaaatactcccagttcatgcttatatccctgtgctgtaaca

SEQ ID NO: 85537 - DNA, 600 bp, Chicken  19866894384617_1
aaggagccttgtccttgctatgcatataaaatctcagaaaatataaaaataattgtacaaaatacaagggctaggcatgtttttggaaggattactgttgtagaagatcatggatgctgaatatgagacatccataaaaaggcaagatgacattggattgagtagattaactcacagtgtgcctacagatgagaaaacagggcagagtgtgttgtacctttcagtatttgttttagtatcccatttttttcccaagcagatacagattcaggtacctactccctgtttttcattcatatyaagaaggccgacatggggtcaggctgtagttttcctgtgcgtattttttatgaggtttatcactggagaaaatgtcttttgtaagaaggttcccatccaggcttgacagcaacatttcttttatgcagttcctttacagcacgaaagaatctcagactttcccttaccaaacaagagatagcgcttcaatttaactacttggaattgggtgcttaaataatttttggcgcatggatttaaaaacatctcatcacacaattgcattgtgaataggcctgcagtgctggcagctgggattta

SEQ ID NO: 85538 - DNA, 600 bp, Chicken  19866894384622_1
tgtaggatatccacccacccttgtcataagtattccaagaggaaaaaaaacaggtggctcatacagtgtatatcaatcctgccttgacagagtgactaccgttccctaaaccgatgccagtactttcaggcagatcgattgtattcagtcaaggtgatggtgttcattctgcaacacctccttgacctacagggtattttgcttctttgcaatgcactgcaatgactgcacggataatacttgtccttctggattgtcatttatctgacaagcttaggtattcatgagtatgacgacacytcttcggatattagcagaagtataaatgttagtttatgctaataagtaatacaatgaaaaacaaagaaaaggtcagaaattgtagttttatactgtgagatttcccaagacaaactaaatccaattcacagcacatgattacagttttccaagaggtatatttatagctgcgaatatgtactttggttaaccctattgtaagcaccaagaaggggggaggttttttttttcgggtggtttttttttttcagttttaaagaaaaaagcaagaggttaattggttttgctagttggaggtct

SEQ ID NO: 85539 - DNA, 599 bp, Chicken  19866894384625_1
  misc_feature (1)..(40): n is any nucleotide
nnnnnnnnnnnnnnnnnnnnnnnnnnnnnnnnnnnnnnnntgtaaatcccctgtgtctgagccatagttttccgaacaattcccatccactactgttcctgattggggtggaaatgatgcaagtgattttgataggaagaacttcttgagtggcttaatttaaagatgctattctaccttgctaaggcacttggtggattttagccagaaagctcataattcttgaatggaagagacagcagtgtctgccaggtttgtctcacagagaaatcagctgttttgtgtactgtaacagtggawgtggtatcgtttctaacgcactgtagagacctgattccaagtctttgcttgcaacccacagcctgctactctcttttacttacctgaagtgggcataaagctgttggaagacaatttccactttcttgatgagggacgctgccttcagtcataccattttctacctggcagacacgttctctcccgtactgtccttcctttagcacacaaactgttcccatcttatgttcctgttcacccttgaaaactgactttttccgtaatttagaacacaactggtgatctgctaactgccagcc

SEQ ID NO: 85540 - DNA, 599 bp, Chicken  19866894384629_1
  misc_feature (1)..(142): n is any nucleotide
nnnnnnnnnnnnnnnnnnnnnnnnnnnnnnnnnnnnnnnnnnnnnnnnnnnnnnnnnnnnnnnnnnnnnnnnnnnnnnnnnnnnnnnnnnnnnnnnnnnnnnnnnnnnnnnnnnnnnnnnnnnnnnnnnnnnnnnnnnnnnntgggttttctagacattcaaggaaatgaggcaagatgatatttatttctaataacaaagcttctctctgtctcaccccagcttgcacagtaagtgcagtgatggaagcacccacctacacagtccatgctttgtcagagagacaaagggttctgcaarcgttatacatgcagaagctctctcccactcctcaccagggagacaggaggagactttgatttaaaccaaatgctactcacagctggacaaagacatgaaaacgcatcttcttagcaagctccttcctttctatgtttctttaacggggaagttaacaatcagtgaattgaatacaaagcccagaatagtatcttgttcaaggacaarcctatgaaattagttaacttagagaatagctgcgtgaacagcctgtaataaacagatgttcacttgatactctcttcacttactcagcactt

SEQ ID NO: 85541 - DNA, 600 bp, Chicken  19866894384629_2
tctgtctcaccccagcttgcacagtaagtgcagtgatggaagcacccacctacacagtccatgctttgtcagagagacaaagggttctgcaarcgttatacatgcagaagctctctcccactcctcaccagggagacaggaggagactttgatttaaaccaaatgctactcacagctggacaaagacatgaaaacgcatcttcttagcaagctccttcctttctatgtttctttaacggggaagttaacaatcagtgaattgaatacaaagcccagaatagtatcttgttcaaggacaarcctatgaaattagttaacttagagaatagctgcgtgaacagcctgtaataaacagatgttcacttgatactctcttcacttactcagcacttgtgcrccagtgttatcagcctgccaacaccttaaaattaacttctgatgttgtctgtgagaaggagtaaccctatagaaacttaatgtactggagcaccagggtggagttgtgcaattcatgttctggactttaaacaagcttctgttgtcaggaggatcggatgaggtgaaagctctaaatcaggtgaatatttatatagcactaag

SEQ ID NO: 85542 - DNA, 600 bp, Chicken  19866894384629_3
atacatgcagaagctctctcccactcctcaccagggagacaggaggagactttgatttaaaccaaatgctactcacagctggacaaagacatgaaaacgcatcttcttagcaagctccttcctttctatgtttctttaacggggaagttaacaatcagtgaattgaatacaaagcccagaatagtatcttgttcaaggacaarcctatgaaattagttaacttagagaatagctgcgtgaacagcctgtaataaacagatgttcacttgatactctcttcacttactcagcacttgtgcrccagtgttatcagcctgccaacaccttaaaattaacttctgatgttgtctgtgagaaggagtaaccctatagaaacttaatgtactggagcaccagggtggagttgtgcaattcatgttctggactttaaacaagcttctgttgtcaggaggatcggatgaggtgaaagctctaaatcaggtgaatatttatatagcactaaggaattagagaattacttccaatctagtgggaaaaatgaactaggaatttgcaatctatcagctgaaaccagcactacgctgctcaaaaacactccta

SEQ ID NO: 85543 - DNA, 554 bp, Chicken  19866894384630_1
ttgttgacctgcttggaggagatcactggtggacataccacaggtttaccaacactgatgaagtgaggtctttatggtcctctggctggtaatccaggatgtggtaagcaaggaaaaaaatgctagtttggctggtattttaacacgtgtagaccaaaaagacttggatttcttcacattctttcatattaagctggtagtcactcggatttactccaaggttttggtatagcacaaggaataggtgtataagatgctgtgctttatatgacaaggatgaggtcttcaagtgaccaagaygtgtgcttggcttctctgaagtatctgagcagaccaatgggattgtgtctgatttctgctccagtctgtacagatgtgggtagcattttcctagaccctgctaactggttgcccaagcagaatagaaaagtgtgattcattgactgcaaacacacgtgtccttccagtctttttctccttttcctgtcagcctcgttgttcctcatccagattgctcctcgggtcaagctgcccacgtgtgccagcagaaggga

SEQ ID NO: 85544 - DNA, 600 bp, Chicken  19866894384637_1
tggtgatgtgtgaagggagaaaactgggaaatacagaaagaagtgcattcttagttgctccttttgggtaacacttaaatactgcttttgaagatagtgatttttctttacctttgcattaaaacttcatcagagaagtcttttatttttatccactttatggattaaaaggagaacgttactacactgaactgtgcaagaaaaaaggattctaaatactaacaaaacttgacttaaagggagtagccagtgcttttcattgcccaccctttcaccaagaggaaaaaatagttcttggcrgtgaaaatacaatggaagtacttgcctagcactctgtgtaaccagtagggcttctcattggtaaggttaattttgttttggaaatgacctcaccacattaacatcctgaatcccaagacgaaacaggctaaaattctctgtttttagggctgctgtttggtcagaaaaataaacagcctctattgagaataaaagaaggaattgctactaaactgtcatatgtctagatagatagttgggacatcaacaggaactgacttttggtggctttttctgtttctttgtgtcaagcctcctgta

SEQ ID NO: 85545 - DNA, 600 bp, Chicken  19866894384638_1
aaacactgtttcaggctgcaaagtggaagcggctccttctgacttgtttgaattttttatttccctgcttttagtttcttctcaatcccactgtcagaattagagtaatgtccaagaatagcttccctcccttcatagccatttccattcttttcattctgcttttacagtccattaaaagcatttcatgctatcccatgatggctgcacccgcgttgtgcatgctctcatgcattttctgagagcagggtttgcagttcacctaacagcccgctcaccccatgccctgggcagcctgcrccgaggggttatcctgatacaaaggacgccagagccgcaatctgcctgcagtgtggctatttccaaactcatgaccccacatccagacaccagctgcgcttctgcagctgagcttccaccaggctcccagcccctagtttggcaactgctgctgcagttcatcgaaagtttgtcaaaacccatccaattccacaaaccccgcagttccaacaaagcaacatttttctacagaaacctgttctcttggaaatttcccaacccagttctactgagagccattatttctgaagtgcttttgta

SEQ ID NO: 85546 - DNA, 600 bp, Chicken  19866894384639_1
tgatatacaggaaggcgtgtgtatgtgagtagagagtgcttgataaatatgaaaagtgatgctaaaatatagatcacgcagatacatttctattcaaatgagttactataaagtactaattactttctctgcagtggcatgtacacacatgtacacatattccctttgtgaaggggaagcatattccttgcttttgtgaagttgtatttatgcaaagtgttgagtctttttcaagtacggtatattttgctatgttaaacttgagtgtgtttccatagaaagttctagttgttttttttytaaagaagtctttttcctccatgaaaatatcaaagctttgtattgtgaactgatttctttaagcagctgcattacagcaagacaaataagttttgttggacattgtaagatacacgagtcattgttctacattgttagctctcactttgaagttctcatttcttgtttacatcattctccccctttcctctctttctctgttccccatatattcatacacttggaaaatatctggcaagcaaacagtactgttttgtcaaatatccaaaaacctctgatggatgttagggcttcacaatg

SEQ ID NO: 85547 - DNA, 391 bp, Chicken  19866894384641_1
taaactcttgcctttgagtctgcagccggcagactgcaacaataacacccgcagaaaagggtgtgctcccattcatctcgatgggtgttaacttggaagggtaattatgacccccgatgccaagagctctaaccgtttcaccgttcagtatcccagcccataaataaagcctctggccggctgtgcacaaacctgggtgggagggaagccgtgtagcaatgaggcgttgacttatggatgtgccaggagtctgaaacgccttggctcttgctgaggctcccagcctctctgcgagccctrcgctgctcagctgaacagaatagggaatgtctggcagatgccttgygctgggtttccctgggaaactcagctggcgttaagataaacaagg

SEQ ID NO: 85548 - DNA, 345 bp, Chicken  19866894384641_2
taaactcttgcctttgagtctgcagccggcagactgcaacaataacacccgcagaaaagggtgtgctcccattcatctcgatgggtgttaacttggaagggtaattatgacccccgatgccaagagctctaaccgtttcaccgttcagtatcccagcccataaataaagcctctggccggctgtgcacaaacctgggtgggagggaagccgtgtagcaatgaggcgttgacttatggatgtgccaggagtctgaaacgccttggctcttgctgaggctcccagcctctctgcgagccctygctgggtttccctgggaaactcagctggcgttaagataaacaagg

SEQ ID NO: 85549 - DNA, 599 bp, Chicken  19866894384645_1
  misc_feature (1)..(54): n is any nucleotide
nnnnnnnnnnnnnnnnnnnnnnnnnnnnnnnnnnnnnnnnnnnnnnnnnnnnnntataagtttgcttagctttaaccttagaaaattcttgctcagaattgtatcctattgcattttgccacactctaactgaaaatgctattatgcaagtagtgcagtttcctgtatgacgaagtgtgcagtgatttttcttgacatatgtatgagtgcctcactttattctgtatctttctccaaaatgagaattcctcagcacctatgcagatatcccatttgaagggacagattgaaggcacaagkaaggacagcaaaaggtgaatgctgtggtcctcccattcatctgcagtcttaccagacccttggaaacctagaatggtagaataatatttttaagaagaacatttttattttctaaattaatagaaaggcagacaggaaacctatcccacaagtctgtgatggccctgacaattagcatttatacaatcaaacgcaaaggttctaaaatgacctccattaaggcagattcttttcagaattarttttagttcttgatttttgtctctgttgtactgactccctcaagtgatggtaaaaat

SEQ ID NO: 85550 - DNA, 461 bp, Chicken  19866894384645_2
gaattcctcagcacctatgcagatatcccatttgaagggacagattgaaggcacaagkaaggacagcaaaaggtgaatgctgtggtcctcccattcatctgcagtcttaccagacccttggaaacctagaatggtagaataatatttttaagaagaacatttttattttctaaattaatagaaaggcagacaggaaacctatcccacaagtctgtgatggccctgacaattagcatttatacaatcaaacgcaaaggttctaaaatgacctccattaaggcagattcttttcagaattarttttagttcttgatttttgtctctgttgtactgactccctcaagtgatggtaaaaattgaaagtatttttgttattctgtaaccaggaatttttttcctttttagaaaaaatagaaatgttaactgaaaaactaaccttatcatttactgaaataaaatta

SEQ ID NO: 85551 - DNA, 600 bp, Chicken  19866894384666_1
ctaagaagatgcaattagatctatttaaaaatccacaactggtgtctacatttctaaacccttatcacagatgaagggggggcttgattctgcaaacatttgcagatgttactccatcactgtgagcaacttactggaacattctgagctaccggagctgcattcctgtctccgttcccctggattatttggcacaaaagcccagcaaagccactttgctcagtcgttggctcagacattcagaggtaatgcaaagttagccttgaaccacttcaggacttcccttcccaggagcaaatyagtcacctgaaggccaccagtctccaccacacacccaagctgccaaaactagcagcaactctccagtattcccaagtcccagccactgctgtctcacccagtcaacatctacactaataacacaaaggggtactgcagtgagagttactacaggagaccgcaccctgcagagcacctgccaacagcatcacgtactccttatgacaatttaattaacgttaaggcaaaaaygggtcaatgttactgctttcctaatatggaaaggaagctgtcatttctgtgtagggtctttggtggatt

SEQ ID NO: 85552 - DNA, 600 bp, Chicken  19866894384666_2
tcagacattcagaggtaatgcaaagttagccttgaaccacttcaggacttcccttcccaggagcaaatyagtcacctgaaggccaccagtctccaccacacacccaagctgccaaaactagcagcaactctccagtattcccaagtcccagccactgctgtctcacccagtcaacatctacactaataacacaaaggggtactgcagtgagagttactacaggagaccgcaccctgcagagcacctgccaacagcatcacgtactccttatgacaatttaattaacgttaaggcaaaaaygggtcaatgttactgctttcctaatatggaaaggaagctgtcatttctgtgtagggtctttggtggatttgtatttaaggaagaaaaatattggatgcatacctaatattttaaagtctaattttaaaatgtccattttttctaattagcaaaaatgatctattagtgaccaatctctcagtaaatctcttcagttagttgtaaattgaagaaaaaaataacccattcagaaagggcgctaagtgacattaaaataaaagcctaggtgaccttattttttaagttacagaaatacagcag

SEQ ID NO: 85553 - DNA, 600 bp, Chicken  19866894384667_1
aggttaaacaaagcctgaatgaaagaatcacaggtgatgttgttcctgctaacaaagaaggcactgatactgccttagaatgaaattaagctgtaggaacacaaggtcagaagtaatcagcagctgaagtactagaaagttctgagctaatcctttggaggaacagaaaatcaagtctccagctggtacaaactggcagaaacccactgatctgcagttaggtggatttgcaccagaagattttgcccatacctgcccttctgcacagcctggaaactgtttaaactgcttgactttttwaaaaaataaaaatgcttaattaaatgacaggagaaatattgtgtgtagaaccaatgaatggatagacaagcatatgataaaacaatggcatggcatggaaacaactctaagtaatggaagagtaatcagcaaagatgattacctgcggcttattgactctgcgtgtaagtctgggaggtggctgtgttgtgacagtagaggaagagagggcagaggaagagagaggagcaggtgaagagaaagcttttgagtctgcagtcttttgaagaaaagaaaagttggtcagcttggcatatacac

SEQ ID NO: 85554 - DNA, 600 bp, Chicken  19866894384667_2
gtagaaccaatgaatggatagacaagcatatgataaaacaatggcatggcatggaaacaactctaagtaatggaagagtaatcagcaaagatgattacctgcggcttattgactctgcgtgtaagtctgggaggtggctgtgttgtgacagtagaggaagagagggcagaggaagagagaggagcaggtgaagagaaagcttttgagtctgcagtcttttgaagaaaagaaaagttggtcagcttggcatatacactcttatcacaatcattggtagtgataagaatatctgctatgctrtaagatttgatgcacacacagcaaacataactccatgcaagggcagatgcagtttcctagttggttcgtcagagcttaccacctcattctgctttaaacatgcaggttatgcccatagaaaacactgctaaaaatatgtgcagttggtaaacagcatagtcttaatacagctttcaatatgcttctggttatgattcaagcagaaatcaaacaaactgtcagaagatttcccagtgtgaaatgtgtcatcgtagaaatcacagtccctcactatttaacactggctagatgggatacgtc

SEQ ID NO: 85555 - DNA, 600 bp, Chicken  19866894384667_3
tttcccagtgtgaaatgtgtcatcgtagaaatcacagtccctcactatttaacactggctagatgggatacgtcatgggggcaatcacattgcattcaagaagctgcttgtaactatgattttgagctccccaaactcctgtacatgttagcacggaagtgttgtaatgtattttggatggctgtagcccataatggacactaagacaagtaagagcttcaaagtaaggcagatctccatatactgagactgaggacagaaaatgttgcagaagctactagaaggttcccttatgctccytcttgtagcatataactatatatatctaagtactcttgggagtattacacatggaaccctttcatrcaattttcaaaatgcaaacttaataaattccaataaattccactcaaagcacagataacaagcaagcctccctgacttagccatgcacatcccagactgaggatcagtaatccacagtatccaggatcatccatcctgtatttccccaacaaggcataacttttgtgattccagaagccaggctgacaactataagatgtttcaatgcttggctttaaggggaagaaataaatc

SEQ ID NO: 85556 - DNA, 600 bp, Chicken  19866894384667_4
gatacgtcatgggggcaatcacattgcattcaagaagctgcttgtaactatgattttgagctccccaaactcctgtacatgttagcacggaagtgttgtaatgtattttggatggctgtagcccataatggacactaagacaagtaagagcttcaaagtaaggcagatctccatatactgagactgaggacagaaaatgttgcagaagctactagaaggttcccttatgctccytcttgtagcatataactatatatatctaagtactcttgggagtattacacatggaaccctttcatrcaattttcaaaatgcaaacttaataaattccaataaattccactcaaagcacagataacaagcaagcctccctgacttagccatgcacatcccagactgaggatcagtaatccacagtatccaggatcatccatcctgtatttccccaacaaggcataacttttgtgattccagaagccaggctgacaactataagatgtttcaatgcttggctttaaggggaagaaataaatcccatttccaaagatgagccattgcacactggaaaatctttaaatagcaaataattgcctgtattct

SEQ ID NO: 85557 - DNA, 599 bp, Chicken  19866894384668_1
  misc_feature (1)..(72): n is any nucleotide
nnnnnnnnnnnnnnnnnnnnnnnnnnnnnnnnnnnnnnnnnnnnnnnnnnnnnnnnnnnnnnnnnnnnnnnnaaagaactgtaaataaagtttagcgttcctattgtaacaaattaatttttatgcaataaattatatttcctagtctaataatgaaaagaaaaaaaaaaaagtagacaatctgctctctcctcctgtgtgcatcactcgccagttggttcccgctgggcttgacggctgctggagctctgtgcctgtggaccctgctgcccttgggactaccgcagtggggagtggttrgtgggaactcttactcatcacggccaatcttcatccatctcttgtgcttggagttcagttctggaggtcatcctgaacaccccaggtggttttccccccacttgctttcagtgggatgctgtaggtatggcactcccaagggacagcagcactctgctttggttgtaggccttggccatggtggcttggagtcactgtaagggatggatacctttcttgttctcctgcagcatgggatgtgctcctgctggaatacttggccatttctttccccttagcccaaaactgcagtcgatgca

SEQ ID NO: 85558 - DNA, 600 bp, Chicken  19866894384672_1
gcatgcctgccaaatataaagaataccttcttgttcaaggttgggcttggtatttccattctggacatggcatgaatgttttcccttcacaacacagactgccagtcacaacaaatcctggcttgcagttctgcctttcccaccgttaactcttctttgccctcaaacactgcaaggacttgcacctttctttcctctcttggcttttgctgattattttccagccatatttctgctttggcaacacacacagtgattctgacttcacattgccagagccttagagacaaacctccagcrgttttcctgatttcaaataagtgtaataaagatctcaggaaraggtgacctttgtggccaattatgtatcctatatgtaaatttagtaaacacttgctaggtagctacccgtctcattagtatcatgtgcatttcagcagattattcctataatatgtctagaaggtacattctgatagaagatcagtttggccaatatcaaatttactatgtctctctcatagtaacctggagcaatctgtatgcccactgatgtcagcgaaaagctactgcctaacatcagcaaacaattasgatctc

SEQ ID NO: 85559 - DNA, 600 bp, Chicken  19866894384672_2
gggcttggtatttccattctggacatggcatgaatgttttcccttcacaacacagactgccagtcacaacaaatcctggcttgcagttctgcctttcccaccgttaactcttctttgccctcaaacactgcaaggacttgcacctttctttcctctcttggcttttgctgattattttccagccatatttctgctttggcaacacacacagtgattctgacttcacattgccagagccttagagacaaacctccagcrgttttcctgatttcaaataagtgtaataaagatctcaggaaraggtgacctttgtggccaattatgtatcctatatgtaaatttagtaaacacttgctaggtagctacccgtctcattagtatcatgtgcatttcagcagattattcctataatatgtctagaaggtacattctgatagaagatcagtttggccaatatcaaatttactatgtctctctcatagtaacctggagcaatctgtatgcccactgatgtcagcgaaaagctactgcctaacatcagcaaacaattasgatctcattccaataccctcaactgctgaaaacaagaccatgagttat

SEQ ID NO: 85560 - DNA, 600 bp, Chicken  19866894384672_3
ccagcrgttttcctgatttcaaataagtgtaataaagatctcaggaaraggtgacctttgtggccaattatgtatcctatatgtaaatttagtaaacacttgctaggtagctacccgtctcattagtatcatgtgcatttcagcagattattcctataatatgtctagaaggtacattctgatagaagatcagtttggccaatatcaaatttactatgtctctctcatagtaacctggagcaatctgtatgcccactgatgtcagcgaaaagctactgcctaacatcagcaaacaattasgatctcattccaataccctcaactgctgaaaacaagaccatgagttatatagcatatccaggtatttatgattctaaattcctttatcttaggaacagatttctaaaatctgttggatacagaggaaagcttctacatgctaactgaaatgtcactagaggtgagattcctaagtagggaattttcataattactacagtaaggccatcatcaaaagatgcaaaagaggaagaatgacatccaagcactacactgaaaccaaccactaaaccagccaaactcatttaaaagaaaatccaa

SEQ ID NO: 85561 - DNA, 599 bp, Chicken  19866894384678_1
  misc_feature (1)..(66): n is any nucleotide
nnnnnnnnnnnnnnnnnnnnnnnnnnnnnnnnnnnnnnnnnnnnnnnnnnnnnnnnnnnnnnnnnntttaaggagtttaacaaaaatagttctgtgacataaacaagtgcaaataccattgcttagtaaagctgggaaaggactcaggcctaactagaggacctggaagtccacagccacacattttaaggacatattagtgttttcactactgttatttaaataatatttagaaagcaaaattcaagattctacataaaagcacaatataaagtcaaagtgcctactggtcaaacttcraagtgcctacaggtcaaagtggtacaaaccatattcagcatggaatgaaagcaatcaaggtcttttcctctccttctcatttccattaggagaagtcacaggtaryatcattccaatctgaagtgacatcaaagccaaatgggtgtacaagagaggagagctgagcctgcatcttgatggaaaactgatcctcacttcctctgtgtaaatgccaattaatcctcaggcttttgctctggaaatccaagcagaaaacagcaccagggaacagcaacttcgatgccacgtttgggggaggc

SEQ ID NO: 85562 - DNA, 600 bp, Chicken  19866894384678_2
agtgcaaataccattgcttagtaaagctgggaaaggactcaggcctaactagaggacctggaagtccacagccacacattttaaggacatattagtgttttcactactgttatttaaataatatttagaaagcaaaattcaagattctacataaaagcacaatataaagtcaaagtgcctactggtcaaacttcraagtgcctacaggtcaaagtggtacaaaccatattcagcatggaatgaaagcaatcaaggtcttttcctctccttctcatttccattaggagaagtcacaggtaryatcattccaatctgaagtgacatcaaagccaaatgggtgtacaagagaggagagctgagcctgcatcttgatggaaaactgatcctcacttcctctgtgtaaatgccaattaatcctcaggcttttgctctggaaatccaagcagaaaacagcaccagggaacagcaacttcgatgccacgtttgggggaggcggagtcggcaacccaacagaacacagcacttggaacagggggtaagcgagcccttgttagctcctgtggagccacatcccccagctgatttattgattctagccac

SEQ ID NO: 85563 - DNA, 600 bp, Chicken  19866894384678_3
gtgcaaataccattgcttagtaaagctgggaaaggactcaggcctaactagaggacctggaagtccacagccacacattttaaggacatattagtgttttcactactgttatttaaataatatttagaaagcaaaattcaagattctacataaaagcacaatataaagtcaaagtgcctactggtcaaacttcraagtgcctacaggtcaaagtggtacaaaccatattcagcatggaatgaaagcaatcaaggtcttttcctctccttctcatttccattaggagaagtcacaggtaryatcattccaatctgaagtgacatcaaagccaaatgggtgtacaagagaggagagctgagcctgcatcttgatggaaaactgatcctcacttcctctgtgtaaatgccaattaatcctcaggcttttgctctggaaatccaagcagaaaacagcaccagggaacagcaacttcgatgccacgtttgggggaggcggagtcggcaacccaacagaacacagcacttggaacagggggtaagcgagcccttgttagctcctgtggagccacatcccccagctgatttattgattctagccacr

SEQ ID NO: 85564 - DNA, 600 bp, Chicken  19866894384678_4
atcattccaatctgaagtgacatcaaagccaaatgggtgtacaagagaggagagctgagcctgcatcttgatggaaaactgatcctcacttcctctgtgtaaatgccaattaatcctcaggcttttgctctggaaatccaagcagaaaacagcaccagggaacagcaacttcgatgccacgtttgggggaggcggagtcggcaacccaacagaacacagcacttggaacagggggtaagcgagcccttgttagctcctgtggagccacatcccccagctgatttattgattctagccacraaagatgagtgtaaggaggtaaatagcactgctcttcgttgggaaaataaggtgattattctcagaagtatattcattcccctcctgtttgtctgcttttactatttcaggcattattttttattttttttgtttttattttaaccgtttcagcttgttattatgttcagtccctttaaaggcaaatagagtttaaaagatcttgtcaccaggaaggggtgggggtgggacagggagaacggcagaccttttattaaacctttaaaaagatttctaactcacattgcaagtgaaaacaac

SEQ ID NO: 85565 - DNA, 415 bp, Chicken  19866894384679_1
gaaatttatcttcagtgacatctatcattatgacagactgtagatctatatgaattataatgatgaagaatgcttttagtttgctgaaggtttattcctactaaagaggaaaatatcttataatctaattacatagtctttcactctttatagggatgtttagtgtgtaaactaggacagtaatagttcttttagcataggaataagtagtgacattgttaaagtgaagttctacttctgaaattcaaagccaattgaatctaattcttctaccatggcaatcagctgtaaagacttgayrtcctgtggcaggaaaatggtctgatcaaatgagatttcatgcatatgtacaacaaaaagctaagcatgacatgtagaatcacatagaatcacatctgtctacatgtcaagattt

SEQ ID NO: 85566 - DNA, 414 bp, Chicken  19866894384679_2
aaatttatcttcagtgacatctatcattatgacagactgtagatctatatgaattataatgatgaagaatgcttttagtttgctgaaggtttattcctactaaagaggaaaatatcttataatctaattacatagtctttcactctttatagggatgtttagtgtgtaaactaggacagtaatagttcttttagcataggaataagtagtgacattgttaaagtgaagttctacttctgaaattcaaagccaattgaatctaattcttctaccatggcaatcagctgtaaagacttgayrtcctgtggcaggaaaatggtctgatcaaatgagatttcatgcatatgtacaacaaaaagctaagcatgacatgtagaatcacatagaatcacatctgtctacatgtcaagattt

SEQ ID NO: 85567 - DNA, 600 bp, Chicken  19866894384689_1
taagccctgactgcacaggaatagcttctcattgatggagaatgagagaactcacaccaacagtcaggaagagcagaactgcagcacagatgcagaccagcagatacctgacggtgtcttccaggcaatggcagcgctttcctccccgtgggacagctgttaactattgcaaagcagctgcaaatgctcaaaatggagagctccatgaaatagcggagttctttcttaagaatgtctttcttaagaaattccctgcactgtgacaaacaagtgtaagggttctggagagcacgtgcactrctacgcttcttccctgcacccacaacttcagcttaccccactgatagcagtgttctgccttttaccaagaacagcctgcagggcaagcccaggagctgccagcttcatggggcacaacgcacgacagggttagccgggatttgacagggacaaatgcagaacagacttttgtcatagctgacggcataccataaaggtagccgggtttgctcccttccctctgccttttcatattggggatttaagtctgcacttcggcaagggcacttccgagtggcagcatgtgtgcctatggcagcg

SEQ ID NO: 85568 - DNA, 600 bp, Chicken  19866894384690_1
agtccccatgggcaacagctttgccaaccctcctccgctgtgggctgctctccttgagctgcagctatggaccaggtcctgctcctgtggggactcttcatggctttccccaggccacatacgtctgttccatcatgggctccaccatgggctgcatttctggtcgtttcttaaccatgctcctccactggcttcttccagcatcgcttagggctcaggtctggcctgcagtgggtcccttttggagctgactggagctgcatctgatctgacatgttgcagctgttgggctgtgccctyttagcaactctcctactgccaaagccttgtctcataagtctagtacgatgtcttccatgtcatactggttatagcacagtttctggtggtaagaaatagttttaaataatgagaagaactttggaacttacattgaagcttgtagcagttgccattcagttgcatttttctctttcaaatattgctttcatgcaagaattcttgtcttaaatatggtatgtcattaaatttgaaaagcaaacttgacagatatattttctaattgtaatattaattactttgacatgtgaacttatcctt

SEQ ID NO: 85569 - DNA, 600 bp, Chicken  19866894384695_1
ttaaaacattgacattaaggaaaaccctttattctttcctgtcttgatacatttcagaaaatggtcttttggctgtatttgctctttcagatgaaatacaggttttcagatgaccataactaatggtttcagcttttgcttaaatgcagtcaatggaggcactctgagcttaaactggacagtcttctgtttcttagttgctttttactccttccaaataggtgtattttgtaagcaagcagtgcatacaggagaatgaatgctgggtagaatgcatgctagcatgtaaatacctggtartayagtacagtgagaagttttaggtctgtttcaaattggtatgtttgaagtccactgttaaataatttatgcattwcttttgcagtcatttaatccttcagattattgtgtttcctggaccttaaagttcttggtgtgaaacaaactgcctcatccaattkaaaagaaaacagaaccattctcatagagacagtggggagagaagagagctgtgtctgtaaacgcacactataatttaatcagttccctttttcctgggttcagtattaatcagtgtgtgcctygtctgctgcaggtgga

SEQ ID NO: 85570 - DNA, 600 bp, Chicken  19866894384695_2
aaacattgacattaaggaaaaccctttattctttcctgtcttgatacatttcagaaaatggtcttttggctgtatttgctctttcagatgaaatacaggttttcagatgaccataactaatggtttcagcttttgcttaaatgcagtcaatggaggcactctgagcttaaactggacagtcttctgtttcttagttgctttttactccttccaaataggtgtattttgtaagcaagcagtgcatacaggagaatgaatgctgggtagaatgcatgctagcatgtaaatacctggtartayagtacagtgagaagttttaggtctgtttcaaattggtatgtttgaagtccactgttaaataatttatgcattwcttttgcagtcatttaatccttcagattattgtgtttcctggaccttaaagttcttggtgtgaaacaaactgcctcatccaattkaaaagaaaacagaaccattctcatagagacagtggggagagaagagagctgtgtctgtaaacgcacactataatttaatcagttccctttttcctgggttcagtattaatcagtgtgtgcctygtctgctgcaggtggaagc

SEQ ID NO: 85571 - DNA, 600 bp, Chicken  19866894384695_3
atttgctctttcagatgaaatacaggttttcagatgaccataactaatggtttcagcttttgcttaaatgcagtcaatggaggcactctgagcttaaactggacagtcttctgtttcttagttgctttttactccttccaaataggtgtattttgtaagcaagcagtgcatacaggagaatgaatgctgggtagaatgcatgctagcatgtaaatacctggtartayagtacagtgagaagttttaggtctgtttcaaattggtatgtttgaagtccactgttaaataatttatgcattwcttttgcagtcatttaatccttcagattattgtgtttcctggaccttaaagttcttggtgtgaaacaaactgcctcatccaattkaaaagaaaacagaaccattctcatagagacagtggggagagaagagagctgtgtctgtaaacgcacactataatttaatcagttccctttttcctgggttcagtattaatcagtgtgtgcctygtctgctgcaggtggaagcctggggtctgattttgccatagtagttttatgtttggcaaatgcagagtcggttgagatgcaaaagtaaacgc

SEQ ID NO: 85572 - DNA, 600 bp, Chicken  19866894384695_4
ctctgagcttaaactggacagtcttctgtttcttagttgctttttactccttccaaataggtgtattttgtaagcaagcagtgcatacaggagaatgaatgctgggtagaatgcatgctagcatgtaaatacctggtartayagtacagtgagaagttttaggtctgtttcaaattggtatgtttgaagtccactgttaaataatttatgcattwcttttgcagtcatttaatccttcagattattgtgtttcctggaccttaaagttcttggtgtgaaacaaactgcctcatccaattkaaaagaaaacagaaccattctcatagagacagtggggagagaagagagctgtgtctgtaaacgcacactataatttaatcagttccctttttcctgggttcagtattaatcagtgtgtgcctygtctgctgcaggtggaagcctggggtctgattttgccatagtagttttatgtttggcaaatgcagagtcggttgagatgcaaaagtaaacgcttctgtctgcttttgttaacctttaaaagatgggtgtggattgtatgttttctctgcttcacgttcaggacaacacagcacagaa

SEQ ID NO: 85573 - DNA, 600 bp, Chicken  19866894384695_5
tgtaaatacctggtartayagtacagtgagaagttttaggtctgtttcaaattggtatgtttgaagtccactgttaaataatttatgcattwcttttgcagtcatttaatccttcagattattgtgtttcctggaccttaaagttcttggtgtgaaacaaactgcctcatccaattkaaaagaaaacagaaccattctcatagagacagtggggagagaagagagctgtgtctgtaaacgcacactataatttaatcagttccctttttcctgggttcagtattaatcagtgtgtgcctygtctgctgcaggtggaagcctggggtctgattttgccatagtagttttatgtttggcaaatgcagagtcggttgagatgcaaaagtaaacgcttctgtctgcttttgttaacctttaaaagatgggtgtggattgtatgttttctctgcttcacgttcaggacaacacagcacagaatgagagacctcatctcataactcagtgctctctcctttggagagtgtcctttgtgtgtggcggtggttgaaagcaacattattgttctgctggaagatgtgttggtgagcagtgtaggctgct

SEQ ID NO: 85574 - DNA, 600 bp, Chicken  19866894384698_1
gttagtggccctcacagtacaacgaactgcagtcactatataccacgtctgtggcacaaagccagtttggctatcagcaggtccaccttcagtggagttttcatttatatcaattttatctccttcatttcatcttgacttttatgttttagaaaaaaaacactcaatcttttgtcttctaggctttatttatgatcaaaggattgaatttatggattgcaggttctgtgatgatacaagaggaattggaacagatactagtttctaaaatgaatagtggaacttgactgaattctcatkacttctgactgctacctgcagcagattttgtttcgggacccttgatgcataaacaaaattggttgcattctctcagaccaaaaggactatatggctcagtgtcctgctcacgcagcagcctatggaaaacaatggggggagagcattaggtgatgttatgcaatgatggtaattccccagtattctgtgggactcagtgattttctggcctggaggtgttatctttgtatatatacagttctagtggctgttgcttacattagtttgtataattacctttgaaccttgtaaacttttggt

SEQ ID NO: 85575 - DNA, 600 bp, Chicken  19866894384722_1
acttctgaaaaaattagattgcagttggacataatgtaaacttcattattcaaaagatgagttcataaccatctcccaccgtctcagaaatgtaactactttgttagctatcaaaacaagaaatttcattttactgtcttagtaagtaccatatttcaaccagttactcccccccttcatcatctgataaaggatcaatacgtccagagagccagaacacaaagttaggttctgtacctagaagaggccaaaaggaatcactttgttcatcttctggaagtaaaaagacaacagatattyctcaccaataaatccatgcatctcttaccatgcaagcctccatgagagcagtgtgcatttcatctgtcttgtgttcctggtctgcgccagcttccagcaagaatctcaccatttctagatgacctgtacagagaaaatacttaatagatagaaacgactttcagcaagtacatttcgcaactgccataaaaatgtaccagcatcatggaagtaaggcaacaaaagaccrtgttacaacaacaacagaagtccagcatgttcgtatctatacattcaaagtccacataaagstagtaacaa

SEQ ID NO: 85576 - DNA, 490 bp, Chicken  19866894384722_2
ttctgtacctagaagaggccaaaaggaatcactttgttcatcttctggaagtaaaaagacaacagatattyctcaccaataaatccatgcatctcttaccatgcaagcctccatgagagcagtgtgcatttcatctgtcttgtgttcctggtctgcgccagcttccagcaagaatctcaccatttctagatgacctgtacagagaaaatacttaatagatagaaacgactttcagcaagtacatttcgcaactgccataaaaatgtaccagcatcatggaagtaaggcaacaaaagaccrtgttacaacaacaacagaagtccagcatgttcgtatctatacattcaaagtccacataaagstagtaacaatttttataaatatcatgtgattcacttaatggctaaaatgatgtgcctactacatgcattcccttgaagtgaaatagcttgagcagtgcaaacatcagattgacaagggtaattcatta

SEQ ID NO: 85577 - DNA, 428 bp, Chicken  19866894384722_3
cagatattyctcaccaataaatccatgcatctcttaccatgcaagcctccatgagagcagtgtgcatttcatctgtcttgtgttcctggtctgcgccagcttccagcaagaatctcaccatttctagatgacctgtacagagaaaatacttaatagatagaaacgactttcagcaagtacatttcgcaactgccataaaaatgtaccagcatcatggaagtaaggcaacaaaagaccrtgttacaacaacaacagaagtccagcatgttcgtatctatacattcaaagtccacataaagstagtaacaatttttataaatatcatgtgattcacttaatggctaaaatgatgtgcctactacatgcattcccttgaagtgaaatagcttgagcagtgcaaacatcagattgacaagggtaattcatta

SEQ ID NO: 85578 - DNA, 600 bp, Chicken  19866894384727_1
aatgagatttttcacttatttatgtgaagctcgttaattttccacttgtgcacttgagggggtggcggcgcgtactcatagtacaaggtctaggaaacccccacccaagtataaataatgctgaaatttaacacctgcacagccactgatgcctttagcccacagaactgttttatgtattttaattcttcatgtgtgattttgttagcatccttcaatggtcaaggaccaggacagtttctcccacaggacaagataatcttgataaaacattaggaagaaataaagtcgagagaggcyattrttttgctgttgattcttcactaaacaccataatgaatcagacagcttcagccttgatatgaataggagtgtaggtaggtgacattggttaggttttgtcaggcaggctcacacggccaaaattcatgggcacattcctggggtacctggctcccagggagcacttagaaaagcaggaatgttctgcactgttctgctcagaatctttccaactggatttatccatctgcagcctggaaagcaattaacaagttccattactccacttggagtgttgagcacatctcaacacttagt

SEQ ID NO: 85579 - DNA, 600 bp, Chicken  19866894384727_2
agatttttcacttatttatgtgaagctcgttaattttccacttgtgcacttgagggggtggcggcgcgtactcatagtacaaggtctaggaaacccccacccaagtataaataatgctgaaatttaacacctgcacagccactgatgcctttagcccacagaactgttttatgtattttaattcttcatgtgtgattttgttagcatccttcaatggtcaaggaccaggacagtttctcccacaggacaagataatcttgataaaacattaggaagaaataaagtcgagagaggcyattrttttgctgttgattcttcactaaacaccataatgaatcagacagcttcagccttgatatgaataggagtgtaggtaggtgacattggttaggttttgtcaggcaggctcacacggccaaaattcatgggcacattcctggggtacctggctcccagggagcacttagaaaagcaggaatgttctgcactgttctgctcagaatctttccaactggatttatccatctgcagcctggaaagcaattaacaagttccattactccacttggagtgttgagcacatctcaacacttagttctc

SEQ ID NO: 85580 - DNA, 600 bp, Chicken  19866894384735_1
ttgcattataaatagatagaaagcttcctaagataactctttagaaagaggaagctcagatttaattcagataaccttcaggattaattttgtttgataaactgagtttgcaggtttccttggatgccagctgacttgtgctttgtaactgcagtgtgggcaagcttctgagctgaaggtcagaatgaagaaaaaggcattctttggagggctggtggctgatcgggtttgctttaccagtattgagattctgatccaaggcgaccccattgcctcatgctatgcgtttcagtgctcagwttctttgttttttggatctaaggacataaaatcttttgggagttttatcagttttcaagcagattgtgcccctcgttgcttttcctttgtagcagcacatgggattctgactctgaactgttgtttctactccagggatggtggttccctccaaaaccaaaattgtttgccatttctccactctggtgctgacctgtgggcagcagcacaccctgcagatagttcccagagatgagtatgacaatccyaccagcaattctgtgtccctgatcgatgagcacaattacagcctctccatcc

SEQ ID NO: 85581 - DNA, 600 bp, Chicken  19866894384735_2
ttctgatccaaggcgaccccattgcctcatgctatgcgtttcagtgctcagwttctttgttttttggatctaaggacataaaatcttttgggagttttatcagttttcaagcagattgtgcccctcgttgcttttcctttgtagcagcacatgggattctgactctgaactgttgtttctactccagggatggtggttccctccaaaaccaaaattgtttgccatttctccactctggtgctgacctgtgggcagcagcacaccctgcagatagttcccagagatgagtatgacaatccyaccagcaattctgtgtccctgatcgatgagcacaattacagcctctccatccatgaggtgagtacagcttcatcccttgcaaactgatttgacgtgaacaagagagaattgtcctctattttgtgttttctgtttagctgggtcctcaagaagaagagaactctgacgttgtgtttgagaaatctgtggtatccaaccggcagacttgccaagtgttcttccgattcaccttgcactgtagagggtgtttccatgcctgcatctcctaccagaaccagcccataagtaatggtgattttg

SEQ ID NO: 85582 - DNA, 600 bp, Chicken  19866894384738_1
ggggcaatccactgacaatgcacaactgccaaggtgaataggacattctcacttgcagtgtatgatgctttccattgctttgtcgctcactactgtgtaatcctgagcaccttgaactttagtactttggtcagaatctttttctgaaggcaagagctacaactggagtcatgatctcagcttgttttccgtgttctagtttcaaacgtcacagtgtggaaatcacaattaggtgggaaactgtttctttgctagactaccatgcaaggagagaggaaataagtgaaagtttaggagaararagacatgtctaaaacttacagctggtcctgatccctctactttatttcaagggcacgagcgtgaccttctctatatcccacagagtggcctgatgagcagacttgttattctgtagcgatgtgcaagcttgcatcccactgctgtggattttcatagagagtagaacaccaaagcaggaatttaaatttgttgttgaggtgtgcttgttcaaagtcctaaaagcttaatttgaagttctagcctttctactaactttggtaaagttggttgtatcctaggaaatccaaagagttaatg

SEQ ID NO: 85583 - DNA, 600 bp, Chicken  19866894384738_2
ggcaatccactgacaatgcacaactgccaaggtgaataggacattctcacttgcagtgtatgatgctttccattgctttgtcgctcactactgtgtaatcctgagcaccttgaactttagtactttggtcagaatctttttctgaaggcaagagctacaactggagtcatgatctcagcttgttttccgtgttctagtttcaaacgtcacagtgtggaaatcacaattaggtgggaaactgtttctttgctagactaccatgcaaggagagaggaaataagtgaaagtttaggagaararagacatgtctaaaacttacagctggtcctgatccctctactttatttcaagggcacgagcgtgaccttctctatatcccacagagtggcctgatgagcagacttgttattctgtagcgatgtgcaagcttgcatcccactgctgtggattttcatagagagtagaacaccaaagcaggaatttaaatttgttgttgaggtgtgcttgttcaaagtcctaaaagcttaatttgaagttctagcctttctactaactttggtaaagttggttgtatcctaggaaatccaaagagttaatgct

SEQ ID NO: 85584 - DNA, 599 bp, Chicken  19866894384739_1
  misc_feature (1)..(113): n is any nucleotide
nnnnnnnnnnnnnnnnnnnnnnnnnnnnnnnnnnnnnnnnnnnnnnnnnnnnnnnnnnnnnnnnnnnnnnnnnnnnnnnnnnnnnnnnnnnnnnnnnnnnnnnnnnnnnnnnntgattgattgagtaccgaggaagctgcatgcaggaataatcagcccttcagatacaattaaataaaatcaattatataaaaaagagctagaaaaagctccatccagtaggaaggacatagaaaagatttacatccaggaaggcagacaaccttcctccctgcagtctaactactactactaacaaamaaacaaacaaacaaacaaataaataaataaattagtacagtgtaacggctagtgaaagaagtaaaaaatgttgtccattcatcattgtctaactcaatctttcacagtctaacaggttttcttaaaatgtatcttaacatctacaactatgggagaagttttagatttgtctgtgttagctttaatattatttgctgacataattacttttgccatgtaaaaactttgcaagaaatccttgaaatcttattcttagcttctaatttatacattaaaccaaatcagttttgagtgaagta

SEQ ID NO: 85585 - DNA, 600 bp, Chicken  19866894384754_1
cctcagtaatttgaatgtctccctttcttccagcagcttgttgtgctgccctggataaggctcagccaagtgagaaggaatatccaaccatgctgaggttgggagctttctgcaaggacggccagtgaggctgtgattcacatcttaaacagggcagggttcactgaggcagctgaagcctcagggaagctcaagcattagtgacccttaagggattaaagagagtttagattttcgcaggcatttcactaacgaaattacaggtttataatttcatttcacttgcaaggctagatgctrctctgagcacatccttgctttccttgttacagtggtatgtggataactcaattaatgtcaccatccacaaggaagcataaacagccaaaggcacaaaacgctgtgcctgtgtggctttcacagaaacaggcagaaactgttaaagggatgaaaatgacttttcctttgtatgagatgaggaagccctcggtgtgtttgcacttgtggcctttctgctttagtcctaataagtctttttactgtgagctggcctaagataacccgcttctgccgtgtttgcaggctccttacaaaatgtgc

SEQ ID NO: 85586 - DNA, 600 bp, Chicken  19866894384757_1
tgggatgggagctgctctgctccctctgccctggggatggggaggggatgcaggctgtgggaggggaggtggggcagggaaccttgcgggctgcgctgtgcagggatggcttccagctgcgcacggaggctgaagtctagctaatgagtcaatggcaattaattaactccagggcacttaacaaatattaactaattgttttgctccaagcaaggtccgtccaattaccccaccggttaggctgagcgcggaggagcaaatcgcacgtgcagctttgcagcctgagcatctctctgctcycctatggaggtttccaaggggagagcttgcggtgctggtggtgacaacctgggttgtgaccgcgctctgagccatgtcagcagaatgccacgttgccgtgggtggcagcagtggtcgtgtgggtacatttatttttaaatggaacagtttggccctcaggtggtttccagtttgtttgtttatttccttcgtttggatggccggagaagtttgcagaacggttgcaaatggcggcttacggttgggaagggagtaaatctctgaggccccattgtgcaagcggagctaattttaggcctc

SEQ ID NO: 85587 - DNA, 600 bp, Chicken  19866894384758_1
tagaaagcagaaaaggcagtagttaaatcccagcttgaagggagaggatggaggacacagctgcatactgatgactcccaggtggacttggcaaatattagtgaagcactgttttcttcattagacagccaggaggatttatccagccctttatccaccatgggcataacagactcacaaaacacaaacatttatctttctacctgtgcactgcctttgagccactgagggaaagaagctgtgcagcaatcatgatcctcatgctatcacctcacccccagcccaggaacacactgcackgcagtgccagcacaactattcatccacaggctgcaaaatcccacatcaaaccacattctgttcactataccatgtgatttcatccacaattttctcaaatttagagaagaaatgaatgtaagttagtttgttaatgtgtaggtaggaaaataggtagaggacagggtggcagcatatatagtacatactctacgatggcttgaatctccctttatcagttctagtaccaaagatagatagtgttgaaggtgcctgtgaaatccactctgtgtggagtcaataggatgatacctctgagag

SEQ ID NO: 85588 - DNA, 599 bp, Chicken  19866894384771_1
  misc_feature (1)..(59): n is any nucleotide
nnnnnnnnnnnnnnnnnnnnnnnnnnnnnnnnnnnnnnnnnnnnnnnnnnnnnnnnnnntgctgggctcaggtttttatgagtgtttaaaggtgataaaatatctgttagaaactgtctagaaacaggagcctggaaaggaccccttttatcttcagatccaaccttttgcccaagcaaactagagggaaggcactttgtgggttttcccccagagccctgccaactacttcctaatcacaacctgccacagcctcactgttctggccctcgctctttcttgctcagtagtggactattmtaacaaaccaaacacaaagaayaaaccacccactgtaaaatgatacacctacaatcctaccattcacgaagcagccattaattgcttggcatgcccagctttagcaagccacgttgtgacttatactgtgagggacaggcatatgtattgtattactgtgatcatgtctgcctctgacccattttgccacatatccataaagataagagaaacagatgccactgagctttaatattgctctcatttcaggaattttatttcttaatcacattatttttgtcactttgacccaattttca

SEQ ID NO: 85589 - DNA, 599 bp, Chicken  19866894384771_2
  misc_feature (1)..(37): n is any nucleotide
nnnnnnnnnnnnnnnnnnnnnnnnnnnnnnnnnnnnntgctgggctcaggtttttatgagtgtttaaaggtgataaaatatctgttagaaactgtctagaaacaggagcctggaaaggaccccttttatcttcagatccaaccttttgcccaagcaaactagagggaaggcactttgtgggttttcccccagagccctgccaactacttcctaatcacaacctgccacagcctcactgttctggccctcgctctttcttgctcagtagtggactattmtaacaaaccaaacacaaagaayaaaccacccactgtaaaatgatacacctacaatcctaccattcacgaagcagccattaattgcttggcatgcccagctttagcaagccacgttgtgacttatactgtgagggacaggcatatgtattgtattactgtgatcatgtctgcctctgacccattttgccacatatccataaagataagagaaacagatgccactgagctttaatattgctctcatttcaggaattttatttcttaatcacattatttttgtcactttgacccaattttcatttagatacgtttttaggtgtc

SEQ ID NO: 85590 - DNA, 600 bp, Chicken  19866894384785_1
aggagatttctccttccaggaatctgcccctttgcctaaaagcttataaactatatgttaaaaaaaaattgcaaactaactaattaaaaagctttatgattaaatggaactgaaaatattttcccagcagttgccggaagaaatgattaatcccccccactgcctgcctgtgacctattttctcatcaccaagagccagagggagaacagggaggcgggaggagcttctttgtagactgttaaataggtcctgacctatattgcataaatcacagccttttatttgacccttggagatgwtcccagaatacatggcaagatggatgagaaggtaacaagatgcatctggaaagcaagaagggtcctttcccyggggacacycagaatgatctcaggcagttcattctaccaatcttgttttctcttagtctcatcctctttcctttttccctcagttttctgggggaggcttggctaaaggggaagctrctcttcrtggcctgtcctgrcaaccaacaacaaggtgttcatctactttcccctgctgtcatagatttggacacagtctgtccctgatcccaaggacaagcagtgcaagcc

SEQ ID NO: 85591 - DNA, 600 bp, Chicken  19866894384785_2
aaactaactaattaaaaagctttatgattaaatggaactgaaaatattttcccagcagttgccggaagaaatgattaatcccccccactgcctgcctgtgacctattttctcatcaccaagagccagagggagaacagggaggcgggaggagcttctttgtagactgttaaataggtcctgacctatattgcataaatcacagccttttatttgacccttggagatgwtcccagaatacatggcaagatggatgagaaggtaacaagatgcatctggaaagcaagaagggtcctttcccyggggacacycagaatgatctcaggcagttcattctaccaatcttgttttctcttagtctcatcctctttcctttttccctcagttttctgggggaggcttggctaaaggggaagctrctcttcrtggcctgtcctgrcaaccaacaacaaggtgttcatctactttcccctgctgtcatagatttggacacagtctgtccctgatcccaaggacaagcagtgcaagccacacttgggcaatactttttatggcaaaaggctttcagaaggcactagcacaggcagagaggacaacccaag

SEQ ID NO: 85592 - DNA, 600 bp, Chicken  19866894384785_3
aattaaaaagctttatgattaaatggaactgaaaatattttcccagcagttgccggaagaaatgattaatcccccccactgcctgcctgtgacctattttctcatcaccaagagccagagggagaacagggaggcgggaggagcttctttgtagactgttaaataggtcctgacctatattgcataaatcacagccttttatttgacccttggagatgwtcccagaatacatggcaagatggatgagaaggtaacaagatgcatctggaaagcaagaagggtcctttcccyggggacacycagaatgatctcaggcagttcattctaccaatcttgttttctcttagtctcatcctctttcctttttccctcagttttctgggggaggcttggctaaaggggaagctrctcttcrtggcctgtcctgrcaaccaacaacaaggtgttcatctactttcccctgctgtcatagatttggacacagtctgtccctgatcccaaggacaagcagtgcaagccacacttgggcaatactttttatggcaaaaggctttcagaaggcactagcacaggcagagaggacaacccaagctgcccaag

SEQ ID NO: 85593 - DNA, 600 bp, Chicken  19866894384785_4
caagagccagagggagaacagggaggcgggaggagcttctttgtagactgttaaataggtcctgacctatattgcataaatcacagccttttatttgacccttggagatgwtcccagaatacatggcaagatggatgagaaggtaacaagatgcatctggaaagcaagaagggtcctttcccyggggacacycagaatgatctcaggcagttcattctaccaatcttgttttctcttagtctcatcctctttcctttttccctcagttttctgggggaggcttggctaaaggggaagctrctcttcrtggcctgtcctgrcaaccaacaacaaggtgttcatctactttcccctgctgtcatagatttggacacagtctgtccctgatcccaaggacaagcagtgcaagccacacttgggcaatactttttatggcaaaaggctttcagaaggcactagcacaggcagagaggacaacccaagctgcccaagtgctgtcactgcagctctctcttcctgggctttgaacctcttggtacaktttttggtatctttttggtatcacacttgatcagacacctgactgggattggaaatgta

SEQ ID NO: 85594 - DNA, 600 bp, Chicken  19866894384785_5
cagagggagaacagggaggcgggaggagcttctttgtagactgttaaataggtcctgacctatattgcataaatcacagccttttatttgacccttggagatgwtcccagaatacatggcaagatggatgagaaggtaacaagatgcatctggaaagcaagaagggtcctttcccyggggacacycagaatgatctcaggcagttcattctaccaatcttgttttctcttagtctcatcctctttcctttttccctcagttttctgggggaggcttggctaaaggggaagctrctcttcrtggcctgtcctgrcaaccaacaacaaggtgttcatctactttcccctgctgtcatagatttggacacagtctgtccctgatcccaaggacaagcagtgcaagccacacttgggcaatactttttatggcaaaaggctttcagaaggcactagcacaggcagagaggacaacccaagctgcccaagtgctgtcactgcagctctctcttcctgggctttgaacctcttggtacaktttttggtatctttttggtatcacacttgatcagacacctgactgggattggaaatgtaatgrttg

SEQ ID NO: 85595 - DNA, 600 bp, Chicken  19866894384785_6
gggaggcgggaggagcttctttgtagactgttaaataggtcctgacctatattgcataaatcacagccttttatttgacccttggagatgwtcccagaatacatggcaagatggatgagaaggtaacaagatgcatctggaaagcaagaagggtcctttcccyggggacacycagaatgatctcaggcagttcattctaccaatcttgttttctcttagtctcatcctctttcctttttccctcagttttctgggggaggcttggctaaaggggaagctrctcttcrtggcctgtcctgrcaaccaacaacaaggtgttcatctactttcccctgctgtcatagatttggacacagtctgtccctgatcccaaggacaagcagtgcaagccacacttgggcaatactttttatggcaaaaggctttcagaaggcactagcacaggcagagaggacaacccaagctgcccaagtgctgtcactgcagctctctcttcctgggctttgaacctcttggtacaktttttggtatctttttggtatcacacttgatcagacacctgactgggattggaaatgtaatgrttggactggatgatct

SEQ ID NO: 85596 - DNA, 600 bp, Chicken  19866894384785_7
tcatcctctttcctttttccctcagttttctgggggaggcttggctaaaggggaagctrctcttcrtggcctgtcctgrcaaccaacaacaaggtgttcatctactttcccctgctgtcatagatttggacacagtctgtccctgatcccaaggacaagcagtgcaagccacacttgggcaatactttttatggcaaaaggctttcagaaggcactagcacaggcagagaggacaacccaagctgcccaagtgctgtcactgcagctctctcttcctgggctttgaacctcttggtacaktttttggtatctttttggtatcacacttgatcagacacctgactgggattggaaatgtaatgrttggactggatgatcttagtggtcttttccagccttaatgactctgtgattctatgcttttgagataccatcagacccagttgctcagtgatgttacctacccagaagagtgtggagctgtgggtcccacagatccatccccaaagtaaccagaatgaccctcctgccacatccaagcatccctcctaatgcatttgatcccatgggggctgagattcacatttgtgttattatttg

SEQ ID NO: 85597 - DNA, 600 bp, Chicken  19866894384785_8
tcrtggcctgtcctgrcaaccaacaacaaggtgttcatctactttcccctgctgtcatagatttggacacagtctgtccctgatcccaaggacaagcagtgcaagccacacttgggcaatactttttatggcaaaaggctttcagaaggcactagcacaggcagagaggacaacccaagctgcccaagtgctgtcactgcagctctctcttcctgggctttgaacctcttggtacaktttttggtatctttttggtatcacacttgatcagacacctgactgggattggaaatgtaatgrttggactggatgatcttagtggtcttttccagccttaatgactctgtgattctatgcttttgagataccatcagacccagttgctcagtgatgttacctacccagaagagtgtggagctgtgggtcccacagatccatccccaaagtaaccagaatgaccctcctgccacatccaagcatccctcctaatgcatttgatcccatgggggctgagattcacatttgtgttattatttggcatccagccttggactagctttgtacgtgtgactctgtttgcttcaggaaccacaacagatt

SEQ ID NO: 85598 - DNA, 600 bp, Chicken  19866894384788_1
cagccttatttctgagaccctgctggatactgttgagaatctaatttttttaactgggtagtgaaatacttgtattcgataaggcacttcacaaagagggaagaatgactggggaaaggcgtagcaaacacttctgtttgaacaggtctcactctggagacaacagacatggttaacaagctgctgtgctgacttttacattcagttttaagcttgtggtcattttcacagacgagaggagaaaagaatccagttagatgcatatagaagaggtgcttaattgttgtattcaattctgcrtgctaataaagctgccacattacaaacagttcctcatttctctctttagcaccctcagtctgctttttatctgggagttttgtaatctctgatgatctgtactcacgctctctgtcttcagcgtgtgacttctctctggctttctttctttctcctctgttgctggtcctcctctttgagggaagtggatagatgcatccacaaagaagcaagttcaggcccccagaacccctgtctcatccagtcgggatgaggggacatgcgctttcctgcagagccctgctcatggtctctgtggcc

SEQ ID NO: 85599 - DNA, 600 bp, Chicken  19866894384789_1
tatttctgcaggttgcaaggacacatggggaatgtatagtgaatgcattggttgatggtaactggtcacgctatgttgtttttccagccctacaactggcataactgctttcatagcaagggtcaaagcaactgcttgcataaaggagaaaaaacacagagccatttagaatttttaaaaaagagaaaagttcctgtctgttagcattgaaatgtatgttttcctgagcgttctcttgtgatgatttgtaatatttattggatcaagcttggttcccacaagaactcaaaatagccatckggatttgaagggacgcagccttcctcggctggcatggctgcaggatgcagagctcgctcccatggcttctgtgcacttggaattcctccgtcctgactgctctcccctgggagcattcaaaataggtaccagaggggaaggggctctgggggtggcattcaatggaaacagtttgaagtgcaactcatttcagctgaacttggaaccttttgctccctgcctggaaatgctgaaaaagtgtaatgctcacttggagcccttgagagagtggttttgtggaaattacgcatcaggtgaagt

SEQ ID NO: 85600 - DNA, 572 bp, Chicken  19866894384802_1
ttctctaactcagttttcactctgagctgacagtctaaaattgcactccgtatgctctgcaggttccactgcgttctcaggagagcatcatccaacgtgaagacaccatcacgtgttcttcgcacctgtgtgcacacagcagatgatttcagctccagaccaatctcgtggactaccttccggaggtactgctgggtctcatgcaagcagtggatttctgaaaggtcagagagattcctttagagtgggcaaagcaatgggacggctcagacctcgtctgtaatgcagacgtccatcacrcttatgctgaaggtaacagttcagcagaatagactgctgtgataaagcacaggtggactgtgcattgctggaacgctgcaggctgtcccagcccctccagaaactaaagctttagagaacaaatctgtgtatgtagcagaattatagagagatttagctattttaaagtggataagaagatttaccttaccacctttgtggtaagacgaatgatttgggagcaatagaagactgactgcagaaaagcaaggcatgcttaaacaccctcccgt

SEQ ID NO: 85601 - DNA, 600 bp, Chicken  19866894384803_1
aaaaatacgccggatgttgctttcagctacaacgagcacttgcattgatcgagctcagtacaaattacacagtggtgaatgcaatcttttgtggccccttccacgcctgcctgcggaggaggaggattagtcacgtctcctcacagcgctggcacagggaggaaagctgctctcttctgcaagtggcacttctaatgtccacatcgctctccctgcttcctacataataggccttgtgcaaaacaaaaggaggaagacacgtttccaccaagggacttttcacagcattaacttgctccrstcagccctgccccagggatgtcacagcagctcctcacagggaagctttggtgcctgcttgcagcacacaggtatggatacggcccaggtgtgctcctgaaggcaggggcacggatggcaccatggctgctgacctgtcattcctgcaagcagcccaaggccctgcacggccccagccagctctgtgctgcactgggagccacctgccttctgctgcagttcctctcctttcctctttgcactgctactacctcgtagcagctttcctccagctctctctgcagaatcacacttttcacc

SEQ ID NO: 85602 - DNA, 600 bp, Chicken  19866894384803_2
aaaatacgccggatgttgctttcagctacaacgagcacttgcattgatcgagctcagtacaaattacacagtggtgaatgcaatcttttgtggccccttccacgcctgcctgcggaggaggaggattagtcacgtctcctcacagcgctggcacagggaggaaagctgctctcttctgcaagtggcacttctaatgtccacatcgctctccctgcttcctacataataggccttgtgcaaaacaaaaggaggaagacacgtttccaccaagggacttttcacagcattaacttgctccrstcagccctgccccagggatgtcacagcagctcctcacagggaagctttggtgcctgcttgcagcacacaggtatggatacggcccaggtgtgctcctgaaggcaggggcacggatggcaccatggctgctgacctgtcattcctgcaagcagcccaaggccctgcacggccccagccagctctgtgctgcactgggagccacctgccttctgctgcagttcctctcctttcctctttgcactgctactacctcgtagcagctttcctccagctctctctgcagaatcacacttttcacct

SEQ ID NO: 85603 - DNA, 573 bp, Chicken  19866894384809_1
ataccaaaataagcttaaaatgcaaagttgaagacagcctattttgatgtcagtgttatgatcaattgatcttctcttgacagagaggtttgcacggttctagctaaacacattacgaattatagtctagcagtgctgggatttaatttaaatatgttttcaataattcaaactatattttgattaattaaacttttctttattaatggagcattgcagagagtctctgtgggatcatgctacattaaaacgaagaagcttttaatacacacttttaaaatatttcaaagtaaatactcrtataggtcttaagtcctgcacgattcagttatatacacaggttagaaatgatggaatatccttttcatagggctgtctcatggtgtctgtccccagtgattgcatggcacagtcaagtaattctcagaatgaaatgttctaccgacaagatgacctataatgcagtaggttatgggccacaaaaaagatggcatataaataatttataatgtagaatacatgggaaaagtatctccacttttatttgctgtcacatgcaaagggcagaagcac

SEQ ID NO: 85604 - DNA, 599 bp, Chicken  19866894384811_1
  misc_feature (1)..(7): n is any nucleotide
nnnnnnnttatttataatgaggtatttacagatgagatcagtgagaaaggattgagcagagcctggtgtgctggtgatagcaagtctttctcagtcagtctggctgttatacatagtaaacaatcccaggtctgtaagctttccacattacacatattgtctacatttccagtttgtgcttgacttgtataactacagacatgccttacccatgcccagtgttattgaataaatgattcagtatgttgtaaagcaatctcatctataaattccaacataatactcatctttctaaaaaakcattctgttattaggttgtaactttcaataattaagttttaaactttcagtaatttcctggtgatacactacagtatggaaggtcctcctctttcctgaataagctgcccagtcagttattgtaccagtgattctgagaagctcatgacactgacttcagacaacttcactgttgtgacatggccttccaaagtgcacacaaccttctagctttgaaatatcctccttatttcaccatccaaatcaatactgaaaaacttaaaatattagcaattagggcaggactaccaagatctgct

SEQ ID NO: 85605 - DNA, 600 bp, Chicken  19866894384812_1
aactggcccagaactgttcagagttatgagaaatgcataatgtaccatagtaatgaatatttggacatgtaaatattagaagaggatacttcaattaactatcatcatcacctattccactccttattccttattaagtataacattttaactattacatctattacttatatccagtacattgtaacttaagtatcatgtcaatacttcctttactttttataattgccttcttcacacaaagaagcaaatatgcttagttagattcaactcaataaagcatttattaaaaatgaactrctgtcttggctcagcaaatttgcctttatcgactttcagactatagccatagmatttatgatacatatgcactgtttacagataggtattacctgttctttttcatgcagtttctgcaacataggaagcaagttcattgtgtaaattgtaatagagaagaaaaagagaagaaaaataagtatcttacatctaacttgccattccacaaagtgtaaactctcttccagtgtgctaccactcatttgataaatagaatctggcactgtttctagggagttcctggaaaggactagcagatct

SEQ ID NO: 85606 - DNA, 600 bp, Chicken  19866894384812_2
tgaatatttggacatgtaaatattagaagaggatacttcaattaactatcatcatcacctattccactccttattccttattaagtataacattttaactattacatctattacttatatccagtacattgtaacttaagtatcatgtcaatacttcctttactttttataattgccttcttcacacaaagaagcaaatatgcttagttagattcaactcaataaagcatttattaaaaatgaactrctgtcttggctcagcaaatttgcctttatcgactttcagactatagccatagmatttatgatacatatgcactgtttacagataggtattacctgttctttttcatgcagtttctgcaacataggaagcaagttcattgtgtaaattgtaatagagaagaaaaagagaagaaaaataagtatcttacatctaacttgccattccacaaagtgtaaactctcttccagtgtgctaccactcatttgataaatagaatctggcactgtttctagggagttcctggaaaggactagcagatctggttctgaattctgcatggaaatattcttcttttctaaatactcagctagtaa

SEQ ID NO: 85607 - DNA, 600 bp, Chicken  19866894384816_1
gctcctctggttctaggagttagtttgttgtgctctgcagttggtattttgatggccataatctaggagtattagaaatgctcttctcccacagaaccatagatccgcctgagaagattgtttctagcggagttggcattcacaaatttgattcagaccattggttgatactcgtataatttatgggatgaagctgagagtgtttactgatgtattttcttctcaaaagggtatgaggaaagatttagaatgtctcaaatttggttaggacaatagggaaggatatttcctcttactctyttgtcctcttttcaatgggatttactaaaagcgctgtaactggatttgggagaggacaagatgaggtaagcagaagtgtctgcctactgtttgttactgcctgcttatttcaagtgtactatgtttaagacacactaacactttttttttttttttttcttccagctattgctgcttctctatgtctgtaacgcaggcagagaagtacatatactaaggaagcatagtacactatggccaaattcagacactttgaggagtccacaaagcactgatctcatgagctgaagcgagcatgtt

SEQ ID NO: 85608 - DNA, 600 bp, Chicken  19866894384818_1
agcgataataaaaaaaatatttctaaagagctggattaaataaagtaggtgctcccatagaacaagcggcgtgacaggcggccgaggcacggcggcgtgcccgtgccggatggagcgctgcgcaccgggaaggaggagaaggctccgtgttagctggtgcctgaagcagccacgcacagccccacagccgcccagggaagcaggtctgggagatgaatctctgctttgctggggattggttcgtctgggagagcggcagcacaaactttctacctcgtttcagcgctgctgaagcctttytgggtctgcagcacgaagaaggtcctccactgaaaggtgatcgcccaggagtcaggactcctcctgcaaaaggcagagagaagttccaagtgctggcagagctgctgaactgacattttccacgggcaaaaatatttttaacacctactgtttttagaacaatggatcataccaagggcaaccttggtcaatgtcttttgatttatagctttatgagaaagrattmwcaacctactatgaaccaactgataatctgtgttaacaactgaattcaattactcatatattttcatacatata

SEQ ID NO: 85609 - DNA, 600 bp, Chicken  19866894384818_2
gctttgctggggattggttcgtctgggagagcggcagcacaaactttctacctcgtttcagcgctgctgaagcctttytgggtctgcagcacgaagaaggtcctccactgaaaggtgatcgcccaggagtcaggactcctcctgcaaaaggcagagagaagttccaagtgctggcagagctgctgaactgacattttccacgggcaaaaatatttttaacacctactgtttttagaacaatggatcataccaagggcaaccttggtcaatgtcttttgatttatagctttatgagaaagrattmwcaacctactatgaaccaactgataatctgtgttaacaactgaattcaattactcatatattttcatacatatatactatgaagtgtagtatcaacaataataatgtgaagacaaagtcacttcttaaaatagaaaaatacttgtatcacaaatgatctttctttctttcttcctttcttcttttcatatctttttctgtcattttactttctaagatcaccctgatagacaaggaaaggcaattcagtagatggcatttggaacagaagaggtagtttaaaagagggcaactaga

SEQ ID NO: 85610 - DNA, 600 bp, Chicken  19866894384818_3
tgctggggattggttcgtctgggagagcggcagcacaaactttctacctcgtttcagcgctgctgaagcctttytgggtctgcagcacgaagaaggtcctccactgaaaggtgatcgcccaggagtcaggactcctcctgcaaaaggcagagagaagttccaagtgctggcagagctgctgaactgacattttccacgggcaaaaatatttttaacacctactgtttttagaacaatggatcataccaagggcaaccttggtcaatgtcttttgatttatagctttatgagaaagrattmwcaacctactatgaaccaactgataatctgtgttaacaactgaattcaattactcatatattttcatacatatatactatgaagtgtagtatcaacaataataatgtgaagacaaagtcacttcttaaaatagaaaaatacttgtatcacaaatgatctttctttctttcttcctttcttcttttcatatctttttctgtcattttactttctaagatcaccctgatagacaaggaaaggcaattcagtagatggcatttggaacagaagaggtagtttaaaagagggcaactagaagca

SEQ ID NO: 85611 - DNA, 600 bp, Chicken  19866894384818_4
gctggggattggttcgtctgggagagcggcagcacaaactttctacctcgtttcagcgctgctgaagcctttytgggtctgcagcacgaagaaggtcctccactgaaaggtgatcgcccaggagtcaggactcctcctgcaaaaggcagagagaagttccaagtgctggcagagctgctgaactgacattttccacgggcaaaaatatttttaacacctactgtttttagaacaatggatcataccaagggcaaccttggtcaatgtcttttgatttatagctttatgagaaagrattmwcaacctactatgaaccaactgataatctgtgttaacaactgaattcaattactcatatattttcatacatatatactatgaagtgtagtatcaacaataataatgtgaagacaaagtcacttcttaaaatagaaaaatacttgtatcacaaatgatctttctttctttcttcctttcttcttttcatatctttttctgtcattttactttctaagatcaccctgatagacaaggaaaggcaattcagtagatggcatttggaacagaagaggtagtttaaaagagggcaactagaagcaa

SEQ ID NO: 85612 - DNA, 600 bp, Chicken  19866894384827_1
tggtgttgctatatcaaattagctgtgaatatgggagcctgaaaataaaaggagctgtggagacatgaggaaggccttcttatggaaggaagtggacggagtccagatttgcattatgaaacagtaaagtcgttatattttaatgcgattttatttttactttgaaggagaatgttttctcttataattttgtgttgttccaaacagaggtttagttattctgtgtttcttactcttgcggtgtgctttaggagacagatcgtactgtggtgatatttggttgtcgcagttcacctgttygagcggtgggtatttttgtgcacgtctggtttataatgagcagttagtgggataacaacagaccgcggtacctcattatcccgttacttgtgacaagactcacggtgtggctttgggggaacagagggaaaaaatttattcccagtaagaaggtatcctgtctgaacgtgggatggctgataggcgtgaacacactgatcggatttggtttgatgcgctgatctgggacattcagagctctgctgacaaataactgacacacttacacctgtattttgccactgagcaatgtgcccagct

SEQ ID NO: 85613 - DNA, 599 bp, Chicken  19866894384837_1
  misc_feature (1)..(39): n is any nucleotide
nnnnnnnnnnnnnnnnnnnnnnnnnnnnnnnnnnnnnnnaatgtttgagttggaagggacctttaaaggtcatcttgtccaacccccatgcaccccccccccccccccaaacaattcaatcaggcagctcaaagcctggtctatcctgaccttgaatgacctctctcagcaacttgttccagtgcttcaccacactgattgtaaaggattgatcttccttatgttcagtcaaaatctcccctcttttagtttgaaaccatttccacttgtcctatcacaacagaccctgctaaagagccygtccccttctttctcatagccccactttagacactgaaaggctgctctcaggtctccttagatctttccccaggctgaacagccgcagcactctcagcctgtcctcataggtgctccatcccttggatcatttctgtggctctctggatgtgcctcaacaggtccatgtgtcttccgtaattcacatctggacatcgtaccccaggcgaggtctcamcagttttcagtctatttgctggccatcgttcttttgatagagcccaggatacagttggcattatgggctgcgagggcacact

SEQ ID NO: 85614 - DNA, 527 bp, Chicken  19866894384837_2
cttatgttcagtcaaaatctcccctcttttagtttgaaaccatttccacttgtcctatcacaacagaccctgctaaagagccygtccccttctttctcatagccccactttagacactgaaaggctgctctcaggtctccttagatctttccccaggctgaacagccgcagcactctcagcctgtcctcataggtgctccatcccttggatcatttctgtggctctctggatgtgcctcaacaggtccatgtgtcttccgtaattcacatctggacatcgtaccccaggcgaggtctcamcagttttcagtctatttgctggccatcgttcttttgatagagcccaggatacagttggcattatgggctgcgagggcacactggtatctcacatccaccttgccatccacagcaaccacaagccctgtttggcagggccgtgctcatccttttgtccccccagctcatattgataacggaggttgccgtaatccaggtgcaagaccttgcacttgactttgttgcat

SEQ ID NO: 85615 - DNA, 600 bp, Chicken  19866894384840_1
aagtggagtattggctggcttgggaatttctgagacagatatatcctcttcttccaggaaaactttgtttcttaatctatttctggcacagtatctgaaaataatatttctaaagaaaatgcagatttgctctttctattgaatgagcatttttttgcaccacgttcaaaacaatgaaagagctggaagctgaaaatggttcttcaacccgcaatataagcctaaaaaggaacacttaagtgtataacattctcatttgcaattcaaaatgcattttgcggagtgaaaataacaaagaamtaaatagacatcatatccagattgtacctcagagacayaggaaaatataaatatgtcactgaatattacagattcacccatctcaggagttaacggatgaattcatttgcttcatgaaaacttaaattgcccttttgttccaatggagaaaacagatgagttaatcaatggcaaagtgtagcccaaccacccctaggtcttgaaattccagtttcagcgatggaaccaactgcagaagaaggcatcagaggcaatatcacagacagaaaaacgttgctagccataacaccacagttattc

SEQ ID NO: 85616 - DNA, 600 bp, Chicken  19866894384840_2
atatatcctcttcttccaggaaaactttgtttcttaatctatttctggcacagtatctgaaaataatatttctaaagaaaatgcagatttgctctttctattgaatgagcatttttttgcaccacgttcaaaacaatgaaagagctggaagctgaaaatggttcttcaacccgcaatataagcctaaaaaggaacacttaagtgtataacattctcatttgcaattcaaaatgcattttgcggagtgaaaataacaaagaamtaaatagacatcatatccagattgtacctcagagacayaggaaaatataaatatgtcactgaatattacagattcacccatctcaggagttaacggatgaattcatttgcttcatgaaaacttaaattgcccttttgttccaatggagaaaacagatgagttaatcaatggcaaagtgtagcccaaccacccctaggtcttgaaattccagtttcagcgatggaaccaactgcagaagaaggcatcagaggcaatatcacagacagaaaaacgttgctagccataacaccacagttattctgactgcaatcttgtaatgttaaatggaatctgattat

SEQ ID NO: 85617 - DNA, 600 bp, Chicken  19866894384842_1
tatactttgcctcacatttatctttatattgaaagggaaagttaaagcagcattttttattttgtttatttgtcatgagtattgccaagtaaaatataaaatccctatacattatttaacttatggccaatcagtgtttctcattatagttaacatggaaaatcatatggtgactgttaaaatttaattacaatgaaggtgaaatgaacattacaaaggccattataataataatttctcaagtcggttattacaagttttattaaaaaatctgtaaggaagacaggttaattttgtctktcttagaactgaaatctagtcaaaagacagatctcagggggaaaaaatatcttaaggaggctatgaaatgaacactaattttatgttttaaaagatattggataatttattttcagatgtactgagatgcattcatatatttagtcacatygctgatgaaatatcactgaaagcaaacaagaatgtgctttccttccctattctgacaatgtcttctgttatactgatatattaaatttcaaaggtgcaattgaagaaagtgaaataaatgcagaaaattcacatgagaaaatacaagcc

SEQ ID NO: 85618 - DNA, 600 bp, Chicken  19866894384842_2
aacatggaaaatcatatggtgactgttaaaatttaattacaatgaaggtgaaatgaacattacaaaggccattataataataatttctcaagtcggttattacaagttttattaaaaaatctgtaaggaagacaggttaattttgtctktcttagaactgaaatctagtcaaaagacagatctcagggggaaaaaatatcttaaggaggctatgaaatgaacactaattttatgttttaaaagatattggataatttattttcagatgtactgagatgcattcatatatttagtcacatygctgatgaaatatcactgaaagcaaacaagaatgtgctttccttccctattctgacaatgtcttctgttatactgatatattaaatttcaaaggtgcaattgaagaaagtgaaataaatgcagaaaattcacatgagaaaatacaagccattttatgtcagtagtatgtttttcttctcaaattaagcaacttgtgctgcttcatttctctacatggctatgcacaataataaggataattttgagggttgctctgaaagtaatgcctcttattttgttatgttggcccactatatcaaa

SEQ ID NO: 85619 - DNA, 599 bp, Chicken  19866894384848_1
  misc_feature (1)..(9): n is any nucleotide
nnnnnnnnntgtgctgcttgagtgtcctaaattgcacagattttaaccagatttctttttctcatttgttgggaaaatgttatgagagctagataactgatcttgagcccaatgaactcagcacctcatcaatggcacaaaataatttttaaaacctctcagaatgctgctcctgggcagatgtttttcattggaactcataataaaggggagtgagtatgctataatcataaaatttatgcagcactgttaatgaaaataatgggaatttttacatattttttatgttgctacttttamattgcaggaattaatacacattacacacttgctggcattcctcaaggcttattcacacatcgtatgaactgtacatatatatgtacttattgctacacgaagcctattttcttagcctcttaagcagatcaatttacaattttattgtctctttttaaagtgacaaatgacttttggaagataaacggtattgaccacatactgtttatgtacaaacgtagcttaagttattttaaaacgtgtcagaagatggatctaaaattataaatatgtaatgaaaatataaatattgataaatc

SEQ ID NO: 85620 - DNA, 565 bp, Chicken  19866894384849_1
actgagtgcagcagtcctgtccttgttgttcatggctgtgtgctccagctctcttgtttgtgctggcatcagcgcttgggcagctgggccactggtctgaaatgtaatctgatcagaaaaaaaaaaaagactttcttcagctgaagcagctccccgaactgatgagccccgtgctgacactgagagaggcagcaaagaatggctgaaggataaagcatatggaggcacaaactcctttagtggccccagggatttaaacaggcttaaatccatcatgaatccacctcctcagtcttatayccactggccacaggatctgtttctgtcttyggtgggggagaccaccttcacacaaacaaggccaacaagttacttccatggatgtgcaaatastggaaacgtaaagctattcaagacaatttggcctgggatgaaacaggtaagtgttattgaatatacaactggatagactgtggccatggttagtagccactgctgcgctgtatctgctgcacttacggccatgttggtaatatgcacttctacttaacagaaagtaagaata

SEQ ID NO: 85621 - DNA, 535 bp, Chicken  19866894384849_2
catggctgtgtgctccagctctcttgtttgtgctggcatcagcgcttgggcagctgggccactggtctgaaatgtaatctgatcagaaaaaaaaaaaagactttcttcagctgaagcagctccccgaactgatgagccccgtgctgacactgagagaggcagcaaagaatggctgaaggataaagcatatggaggcacaaactcctttagtggccccagggatttaaacaggcttaaatccatcatgaatccacctcctcagtcttatayccactggccacaggatctgtttctgtcttyggtgggggagaccaccttcacacaaacaaggccaacaagttacttccatggatgtgcaaatastggaaacgtaaagctattcaagacaatttggcctgggatgaaacaggtaagtgttattgaatatacaactggatagactgtggccatggttagtagccactgctgcgctgtatctgctgcacttacggccatgttggtaatatgcacttctacttaacagaaagtaagaata

SEQ ID NO: 85622 - DNA, 472 bp, Chicken  19866894384849_3
ggtctgaaatgtaatctgatcagaaaaaaaaaaaagactttcttcagctgaagcagctccccgaactgatgagccccgtgctgacactgagagaggcagcaaagaatggctgaaggataaagcatatggaggcacaaactcctttagtggccccagggatttaaacaggcttaaatccatcatgaatccacctcctcagtcttatayccactggccacaggatctgtttctgtcttyggtgggggagaccaccttcacacaaacaaggccaacaagttacttccatggatgtgcaaatastggaaacgtaaagctattcaagacaatttggcctgggatgaaacaggtaagtgttattgaatatacaactggatagactgtggccatggttagtagccactgctgcgctgtatctgctgcacttacggccatgttggtaatatgcacttctacttaacagaaagtaagaata

SEQ ID NO: 85623 - DNA, 600 bp, Chicken  19866894384850_1
ttagcaatgtttggagtactaaaaaagctgtaagtggtaacaccagtgcttccacagcatctttcatctgcaaatctttctgttcttaatgaattttggtgcctctctgtgaggcaggaattattggtgtcattttgcagacaagtagataaaatgcttgcatagaaacattctgaaagccacttatattcaggaatattaatgcttcaacccgctcttgagctattatcttgtcctttctcttttgccagaaaagaagccccaggcattaattttggtagaactttggtaggtttattwtattwtwtttttaattgggttaggaagcatgaaagtgagacattattatgcaacgtctctaagtgtgcatgtgatacttgaaaaatggtaatcagataaattgctaagcaactgtaccctgccttcagttaccaaaaagccagtgacttcgctttcatgatgtaacatgctctatacttctccacggagcacgtgtagggcggagttctgtgagagttgctcctttttaactcccctcctgcttgactgccatattgtgaggtcagctctgacccgtggtttcacagaaatgtattcaca

SEQ ID NO: 85624 - DNA, 600 bp, Chicken  19866894384850_2
aatgtttggagtactaaaaaagctgtaagtggtaacaccagtgcttccacagcatctttcatctgcaaatctttctgttcttaatgaattttggtgcctctctgtgaggcaggaattattggtgtcattttgcagacaagtagataaaatgcttgcatagaaacattctgaaagccacttatattcaggaatattaatgcttcaacccgctcttgagctattatcttgtcctttctcttttgccagaaaagaagccccaggcattaattttggtagaactttggtaggtttattwtattwtwtttttaattgggttaggaagcatgaaagtgagacattattatgcaacgtctctaagtgtgcatgtgatacttgaaaaatggtaatcagataaattgctaagcaactgtaccctgccttcagttaccaaaaagccagtgacttcgctttcatgatgtaacatgctctatacttctccacggagcacgtgtagggcggagttctgtgagagttgctcctttttaactcccctcctgcttgactgccatattgtgaggtcagctctgacccgtggtttcacagaaatgtattcacagagcc

SEQ ID NO: 85625 - DNA, 600 bp, Chicken  19866894384850_3
tgtttggagtactaaaaaagctgtaagtggtaacaccagtgcttccacagcatctttcatctgcaaatctttctgttcttaatgaattttggtgcctctctgtgaggcaggaattattggtgtcattttgcagacaagtagataaaatgcttgcatagaaacattctgaaagccacttatattcaggaatattaatgcttcaacccgctcttgagctattatcttgtcctttctcttttgccagaaaagaagccccaggcattaattttggtagaactttggtaggtttattwtattwtwtttttaattgggttaggaagcatgaaagtgagacattattatgcaacgtctctaagtgtgcatgtgatacttgaaaaatggtaatcagataaattgctaagcaactgtaccctgccttcagttaccaaaaagccagtgacttcgctttcatgatgtaacatgctctatacttctccacggagcacgtgtagggcggagttctgtgagagttgctcctttttaactcccctcctgcttgactgccatattgtgaggtcagctctgacccgtggtttcacagaaatgtattcacagagcctg

SEQ ID NO: 85626 - DNA, 600 bp, Chicken  19866894384854_1
tggagttgcttgaaggatgcacacacaagctatgtgctggtgaggaattccagtaatgctctttctctccatcctgctgtctgttctcagtcattattttatcagaagaatattctttttaggactgaagaaagtatttattggctttttgtctagctgcttttataaacatagatagccagcgattttaaacaggacatttcccagtacacttcaaacacagaatcgctcgtgtgaaatctgtgtatgaagaaatagtttaatgatagtgaactttagtacattaaagctcctactgcktttgtaacctctcagtgagttctgcctgagtgagaatgcaagctagatgcaaaaggtactgatgctacatctaccattttcccagctgacagaaaatacagtccttcgctaccttgatttagtactatctacctctaaaaagcagctttaaaacatccaagaaaaacaaacagcgcatcacaaattttccatttttttagttagcaaaaaaaaggtaccccctgcctttaggctgcactttgccattgctgcgggattgtccagcacatctcctctcaatccaagtaatagcaatacctg

SEQ ID NO: 85627 - DNA, 599 bp, Chicken  19866894384860_1
  misc_feature (1)..(57): n is any nucleotide
nnnnnnnnnnnnnnnnnnnnnnnnnnnnnnnnnnnnnnnnnnnnnnnnnnnnnnnnnggtgatgaatagtcacgttgtttaattccctgcatttgtagaacactttgcttaaaaaagcgaaaatatttttataagtttcaccagaatttttttcaggctttgtgcggatctttgaggatttggtctctctctctcactctccccctctctctcaaatatatatatggcagaggctgagctagggaggcccagctgaccttactgtgttgcttcaaggggtctgcttgggttgagctgggrtgatctgttgttcacaggcccgtcgggctgccctgctgctcctcaggtgtgtcctgcctggcttcatgaggaatgagggcagtgccacgcctgggatgttggataattctttcagaaccgtggcctggcactgcagaatgttttgttccagttattcatctctttttgagatccagataggtcacactgcactgcagtgcaatcatagtgtcagctgaaataccacatagtaaatgcactgacagcacgcgataggctttttatatagagaagcaccgcttggtattttctgcttggaa

SEQ ID NO: 85628 - DNA, 531 bp, Chicken  19866894384866_1
aattccctgagacagatctagcaaagcatgtagaagggaactatcatatcagtccagttgtctcacagctggattttcatacttgaaaagtgctgagcagtatttctcaatatgtgctctgttccaatactgaaaacatttgccaagatttgatgtgattttttttcaaggcatagtaatgcttctttccaagcacaccgtgatgaattgaggagggcagtggagctcagcagcaggatttaagtttttcagtaactgcttcattctgcggagggtctcccaatgagaacaagaagtgcrtaaacggctctaaagatggtacttttcatcgtgtgattgttcaccttttgttctttctctcacagaacaaatgaccagctcgtagcattcctgtccagataccgcgacatgaacttcttgaagtcacacgggagggacaacgcaaggtaagcccaccccttccctctgctgtttgacctgcagcactgggcttctgtgtagcaactgctctttagtgccacctgagtggag

SEQ ID NO: 85629 - DNA, 600 bp, Chicken  19866894384867_1
cattctgtgggcacagatccaactaaattcagttttgctgtgctttaatgctccagctgaggatctgaactgctaggcagcaaaagcctggccagtgggctagatgaaatgcatttgtcccaaaagagcactgcactgaaacttcctatttctggatctactgctaacctttttattatgcatttagtaaagtaatgtagcattcctacatggaacctcagttaaagtcaggctgcaggcttgatggctattaaacactgatatatctgctgtcagagctttgcataaacaacatgaaargcaacactttattccagggattccctaaaaaattgttttgctggggtcattagggaacaggatgctctcaagaactgactttgttcagagtcctaggtagataaatcaagagttttctcgtgtttccatacctacccacattgcttttgtgccaagcattgccttattccaactaatagcacaagaggctatctggccaaaagtagaaaatggttcccatatgaagatacagcagcaggacctctgaagtttttagttaaaaataccatttaagagaggaagcacttacgaacattctag

SEQ ID NO: 85630 - DNA, 599 bp, Chicken  19866894384872_1
  misc_feature (1)..(109): n is any nucleotide
nnnnnnnnnnnnnnnnnnnnnnnnnnnnnnnnnnnnnnnnnnnnnnnnnnnnnnnnnnnnnnnnnnnnnnnnnnnnnnnnnnnnnnnnnnnnnnnnnnnnnnnnnnnnnaaatgttggctgtttataatgaatggcattttgtgtaatcatttcagataagaaaggaataaccaaagctgacagaaaaatcacagggtcagcactactgctattgtttgttctcatctcccacgtggactgataataagcatttctacctcatttagtcatacggtttatggatttatttgggagtctawgtatgtatctttgcttgaatagacttcacttatttatttctataccattttatggcatttctcttcttctcttttttttttttcccccttttttaactgaaattaagaagaagctttgagaaggcaactgggtggctcccagggcatagatgggctgcagcatcctcccccttaattaaaagctctcactgcttgtgaatattctcacatgtttcagaggctgtgcatggtggaggggcattctcttctgaactggagcagagctcagtagctgttgctcttgggtcttctgctatttc

SEQ ID NO: 85631 - DNA, 600 bp, Chicken  19866894384872_2
ttcttctcttttttttttttcccccttttttaactgaaattaagaagaagctttgagaaggcaactgggtggctcccagggcatagatgggctgcagcatcctcccccttaattaaaagctctcactgcttgtgaatattctcacatgtttcagaggctgtgcatggtggaggggcattctcttctgaactggagcagagctcagtagctgttgctcttgggtcttctgctatttctgtctgtgtagtgcagataatacttggctcttttgcaggactgtcatgaacacaacaactgagwaaatgcctctggagaatcctcgatgagattctggcagcttccaaaattgccaaatgtttgtagacattgcaaaaaatcagtgatgctggaacaggagagggaagcagcgaggctgttgtcgagctccaggtctctgctgaaccaagtttcaagttattggtgttgataaaagaaggagaatgaactgcaaaaagagagccgtttctttgtgatttcaaggcagtggttcctggggatctgtgtctcttggggtctttctgaagtttgcatagtgtttacagtattcttagcccctcttat

SEQ ID NO: 85632 - DNA, 600 bp, Chicken  19866894384874_1
atgcattcctaaacataccaggttcatctctgcgctgctcaaagcctgctgcacaggtcctgggactcgttggaacaagtcagagcacaaatcctcaaattcttgccttgagactttggctttgaagtcaatatcatccagcagcccctcaatctgcccagtaaaaaaagaattaaattttcacagagcattctacaaccagaatctctgcctaatttgcctaacatgcaaaaaagttccagtgttgttattgtgcctaggaccttacagcattccatctgaaccctgtaattgctgctmtgaaaggatggaatacagacatcacagacaacttctctcaaaycccgtgaaaacttagttaccaagctccacacaactaaccctcatccaatgcactcattgatcaatagagctattaagtgagcagaggtttgaaggaactgcctgtgccaccacatccaaaatactatgggtgattcttttcagtatactaacactgcagagggacagctggcatttagtaacatttaccatcagctacactataaccagttaattctgtctatattaggcaattaatctaaatcacgttatcccacc

SEQ ID NO: 85633 - DNA, 600 bp, Chicken  19866894384874_2
gcctgctgcacaggtcctgggactcgttggaacaagtcagagcacaaatcctcaaattcttgccttgagactttggctttgaagtcaatatcatccagcagcccctcaatctgcccagtaaaaaaagaattaaattttcacagagcattctacaaccagaatctctgcctaatttgcctaacatgcaaaaaagttccagtgttgttattgtgcctaggaccttacagcattccatctgaaccctgtaattgctgctmtgaaaggatggaatacagacatcacagacaacttctctcaaaycccgtgaaaacttagttaccaagctccacacaactaaccctcatccaatgcactcattgatcaatagagctattaagtgagcagaggtttgaaggaactgcctgtgccaccacatccaaaatactatgggtgattcttttcagtatactaacactgcagagggacagctggcatttagtaacatttaccatcagctacactataaccagttaattctgtctatattaggcaattaatctaaatcacgttatcccaccctcagccctaagagctctggaaattctgcaacctgtcctacct

SEQ ID NO: 85634 - DNA, 599 bp, Chicken  19866894384881_1
  misc_feature (1)..(20): n is any nucleotide
nnnnnnnnnnnnnnnnnnnnctgcattctgagagctgcttttgctgttatcagtaatgcctttcaggaaaccgctatatgtattccaaggaaggaaagaaaaaggaacaaattagaaacattggagtaacaggaaaaaacagagatctggtattgcccagctattcctacagaccagggcagctcacgtactcagaggcagtgctgcgagatgtgctaccatttatcagcagagcagtagaacagcttaccaaaaaacctgtttttatcttggtgactgcaggaagaaaagccctgaacrcagcaatccctgagcacggcagatagcgagatctgatcgcagggtgccyggctctcctttcattctgcatgcaccgcactgctaagcacatcttttcttcccttaaagttttctgttgttctgtagtttttcctaagttttacaatctaccattacacaccgcacacaattgcatctcctgcacagctgggggttcccggagctagttttctaaagaaaatgtattttccatccagtgactccaygagcctccctactgagaagagtttatgcttagctacactcaggacataataaat

SEQ ID NO: 85635 - DNA, 600 bp, Chicken  19866894384881_2
tcagtaatgcctttcaggaaaccgctatatgtattccaaggaaggaaagaaaaaggaacaaattagaaacattggagtaacaggaaaaaacagagatctggtattgcccagctattcctacagaccagggcagctcacgtactcagaggcagtgctgcgagatgtgctaccatttatcagcagagcagtagaacagcttaccaaaaaacctgtttttatcttggtgactgcaggaagaaaagccctgaacrcagcaatccctgagcacggcagatagcgagatctgatcgcagggtgccyggctctcctttcattctgcatgcaccgcactgctaagcacatcttttcttcccttaaagttttctgttgttctgtagtttttcctaagttttacaatctaccattacacaccgcacacaattgcatctcctgcacagctgggggttcccggagctagttttctaaagaaaatgtattttccatccagtgactccaygagcctccctactgagaagagtttatgcttagctacactcaggacataataaatgcaaaggaaaaggaggcaaagtgaggatttaaagagtcgtatcaaatttt

SEQ ID NO: 85636 - DNA, 600 bp, Chicken  19866894384881_3
cttaccaaaaaacctgtttttatcttggtgactgcaggaagaaaagccctgaacrcagcaatccctgagcacggcagatagcgagatctgatcgcagggtgccyggctctcctttcattctgcatgcaccgcactgctaagcacatcttttcttcccttaaagttttctgttgttctgtagtttttcctaagttttacaatctaccattacacaccgcacacaattgcatctcctgcacagctgggggttcccggagctagttttctaaagaaaatgtattttccatccagtgactccaygagcctccctactgagaagagtttatgcttagctacactcaggacataataaatgcaaaggaaaaggaggcaaagtgaggatttaaagagtcgtatcaaattttatcactggaaggtctggcaacgaacacgatcctattttgttcgctttagcacattttgcagttcagttttcacagaaacctccaggtctacccaagggatttgctaytttttttaagtacctaaatggctgaactggtcagactaatggtggctgaaaggctacagctgacatacactggagacttaattatgtag

SEQ ID NO: 85637 - DNA, 600 bp, Chicken  19866894384881_4
acaccgcacacaattgcatctcctgcacagctgggggttcccggagctagttttctaaagaaaatgtattttccatccagtgactccaygagcctccctactgagaagagtttatgcttagctacactcaggacataataaatgcaaaggaaaaggaggcaaagtgaggatttaaagagtcgtatcaaattttatcactggaaggtctggcaacgaacacgatcctattttgttcgctttagcacattttgcagttcagttttcacagaaacctccaggtctacccaagggatttgctaytttttttaagtacctaaatggctgaactggtcagactaatggtggctgaaaggctacagctgacatacactggagacttaattatgtagtgtgcagctccatctgtcagctgcaatatcttttgttaccaagaatgagacttccatagaagatgacgtggcagactcaatttgctttcacaaggatagctgttatgtgggcatttaaatggtgctggaaattaggacaacatttacattcttcatgtagacattgaaggtctatttacagcaaggtttgtacgaaatakataactaacac

SEQ ID NO: 85638 - DNA, 568 bp, Chicken  19866894384881_5
ggatttgctaytttttttaagtacctaaatggctgaactggtcagactaatggtggctgaaaggctacagctgacatacactggagacttaattatgtagtgtgcagctccatctgtcagctgcaatatcttttgttaccaagaatgagacttccatagaagatgacgtggcagactcaatttgctttcacaaggatagctgttatgtgggcatttaaatggtgctggaaattaggacaacatttacattcttcatgtagacattgaaggtctatttacagcaaggtttgtacgaaatakataactaacactgaatgagtgactgtcacacaatgctgacaagcaggaaacaattaattaaaatatcatgacatgggggatggtctgaaacagcactgtctgcattacgatgcacacatgcaaatggagaaaaagtcctgaagtgtttgttcatacgtgaagttaatggcaagagtatttgtgctaacattcaagagctttaatggcaaatctgacagcaacatttaaagaccacgagatccccagtttggggagagggggggaaaaa

SEQ ID NO: 85639 - DNA, 460 bp, Chicken  19866894384883_1
ccaggacccaagtcctccactgaattgttctcaatgagttctctcctagtctgtgtgtgtatctggcattgtcctgacccaagtgtggcttggcaaccataacagtctgttcctttaggaccctagcagacatgttatctggccccaaagacttgtacctgttctttcttaagaggtggtttctgaattgctctggtcttacagtggaaaggaagggatttggcttccctgacccctgcctagtggttcagagacatgagagctgtgggaagtccaagtggtgaagactgaggcaaagamctttaaatacctttttactgtctgcctttttactgtctgttttagccagttctcacttagcagaggaggtacattctccttttttctgtttcttctgaccaatgtatctgtagaaccccttcttgttatttctcacatctcttgccaagttcagttctat

SEQ ID NO: 85640 - DNA, 600 bp, Chicken  19866894384890_1
tgacaaagaaggctgagggctactagtaagaacatttctgaataaaatagctgcaatttgcaagaaaataggttttcccaaatcattgcagttgagagtagtacacactcataggatgctaaggggactcacatattaacaaagcaatccaaatcttatatgatataagagaatgatggggcaaagtagatctttaagaagaaagatcatccaggacctaaaggatgccactgaatatggggaacaaaatctattgcataatgcaatttatatagagatatacctacctatgcctacackgaagtggatatacatataaagtgagaaaaaattamttaagataatgaactcaatggataaaaaaataaatgtttaaactgctcctagataaacttattcctcaatttagggcatttatagtcaggacaagtataatcttctaacatattttcttagttgatttcagaatgccctttaagtgattttaaactgggatgcaacttgtctctgtcatcagaaaactgctccagtcctaggccctgtatactgtggtatctgtgattccatgatacatttgaattgcatcctaaaggacactca

SEQ ID NO: 85641 - DNA, 600 bp, Chicken  19866894384890_2
ttctgaataaaatagctgcaatttgcaagaaaataggttttcccaaatcattgcagttgagagtagtacacactcataggatgctaaggggactcacatattaacaaagcaatccaaatcttatatgatataagagaatgatggggcaaagtagatctttaagaagaaagatcatccaggacctaaaggatgccactgaatatggggaacaaaatctattgcataatgcaatttatatagagatatacctacctatgcctacackgaagtggatatacatataaagtgagaaaaaattamttaagataatgaactcaatggataaaaaaataaatgtttaaactgctcctagataaacttattcctcaatttagggcatttatagtcaggacaagtataatcttctaacatattttcttagttgatttcagaatgccctttaagtgattttaaactgggatgcaacttgtctctgtcatcagaaaactgctccagtcctaggccctgtatactgtggtatctgtgattccatgatacatttgaattgcatcctaaaggacactcaataatggtcagaatattgcagtgggatatcacttg

SEQ ID NO: 85642 - DNA, 599 bp, Chicken  19866894384896_1
  misc_feature (1)..(91): n is any nucleotide
nnnnnnnnnnnnnnnnnnnnnnnnnnnnnnnnnnnnnnnnnnnnnnnnnnnnnnnnnnnnnnnnnnnnnnnnnnnnnnnnnnnnnnnnnnntttaacccagagtccgtgcatcttgagccgtaaatctggggtatttccagccatgcagctgatagaaacaatgtcactttgtgtgtgaacagagaccataacagataccctgcatttggttttagtcccaggaagagctctggatttaaatgacattatctaatcctgctcgctccaataaaaaaagccctaaatgagtgccctgaccycggggcacaggcaccacatgccagcagcattgcatccatataggagctgtgccatgagcactctacaacacatcctcctgcactacacacaaccactggctaccaaagaatggatttctacccagcccctctgcagtgagttcaggaaagccctctccagagcccaagcccagcaagaggtgctggcagtgtggctctggcacgggcaggaagcctcaagcgtggagatctgcagaagggagttcagcagtgkaacagcataacacgtcctcagccttccctactggaacatctccaca

SEQ ID NO: 85643 - DNA, 581 bp, Chicken  19866894384896_2
atcctgctcgctccaataaaaaaagccctaaatgagtgccctgaccycggggcacaggcaccacatgccagcagcattgcatccatataggagctgtgccatgagcactctacaacacatcctcctgcactacacacaaccactggctaccaaagaatggatttctacccagcccctctgcagtgagttcaggaaagccctctccagagcccaagcccagcaagaggtgctggcagtgtggctctggcacgggcaggaagcctcaagcgtggagatctgcagaagggagttcagcagtgkaacagcataacacgtcctcagccttccctactggaacatctccacaggctacagcatcattctcccacaggcaggcagctctgtaagcaaggcagaccagtgggactatatacaccgtgcttgctttccagcagctcttaccagcggattgggttttcctgccctcactgctcaccagcctgtacctggtaagcgagctcaccagcccattcaccaccttccctgttttctgtggattggttttttcttttttttcaagcatccaatcagccccaaacaga

SEQ ID NO: 85644 - DNA, 534 bp, Chicken  19866894384899_1
cacagtaattacatctgtagaaaataaccatgaacgcaaaattcagttttaaagagccttgatcttttagaaatcttaattattaccaaactcccctgcaaaaatattcttaaaggggtacttcatatcctattttttattttttacggccttatattacattatttttgaatgctctggttcagatcactgctcccagtactgataaatcggctacccatataaatatgcatcacagacttaaaggcaaagaatttttcaatgtgaaaaaaatgtgatgaaagtgtcactgctttacarcagttctatcccacagggaaaataatcaaaagcacaaaacaatgagtgctctaatccatacawttatcttcctgacaacatagtgatggaggtacctatgctgaaaactcttttagttaaagaggatgcaggtgatgtaggtgctgctttcacagaccctaaagtcgcactgtggaagttgtcagaaaaacagaccaatggaataatctcagcagacaaacagaaaaatctgct

SEQ ID NO: 85645 - DNA, 471 bp, Chicken  19866894384899_2
cttttagaaatcttaattattaccaaactcccctgcaaaaatattcttaaaggggtacttcatatcctattttttattttttacggccttatattacattatttttgaatgctctggttcagatcactgctcccagtactgataaatcggctacccatataaatatgcatcacagacttaaaggcaaagaatttttcaatgtgaaaaaaatgtgatgaaagtgtcactgctttacarcagttctatcccacagggaaaataatcaaaagcacaaaacaatgagtgctctaatccatacawttatcttcctgacaacatagtgatggaggtacctatgctgaaaactcttttagttaaagaggatgcaggtgatgtaggtgctgctttcacagaccctaaagtcgcactgtggaagttgtcagaaaaacagaccaatggaataatctcagcagacaaacagaaaaatctgct

SEQ ID NO: 85646 - DNA, 599 bp, Chicken  19866894384902_1
  misc_feature (1)..(52): n is any nucleotide
nnnnnnnnnnnnnnnnnnnnnnnnnnnnnnnnnnnnnnnnnnnnnnnnnnnntgttggattgctagtctgatggttagcgctgtttttgtgatgagcatgaaacaactcgggtgctctgctaccacacctatttggaaccaagtgaaatcacaggaaaacaaggtgaacgttcagcacatccatttccctctcgtttatcacagtgtttcaacccataacgtgaggctttggattgcaccagtcagctctaaacactgaggctctcaactctgaaaatggacatttcgacccccaaaackgtgctttggactcccagtatttttccttggattyaarcgtaggcaattccaccgtaaaaaggaagcattttgattgtaataaaagagaacatctggaacctaaaagtgaggttttaaagcctaagaatgtaagacatctcacgacaagtcagggttctgactctgaaaatgagactctaaaaagtgaaatgaggttttgttctcaaaaaatactacattggacatgaaaaattgtctctcgtggctctgggtaaaagctcagatccactccccctgcccatgaatggcctctgttactc

SEQ ID NO: 85647 - DNA, 599 bp, Chicken  19866894384902_2
  misc_feature (1)..(18): n is any nucleotide
nnnnnnnnnnnnnnnnnntgttggattgctagtctgatggttagcgctgtttttgtgatgagcatgaaacaactcgggtgctctgctaccacacctatttggaaccaagtgaaatcacaggaaaacaaggtgaacgttcagcacatccatttccctctcgtttatcacagtgtttcaacccataacgtgaggctttggattgcaccagtcagctctaaacactgaggctctcaactctgaaaatggacatttcgacccccaaaackgtgctttggactcccagtatttttccttggattyaarcgtaggcaattccaccgtaaaaaggaagcattttgattgtaataaaagagaacatctggaacctaaaagtgaggttttaaagcctaagaatgtaagacatctcacgacaagtcagggttctgactctgaaaatgagactctaaaaagtgaaatgaggttttgttctcaaaaaatactacattggacatgaaaaattgtctctcgtggctctgggtaaaagctcagatccactccccctgcccatgaatggcctctgttactccccagctgcactcacatcttctccttttccctcc

SEQ ID NO: 85648 - DNA, 599 bp, Chicken  19866894384902_3
  misc_feature (1)..(15): n is any nucleotide
nnnnnnnnnnnnnnntgttggattgctagtctgatggttagcgctgtttttgtgatgagcatgaaacaactcgggtgctctgctaccacacctatttggaaccaagtgaaatcacaggaaaacaaggtgaacgttcagcacatccatttccctctcgtttatcacagtgtttcaacccataacgtgaggctttggattgcaccagtcagctctaaacactgaggctctcaactctgaaaatggacatttcgacccccaaaackgtgctttggactcccagtatttttccttggattyaarcgtaggcaattccaccgtaaaaaggaagcattttgattgtaataaaagagaacatctggaacctaaaagtgaggttttaaagcctaagaatgtaagacatctcacgacaagtcagggttctgactctgaaaatgagactctaaaaagtgaaatgaggttttgttctcaaaaaatactacattggacatgaaaaattgtctctcgtggctctgggtaaaagctcagatccactccccctgcccatgaatggcctctgttactccccagctgcactcacatcttctccttttccctccttc

SEQ ID NO: 85649 - DNA, 451 bp, Chicken  19866894384904_1
aaatgttgtttcaacaatattcttctactttgttgcttgcttggttgtttttctcctttgtagggggaaggaaaagagaaaccttttcaaggttttattcaggttttgattgagtgggagactaggaagctacagatgcccacaagaaacaactagtttgaaaacagttctgatctttatgtatatagctgtacagtcacttctcctttccctccctcattatgcagataatatgtaattgtaggtaatgtgtctaaataccctgagcacctctaacttttatgacatgttctgtcattrtactgtattgacattaaaagtgcttcctgtttcctaggaagtacttgaccaaatctgcattttaccactcttattttgaaatacttttgtgtagcaactggacctttagttcaaacaaagttacaggggcttattactcaaatactgaaag

SEQ ID NO: 85650 - DNA, 600 bp, Chicken  19866894384905_1
gaaattaaatttctgagagacacctatgagaaaatactcttccttatatttgtttccatataatcaatggaaatttgattataagcagggtcaagtctgttttgagggctccttaaaaatttcatatcttcttgcacactcgagctggctggcaaaagtagtttgaattcataagcatttattcatgtaattcaaattaaatttaaaaaagaattcagaaataaaagactttttttgactgaaagaggagcgtttactatatatgaaggaataaaaatgctttatataagtcatgtgtaygcccatgatgtayttttaatgaataattttcttttttctctttccaaggccagatcttataacaaatgtctaggtccttcaattcaattaagaaccagctccacaccgtccttcaaaaaaagcacaaaaaataaacttacatgtgcatttttgttcttgcatttgatttcagccaagacactcacagtgcaaaaactgaacaagtctttcctctatacaaatattgaaaattactagatacctgtttttctgtgaggatgacacggccaaggagctgatcttccaaccctcgcacggtaa

SEQ ID NO: 85651 - DNA, 600 bp, Chicken  19866894384905_2
tgagagacacctatgagaaaatactcttccttatatttgtttccatataatcaatggaaatttgattataagcagggtcaagtctgttttgagggctccttaaaaatttcatatcttcttgcacactcgagctggctggcaaaagtagtttgaattcataagcatttattcatgtaattcaaattaaatttaaaaaagaattcagaaataaaagactttttttgactgaaagaggagcgtttactatatatgaaggaataaaaatgctttatataagtcatgtgtaygcccatgatgtayttttaatgaataattttcttttttctctttccaaggccagatcttataacaaatgtctaggtccttcaattcaattaagaaccagctccacaccgtccttcaaaaaaagcacaaaaaataaacttacatgtgcatttttgttcttgcatttgatttcagccaagacactcacagtgcaaaaactgaacaagtctttcctctatacaaatattgaaaattactagatacctgtttttctgtgaggatgacacggccaaggagctgatcttccaaccctcgcacggtaacagtaaagtcaat

SEQ ID NO: 85652 - DNA, 600 bp, Chicken  19866894384905_3
aacaagtctttcctctatacaaatattgaaaattactagatacctgtttttctgtgaggatgacacggccaaggagctgatcttccaaccctcgcacggtaacagtaaagtcaatcactgttgttcttgcactgatttctggagtataggcaggattagccaattttgttgtcatataaagggtaaaccctttcatgacatctacctccttgtcacctactttcacctgaaaacaataataaacaaaaacaatctagttttcaaaagttgaaatcagaaaaaaacagtcatttcatcaaygaaaaacagattaaatattttttattattatttcatgaacactttttacacaaataagaaaactcatgagttcattgcttatcttattttagcatagcgaaggtatgaatcttcatatcatccagactatcagatgcgcagcacctgccctatgygkttttttttactttcacgttcacaattcatcttactttgtgtgctgaaccagattttatgaaatttttttccaggatgttatctagagcaggatcaagttcctctccaatgttttctattaacaggggtcggccaagagacagg

SEQ ID NO: 85653 - DNA, 600 bp, Chicken  19866894384905_4
ttagccaattttgttgtcatataaagggtaaaccctttcatgacatctacctccttgtcacctactttcacctgaaaacaataataaacaaaaacaatctagttttcaaaagttgaaatcagaaaaaaacagtcatttcatcaaygaaaaacagattaaatattttttattattatttcatgaacactttttacacaaataagaaaactcatgagttcattgcttatcttattttagcatagcgaaggtatgaatcttcatatcatccagactatcagatgcgcagcacctgccctatgygkttttttttactttcacgttcacaattcatcttactttgtgtgctgaaccagattttatgaaatttttttccaggatgttatctagagcaggatcaagttcctctccaatgttttctattaacaggggtcggccaagagacaggctgtcttctatatgacttctgaagaacttgtggttcatagctgtaacctaggaagattggttcacaacatatcatgcatttgtaagcacacggaaaaaagtacaaaatgtattgctgctttcaaaagtcatacttatccttggatatcatagaat

SEQ ID NO: 85654 - DNA, 600 bp, Chicken  19866894384905_5
agccaattttgttgtcatataaagggtaaaccctttcatgacatctacctccttgtcacctactttcacctgaaaacaataataaacaaaaacaatctagttttcaaaagttgaaatcagaaaaaaacagtcatttcatcaaygaaaaacagattaaatattttttattattatttcatgaacactttttacacaaataagaaaactcatgagttcattgcttatcttattttagcatagcgaaggtatgaatcttcatatcatccagactatcagatgcgcagcacctgccctatgygkttttttttactttcacgttcacaattcatcttactttgtgtgctgaaccagattttatgaaatttttttccaggatgttatctagagcaggatcaagttcctctccaatgttttctattaacaggggtcggccaagagacaggctgtcttctatatgacttctgaagaacttgtggttcatagctgtaacctaggaagattggttcacaacatatcatgcatttgtaagcacacggaaaaaagtacaaaatgtattgctgctttcaaaagtcatacttatccttggatatcatagaatca

SEQ ID NO: 85655 - DNA, 599 bp, Chicken  19866894384911_1
  misc_feature (1)..(1): n is any nucleotide
nctggaggagctgcaggagcagatctcattacagcaccaaccgcattacctgctttgtcttctcatttctaattcatgagattctcctaaaagtcgtattttggaaagggtttcacaccggtgcagtatgcatatttgcaaacctttaaagatagaatgcttttctttttaactttcctttgtttacagaaattgaaattttatatcatttacaaaaagtcatcgaaaacaccactgcatagtatttttcccaattatatcttttaaagaaggtatagtaaaagggctgtatttaatttwttttttttttcctgctggaattctaaaatatgttattgtagatgttgcattcaggcaataaatattacaaatgacatctctgtttacaacatttttccctgcaaaagtgtgcttgaagagttagctgctgattgaaacaagatgactgccactgtcttggatttcagaaaatttctgggcactttgcaagagcacgaacaggaaagcagagtgaattcaaacagagtacagtctcgaatctatcagcgttgagcatcacagacactttcagtgatttcggtccatcttttcttagcctg

SEQ ID NO: 85656 - DNA, 513 bp, Chicken  19866894384911_2
acaacatttttccctgcaaaagtgtgcttgaagagttagctgctgattgaaacaagatgactgccactgtcttggatttcagaaaatttctgggcactttgcaagagcacgaacaggaaagcagagtgaattcaaacagagtacagtctcgaatctatcagcgttgagcatcacagacactttcagtgatttcggtccatcttttcttagcctgttcaccaggaatgcagtcaattttaacacaacaggcaagaaattgttagccttttaaatagactagctattgccagaacaattttrcaaacaacaagcccgtgccacagaaacagccaaatcacatccacatgtaygaatgctttctcctctgatactacattttttatttagggctccatccagcaaaagactgaatgctggccccagcccagcaacctacttagacacgtgcttttaacttcagtgcaaccaatggcattaggcttgtgctcaggtcgagaatgtgtttaaatgttg

SEQ ID NO: 85657 - DNA, 463 bp, Chicken  19866894384911_3
aacaagatgactgccactgtcttggatttcagaaaatttctgggcactttgcaagagcacgaacaggaaagcagagtgaattcaaacagagtacagtctcgaatctatcagcgttgagcatcacagacactttcagtgatttcggtccatcttttcttagcctgttcaccaggaatgcagtcaattttaacacaacaggcaagaaattgttagccttttaaatagactagctattgccagaacaattttrcaaacaacaagcccgtgccacagaaacagccaaatcacatccacatgtaygaatgctttctcctctgatactacattttttatttagggctccatccagcaaaagactgaatgctggccccagcccagcaacctacttagacacgtgcttttaacttcagtgcaaccaatggcattaggcttgtgctcaggtcgagaatgtgtttaaatgttg

SEQ ID NO: 85658 - DNA, 600 bp, Chicken  19866894384935_1
tctacctaggatagcacagataaatccatgactgaaaatatatatatatgtatatatatattctttcaaaatacaacagttatgaagatgcattgctaatatctgaggattaatggccaatttcatcctcaggtgtgacagtatgaagaaatgtatgatacagtacaggatataaatgatccagacactctgtatttgtagttgaaattaaaatgtattactatatcacttttttttttttttaattgcagttgataaggagctaaaaactttaaaatttttcatcatcctaatggtctygtctagatcaataatctatcaggtctaactttcacattacacacctacaggttttatcttcctcaagcttagctacttttggataaattcagtaaagatttctgcatacagatttttgaatcttttttttagtccccttgtttaaatatgctcattgatattatcttggcttctagtggacacttatccacattgcaaaatttggcagtgtaacatatgactggcagcctgatgaagaaaagcccagagcaggaacagcaggagcattggaaggtcaggatttgtactgactgagctgtg

SEQ ID NO: 85659 - DNA, 600 bp, Chicken  19866894384939_1
tgtggtttcttatggcaaaaagttaacactgctggttacaagaaaaggtgctctgtcatttctttgtgtcctctgtgttatgtgacaggtgacctcagggaggtttgacatttattgtaccagttaccaggctctgaccacagatctgcaatctagttcagtgtctcccaaacccgatgtcaccaagacatgtctaagctgcacctgtggaactggctttggttgctttgtatactctgtgcatggctccttggatttggttgtctcctcagaaggccaagggaggctgaagtagggcaytgctctatgtctgtgccctggcactatcctggcattacattaaatcattttgatgtttactactgaggggatgggggagaaaaattccaataactgagtgttaggacaccgttaaagatcttgaaggctaaaattttgctattgctccgagtactgaggccagttgcacacagttggtgccattagtagcattggaagcatctgttgttgttgttaataataacagcaattgccttttaatagtgcaaatagtgattaaaaggaaaaagagcatatggtctcagacactttttgctgttg

SEQ ID NO: 85660 - DNA, 600 bp, Chicken  19866894384942_1
tcctcacagggagcggaagagcagcgctgagctctgctctgtatgacagtgacaggacccgagggaatggcatggagctgtgtcaggggaggggcagctggaggtcagggaacggttctgcctcggagggcgctgggcatggaacagcctgcccagggcagcaagcacagccttagtgctggagtttaggaagcatttggacaacactctcagacatagggtttggatttttggatggtcccatgtggagtcaggagttccttgtgggtcccttccaacttgggatattctgtgattctrtgcttttgtttcctctatcccatttaaagataagggagaaaaccttgtgcttcagagcttgtcaggcagtgcattaaatgtttgttgtgttcccggagattctctgataaaaattagctgttctcttatggaaaatctgtttgtttcctaagaccattttttcccatgtaagtatatttcttgtagaacttcaaaatttcaattttccccaagtctctctttgtggtctataggactagggccaattaaagagagatctgcaaagggcaatcatgaaaagcactgcatggttctgtgcag

SEQ ID NO: 85661 - DNA, 600 bp, Chicken  19866894384944_1
atgagatggcatcactcatctaatactgtcacttggcataaagtactctcttttactcaagtaatggctaaattccaatcctcatgtctacagtaaataataccttaatctacaagctagcctgtatttctggggtcaggcacagagcaaggcgctattcttcacaattaatgctctgaaatctggcattttacaatctgaagtgcaaagagggacttgaaatcatccatttctttgggcctgaacagagatggttttacagagcctgtttctcaggaggcgagagcccaatatttcacyccgaaatggctgtaccagctcagaacttccacccagaayggcagcaaatccctccatgggcatagctacagcagaggacagaggcagcattcagcagtactactccgggaacttgctccagattccaatgcacaggcactgcctgatccttaagtgctgccttcatatttcacagcctttaatagggtttttcttcctgattttcacagtttcaaatacacattgcctgcagtacggcccatggtaaccaaagctccaggttttgccacgtattctttaagtaaatacagcactacaatc

SEQ ID NO: 85662 - DNA, 600 bp, Chicken  19866894384944_2
aaagtactctcttttactcaagtaatggctaaattccaatcctcatgtctacagtaaataataccttaatctacaagctagcctgtatttctggggtcaggcacagagcaaggcgctattcttcacaattaatgctctgaaatctggcattttacaatctgaagtgcaaagagggacttgaaatcatccatttctttgggcctgaacagagatggttttacagagcctgtttctcaggaggcgagagcccaatatttcacyccgaaatggctgtaccagctcagaacttccacccagaayggcagcaaatccctccatgggcatagctacagcagaggacagaggcagcattcagcagtactactccgggaacttgctccagattccaatgcacaggcactgcctgatccttaagtgctgccttcatatttcacagcctttaatagggtttttcttcctgattttcacagtttcaaatacacattgcctgcagtacggcccatggtaaccaaagctccaggttttgccacgtattctttaagtaaatacagcactacaatctgtttagataggggaaattttaaattaggccagcatttc

SEQ ID NO: 85663 - DNA, 600 bp, Chicken  19866894384946_1
tgactctcggggcagcaatgaacacagagtctgtctgttacggttatgggcatcgaaatccacaaatataacagaccaggaacagccctgtaaatgcaaatttatttagagagaaatgaagaaaggttggcgtgtcctggtgaaactaactaaccttttgttctaccaatggtaatactctggtagttggccattttaatcaggaaatgaacaatatatatccagaagagtttgagaaaagaacttgaaattctaaacaaaattagctgtctttgtccgctactggttatgaattgtatyatmcactcaaagtcataacatcttccattacttcttgatcagcaatggttgtactgaggtaaaacaaaaaactagttgttcctccctgtggttgtgggaaatgttccaagtgggagatgttgaatatttcattaaagtatgctagaataaaaaaaaattggatcttcacctgaggtatcacttaggaaaaggacttcagtagcaaataaaaacaatttactttttggttgttgtgttgcacttcattactcttaagcacaagctcacttctcagaaaaataaaaaatgtggcaaaataaa

SEQ ID NO: 85664 - DNA, 600 bp, Chicken  19866894384946_2
ctctcggggcagcaatgaacacagagtctgtctgttacggttatgggcatcgaaatccacaaatataacagaccaggaacagccctgtaaatgcaaatttatttagagagaaatgaagaaaggttggcgtgtcctggtgaaactaactaaccttttgttctaccaatggtaatactctggtagttggccattttaatcaggaaatgaacaatatatatccagaagagtttgagaaaagaacttgaaattctaaacaaaattagctgtctttgtccgctactggttatgaattgtatyatmcactcaaagtcataacatcttccattacttcttgatcagcaatggttgtactgaggtaaaacaaaaaactagttgttcctccctgtggttgtgggaaatgttccaagtgggagatgttgaatatttcattaaagtatgctagaataaaaaaaaattggatcttcacctgaggtatcacttaggaaaaggacttcagtagcaaataaaaacaatttactttttggttgttgtgttgcacttcattactcttaagcacaagctcacttctcagaaaaataaaaaatgtggcaaaataaaaag

SEQ ID NO: 85665 - DNA, 600 bp, Chicken  19866894384949_1
gctttggtcacctgatctggtgcctgattaagtggttggaactctccacagcgtggggctagaactagatgatctttaaggtcccttccaacccctgccattctgtgatttaactggatatagaggctacttttggaggtgaaggaaaaaatattctgatgcttgctgtatgaatgtagtttttttatgcatcgctcttgttgaacagcactgaattgtttacttttaaccacttaaggctatacaggagtcatacgttcctgtttttcacaggaatggaatttctacttttatctctgyctaatgcttttcaggtttagtattccaaagagttattgtaagagttatagtatgaaagactaagtaaatacatgtaccttaactctgtttttttttttgcagcagttgttatatcctaatttcaaatattcaagaaagctattttttcgttgttctttctctctatagagatttgtatgaccacttaccatatatgacataacaggaaggtagtaataatgtctgctttcacttcttcttgtccataatcctgataaagcaggttttttttcctttactttccaaatggaaaaaggacac

SEQ ID NO: 85666 - DNA, 600 bp, Chicken  19866894384950_1
tatcccataatatcatctcccagaaaagaatgacttgtttttaaccaattttgtcattgctagacagaggaagggaatgtgttagtgcaatgaatagctgtttttaatttctcagttgtagcttacagtgagaatcttgagagttatgctgagaatggctgggatgtatactgtaatggagcaattttgcttctccccctttaagaaaaagaaaagagggattctatttaatcctttgttttatgagagactggataggagaagtggaaaatggaaaacacttgttatccccagatgctkgagtcagggatgcacccataagcctttatgtatgtcctcaaataaagatgaaaggaaacatcctcttctaatccatgaactgagcagttcactgyctttgtcatttaaactatcgcaaagtgtgtgagtscctttttccccctttaaggtgtagtaccaatgcatatcattgtgaaatggatctgcccatttattaagtagcacagtacacacagtgcatatcatagtgtaccttacgggctggtatgctgcttttgacttgtttcccagggtagcttaaggtgctggtttagacagatg

SEQ ID NO: 85667 - DNA, 600 bp, Chicken  19866894384950_2
agctgtttttaatttctcagttgtagcttacagtgagaatcttgagagttatgctgagaatggctgggatgtatactgtaatggagcaattttgcttctccccctttaagaaaaagaaaagagggattctatttaatcctttgttttatgagagactggataggagaagtggaaaatggaaaacacttgttatccccagatgctkgagtcagggatgcacccataagcctttatgtatgtcctcaaataaagatgaaaggaaacatcctcttctaatccatgaactgagcagttcactgyctttgtcatttaaactatcgcaaagtgtgtgagtscctttttccccctttaaggtgtagtaccaatgcatatcattgtgaaatggatctgcccatttattaagtagcacagtacacacagtgcatatcatagtgtaccttacgggctggtatgctgcttttgacttgtttcccagggtagcttaaggtgctggtttagacagatgaacatattacctagactggggctaatatccctgttttatctttctacatgctgcagtagcagtgaatagtactctctttagtgaagtgcagactg

SEQ ID NO: 85668 - DNA, 600 bp, Chicken  19866894384950_3
agaatcttgagagttatgctgagaatggctgggatgtatactgtaatggagcaattttgcttctccccctttaagaaaaagaaaagagggattctatttaatcctttgttttatgagagactggataggagaagtggaaaatggaaaacacttgttatccccagatgctkgagtcagggatgcacccataagcctttatgtatgtcctcaaataaagatgaaaggaaacatcctcttctaatccatgaactgagcagttcactgyctttgtcatttaaactatcgcaaagtgtgtgagtscctttttccccctttaaggtgtagtaccaatgcatatcattgtgaaatggatctgcccatttattaagtagcacagtacacacagtgcatatcatagtgtaccttacgggctggtatgctgcttttgacttgtttcccagggtagcttaaggtgctggtttagacagatgaacatattacctagactggggctaatatccctgttttatctttctacatgctgcagtagcagtgaatagtactctctttagtgaagtgcagactgctagaggatgttgcatgtgagtctctgtgacgcag

SEQ ID NO: 85669 - DNA, 599 bp, Chicken  19866894384951_1
  misc_feature (1)..(54): n is any nucleotide
nnnnnnnnnnnnnnnnnnnnnnnnnnnnnnnnnnnnnnnnnnnnnnnnnnnnnnatcccttttctcctttggccttcctttgttctgtggttgaagccatccctctctttgacacatgacgacaaggctgccacagacacacatatatttccacccttgaatcatttttaagaggtatttctacctccagtcacaggggaattggtttgattatccttctttaattaacctagaagtgatatgaagcacttctaacctttgctcttcagcagtggagcatgagcttatctctaggagatmccactttgatgggtgagcagattgcagagattcagggctggagatgaactaccagcagagttttattcctagtgcttgctcttcttacttaagtaaggcaacgtgactgtccagtgaccaaccaacttgatttgcaktttcacagcacagttgggaggaaaactcaaaagccatgaattttgcagtgaaaagcaatcagataggtcatgtcattttccccaagctgtttgttatgcatttctgaagggctgaactaaagcacatgacaactacgcatagccttgatgtaggggcacata

SEQ ID NO: 85670 - DNA, 600 bp, Chicken  19866894384951_2
cacacatatatttccacccttgaatcatttttaagaggtatttctacctccagtcacaggggaattggtttgattatccttctttaattaacctagaagtgatatgaagcacttctaacctttgctcttcagcagtggagcatgagcttatctctaggagatmccactttgatgggtgagcagattgcagagattcagggctggagatgaactaccagcagagttttattcctagtgcttgctcttcttacttaagtaaggcaacgtgactgtccagtgaccaaccaacttgatttgcaktttcacagcacagttgggaggaaaactcaaaagccatgaattttgcagtgaaaagcaatcagataggtcatgtcattttccccaagctgtttgttatgcatttctgaagggctgaactaaagcacatgacaactacgcatagccttgatgtaggggcacataagctgcttctttttagtctaatgcagaggcaataaacactgagactgggagtaactctatcagctcctatacagcaacaccaacacaggctaactcgcaggacagaagacaacaaaatatctgaggccaaaaaacaag

SEQ ID NO: 85671 - DNA, 600 bp, Chicken  19866894384956_1
ctcagtggcacagctccaggaacagctagctatcctctgagacagctcctgtctcttgctgccagagggccagccccagccctgccagttttcacctaattatagccactggggggagaaacgagtgggagatggatggcataaactcaagtaactctgcctaggtagaaggtttgggaggtggagttaatgggggagccgaagaggaatgagcatgactagctgggctctgcaggtgtgggtttgcttgtgagatgcctggggttcctcatttctgtgtgctccgagaggccaggatgrgaggagtcactatggaaactccaatgttaatctctgtggagtacgtgggtttggttcctgggagcttttcgtaaatccctggagtagagattaaggcagaaaagctcttaggaatctttccctgaagttgtggcgtggctggagcctgacaggctgtagataagccccacagattgctcgagctgaaacgtgcatctctgcttattgtctcatcctaggacaaggagcagatgacgacagggatttacaccaccaagtggttcctgcagtgcttcatcgaccgggtgaggaccccgtggg

SEQ ID NO: 85672 - DNA, 600 bp, Chicken  19866894384959_1
agacaccggtttttgcaaaggattaagggccagattcttatcacagtgcctgaattctatgtgcctgtcccttcagagatagatcacacccaagcttaataacccttttacatgttcaaggggaattagcttacatcttggtgattgcaagccaaggattttttttttttatgcggacaaaacagcctccaaagaatttcacatgctggtgaccttttgtctactgactggatctgctgctcactctccactatgcagagaaatcaaaatctatcttgaaattggaaggacctcataaaygtacctgcaaaacyggtagttttactggttggcttatttagctatgttggatacttgacaccttctctgcagaagttctactcagcagcatgagaaagaataaggaatgtaatagactatggtccttgttctgtaacagattcagagaggtaaagatttttttttcagggggaaggtatgaagggtctgtggtgagatgctaccagcagagagaagatagggatggatctcgaaggagttccccagccaggacaacagcctggtattcctgcatccaaacataccttatcatctttacca

SEQ ID NO: 85673 - DNA, 600 bp, Chicken  19866894384959_2
gcaaaggattaagggccagattcttatcacagtgcctgaattctatgtgcctgtcccttcagagatagatcacacccaagcttaataacccttttacatgttcaaggggaattagcttacatcttggtgattgcaagccaaggattttttttttttatgcggacaaaacagcctccaaagaatttcacatgctggtgaccttttgtctactgactggatctgctgctcactctccactatgcagagaaatcaaaatctatcttgaaattggaaggacctcataaaygtacctgcaaaacyggtagttttactggttggcttatttagctatgttggatacttgacaccttctctgcagaagttctactcagcagcatgagaaagaataaggaatgtaatagactatggtccttgttctgtaacagattcagagaggtaaagatttttttttcagggggaaggtatgaagggtctgtggtgagatgctaccagcagagagaagatagggatggatctcgaaggagttccccagccaggacaacagcctggtattcctgcatccaaacataccttatcatctttaccagtggactccaagac

SEQ ID NO: 85674 - DNA, 600 bp, Chicken  19866894384964_1
aggacattcgacactgaaatatttaggaaacaaaatcatggacattaggaagtacccagtcacctgagaagaaaaaacaggatgcactgattattgctcatttctactctaattgaatttataattaaaatatggcttgccttcttttttagttaaatctgcctagaagaaattccaggcccttagtagctcttttatttaatctcagtgatagactttcagcatatatatatatcatataccatgtataatacgtatgctaatttctcaagaacattttaagatgcattatgaacagtyccatctggtagaatgaaccgatgagttgacaaaatgacatttttttgttattagagttgattgaaattgtaaaaaactgtgaaaggcattgattgtagagaaaatagttgataatatttgagaaagaggaggttttctgatactgaaactccaattgcaagttcacttcagactatagtatatyatgaaatttttgaaaacatatttgttctgctgtggtctgctaaattacatctggcttcaagttatagagaagttttcactctcactccgtttcataaagattgttgttaggatagc

SEQ ID NO: 85675 - DNA, 600 bp, Chicken  19866894384964_2
agtagctcttttatttaatctcagtgatagactttcagcatatatatatatcatataccatgtataatacgtatgctaatttctcaagaacattttaagatgcattatgaacagtyccatctggtagaatgaaccgatgagttgacaaaatgacatttttttgttattagagttgattgaaattgtaaaaaactgtgaaaggcattgattgtagagaaaatagttgataatatttgagaaagaggaggttttctgatactgaaactccaattgcaagttcacttcagactatagtatatyatgaaatttttgaaaacatatttgttctgctgtggtctgctaaattacatctggcttcaagttatagagaagttttcactctcactccgtttcataaagattgttgttaggatagctattaaatgtttcttcttcacaggaaacacttctgtgcatgctgtcttgcaacacgatttctgtgtaaacaatctttctgtgtagtcagtctgcccttggaatagccttcaaagccaccttttcaacctttatacttatctaatttcaggaaaacagtttgtgtttcttctgcacccttctgtg

SEQ ID NO: 85676 - DNA, 488 bp, Chicken  19866894384974_1
acaagtggctgaaacgtccacatccagttaattgccgtgcagaaaggatatttactggaagaaaaaaagtaataataaaaattaagacctggattttgcatccagaactcaaagtaaacaaatattgtgtcagtttaaaatttggtaacaacttttatcatctataaatctgaacctctgccaccttatcagaacattctgtgctgtcttccaaaaaatgcacaaccatgaaggaagaagttttcaaaacctattgcaacacacaatacacctggtttcctaacaaatattaaagcaaartaaagagttttcataatcaccaaaagttaatccaagagttcagatggtgaacaggcaacaactctgtggactttgaaaattcagtgttagtgatacgaaattgccatataacaattatcacaaatttatttttggatggcatcacttttggttggtgggtttttaatttgggataatatagattcatt

SEQ ID NO: 85677 - DNA, 593 bp, Chicken  19866894384993_1
ctttctgctgtgaaatgacacctcccacgctcacatacacacacaaaacagtctcttgctacttacatatagcatgccctaaaatgttaattaatactgtaaaactgtttcacctccctgagcaactgaaaagcatcagaagctgtgatccatttttgcctctcttgctttcacttttaagcacgtgtctttacatttatagctagcttaagcctacatctctatttcatgatccctccagttacagttaaactcctcatcgatgtaggtggaccccaatgcatgacatgcggggtaaayagaatagatagaacactgtgaagagtggttgtagcatacgactacagcatttcatttccagcttacctactaagaatatctacatactttgatttccccccatggtcccttcacttccaatgctgcttttatttttatttttttttaatttactgattactattgaacaccatacagtagtacggtgacaacaagaaattgcacctgctacatgaattatgtattctcttttgcaaaaccacccccgcccccccaaaaaagacataaacagcaaatggtgcgcattgaatggt

SEQ ID NO: 85678 - DNA, 600 bp, Chicken  19866894384997_1
tctatttaaaatatttgaacctgtaattgtctaatgctgacctgatccacctacaaagcacactgccgtgcaaaggcatttttgcttaactcaagcttgttttctccacatcagacgtccagtgtctggcataataaaatgcatgctgttgttggcatgaagttctattacattcaggatgatggatgaaaacctgcattttaacctcaaatatttgcatgatagcttttttttgaggaaatgacagagatcccagagttctactgatattaataaatgacaccaatataagaaatgtaygggttaatcatacccttgtaatcataatgagtgttacagtttcattccctctgaaacacaaatgaagagcaatttagtgaagaaagttttgtttcagaagtaaacactggcagcacaaacacacacacaaagaaagatcagaatggagcatttccactagcaaatctataacttcactttcaaatccaattctagtgttagctgaattaccacttttgttacagttcttaaaaagttggttcatcacctttgaagtccttcaaagtcaactgctgcacctgtatatatgtgcctttttta

SEQ ID NO: 85679 - DNA, 600 bp, Chicken  19866894384997_2
cagtctcaccttggtgcccggggaaggttatggaatggacaatctcaggagccatcatggaccacttaaaggtcaaccaggggatcaggcccagtcagcatgggtttatgaacggtagatcctgtttgacaaacctgatttcactctatgataaggtgacccacttagtggatgagggtaaggctgttgatgtgggctacctggacttcagtaaggcctttgacacagtcctccacaacatccttgtggagaaactggctgcccacagtttggatgggcgcacgctctgctgggtgaaayattggctggatggccaggcccaaagagttgtggtcaatggagttaaatccagttggtggccagtcatgagcggtgtctccttggaggggcggagggcttggtactggggccgcttctatttaacacctttattaatgatcttgacaaggggaattgagtgcaccctcagtaagtttgcagatgacaccaagttgggaggaagtgtcgatctgcctgaggggagaaaggcactacagagggacctggatagactggatcgatgggccaaggtcaatggcatgcgtttcaatagggccaaga

SEQ ID NO: 85680 - DNA, 600 bp, Chicken  19866894385012_1
aaacttaacgttagtgtgttttccacccagtgacacactgtggaaaccagttatttgtacacagtggttcacccgatcgctgccaccaggctcagcacattcaggcagtgggagtgagccctgattccaaaagaaccccaagaagagaagtcaaacgttcccctgtacacagcgactgcaatcctctacagacaaaaatgtacagaatgtggtaggcaggtcctgaaagcatcctctgatcggcgaatacaaaggggttgggagatgttaaatgcttcgtggttttttttttttctgtckgtaggaaaattgtaatatgtcttacagtacctgctgttgctgaagatgtgttaaatctgcagccccaatttcaactgaaggtgtctcgccgtttgatctcacctcccgtaggctgcactctagtaagtggttgccaccgctcgctccattctgaatggctgaaccgttactttttgtctcagtcccagattcttgcatcatgactcaaaaacctgaaataatttaggggaggggaaaaaaaaaaagcagctgttaaaacagttgctgtatataaggagacatgccctgttttaaatcctg

SEQ ID NO: 85681 - DNA, 600 bp, Chicken  19866894385016_1
tttcacttaattagtttgggtggttaactcaaaatcccttgtaaagcttcatggtaatcaaaattttaccagtatttttagagataatttttttgtagccaacctgtttgaatatttacatagaaaattataccacagctgaaacacagtaaacacacattcctggtagataatagaacctttcaggaattgatgctaggtcctaaatgcaattaaatatgcctctcagtttgtaatgttgcatatcaaaaaacccgaatggcaccatggtaaatccaattttagctttcaagcccttcytcmccccttctyttctactttgtgctaatcatcagaaaggttggcactgccttgtcacattcctattgaactgaactgttggcacaccagagggtcctgtcacgcacgttgagttttctcactggcactgacaacgaagacaaatcttacacagcatcggtgcactggcacacaaggagtttataacttctgctgacaaacataccatctcagcagtgttgccacctcctgctagttggagataagtctcaagcttagttcagccaatgtcaaaacccatcgatatgtttatacagaaat

SEQ ID NO: 85682 - DNA, 600 bp, Chicken  19866894385016_2
cacttaattagtttgggtggttaactcaaaatcccttgtaaagcttcatggtaatcaaaattttaccagtatttttagagataatttttttgtagccaacctgtttgaatatttacatagaaaattataccacagctgaaacacagtaaacacacattcctggtagataatagaacctttcaggaattgatgctaggtcctaaatgcaattaaatatgcctctcagtttgtaatgttgcatatcaaaaaacccgaatggcaccatggtaaatccaattttagctttcaagcccttcytcmccccttctyttctactttgtgctaatcatcagaaaggttggcactgccttgtcacattcctattgaactgaactgttggcacaccagagggtcctgtcacgcacgttgagttttctcactggcactgacaacgaagacaaatcttacacagcatcggtgcactggcacacaaggagtttataacttctgctgacaaacataccatctcagcagtgttgccacctcctgctagttggagataagtctcaagcttagttcagccaatgtcaaaacccatcgatatgtttatacagaaatccc

SEQ ID NO: 85683 - DNA, 600 bp, Chicken  19866894385016_3
agtttgggtggttaactcaaaatcccttgtaaagcttcatggtaatcaaaattttaccagtatttttagagataatttttttgtagccaacctgtttgaatatttacatagaaaattataccacagctgaaacacagtaaacacacattcctggtagataatagaacctttcaggaattgatgctaggtcctaaatgcaattaaatatgcctctcagtttgtaatgttgcatatcaaaaaacccgaatggcaccatggtaaatccaattttagctttcaagcccttcytcmccccttctyttctactttgtgctaatcatcagaaaggttggcactgccttgtcacattcctattgaactgaactgttggcacaccagagggtcctgtcacgcacgttgagttttctcactggcactgacaacgaagacaaatcttacacagcatcggtgcactggcacacaaggagtttataacttctgctgacaaacataccatctcagcagtgttgccacctcctgctagttggagataagtctcaagcttagttcagccaatgtcaaaacccatcgatatgtttatacagaaatccctcagattac

SEQ ID NO: 85684 - DNA, 599 bp, Chicken  19866894385022_1
  misc_feature (1)..(45): n is any nucleotide
nnnnnnnnnnnnnnnnnnnnnnnnnnnnnnnnnnnnnnnnnnnnntactggagctgcaagtctaattaattaatgtttgtataatgttccaagattccccagacagaacatgtttcagaagtgagaaatattacaagtgatcttcactgaagtattaacgattcagaagacaggaaagcagccttgttataaaagggcttataacgggtttctcctgcagcagtttgctaacaggtgcaatcagcagcaaagcaagtgcaaggctccgctcccagctctggtgcctcagtgcagaacagwggagggatgtgcacagtacagggcycacatcatgctgctgctgctaatacggatcagaactttgttacttgaagcagtgtcaggatcttcaggtggaaacacacccacaggacctatgagcatacygatgtggaaacaccrggttatttctccagattgctctccttggrgtgacatgcaacaaagagacagcttggcacagcagagtgctgggtggctgcaacacaccctctgtactcttgtctagcagagcacctgtgatcacgcattgtggcatactgcatgtcgtgtttcattat

SEQ ID NO: 85685 - DNA, 599 bp, Chicken  19866894385022_2
  misc_feature (1)..(20): n is any nucleotide
nnnnnnnnnnnnnnnnnnnntactggagctgcaagtctaattaattaatgtttgtataatgttccaagattccccagacagaacatgtttcagaagtgagaaatattacaagtgatcttcactgaagtattaacgattcagaagacaggaaagcagccttgttataaaagggcttataacgggtttctcctgcagcagtttgctaacaggtgcaatcagcagcaaagcaagtgcaaggctccgctcccagctctggtgcctcagtgcagaacagwggagggatgtgcacagtacagggcycacatcatgctgctgctgctaatacggatcagaactttgttacttgaagcagtgtcaggatcttcaggtggaaacacacccacaggacctatgagcatacygatgtggaaacaccrggttatttctccagattgctctccttggrgtgacatgcaacaaagagacagcttggcacagcagagtgctgggtggctgcaacacaccctctgtactcttgtctagcagagcacctgtgatcacgcattgtggcatactgcatgtcgtgtttcattatttcattattgtggttgcccctgtta

SEQ ID NO: 85686 - DNA, 600 bp, Chicken  19866894385022_3
aatattacaagtgatcttcactgaagtattaacgattcagaagacaggaaagcagccttgttataaaagggcttataacgggtttctcctgcagcagtttgctaacaggtgcaatcagcagcaaagcaagtgcaaggctccgctcccagctctggtgcctcagtgcagaacagwggagggatgtgcacagtacagggcycacatcatgctgctgctgctaatacggatcagaactttgttacttgaagcagtgtcaggatcttcaggtggaaacacacccacaggacctatgagcatacygatgtggaaacaccrggttatttctccagattgctctccttggrgtgacatgcaacaaagagacagcttggcacagcagagtgctgggtggctgcaacacaccctctgtactcttgtctagcagagcacctgtgatcacgcattgtggcatactgcatgtcgtgtttcattatttcattattgtggttgcccctgttatgaatgaatagacacacccagcttcttcctgagatcttctgattagatactctcctgcaaattaytcctttaatgaaggtttgtgggaaagtctgcagtcat

SEQ ID NO: 85687 - DNA, 600 bp, Chicken  19866894385022_4
cttcactgaagtattaacgattcagaagacaggaaagcagccttgttataaaagggcttataacgggtttctcctgcagcagtttgctaacaggtgcaatcagcagcaaagcaagtgcaaggctccgctcccagctctggtgcctcagtgcagaacagwggagggatgtgcacagtacagggcycacatcatgctgctgctgctaatacggatcagaactttgttacttgaagcagtgtcaggatcttcaggtggaaacacacccacaggacctatgagcatacygatgtggaaacaccrggttatttctccagattgctctccttggrgtgacatgcaacaaagagacagcttggcacagcagagtgctgggtggctgcaacacaccctctgtactcttgtctagcagagcacctgtgatcacgcattgtggcatactgcatgtcgtgtttcattatttcattattgtggttgcccctgttatgaatgaatagacacacccagcttcttcctgagatcttctgattagatactctcctgcaaattaytcctttaatgaaggtttgtgggaaagtctgcagtcatcctcaaacaacactc

SEQ ID NO: 85688 - DNA, 600 bp, Chicken  19866894385022_5
caggaaagcagccttgttataaaagggcttataacgggtttctcctgcagcagtttgctaacaggtgcaatcagcagcaaagcaagtgcaaggctccgctcccagctctggtgcctcagtgcagaacagwggagggatgtgcacagtacagggcycacatcatgctgctgctgctaatacggatcagaactttgttacttgaagcagtgtcaggatcttcaggtggaaacacacccacaggacctatgagcatacygatgtggaaacaccrggttatttctccagattgctctccttggrgtgacatgcaacaaagagacagcttggcacagcagagtgctgggtggctgcaacacaccctctgtactcttgtctagcagagcacctgtgatcacgcattgtggcatactgcatgtcgtgtttcattatttcattattgtggttgcccctgttatgaatgaatagacacacccagcttcttcctgagatcttctgattagatactctcctgcaaattaytcctttaatgaaggtttgtgggaaagtctgcagtcatcctcaaacaacactcattcatactgaatgggggctgtgaggtct

SEQ ID NO: 85689 - DNA, 600 bp, Chicken  19866894385022_6
caggtggaaacacacccacaggacctatgagcatacygatgtggaaacaccrggttatttctccagattgctctccttggrgtgacatgcaacaaagagacagcttggcacagcagagtgctgggtggctgcaacacaccctctgtactcttgtctagcagagcacctgtgatcacgcattgtggcatactgcatgtcgtgtttcattatttcattattgtggttgcccctgttatgaatgaatagacacacccagcttcttcctgagatcttctgattagatactctcctgcaaattaytcctttaatgaaggtttgtgggaaagtctgcagtcatcctcaaacaacactcattcatactgaatgggggctgtgaggtctttacagctgtgcttcatcctctttgcctatgtctacagtagctggatttttccagcaagaccccagcagccttcagagagatcaatgaggctgagcagctgcagaacataaggtcaactcacaaactcctttctccctcagcatgagacagtggggtgtaggtgatttataaactggagttggaggtgattgcagtcttcagggctaattacacaattt

SEQ ID NO: 85690 - DNA, 600 bp, Chicken  19866894385027_1
cctaactagctattagacaacagctagaagacctctcaaagaattctcactgagcagaagactgaatacagtcacaactctctttggggttctttccttaattgcccaaggtcctaattctgccctggagtaagacatatctttcatggtgtcatctgtacagttctttttgactaggtccggagagtttgtttggtaatggtgactggcaaactctgaattatttatttatatacaagagaaaaattcacagaaaattcttctttgtgcacttatgttcagtgttgagtaaattctcartcaaaggcaatggcaacatttttctgtctcttctcctatctcactagctgcatgttgtgcaagtacaagtgatgaaaaggtatgcattgactgcagggacaatgatagacaraagataagagagataaattctgaaattgtattatgttgctgatattttactgaatttacttctggtacactggcggaaatcagactggcaaaaactttcttaatttagcctggataggattttcatgattgaacttaaatttgcaagaactgtgccattgtacttcagcatacaaacaaaatagttac

SEQ ID NO: 85691 - DNA, 519 bp, Chicken  19866894385027_2
cctaattctgccctggagtaagacatatctttcatggtgtcatctgtacagttctttttgactaggtccggagagtttgtttggtaatggtgactggcaaactctgaattatttatttatatacaagagaaaaattcacagaaaattcttctttgtgcacttatgttcagtgttgagtaaattctcartcaaaggcaatggcaacatttttctgtctcttctcctatctcactagctgcatgttgtgcaagtacaagtgatgaaaaggtatgcattgactgcagggacaatgatagacaraagataagagagataaattctgaaattgtattatgttgctgatattttactgaatttacttctggtacactggcggaaatcagactggcaaaaactttcttaatttagcctggataggattttcatgattgaacttaaatttgcaagaactgtgccattgtacttcagcatacaaacaaaatagttacgatgatgacaattatcataggtattacatgg

SEQ ID NO: 85692 - DNA, 549 bp, Chicken  19866894385033_1
tttgtgacttttattagaacaaatgaagttaactgaaaggtttgatttctgtaaagcagtgcgtgcatatttagtaacacaaatgatttagagctattgttaaatcccccgaagcatacaaatttttgttaagcttgattagtatttgctagttccatatgttcaagatctttcaattttagaccgtctgttgttcagtaaggaattaatttccaatttaatctttctatctgcagtttgtactttgcaggtacaaaacggtatcagtgatcattagaataaagtaagttgtgctatttktattaaaatacagactcctttcaagatcatgctccacaaagctaatggcacttcaacaaaaagtagctttgtgcaatctgtacatataccctatgtaatattcccgtgttttcctaaaatacacctagaggatttgattgtcatttgggaatgctcaaataggttggaatcttttctgtcttacaaaagaactcttcttaaagctccagttaagtgagctatatagcttagaaaacatttgctttgagt

SEQ ID NO: 85693 - DNA, 600 bp, Chicken  19866894385034_1
agaagaaaggggaggaaatctcagatgtttgttaataaacaatcaagacagaaaatctgatgacaaagttgttcagagactttctgaatgcagttttctgcaggacgattcagtagaatgctatatagaaaaattataaatatcgaccaagaaagcacaaaaaataatcaaaactgaatcaaatgtacatcttcacaatgaatcaatatatgattcctaattttcagatatggtaccttaagcacaaagttctggttgtgtaaattcaattgtatatataactgtcctgccaggaaaaakaaaagaaattaaaaaacatagctgaagacaccttttgaaatttccaaggcaacataaagaaggcaaacaactagtcaatgttcaaacattgaggaagcttcartatgctgcaataaaaagctatccatgaagaaaataattcataatacaggggcaaaaaaataaaataaaataaaacaaaatctgtgtaaaacaagaaagatgagaaaatagatcaaaaagttccattcaagtttggtgactgcttgataagtggttcagaactgctattcacatatcatatataggatggatgacaca

SEQ ID NO: 85694 - DNA, 600 bp, Chicken  19866894385034_2
gacgattcagtagaatgctatatagaaaaattataaatatcgaccaagaaagcacaaaaaataatcaaaactgaatcaaatgtacatcttcacaatgaatcaatatatgattcctaattttcagatatggtaccttaagcacaaagttctggttgtgtaaattcaattgtatatataactgtcctgccaggaaaaataaaagaaattaaaaaacatagctgaagacaccttttgaaatttccaaggcaacataaagaaggcaaacaactagtcaatgttcaaacattgaggaagcttcartatgctgcaataaaaagctatccatgaagaaaataattcataatacaggggcaaaaaaataaaataaaataaaacaaaatctgtgtaaaacaagaaagatgagaaaatagatcaaaaagttccattcaagtttggtgactgcttgataagtggttcagaactgctattcacatatcatatataggatggatgacacagaacctcatactgagtaaatcattacagtattaaaaatctgacatctagacacactactatattgcaaggttattctgcaaatcaagaattaccactaggtaa

SEQ ID NO: 85695 - DNA, 600 bp, Chicken  19866894385038_1
ctacttaaatccaaggaagtgtccgacaaaaaacttgactattctgaaggagaagggaaagtgaaatctattttaataaagacaagaatcactaagactacatttgcagttctgaatccctagacactgccttttaaaccattccttttagtattactagaatagagcagttctattttaactaaatttcctatctgcaaaaacctttatttcatcctttttgtctcaaaatacgcaagttattttttcacaatggcatgggaagcatggaataatcctgtcctcacaggaaaggaacaraaagtccaaattcatcagttttgctttacatgagaattccttcccatacctctagtctcagcatagcagagattaaatgatggcttaagcttgactcccttgagatatacacttaaagctgtttgaacatttctcctttatcctttttctaagagctatagtactaaaaagaattttcttcctcaaagaccactgaggtctgatagagataatattaaaaatttggtggattttagtgctcatgaaagttggagactgaacacatctcctagaagcaagtcatagatatgcatcactaaa

SEQ ID NO: 85696 - DNA, 600 bp, Chicken  19866894385041_1
aaatgctgcagcatgtttgcatttgatttcataagacacccagatccagttggtagattaaaaaaaaaaattaaagaaaaaaattacattatcagagctgcctatttcctttcataccctgagcagggtagtcggacccgaacaactaaaggaaacagatgggcctggaagtttaagccttgaaggaagaaaatcttcagtaaataaaaatgcttagagtcacagaggcaattgttccatagcttgtaaaaatagacagcttcccagctctgcagcttcagcagaactccatatctagcratgtcatactcttaaattcccatgccatctcctggtttctatacctactacgtttctaaatcatcttacataccaaagttaataactggaagagaagaatgcttgcaaaggtccttagtagcaaattctctcgttcttctaagactccttatctttgagtggcttcttgtcattgagagaaactttgctgataaatctactgaaaaaccactcttatttaagaagaagccttccctggaagaagccaaagaagttgatagttttaatctgaaactgttctatcctctgccctgccatact

SEQ ID NO: 85697 - DNA, 599 bp, Chicken  19866894385046_1
  misc_feature (1)..(41): n is any nucleotide
nnnnnnnnnnnnnnnnnnnnnnnnnnnnnnnnnnnnnnnnncaagggtgtcctccagatacaggactgagagcagaagacagtgggatttttcactgcgttgccaccaatattgctaacgtgaagttcagccgggaggccaggctcactgtgtcaggtcagtaccagcacatactatcctggctccctttccttctttttctacctgttgctgttctagaatgggaccatttaagagagcttcaggctgacagcactgagaagtgttcctctgtcaggcaaaagcactttccttgttctkgattagtccatttggtagcagataaatctgtctcttagccttcaaattagtgccagtttctggagagagggaggacagtgtgaacaagagctacagcagctttcttttggaaatgtggaagactcatcatttccttatgagacatgcccaccctgtaagtaattgcagcacacatggtgatcaattatttatctaataggggaattatgttctgtaggctgttagtgttacactgcaaccagagtgagctaacctttcttttgccagatgagaaggaaaaaacccccaagcaccccagt

SEQ ID NO: 85698 - DNA, 600 bp, Chicken  19866894385050_1
atataattgttttcttcagagcatcaggtatgatgctatgttttggttctaggagaaaaacaacattgattacacactaatgtttatagctgctgctaagcagtattgtatagagccaagaccattcacagagaagggccaaaggagctgggagggaacagacttaaattggccaaagggatattccatacaatatgatttcatgtaaaggagtctgaagggggtgggatatcataattactattgttttcctcttctctgtcttagtaaattgttttatctccactcaaaatttctacktttttttttttttttttttaattttctcccccatcccactggaaaggggagaaatgagtgaatgactgtgtagtgctgagccacctgctgggttatcccatgcaccaaagaaatgcatattttctcacaggacagcccaygtgatgataactttcagaaatatcacatttggcaatmaargataatatgcagtggattaaaaactaaaagacaaaaaaacctgttcaaatagaccaccagtaaatcccagtgctttcttctacactcatgcagtcctcaagcgcacgtgacagggaggct

SEQ ID NO: 85699 - DNA, 600 bp, Chicken  19866894385050_2
aaaggagctgggagggaacagacttaaattggccaaagggatattccatacaatatgatttcatgtaaaggagtctgaagggggtgggatatcataattactattgttttcctcttctctgtcttagtaaattgttttatctccactcaaaatttctacttttttttttttttttttttaattttctcccccatcccactggaaaggggagaaatgagtgaatgactgtgtagtgctgagccacctgctgggttatcccatgcaccaaagaaatgcatattttctcacaggacagcccaygtgatgataactttcagaaatatcacatttggcaatmaargataatatgcagtggattaaaaactaaaagacaaaaaaacctgttcaaatagaccaccagtaaatcccagtgctttcttctacactcatgcagtcctcaagcgcacgtgacagggaggctagacagcaggcaagagaggtttgccttaatttctgaaagtaatgtcacagatctgattgccagtgcaagcatttaattcacagtgcctctttcagaggttgaaatagaacatgctgcagctgaaggccatttcctagtca

SEQ ID NO: 85700 - DNA, 600 bp, Chicken  19866894385050_3
gggatattccatacaatatgatttcatgtaaaggagtctgaagggggtgggatatcataattactattgttttcctcttctctgtcttagtaaattgttttatctccactcaaaatttctacttttttttttttttttttttaattttctcccccatcccactggaaaggggagaaatgagtgaatgactgtgtagtgctgagccacctgctgggttatcccatgcaccaaagaaatgcatattttctcacaggacagcccaygtgatgataactttcagaaatatcacatttggcaatmaargataatatgcagtggattaaaaactaaaagacaaaaaaacctgttcaaatagaccaccagtaaatcccagtgctttcttctacactcatgcagtcctcaagcgcacgtgacagggaggctagacagcaggcaagagaggtttgccttaatttctgaaagtaatgtcacagatctgattgccagtgcaagcatttaattcacagtgcctctttcagaggttgaaatagaacatgctgcagctgaaggccatttcctagtcagtgtcaaacacagtttgctgtctatgtgcatggggct

SEQ ID NO: 85701 - DNA, 600 bp, Chicken  19866894385050_4
atattccatacaatatgatttcatgtaaaggagtctgaagggggtgggatatcataattactattgttttcctcttctctgtcttagtaaattgttttatctccactcaaaatttctacttttttttttttttttttttaattttctcccccatcccactggaaaggggagaaatgagtgaatgactgtgtagtgctgagccacctgctgggttatcccatgcaccaaagaaatgcatattttctcacaggacagcccaygtgatgataactttcagaaatatcacatttggcaatmaargataatatgcagtggattaaaaactaaaagacaaaaaaacctgttcaaatagaccaccagtaaatcccagtgctttcttctacactcatgcagtcctcaagcgcacgtgacagggaggctagacagcaggcaagagaggtttgccttaatttctgaaagtaatgtcacagatctgattgccagtgcaagcatttaattcacagtgcctctttcagaggttgaaatagaacatgctgcagctgaaggccatttcctagtcagtgtcaaacacagtttgctgtctatgtgcatggggctaac

SEQ ID NO: 85702 - DNA, 600 bp, Chicken  19866894385053_1
gtaaagctccatttataaatattttataaaggttaaatgacaacatgttagaaagatggtttaagatttatgtattacagtcgacggtatctttaggtttaatggacagttaaaagcaatgattataagcaccctattggattgtaattgctgatctgccttttaatcaaatatctattaagccttttattaaccctctgtatgaccctcactataaattcccatcctgataaatattcctggtttttggtcctatccacttgacaatttccctagattagaaagcccattttagtcaaygtttgtaattaagagtagttaatacactatgttatgccaccagtggaaaacttaagtttaccacagttctctgtagtagttaagctcttgcccacttaggaagatagcgttgcttatagaaagcacatttcaaagcaatttaaaattagctccttctttctgctattatggtttactgatgtcctccccctcttcctttcagtatgttcctcgtgggatatatggagtcagtagcagtgaataaaatgctacaattaaactaaatgcagtaagcttcagcaggcacaattcctgatcctg

SEQ ID NO: 85703 - DNA, 599 bp, Chicken  19866894385054_1
  misc_feature (1)..(203): n is any nucleotide
nnnnnnnnnnnnnnnnnnnnnnnnnnnnnnnnnnnnnnnnnnnnnnnnnnnnnnnnnnnnnnnnnnnnnnnnnnnnnnnnnnnnnnnnnnnnnnnnnnnnnnnnnnnnnnnnnnnnnnnnnnnnnnnnnnnnnnnnnnnnnnnnnnnnnnnnnnnnnnnnnnnnnnnnnnnnnnnnnnnnnnnnnnnnnnnnnnnnnnnnnnnataaatagggcctgagctagctccactgacttctcatagacatttcccctatggagaagcatcacagccaggggagcttggtggatacccccacacscatgtgcccctttcctcctacgggcaggtgctggccgtcctgtggctgaaggcagcctcccccatggccagtgccattcccatggctggtggccgcagtgaagcagtggtcagcctaacctaaacacagccccacattcacagtgtttgcagcccactgctgctactcctcctccctcagcccaggacgactatcgtgctgcagaagatgaagagcaaacaataaaaacccaaagaaagccaaacttaccagcttccctcatccaaatgaagcgccatgctggacaggaaaggacaaca

SEQ ID NO: 85704 - DNA, 599 bp, Chicken  19866894385059_1
  misc_feature (1)..(117): n is any nucleotide
nnnnnnnnnnnnnnnnnnnnnnnnnnnnnnnnnnnnnnnnnnnnnnnnnnnnnnnnnnnnnnnnnnnnnnnnnnnnnnnnnnnnnnnnnnnnnnnnnnnnnnnnnnnnnnnnnnnnntttttaatgaaagaccttaatgtgtgttttagtgctattcataaatgaataagtaagagggaaagtgtatgattgtagctgttctatagccctaaatagaacttatgtgtattcttaaatgacatcatgtctttctaagagaggggaaaaaaagagaaatccatcccatcagatattattatmaatggcagagacaaagaatcagttccaaaaaaaacttttaagtaagacttttctgtggttactgtaaataataggaagaaacaaaagcatgattacttaattttcctgctcttacatctttaatgtatttttccatgctagattggagaactcattaccaagtctttgttcctactgtagacactcacaaaacgagaaggatttatttcttaatcttctacttggtaatttaaatagtttcacctctcccttattctttctttgtatggcatattttataattctttctrtataggttg

SEQ ID NO: 85705 - DNA, 600 bp, Chicken  19866894385059_2
tattattatmaatggcagagacaaagaatcagttccaaaaaaaacttttaagtaagacttttctgtggttactgtaaataataggaagaaacaaaagcatgattacttaattttcctgctcttacatctttaatgtatttttccatgctagattggagaactcattaccaagtctttgttcctactgtagacactcacaaaacgagaaggatttatttcttaatcttctacttggtaatttaaatagtttcacctctcccttattctttctttgtatggcatattttataattctttctrtataggttgttattcatcccagtgtgataactgaatcttgttagagagactaaaagtaagaagtcccatctacctctccctcacctcttttcacttctgtgaaaaataaccatgggtgtagttaatctgttcaagttgttatttttcataaattattttaattattaacttatctgttgctgaactgttgtaagtttagacaaatatgtcataatgtgaggataaaatacrcagtattacaagagtactctcttactattcttacaaaacctagtatttcaggtattgtccctgttggta

SEQ ID NO: 85706 - DNA, 600 bp, Chicken  19866894385059_3
ttggtaatttaaatagtttcacctctcccttattctttctttgtatggcatattttataattctttctrtataggttgttattcatcccagtgtgataactgaatcttgttagagagactaaaagtaagaagtcccatctacctctccctcacctcttttcacttctgtgaaaaataaccatgggtgtagttaatctgttcaagttgttatttttcataaattattttaattattaacttatctgttgctgaactgttgtaagtttagacaaatatgtcataatgtgaggataaaatacrcagtattacaagagtactctcttactattcttacaaaacctagtatttcaggtattgtccctgttggtatggtcaaagtagtcttcttttgttgtttgctctcgttatggggaccaaaaaaaaaaaaaaaaaaaaaaaaggactgatcactactcatttttttgaatgaaagacactaatttaagaaacaatttcctgaatgttgatcccaaaaaacaagatgaaatttcatattattctgatgcagttgcttcaactcagacaaacagtggtaaggagctgtacacctcaggatactga

SEQ ID NO: 85707 - DNA, 600 bp, Chicken  19866894385067_1
cctgatagctcatttcccaaacaacccctggctggggctgggactctcttgccctggattctccctaagcacagacaggaagacacagacaggggctgcttctgagagctcccacgcataaagaagtcattctggaaccaaagggtaattccggctcttgctgtgaactgctcacaccacaaatatcttctcattatcagcgacttgtcccatacgtctgctgcatagattgtcttgtagcatttcctttcttctgagatgtctgtatattccttttcgtgccgtgagattcagtgtgcrctttcccatagcgctccctgggctgtgtctgtgctgcagtgtgttcccccattgggaacagacatttggctctgtgaaaygcctgccagctccattctgcagcctgggaccccctgctcacaaagccctcactatcctacgcctctccatgcaccccgcatctgtgtgtttatcttcacctgattagggctcatctgctgcagagtttctgcagatgtttctttatttaaaccatgctgtaggaagggaaggaaaggagacccacagaggaaggaggtgtgttccataggatcccattta

SEQ ID NO: 85708 - DNA, 600 bp, Chicken  19866894385067_2
agacacagacaggggctgcttctgagagctcccacgcataaagaagtcattctggaaccaaagggtaattccggctcttgctgtgaactgctcacaccacaaatatcttctcattatcagcgacttgtcccatacgtctgctgcatagattgtcttgtagcatttcctttcttctgagatgtctgtatattccttttcgtgccgtgagattcagtgtgcrctttcccatagcgctccctgggctgtgtctgtgctgcagtgtgttcccccattgggaacagacatttggctctgtgaaaygcctgccagctccattctgcagcctgggaccccctgctcacaaagccctcactatcctacgcctctccatgcaccccgcatctgtgtgtttatcttcacctgattagggctcatctgctgcagagtttctgcagatgtttctttatttaaaccatgctgtaggaagggaaggaaaggagacccacagaggaaggaggtgtgttccataggatcccatttatcccgaggtggctctgatgccaggaaagcactcacatcrttcataatttgtctcatttgttcttccctcccactcccccc

SEQ ID NO: 85709 - DNA, 600 bp, Chicken  19866894385067_3
tgtgttcccccattgggaacagacatttggctctgtgaaaygcctgccagctccattctgcagcctgggaccccctgctcacaaagccctcactatcctacgcctctccatgcaccccgcatctgtgtgtttatcttcacctgattagggctcatctgctgcagagtttctgcagatgtttctttatttaaaccatgctgtaggaagggaaggaaaggagacccacagaggaaggaggtgtgttccataggatcccatttatcccgaggtggctctgatgccaggaaagcactcacatcrttcataatttgtctcatttgttcttccctcccactcccccctcacaaaaacaccaacaggaattccttgcttcctcgcttgctaattaaatctcctcgcctgcaataaaccacgaaggtctatcaatgargcagtatgcggtcgaatgatggctggaacagctcagcaggaaatttggtaggaaaatacgacttcagcagcttagcaggtttatttttagggctcgtgagctcgtttaactcacagatgcgaactgccggatcgctattgttgtcggatggatccggtcctgcagggctg

SEQ ID NO: 85710 - DNA, 600 bp, Chicken  19866894385067_4
ttatcttcacctgattagggctcatctgctgcagagtttctgcagatgtttctttatttaaaccatgctgtaggaagggaaggaaaggagacccacagaggaaggaggtgtgttccataggatcccatttatcccgaggtggctctgatgccaggaaagcactcacatcrttcataatttgtctcatttgttcttccctcccactcccccctcacaaaaacaccaacaggaattccttgcttcctcgcttgctaattaaatctcctcgcctgcaataaaccacgaaggtctatcaatgargcagtatgcggtcgaatgatggctggaacagctcagcaggaaatttggtaggaaaatacgacttcagcagcttagcaggtttatttttagggctcgtgagctcgtttaactcacagatgcgaactgccggatcgctattgttgtcggatggatccggtcctgcagggctgtgactcactgcaatggctttggcaacaggcagtgatttgcttccctcctgcagccgaagatgcacgatagacacaacatgtttggaaagctcctttccagtttgctctggttaaaaaccctcgtttgcaa

SEQ ID NO: 85711 - DNA, 599 bp, Chicken  19866894385069_1
  misc_feature (1)..(31): n is any nucleotide
nnnnnnnnnnnnnnnnnnnnnnnnnnnnnnncatattgatgtcactttgctggatgtgagccaagcatccaaagggcagtgaggcggttaacatgataatcacgttgcatcccagcctctccgtatgacagagctctccgctcctgttcatgatgctgccacgttttcctctgggggcacgtgtgacttaagcaaagtggcagaagggaaagaggcaagtcagcattcatcggggaaaaaaatatctgtagccagaaacagtaatactggtgattacgataagcatcaggagtgattacyttccctgtgggatgctgtcagctgggactgatacacctctgaggattgagaaccccaataagcattgggagagctggaaaatgagtaatcaagtgaaagcaggaggaggagctgtcatctcactagggctggtgctatggctctgagggaagatgagagctgcagcaactggaggaagggcagctggctgcaggcagcagttagcatctggctcagcatccagctctactgaactctcacaacgtggggctaccaacttctgggcatagtttagtccctttgacaaggattagggcagt

SEQ ID NO: 85712 - DNA, 600 bp, Chicken  19866894385069_2
aggcagcagttagcatctggctcagcatccagctctactgaactctcacaacgtggggctaccaacttctgggcatagtttagtccctttgacaaggattagggcagtctgagccaccgctgttctgcagagacagaacagggcacagatgtttgtataaaatgagacctaagctaaggctttagattgctggagaaccttccactgatgctggtggcctcgggatcagactccaagtctctgcagcttaaagaaatctgaatcttattgaactcagagtcatcctagacatttgccagyrttcccagccctggcatggtcttcatcttccttctgtatggcagtttccttcctgaaataatcttactatggaaatatcaccayagtatctttcctctgcgtttcccactggcactgagggaccgctctgcagtcagccatggttctgtcattctttgccattgagtcaggggatgcattttaatggaggatgtagcaacattgctcatgcaatgcacttcccatctgaascagcaaactgattgctgtgatccatctgtgacacagctgtgatatcaccagctgaaccaggaacacttc

SEQ ID NO: 85713 - DNA, 600 bp, Chicken  19866894385069_3
ggcagcagttagcatctggctcagcatccagctctactgaactctcacaacgtggggctaccaacttctgggcatagtttagtccctttgacaaggattagggcagtctgagccaccgctgttctgcagagacagaacagggcacagatgtttgtataaaatgagacctaagctaaggctttagattgctggagaaccttccactgatgctggtggcctcgggatcagactccaagtctctgcagcttaaagaaatctgaatcttattgaactcagagtcatcctagacatttgccagyrttcccagccctggcatggtcttcatcttccttctgtatggcagtttccttcctgaaataatcttactatggaaatatcaccayagtatctttcctctgcgtttcccactggcactgagggaccgctctgcagtcagccatggttctgtcattctttgccattgagtcaggggatgcattttaatggaggatgtagcaacattgctcatgcaatgcacttcccatctgaascagcaaactgattgctgtgatccatctgtgacacagctgtgatatcaccagctgaaccaggaacacttcc

SEQ ID NO: 85714 - DNA, 600 bp, Chicken  19866894385069_4
ccctttgacaaggattagggcagtctgagccaccgctgttctgcagagacagaacagggcacagatgtttgtataaaatgagacctaagctaaggctttagattgctggagaaccttccactgatgctggtggcctcgggatcagactccaagtctctgcagcttaaagaaatctgaatcttattgaactcagagtcatcctagacatttgccagyrttcccagccctggcatggtcttcatcttccttctgtatggcagtttccttcctgaaataatcttactatggaaatatcaccayagtatctttcctctgcgtttcccactggcactgagggaccgctctgcagtcagccatggttctgtcattctttgccattgagtcaggggatgcattttaatggaggatgtagcaacattgctcatgcaatgcacttcccatctgaascagcaaactgattgctgtgatccatctgtgacacagctgtgatatcaccagctgaaccaggaacacttccaactctgagttctttcttaatggarctatascctactttaaaaacatccacaatgaacttatctccagttggatctaaatcct

SEQ ID NO: 85715 - DNA, 600 bp, Chicken  19866894385069_5
tccaagtctctgcagcttaaagaaatctgaatcttattgaactcagagtcatcctagacatttgccagyrttcccagccctggcatggtcttcatcttccttctgtatggcagtttccttcctgaaataatcttactatggaaatatcaccayagtatctttcctctgcgtttcccactggcactgagggaccgctctgcagtcagccatggttctgtcattctttgccattgagtcaggggatgcattttaatggaggatgtagcaacattgctcatgcaatgcacttcccatctgaascagcaaactgattgctgtgatccatctgtgacacagctgtgatatcaccagctgaaccaggaacacttccaactctgagttctttcttaatggarctatascctactttaaaaacatccacaatgaacttatctccagttggatctaaatcctccagcaaagtgcagatttattacctctatcgtgtgtaaaatatcttctttatacctcatatcagcttcttttctaaccagacactacttacagttatggcatacttacattatagtcactttccatcatatgtattgggttcttgtg

SEQ ID NO: 85716 - DNA, 543 bp, Chicken  19866894385069_6
cttccttctgtatggcagtttccttcctgaaataatcttactatggaaatatcaccayagtatctttcctctgcgtttcccactggcactgagggaccgctctgcagtcagccatggttctgtcattctttgccattgagtcaggggatgcattttaatggaggatgtagcaacattgctcatgcaatgcacttcccatctgaascagcaaactgattgctgtgatccatctgtgacacagctgtgatatcaccagctgaaccaggaacacttccaactctgagttctttcttaatggarctatascctactttaaaaacatccacaatgaacttatctccagttggatctaaatcctccagcaaagtgcagatttattacctctatcgtgtgtaaaatatcttctttatacctcatatcagcttcttttctaaccagacactacttacagttatggcatacttacattatagtcactttccatcatatgtattgggttcttgtgtggctttaaatgctaaaggacacctttctgccctgttg

SEQ ID NO: 85717 - DNA, 537 bp, Chicken  19866894385069_7
tctgtatggcagtttccttcctgaaataatcttactatggaaatatcaccayagtatctttcctctgcgtttcccactggcactgagggaccgctctgcagtcagccatggttctgtcattctttgccattgagtcaggggatgcattttaatggaggatgtagcaacattgctcatgcaatgcacttcccatctgaascagcaaactgattgctgtgatccatctgtgacacagctgtgatatcaccagctgaaccaggaacacttccaactctgagttctttcttaatggarctatascctactttaaaaacatccacaatgaacttatctccagttggatctaaatcctccagcaaagtgcagatttattacctctatcgtgtgtaaaatatcttctttatacctcatatcagcttcttttctaaccagacactacttacagttatggcatacttacattatagtcactttccatcatatgtattgggttcttgtgtggctttaaatgctaaaggacacctttctgccctgttg

SEQ ID NO: 85718 - DNA, 600 bp, Chicken  19866894385073_1
gagctagcttttgctagaatgctctgtagctttaaagagcagagcaagacaggaaaagcatggctgagtcaggctgggagcgctgagtaatccttcctgagtgtgcacagtcgccagatgtcagcccagcacagagctgtgtgcgtgcacaatccctccaggccactcctatccatagcacggaacccagctgtgcagaggacacacgaggcccacccaaagccaggggacagatagacagaagacttcccttccagcccacagcagcagggcagtgatggctttaagtgccccacactyttggctccaaggcagaatttgtgctttcccaaagcacagatgaatgatgcatctctcgttctggtttgctgagcttccagcgtagctccagatggaagaggggccccactacatctgcgggctgcctccttggctgacgcagcagacaaaacagcagagcagccagcaagtagsaggagcaccttgtccrgctctcctgtcctaaatcagagaaactattcgcygttgcaaatatctgcagcctgcctcagtttccccaaagccctgcatcacacctttggcagtctcctgcacacagca

SEQ ID NO: 85719 - DNA, 576 bp, Chicken  19866894385073_2
atagcacggaacccagctgtgcagaggacacacgaggcccacccaaagccaggggacagatagacagaagacttcccttccagcccacagcagcagggcagtgatggctttaagtgccccacactyttggctccaaggcagaatttgtgctttcccaaagcacagatgaatgatgcatctctcgttctggtttgctgagcttccagcgtagctccagatggaagaggggccccactacatctgcgggctgcctccttggctgacgcagcagacaaaacagcagagcagccagcaagtagsaggagcaccttgtccrgctctcctgtcctaaatcagagaaactattcgcygttgcaaatatctgcagcctgcctcagtttccccaaagccctgcatcacacctttggcagtctcctgcacacagcaggtgtgacaacccccagggtatcgggggggatgggctgctgtcctcctctatcacctcacacacagtgctgctcacagcagggcccacatgccacgccaattcagtacttctgttgtgtaagggagaaaggaaagcatatccctgtgcat

SEQ ID NO: 85720 - DNA, 560 bp, Chicken  19866894385073_3
ctgtgcagaggacacacgaggcccacccaaagccaggggacagatagacagaagacttcccttccagcccacagcagcagggcagtgatggctttaagtgccccacactyttggctccaaggcagaatttgtgctttcccaaagcacagatgaatgatgcatctctcgttctggtttgctgagcttccagcgtagctccagatggaagaggggccccactacatctgcgggctgcctccttggctgacgcagcagacaaaacagcagagcagccagcaagtagsaggagcaccttgtccrgctctcctgtcctaaatcagagaaactattcgcygttgcaaatatctgcagcctgcctcagtttccccaaagccctgcatcacacctttggcagtctcctgcacacagcaggtgtgacaacccccagggtatcgggggggatgggctgctgtcctcctctatcacctcacacacagtgctgctcacagcagggcccacatgccacgccaattcagtacttctgttgtgtaagggagaaaggaaagcatatccctgtgcat

SEQ ID NO: 85721 - DNA, 526 bp, Chicken  19866894385073_4
aggggacagatagacagaagacttcccttccagcccacagcagcagggcagtgatggctttaagtgccccacactyttggctccaaggcagaatttgtgctttcccaaagcacagatgaatgatgcatctctcgttctggtttgctgagcttccagcgtagctccagatggaagaggggccccactacatctgcgggctgcctccttggctgacgcagcagacaaaacagcagagcagccagcaagtagsaggagcaccttgtccrgctctcctgtcctaaatcagagaaactattcgcygttgcaaatatctgcagcctgcctcagtttccccaaagccctgcatcacacctttggcagtctcctgcacacagcaggtgtgacaacccccagggtatcgggggggatgggctgctgtcctcctctatcacctcacacacagtgctgctcacagcagggcccacatgccacgccaattcagtacttctgttgtgtaagggagaaaggaaagcatatccctgtgcat

SEQ ID NO: 85722 - DNA, 600 bp, Chicken  19866894385075_1
cggttttgtccatttctgcccagccctgcctgtgcagcacatcagaagagccctgcagagcacagccagggcctcccaggcttcagggacagaaccccagctggtggacaacagcgcaaacgctgctgaactcagcattactgcatgtaagcagctacacttctgaccccagttcctatttcaaaatgccttctgtatggacctcaccagtgcagaggctgccaggaatggactcagggctgggtgtgtgctatgcactctgagcatcggtgccccgagggagagacatcagctgccccrttccacagaccaggatctgcagcccaggactgagcagcaagtttggtaccacgtcccaagcagaactgaacccggtcttttccagcagtcaatsccatcaggagatgttcctttagtgatactctccctcgcaggggaagacaaacacagctaagcatcctggatctgacccagtgcaccgcacccataggatcaacgcacatttttaccatgccagcagcggacagcctcactgctctcccagatggcagaagatgtgaactgggagaaggtttttcttcacccttttcttatgctgag

SEQ ID NO: 85723 - DNA, 600 bp, Chicken  19866894385075_2
ccccagctggtggacaacagcgcaaacgctgctgaactcagcattactgcatgtaagcagctacacttctgaccccagttcctatttcaaaatgccttctgtatggacctcaccagtgcagaggctgccaggaatggactcagggctgggtgtgtgctatgcactctgagcatcggtgccccgagggagagacatcagctgccccrttccacagaccaggatctgcagcccaggactgagcagcaagtttggtaccacgtcccaagcagaactgaacccggtcttttccagcagtcaatsccatcaggagatgttcctttagtgatactctccctcgcaggggaagacaaacacagctaagcatcctggatctgacccagtgcaccgcacccataggatcaacgcacatttttaccatgccagcagcggacagcctcactgctctcccagatggcagaagatgtgaactgggagaaggtttttcttcacccttttcttatgctgagaaccattctgcacttttccagaggctcctctctctctctctccccccaaactcagcccggctgtgctgctctcctgttggctgagccctcgttt

SEQ ID NO: 85724 - DNA, 600 bp, Chicken  19866894385090_1
atgtttaaacaaacgtgttttaaaatgggaacaaatatatttaccatagaggaaatgacaactgaggaaattaatgcttgggaagaatagaggagagttttgtaccggcatttgctttgcattttttaatgagttgtgaggctttgttgctgcaagacttttacaggaggaggagagtggtggtgcactatgtgaagacaaatgtcttgggaacaaaagggcccttttctgccaaagctggaagatggttctggctcttcattttttcccaccttcaaagaagtccaagaaaactgctgrcacttaaagaagtggaaaatgtgatttatggtgacatcatgtattacccaagcaaatctatttcaaggaagattttttttttttttttaatgatatgtgtaataatggaatagtgattcattcttgaaggaggattggttcagattcttctcccttctgttgcctctaccccacccccacttttccctttctactttgtcagtytttaggggtttcagtattgatgtgagctacagaagaaagttcttaagttattttcaattcttaaacataactacttcatgcaggatgatgttatgc

SEQ ID NO: 85725 - DNA, 600 bp, Chicken  19866894385090_2
tcttgggaacaaaagggcccttttctgccaaagctggaagatggttctggctcttcattttttcccaccttcaaagaagtccaagaaaactgctgrcacttaaagaagtggaaaatgtgatttatggtgacatcatgtattacccaagcaaatctatttcaaggaagattttttttttttttttaatgatatgtgtaataatggaatagtgattcattcttgaaggaggattggttcagattcttctcccttctgttgcctctaccccacccccacttttccctttctactttgtcagtytttaggggtttcagtattgatgtgagctacagaagaaagttcttaagttattttcaattcttaaacataactacttcatgcaggatgatgttatgcaagagtaatttctgccatgtggctggaggccatacccagctgctactgagtaactttggttcttatttactggttccaacaatatttcactacaaacatttttttagagccagtaagtttcttttgctaaagaactgtagcaacctcatctactaatggaagttggttgttttcaggcagtattccttacttaaagtagttaaa

SEQ ID NO: 85726 - DNA, 600 bp, Chicken  19866894385092_1
gaatacatttagtatgcggaggcaggatacacctctaagattgttttgtatgaaaaagctgcatgtgaaaaatcatgtactaggagtcatctgccactggaagcctttgctttctgcagcaagtgtgtatatgtgcaagcatgtatattatgacacacaacaactatgcttttccctgaaaataaagcacagaataaaaattacctggctgtaacagtcaaaaactgcagccaacacttttgcactgtatttacaccttcagtatcttctgactttatttacatctcatgtttcctttgytgataataccaggttgcgttaaccttggtgaagttgatcagtaaagaacaaatgacagactctgaattactacaaatgtgttttaagactctcctcttaataaagacttaacacaagcaccatcgttcyatgggcatgctaatcaggtatgcaagtcttttggggtcagggtctttcataatatgtgaaatgtagtctttccatatgtatcctatagatcttatattttagagtgatggaagtacagaattccatttccatgctgccacaaccccccagtcccccagggatcacgagctt

SEQ ID NO: 85727 - DNA, 600 bp, Chicken  19866894385092_2
tatgtgcaagcatgtatattatgacacacaacaactatgcttttccctgaaaataaagcacagaataaaaattacctggctgtaacagtcaaaaactgcagccaacacttttgcactgtatttacaccttcagtatcttctgactttatttacatctcatgtttcctttgytgataataccaggttgcgttaaccttggtgaagttgatcagtaaagaacaaatgacagactctgaattactacaaatgtgttttaagactctcctcttaataaagacttaacacaagcaccatcgttcyatgggcatgctaatcaggtatgcaagtcttttggggtcagggtctttcataatatgtgaaatgtagtctttccatatgtatcctatagatcttatattttagagtgatggaagtacagaattccatttccatgctgccacaaccccccagtcccccagggatcacgagcttgttaacgtgtgcctcatagtgacctgtaaggcatacctaccttctctttgacagcatagggtttttttcacatctttggttaggaagcatatacacacacttgcctttacctggtccctgctctgcaag

SEQ ID NO: 85728 - DNA, 600 bp, Chicken  19866894385100_1
aaaaaagaatcaaaacagcatctgctatatcagcgtaaacagtaaaaaaacttccatatagttaaaatggcaaaacatttaatacatattcatgttagaaagttaactgtttgttttatatcagatgagaaattagctttgctttatttcctttttctagtggagcccactgctgtaagtcatagagttcacagagctgtgacaaggacagaagaatgttgtgcatgtttaagaacgggagagggattttttgataagcattgtttctgcaattcttattacatcatatgatgtactacrtcaataaaatgaagattctatggcctacttttaagcaaagatttggaaatcacagtgcaatacaggaaatgtccattagtttgttcatttaacttttcatagttaaaaatgtacagcatgtgacattttgacgtgctataagcagattcctcaaatgcataaaatgcaattgcgcctgcagtagaaaacatttttwcacccaatgatgaggagccaaaagacaaaatatgtctattgctgtacacttacrcttttttcacctttactccagcatacagatggaaattaagcagttcaact

SEQ ID NO: 85729 - DNA, 570 bp, Chicken  19866894385100_2
ctgtgacaaggacagaagaatgttgtgcatgtttaagaacgggagagggattttttgataagcattgtttctgcaattcttattacatcatatgatgtactacrtcaataaaatgaagattctatggcctacttttaagcaaagatttggaaatcacagtgcaatacaggaaatgtccattagtttgttcatttaacttttcatagttaaaaatgtacagcatgtgacattttgacgtgctataagcagattcctcaaatgcataaaatgcaattgcgcctgcagtagaaaacatttttwcacccaatgatgaggagccaaaagacaaaatatgtctattgctgtacacttacrcttttttcacctttactccagcatacagatggaaattaagcagttcaactgcaactgtgagttgcacagatcatcacagatgactgtgaagagaaaacggcctgggggttggttgggttgatgctcggctgaatgtgagccaacagtgtgcccaggtgacccaagaagaccaatgccatcctggtctgcatcagaaaacggtgtggccagcaggag

SEQ ID NO: 85730 - DNA, 516 bp, Chicken  19866894385100_3
ttgataagcattgtttctgcaattcttattacatcatatgatgtactacrtcaataaaatgaagattctatggcctacttttaagcaaagatttggaaatcacagtgcaatacaggaaatgtccattagtttgttcatttaacttttcatagttaaaaatgtacagcatgtgacattttgacgtgctataagcagattcctcaaatgcataaaatgcaattgcgcctgcagtagaaaacatttttwcacccaatgatgaggagccaaaagacaaaatatgtctattgctgtacacttacrcttttttcacctttactccagcatacagatggaaattaagcagttcaactgcaactgtgagttgcacagatcatcacagatgactgtgaagagaaaacggcctgggggttggttgggttgatgctcggctgaatgtgagccaacagtgtgcccaggtgacccaagaagaccaatgccatcctggtctgcatcagaaaacggtgtggccagcaggag

SEQ ID NO: 85731 - DNA, 600 bp, Chicken  19866894385104_1
aaggtctctacaaagcgtatagaggagatgaggaggggacaaaatgatacatgatacatgaatatatacttcttcaagaaatgcctatttgtggaacttggtgctgtatgatgttgtggggtcaagaaatatcagtaacttcaaaccaggattaaaccaatgtccattacaggcaatggtaccaatgtgatcggaatttgggtttattgctggtgtgagaaagatcaccccatacttatccaatttatttacaagtatatatatatataagtatttaagtacctcctgccgggcactctsaaagatcagtaataagatctggtagtcccatcagaatcaggtgttaatgcacaatgaggattctagcaagcactgttagcacagaggtttattagtttacagtaaaatatccattacgggagaattaagaggaaagtcagggtccacatgtgaatgagagcacttcaaatgtcagtcagaaccacccacgcggtgtctgtgcagcgcaggaacacagcagcctgacatcactctgcctttggcagcactcccaaccccatgcagtcagacctcaccctactgcgccacgctcaccgcgtc

SEQ ID NO: 85732 - DNA, 599 bp, Chicken  19866894385106_1
  misc_feature (1)..(95): n is any nucleotide
nnnnnnnnnnnnnnnnnnnnnnnnnnnnnnnnnnnnnnnnnnnnnnnnnnnnnnnnnnnnnnnnnnnnnnnnnnnnnnnnnnnnnnnnnnnnnnnttgagtccaagtgagaagaaagcttcccctcaaaatcatctgctatgcaggcaaacacacagcgacaaagcatacttgattccattctaagtaacatgagaaagtaaccaatacaccaagaatcgtgcagtttgagtttggtgaaaaaagatgcatcatgaggtaacttcagaatgagctgcagctaagggaagactcagtcaayggggcatcaactcagcacacaggaaaaaacaagggagacaaatggagtaacacaaacagtaagaagggaaaatgacatcttgaggttacagggggatgaggaggaagggaagcaagtagtcctgctgcatccattcttccaaaggcacactgggctacgcatcactgcacaggctcaatggagcaggcaggttttgcagactaacacrgtattctacggtgttcagagcgcccagggaaagaatttaaaacttaatgcataaactagcactagcctcatgaaaacackgtgcaactgct

SEQ ID NO: 85733 - DNA, 600 bp, Chicken  19866894385106_2
caccaagaatcgtgcagtttgagtttggtgaaaaaagatgcatcatgaggtaacttcagaatgagctgcagctaagggaagactcagtcaayggggcatcaactcagcacacaggaaaaaacaagggagacaaatggagtaacacaaacagtaagaagggaaaatgacatcttgaggttacagggggatgaggaggaagggaagcaagtagtcctgctgcatccattcttccaaaggcacactgggctacgcatcactgcacaggctcaatggagcaggcaggttttgcagactaacacrgtattctacggtgttcagagcgcccagggaaagaatttaaaacttaatgcataaactagcactagcctcatgaaaacackgtgcaactgctttctgcaccaggagggggaatctctatgggattcctgacactaagctgcaacagaaggaaactgagcatggaaaaaattctcagaacaaaytcagaacaaatcttcccccgccagcacagtttgctggtgaagaaagaagacacgcttcttatgatacgtcctgaagaagcagagcccatcctctaccgcatggtccatcaggagccag

SEQ ID NO: 85734 - DNA, 600 bp, Chicken  19866894385106_3
gactcagtcaayggggcatcaactcagcacacaggaaaaaacaagggagacaaatggagtaacacaaacagtaagaagggaaaatgacatcttgaggttacagggggatgaggaggaagggaagcaagtagtcctgctgcatccattcttccaaaggcacactgggctacgcatcactgcacaggctcaatggagcaggcaggttttgcagactaacacrgtattctacggtgttcagagcgcccagggaaagaatttaaaacttaatgcataaactagcactagcctcatgaaaacackgtgcaactgctttctgcaccaggagggggaatctctatgggattcctgacactaagctgcaacagaaggaaactgagcatggaaaaaattctcagaacaaaytcagaacaaatcttcccccgccagcacagtttgctggtgaagaaagaagacacgcttcttatgatacgtcctgaagaagcagagcccatcctctaccgcatggtccatcaggagccaggcacacccagcatgcatacacagagcagcaggtattcccaattcccaagtatctgcaaaactttacttgtgaagaaggtg

SEQ ID NO: 85735 - DNA, 600 bp, Chicken  19866894385106_4
gggggatgaggaggaagggaagcaagtagtcctgctgcatccattcttccaaaggcacactgggctacgcatcactgcacaggctcaatggagcaggcaggttttgcagactaacacrgtattctacggtgttcagagcgcccagggaaagaatttaaaacttaatgcataaactagcactagcctcatgaaaacackgtgcaactgctttctgcaccaggagggggaatctctatgggattcctgacactaagctgcaacagaaggaaactgagcatggaaaaaattctcagaacaaaytcagaacaaatcttcccccgccagcacagtttgctggtgaagaaagaagacacgcttcttatgatacgtcctgaagaagcagagcccatcctctaccgcatggtccatcaggagccaggcacacccagcatgcatacacagagcagcaggtattcccaattcccaagtatctgcaaaactttacttgtgaagaaggtgaccgcacggcagaacgcgagcttcaacacgggacgtgtgaatgtcctgttttgagacaagtatcagacaaaagaaaggaaacattaagttccaacagagccc

SEQ ID NO: 85736 - DNA, 599 bp, Chicken  19866894385112_1
  misc_feature (1)..(61): n is any nucleotide
nnnnnnnnnnnnnnnnnnnnnnnnnnnnnnnnnnnnnnnnnnnnnnnnnnnnnnnnnnnnntaatgggagtcccgaaggtcagccaagctttaggcccacggagtgagtcttgggctgtactcttcctcaggagctgctcgtctcagctgagcacagaccccaagctgctcaaaaaccatctgcccctcagcagcagcaggaaggaaggcctggtgcagctttccaaaagccttgtctcaatttaagcccttcctcttcctctcactgtgccccaaggctgggctgatggacatgaagcygcagcaatgattgcattttgtcttcaaattcttcaaattgtgcaaaccttggcatgcacgctgggttcagggcacttgtggagatgagtattccctgctctctatttctgtaygtttaatagatggcacctgaccatccccatcctcaaggtacaaagcaccagtgctgagttctgctgccatgtgaaaaagccagtgagcacagattttctcagccactgccaaggcttgagacatatttcttcatagacactctgaaccaaaagttttcccactactcttaccttaggaaatgctca

SEQ ID NO: 85737 - DNA, 600 bp, Chicken  19866894385112_2
ggctgtactcttcctcaggagctgctcgtctcagctgagcacagaccccaagctgctcaaaaaccatctgcccctcagcagcagcaggaaggaaggcctggtgcagctttccaaaagccttgtctcaatttaagcccttcctcttcctctcactgtgccccaaggctgggctgatggacatgaagcygcagcaatgattgcattttgtcttcaaattcttcaaattgtgcaaaccttggcatgcacgctgggttcagggcacttgtggagatgagtattccctgctctctatttctgtaygtttaatagatggcacctgaccatccccatcctcaaggtacaaagcaccagtgctgagttctgctgccatgtgaaaaagccagtgagcacagattttctcagccactgccaaggcttgagacatatttcttcatagacactctgaaccaaaagttttcccactactcttaccttaggaaatgctcattgcaagtcaagatccatggaaaaaaacctcacagatactgtttccatggaaacaccaccgctgcttaccaagagatgtagtccactttgacttgaagaacctcactgatgttg

SEQ ID NO: 85738 - DNA, 600 bp, Chicken  19866894385115_1
ctcccaaataacccctggctgatgatgagccataatgaaaacacttcacagatgctacagatactgatgagtcaccaaaacaacaccaactacatcttcccacactgcattccaatcctgtacagctgcgcacaacaggtactgttgttactgagcaaaccctgagaggactaccgccttctcattgcacgtgctttcagtgtgccttcagtttagcacctttattttacttaagcatttgcacaaattaagtacaccaacatctgtgctaaacaggactgaatagcttaaaccaatccyaaaacatattttgacttatttgaagatggtttgaacactgacaatgtttataaggcatctgacttaagaaatgcaactcctggatgcaacagcaccataggatcrttaggtattttmtcacatatcaatattaccacagagtgtgtcagcagataaaaagggcttctcctcagcaccgagaatatctttatccacgctgacatattcacgccattcttagccaatagctccctctttagtcctgcagcagagagtaacagtcatttttttttcctggcaaatgaagttgattgctttata

SEQ ID NO: 85739 - DNA, 600 bp, Chicken  19866894385115_2
tgcattccaatcctgtacagctgcgcacaacaggtactgttgttactgagcaaaccctgagaggactaccgccttctcattgcacgtgctttcagtgtgccttcagtttagcacctttattttacttaagcatttgcacaaattaagtacaccaacatctgtgctaaacaggactgaatagcttaaaccaatccyaaaacatattttgacttatttgaagatggtttgaacactgacaatgtttataaggcatctgacttaagaaatgcaactcctggatgcaacagcaccataggatcrttaggtattttmtcacatatcaatattaccacagagtgtgtcagcagataaaaagggcttctcctcagcaccgagaatatctttatccacgctgacatattcacgccattcttagccaatagctccctctttagtcctgcagcagagagtaacagtcatttttttttcctggcaaatgaagttgattgctttatagaaagaatagcaaacacatcttttggcttttgtaaagaaatttactccaggaaaactaagcaaaataatttgctggtaagggcaatcttatatcaaagtgcattt

SEQ ID NO: 85740 - DNA, 600 bp, Chicken  19866894385115_3
ctgtacagctgcgcacaacaggtactgttgttactgagcaaaccctgagaggactaccgccttctcattgcacgtgctttcagtgtgccttcagtttagcacctttattttacttaagcatttgcacaaattaagtacaccaacatctgtgctaaacaggactgaatagcttaaaccaatccyaaaacatattttgacttatttgaagatggtttgaacactgacaatgtttataaggcatctgacttaagaaatgcaactcctggatgcaacagcaccataggatcrttaggtattttmtcacatatcaatattaccacagagtgtgtcagcagataaaaagggcttctcctcagcaccgagaatatctttatccacgctgacatattcacgccattcttagccaatagctccctctttagtcctgcagcagagagtaacagtcatttttttttcctggcaaatgaagttgattgctttatagaaagaatagcaaacacatcttttggcttttgtaaagaaatttactccaggaaaactaagcaaaataatttgctggtaagggcaatcttatatcaaagtgcatttgcaaatcttgga

SEQ ID NO: 85741 - DNA, 464 bp, Chicken  19866894385119_1
ttggaaaataagaattttgtacctttttgttttttttaagcaaaggcagccattaagttattaaggggtattaaacatggacagaacaaatgcagcaaacagacaaaaataccaaactaacctttaagctgtgtttgttggtttgtttttttttttaatatcatcttactacgctctaggaacaacacgatcatttcctcactcagttaccaaggccatactgtcactaaagccattatcaaagaaacacccagaactctgttaagcattttgcaaatagagggaagcaaaattattccktgttcaagtacacagttctttcaccacacacacaagaaagargtgcagtaaacaagagctctgtaattacatccaccatatttcaaaaaatcaaaagccagggacatttctgaattattatttctttttttttttttttttttttttttttctccaaaggattt

SEQ ID NO: 85742 - DNA, 422 bp, Chicken  19866894385119_2
ttggaaaataagaattttgtacctttttgttttttttaagcaaaggcagccattaagttattaaggggtattaaacatggacagaacaaatgcagcaaacagacaaaaataccaaactaacctttaagctgtgtttgttggtttgtttttttttttaatatcatcttactacgctctaggaacaacacgatcatttcctcactcagttaccaaggccatactgtcactaaagccattatcaaagaaacacccagaactctgttaagcattttgcaaatagagggaagcaaaattattccrgtgcagtaaacaagagctctgtaattacatccaccatatttcaaaaaatcaaaagccagggacatttctgaattattatttctttttttttttttttttttttttttttctccaaaggattt

SEQ ID NO: 85743 - DNA, 599 bp, Chicken  19866894385130_1
  misc_feature (1)..(69): n is any nucleotide
nnnnnnnnnnnnnnnnnnnnnnnnnnnnnnnnnnnnnnnnnnnnnnnnnnnnnnnnnnnnnnnnnnnnnttgagcaggtacgtaactgttctctgaagtaataattacagtgcccaaagcagtaagcctttggttattactgtaaagggagacaaagcattcagcaaaacacgtacatttcatctaaagattcagatttaagattgtgctggagaaggataagggttctcctcttttcaaggaggtaaacattctgaagttccagcattcctggcacttaagaccaaatttggatgttgyttaaaataaatggattcttttagcaaaatcaggtcaaccagatcccctctcctaagaaacccaggaggagcaacacatrtatttatttttattgtggcactaattatgttgacagtgaagtagtgatgggagagaaaacaaagaaacagacttccactgatgagcttttaaattattacctacaaggtctaccccgaaagtaatgcctcctattttattattaggttggtccacaacatcagaagcagatggtggtggtacagaggttgaacccccccccccaatatccccttacattt

SEQ ID NO: 85744 - DNA, 600 bp, Chicken  19866894385130_2
acgtaactgttctctgaagtaataattacagtgcccaaagcagtaagcctttggttattactgtaaagggagacaaagcattcagcaaaacacgtacatttcatctaaagattcagatttaagattgtgctggagaaggataagggttctcctcttttcaaggaggtaaacattctgaagttccagcattcctggcacttaagaccaaatttggatgttgyttaaaataaatggattcttttagcaaaatcaggtcaaccagatcccctctcctaagaaacccaggaggagcaacacatrtatttatttttattgtggcactaattatgttgacagtgaagtagtgatgggagagaaaacaaagaaacagacttccactgatgagcttttaaattattacctacaaggtctaccccgaaagtaatgcctcctattttattattaggttggtccacaacatcagaagcagatggtggtggtacagaggttgaacccccccccccaatatccccttacattttgttgctgtgtgagagatggcagcagaggggcagactgaaagaactgtataagcgatggaagtgcgtatgaaggaaaggg

SEQ ID NO: 85745 - DNA, 600 bp, Chicken  19866894385138_1
aaaaccttaagctctgtagtaattgatgaatcactaaccatcccttgtgattccactattgctcttctgtacgtccttggtaataaaaggaataaaaatctagagattgcctctttttcaggtagtgctattgaacttttcactgtattttaaaggataagcttttgtacctgctttatccagtgtgttaagatagcaataaagttacataaaaatgatgctattggcaattcacaaacatattgcactgaaaaatagattcacaattacagtgtggataataaataaacatacttttaygtttgaaaatccaaagcctatttaatataatattgatataaaaagtgaaatgcaataaaaacatgtaagtgaagatacaatccaaaaaagaaaccataataaactcagtgaaagaaaactggccaggatatctagatctctcaattcctctgagataattactacagctttgtttattaaaaacatttattgccatagctactatttctgttttcagtcatcttttattttgtgtcttttgtaagacatcatctgagtaaagaaaatgttgyagaaatgctccttttctttcacctattc

SEQ ID NO: 85746 - DNA, 600 bp, Chicken  19866894385138_2
tgtggataataaataaacatacttttaygtttgaaaatccaaagcctatttaatataatattgatataaaaagtgaaatgcaataaaaacatgtaagtgaagatacaatccaaaaaagaaaccataataaactcagtgaaagaaaactggccaggatatctagatctctcaattcctctgagataattactacagctttgtttattaaaaacatttattgccatagctactatttctgttttcagtcatcttttattttgtgtcttttgtaagacatcatctgagtaaagaaaatgttgyagaaatgctccttttctttcacctattctcattgcttcttttcttatatgcaactcaagattgtctatagatatcactcttacattcttataagataatcatgtaatcacattgaaatgcataaataaaagtttctttttcattaattataaagacaactgctttttccagacgtctraatcattctcatttctgcatctctcctctccccatacaatgatagccacctatgaataggttatgaatagtctctctctaccagagaatagtaatacagaaaaagaaaaattggctttgctt

SEQ ID NO: 85747 - DNA, 600 bp, Chicken  19866894385138_3
tgagataattactacagctttgtttattaaaaacatttattgccatagctactatttctgttttcagtcatcttttattttgtgtcttttgtaagacatcatctgagtaaagaaaatgttgyagaaatgctccttttctttcacctattctcattgcttcttttcttatatgcaactcaagattgtctatagatatcactcttacattcttataagataatcatgtaatcacattgaaatgcataaataaaagtttctttttcattaattataaagacaactgctttttccagacgtctraatcattctcatttctgcatctctcctctccccatacaatgatagccacctatgaataggttatgaatagtctctctctaccagagaatagtaatacagaaaaagaaaaattggctttgcttagatgcatgggtcttattatgtacttaygtgagataaagtcaacctctaaaactggtgatacattcaactatcacttctgtctttacttagagttcagcagttttaagaagaaacttacttacagtaaacataactttcaagatgtaaataggtcatgagcaatccctagtctttgtg

SEQ ID NO: 85748 - DNA, 474 bp, Chicken  19866894385138_4
tcattgcttcttttcttatatgcaactcaagattgtctatagatatcactcttacattcttataagataatcatgtaatcacattgaaatgcataaataaaagtttctttttcattaattataaagacaactgctttttccagacgtctraatcattctcatttctgcatctctcctctccccatacaatgatagccacctatgaataggttatgaatagtctctctctaccagagaatagtaatacagaaaaagaaaaattggctttgcttagatgcatgggtcttattatgtacttaygtgagataaagtcaacctctaaaactggtgatacattcaactatcacttctgtctttacttagagttcagcagttttaagaagaaacttacttacagtaaacataactttcaagatgtaaataggtcatgagcaatccctagtctttgtgctgcacctcattcagagatgaaaa

SEQ ID NO: 85749 - DNA, 599 bp, Chicken  19866894385140_1
  misc_feature (1)..(157): n is any nucleotide
nnnnnnnnnnnnnnnnnnnnnnnnnnnnnnnnnnnnnnnnnnnnnnnnnnnnnnnnnnnnnnnnnnnnnnnnnnnnnnnnnnnnnnnnnnnnnnnnnnnnnnnnnnnnnnnnnnnnnnnnnnnnnnnnnnnnnnnnnnnnnnnnnnnnnnnnnnnnnttaaaaaaatcagtaaagttcagtctgataaacacagaattcaaaatgcaaggaagagaaccaagtagtaacatttactattcagaaaataatgattcaagttataattaacaggttgtccagagatgtggcagagtattccytcttgtatacattccaaagctgtttggacatggtcctgggcaacgtgctctaggcacatttgcttgagcaggggaattggaccatacaacctgcagaggtgccttacaatttcaaccattctaaccatgacagtagcagcagagtatgaatatcctaaataaccagtaatcaagctaaacagaccatgcatctgaaagctattaggttaacttcagcctgtagaagaaactctcacttcacaatcagccaacagtgaasagagacaaacaaaaatccctgttaggctgcataagagcat

SEQ ID NO: 85750 - DNA, 600 bp, Chicken  19866894385140_2
tataattaacaggttgtccagagatgtggcagagtattccytcttgtatacattccaaagctgtttggacatggtcctgggcaacgtgctctaggcacatttgcttgagcaggggaattggaccatacaacctgcagaggtgccttacaatttcaaccattctaaccatgacagtagcagcagagtatgaatatcctaaataaccagtaatcaagctaaacagaccatgcatctgaaagctattaggttaacttcagcctgtagaagaaactctcacttcacaatcagccaacagtgaasagagacaaacaaaaatccctgttaggctgcataagagcatacaaagggagactagcagcactagctcaaacttaaaccttgcacaaatccaccccatgcagaaatagtactcttgaagagaacttatggtaagactaaacatcatctacgaaactgagtatataggcctctggtcagacagttagrtttttcttttttaaagtagtttttgcaaatgtaagcaaatttctaaaatctctaaaaagggagaaaatcagaacctttaaaaggaagttcagacacaaactaatgatgatttta

SEQ ID NO: 85751 - DNA, 600 bp, Chicken  19866894385140_3
atgaatatcctaaataaccagtaatcaagctaaacagaccatgcatctgaaagctattaggttaacttcagcctgtagaagaaactctcacttcacaatcagccaacagtgaasagagacaaacaaaaatccctgttaggctgcataagagcatacaaagggagactagcagcactagctcaaacttaaaccttgcacaaatccaccccatgcagaaatagtactcttgaagagaacttatggtaagactaaacatcatctacgaaactgagtatataggcctctggtcagacagttagrtttttcttttttaaagtagtttttgcaaatgtaagcaaatttctaaaatctctaaaaagggagaaaatcagaacctttaaaaggaagttcagacacaaactaatgatgattttaaaatttaatgagactgttacaaacagtatcagaatactaccacctagtgatagactgaaacatcacaaattcttggcactattaaaaaaacaaaatgactacagcatttcattttttccatattaaattgctgtgtttcttcttgttcttgaaaacaacaggacgttcactctaacatcagtaatg

SEQ ID NO: 85752 - DNA, 599 bp, Chicken  19866894385141_1
  misc_feature (1)..(72): n is any nucleotide
nnnnnnnnnnnnnnnnnnnnnnnnnnnnnnnnnnnnnnnnnnnnnnnnnnnnnnnnnnnnnnnnnnnnnnnnaacttgactggcatagaggagctctaggcaagtgacttttaccaagatcacctatgagcctgataagaagtttattccctctttgaccatacttaagttgtttggaaagtcacgtattaactaagcgaggctaggaagagacagtaatttagagagtgcttgcatcactgctgtaggtcacacacggctctactgtaactgtgggtgtcccagaggtggaagccatamcagcacgggtgcctgtgcttctgtagccccaacggcttcctaggtgatggggtcctaattgtttccagattcaagttttcagcaggttaggaagtggaaggatcttgaggacgtacagaagcaacaagctgtacgcactgacctaggtttgaacagccctgccttggcaggtctggtcctgaagaaattagtttgcattaatagtcctattgtcttcaaattttacagtgatgaaatccttctaacttcttccaggggtgcgaggactgcagggtgaggccctgaataaaagactactg

SEQ ID NO: 85753 - DNA, 600 bp, Chicken  19866894385148_1
acaggaagcaaaacaatcagagaagagtaaaacacgaaagcactctgtcccaatatctccaggaatgcagcagtctcttcagtcagtgaggtcactttgactgcagtacttcagctggaacttgttaagcagactgaaggaataaaatgtgtcacagcccaaagccaagtttagtcacttagattataaagctagtgtcacgttagagctatttcaggcctgttgtctttgatcgtacctgtgagttgagaaattcttggagacaggaaaagacagccctttctacaagggagaacggtragtgtgttaaccactgcactgcccagaggtcttttggtctagttacacgtatttagcaaatgtctaggctgtgcaaagaaggcagtgtgtttgtatattaagcattctctytcttgcacttacrtggtgtaagggcttcactgcatcaagcatttttcttggcctggcaaaactgttatcttcagcagaaggagatttggagagtgcaggtcagtgagggtgtgagaggcagtctggtgcaggatagcaaagygtaggtgggagtgtttggaaacgattctcctggttttctcaggagaa

SEQ ID NO: 85754 - DNA, 600 bp, Chicken  19866894385148_2
cagctggaacttgttaagcagactgaaggaataaaatgtgtcacagcccaaagccaagtttagtcacttagattataaagctagtgtcacgttagagctatttcaggcctgttgtctttgatcgtacctgtgagttgagaaattcttggagacaggaaaagacagccctttctacaagggagaacggtragtgtgttaaccactgcactgcccagaggtcttttggtctagttacacgtatttagcaaatgtctaggctgtgcaaagaaggcagtgtgtttgtatattaagcattctctytcttgcacttacrtggtgtaagggcttcactgcatcaagcatttttcttggcctggcaaaactgttatcttcagcagaaggagatttggagagtgcaggtcagtgagggtgtgagaggcagtctggtgcaggatagcaaagygtaggtgggagtgtttggaaacgattctcctggttttctcaggagaaactgctgccacttgagcatcctgcttttggaatttcagtattagtctctcatcctcttgttattttttgcttgggatcctactgtaggctctaagaaggctcttaaaagtc

SEQ ID NO: 85755 - DNA, 598 bp, Chicken  19866894385148_3
ttaagcagactgaaggaataaaatgtgtcacagcccaaagccaagtttagtcacttagattataaagctagtgtcacgttagagctatttcaggcctgttgtctttgatcgtacctgtgagttgagaaattcttggagacaggaaaagacagccctttctacaagggagaacggtragtgtgttaaccactgcactgcccagaggtcttttggtctagttacacgtatttagcaaatgtctaggctgtgcaaagaaggcagtgtgtttgtatattaagcattctctytcttgcacttacrtggtgtaagggcttcactgcatcaagcatttttcttggcctggcaaaactgttatcttcagcagaaggagatttggagagtgcaggtcagtgagggtgtgagaggcagtctggtgcaggatagcaaagygtaggtgggagtgtttggaaacgattctcctggttttctcaggagaaactgctgccacttgagcatcctgcttttggaatttcagtattagtctctcatcctcttgttattttttgcttgggatcctactgtaggctctaagaaggctcttaaaagtctttctcgggtg

SEQ ID NO: 85756 - DNA, 469 bp, Chicken  19866894385148_4
ttcttggagacaggaaaagacagccctttctacaagggagaacggtragtgtgttaaccactgcactgcccagaggtcttttggtctagttacacgtatttagcaaatgtctaggctgtgcaaagaaggcagtgtgtttgtatattaagcattctctytcttgcacttacrtggtgtaagggcttcactgcatcaagcatttttcttggcctggcaaaactgttatcttcagcagaaggagatttggagagtgcaggtcagtgagggtgtgagaggcagtctggtgcaggatagcaaagygtaggtgggagtgtttggaaacgattctcctggttttctcaggagaaactgctgccacttgagcatcctgcttttggaatttcagtattagtctctcatcctcttgttattttttgcttgggatcctactgtaggctctaagaaggctcttaaaagtctttctcgggtg

SEQ ID NO: 85757 - DNA, 599 bp, Chicken  19866894385151_1
  misc_feature (1)..(73): n is any nucleotide
nnnnnnnnnnnnnnnnnnnnnnnnnnnnnnnnnnnnnnnnnnnnnnnnnnnnnnnnnnnnnnnnnnnnnnnnngatatgtatggctcaggtgcctgtttttgaattacatcagctctgaagctggagacaaacatgcatgtaactgatctctccagtacctagattagaccggcagcttaggaaaactgaccaacagttgaaaaactatatttcattgcctctcaattgcaagagtacaggttgctttagtggagaaacttccatgagatgctttgggtaggaacagatcctcatacagyatctctgacttttcaagatgattcatccacatagatctgtgtaccctgtcctcctttcccactctttaggggatacatttaggcatgtggcatcttgtgttacgaatgcaagccattctggcagtgactgtttctcatgtagcacactgttccaggaagtacatctgctgtgtctaacggacagctcacgagtaggagccgttctctggctctgacttccacaatgtagtttgaaacaagattctgggtctcatgctgttagtatgggtggtgttactgtgtgtgtagtgggagttttg

SEQ ID NO: 85758 - DNA, 600 bp, Chicken  19866894385152_1
ccgggcccctcccactgctgtggcagagtaaccccatcacggtcatcccagagcgacccacggcttcttggcacagcttcccatgggcctaatctcatttttcagaggaaagcagtgtttcttctgaccgtgaaggaaatcccatccagtcccacgaagtgtttggatttgaggaattaagctgatgacaaatgagtaacaaaaagttctttccaaatgaaaaccagatctattttgatgggctcgatagctggtttcatgtcgtgcttttgttttctttgtttctttgttgttgctttytgattaaataaatcccttttccctggggtctggccccagccctgggagccgtgcccaggttgagctctggccctgggctggccacgtcccactgaccacatcaccaccccgtggggccacagcaracacccaccacggagggtggarcttttaaggaggggaacagggcaactcttagaccgttggccccactgtgcgctgggcacgrccacggcgacccaatgggaaaatcacagctcyttgaaaagggacaaatcctcccactggggcacctgtgggatgcagagaaccacttccaga

SEQ ID NO: 85759 - DNA, 600 bp, Chicken  19866894385152_2
gaccgtgaaggaaatcccatccagtcccacgaagtgtttggatttgaggaattaagctgatgacaaatgagtaacaaaaagttctttccaaatgaaaaccagatctattttgatgggctcgatagctggtttcatgtcgtgcttttgttttctttgtttctttgttgttgctttytgattaaataaatcccttttccctggggtctggccccagccctgggagccgtgcccaggttgagctctggccctgggctggccacgtcccactgaccacatcaccaccccgtggggccacagcaracacccaccacggagggtggarcttttaaggaggggaacagggcaactcttagaccgttggccccactgtgcgctgggcacgrccacggcgacccaatgggaaaatcacagctcyttgaaaagggacaaatcctcccactggggcacctgtgggatgcagagaaccacttccagaagagaaagaagggatttaggagcctgcawgtccctgacgtcaataaaccccttccaagaatcacagcttcctgatcacaccacaccctgatgcgagcatccacaaagccttcattgctgacactg

SEQ ID NO: 85760 - DNA, 600 bp, Chicken  19866894385152_3
agtcccacgaagtgtttggatttgaggaattaagctgatgacaaatgagtaacaaaaagttctttccaaatgaaaaccagatctattttgatgggctcgatagctggtttcatgtcgtgcttttgttttctttgtttctttgttgttgctttytgattaaataaatcccttttccctggggtctggccccagccctgggagccgtgcccaggttgagctctggccctgggctggccacgtcccactgaccacatcaccaccccgtggggccacagcaracacccaccacggagggtggarcttttaaggaggggaacagggcaactcttagaccgttggccccactgtgcgctgggcacgrccacggcgacccaatgggaaaatcacagctcyttgaaaagggacaaatcctcccactggggcacctgtgggatgcagagaaccacttccagaagagaaagaagggatttaggagcctgcawgtccctgacgtcaataaaccccttccaagaatcacagcttcctgatcacaccacaccctgatgcgagcatccacaaagccttcattgctgacactggtcctgtgcccatcagtgggat

SEQ ID NO: 85761 - DNA, 600 bp, Chicken  19866894385152_4
ctttccaaatgaaaaccagatctattttgatgggctcgatagctggtttcatgtcgtgcttttgttttctttgtttctttgttgttgctttytgattaaataaatcccttttccctggggtctggccccagccctgggagccgtgcccaggttgagctctggccctgggctggccacgtcccactgaccacatcaccaccccgtggggccacagcaracacccaccacggagggtggarcttttaaggaggggaacagggcaactcttagaccgttggccccactgtgcgctgggcacgrccacggcgacccaatgggaaaatcacagctcyttgaaaagggacaaatcctcccactggggcacctgtgggatgcagagaaccacttccagaagagaaagaagggatttaggagcctgcawgtccctgacgtcaataaaccccttccaagaatcacagcttcctgatcacaccacaccctgatgcgagcatccacaaagccttcattgctgacactggtcctgtgcccatcagtgggatcagcagtgcctgcaggccggacaccgtgacacccacctgcctcctcccttgccattccctt

SEQ ID NO: 85762 - DNA, 581 bp, Chicken  19866894385152_5
ggctcgatagctggtttcatgtcgtgcttttgttttctttgtttctttgttgttgctttytgattaaataaatcccttttccctggggtctggccccagccctgggagccgtgcccaggttgagctctggccctgggctggccacgtcccactgaccacatcaccaccccgtggggccacagcaracacccaccacggagggtggarcttttaaggaggggaacagggcaactcttagaccgttggccccactgtgcgctgggcacgrccacggcgacccaatgggaaaatcacagctcyttgaaaagggacaaatcctcccactggggcacctgtgggatgcagagaaccacttccagaagagaaagaagggatttaggagcctgcawgtccctgacgtcaataaaccccttccaagaatcacagcttcctgatcacaccacaccctgatgcgagcatccacaaagccttcattgctgacactggtcctgtgcccatcagtgggatcagcagtgcctgcaggccggacaccgtgacacccacctgcctcctcccttgccattcccttttccaatcagcca

SEQ ID NO: 85763 - DNA, 492 bp, Chicken  19866894385152_6
ctggccccagccctgggagccgtgcccaggttgagctctggccctgggctggccacgtcccactgaccacatcaccaccccgtggggccacagcaracacccaccacggagggtggarcttttaaggaggggaacagggcaactcttagaccgttggccccactgtgcgctgggcacgrccacggcgacccaatgggaaaatcacagctcyttgaaaagggacaaatcctcccactggggcacctgtgggatgcagagaaccacttccagaagagaaagaagggatttaggagcctgcawgtccctgacgtcaataaaccccttccaagaatcacagcttcctgatcacaccacaccctgatgcgagcatccacaaagccttcattgctgacactggtcctgtgcccatcagtgggatcagcagtgcctgcaggccggacaccgtgacacccacctgcctcctcccttgccattcccttttccaatcagcca

SEQ ID NO: 85764 - DNA, 483 bp, Chicken  19866894385160_1
atggctgactgccactgaggaagggtctctctctggagattgctcctcgtggagttttcttgtgtgcctacaacactggtgagcatttttccatttatttctgattatcttttccaatgtaataatctttccagctatatgctcttgaaagaccagcctagcttctctgtatacttactggttacacttctatatactcattcattatacatatgcattatgtgtattttaaacgtagtattaagagaacaaagtacatccagttctcctcaaacttgatagtaaatgacatttaataayaaaaactgaaggcaatattaagttaaagcttctgtaattttcagtattttattgtttgagaatcatccaagatgactgctttcagcatgctttcagcctttttcacctttcatgtgactagcagaactgctgtataaaacttgatataccacattacagaattgtaattttctttctttttta

SEQ ID NO: 85765 - DNA, 600 bp, Chicken  19866894385172_1
attaaggatacggattttactactgccagaatagtgcagtaagtgttgtgccatcagtggttggggtaagctcagttacatcctgctgagtgtggttgctgtgagggcacgtgcagtatcctcaaactgttgaaggggcaggattgctgtggggttatcacttggttagttaatttggaggaccgtgcttttccctagagattgatactaaaaaatccagttatgcagacccgtacaatagtttatgtgagaaaggaatctctgggcatcttctttccagcccctgctcacagcaggtgygtggttttgcrtgttgtcgttatctcacctgcatgtgatcgtgatgatttatgcaagaaagattaattaatcagaactttttttgtgtgtgcatgtgtagacaagaggcaagtgccaaagaggggtacaaactgagtccaaagtgttttacagaggtgrtggagatggcattgaagtgccaccaaaaatcccaccccacttaacacgtatgagtgctcrtacagaaggcaaacatcgctctggggtarcacaagggacctaattggaacatttgtaacttaattttaaatcgttgttgtc

SEQ ID NO: 85766 - DNA, 600 bp, Chicken  19866894385172_2
ggattttactactgccagaatagtgcagtaagtgttgtgccatcagtggttggggtaagctcagttacatcctgctgagtgtggttgctgtgagggcacgtgcagtatcctcaaactgttgaaggggcaggattgctgtggggttatcacttggttagttaatttggaggaccgtgcttttccctagagattgatactaaaaaatccagttatgcagacccgtacaatagtttatgtgagaaaggaatctctgggcatcttctttccagcccctgctcacagcaggtgygtggttttgcrtgttgtcgttatctcacctgcatgtgatcgtgatgatttatgcaagaaagattaattaatcagaactttttttgtgtgtgcatgtgtagacaagaggcaagtgccaaagaggggtacaaactgagtccaaagtgttttacagaggtgrtggagatggcattgaagtgccaccaaaaatcccaccccacttaacacgtatgagtgctcrtacagaaggcaaacatcgctctggggtarcacaagggacctaattggaacatttgtaacttaattttaaatcgttgttgtcattgtgggtta

SEQ ID NO: 85767 - DNA, 600 bp, Chicken  19866894385172_3
acttggttagttaatttggaggaccgtgcttttccctagagattgatactaaaaaatccagttatgcagacccgtacaatagtttatgtgagaaaggaatctctgggcatcttctttccagcccctgctcacagcaggtgygtggttttgcrtgttgtcgttatctcacctgcatgtgatcgtgatgatttatgcaagaaagattaattaatcagaactttttttgtgtgtgcatgtgtagacaagaggcaagtgccaaagaggggtacaaactgagtccaaagtgttttacagaggtgrtggagatggcattgaagtgccaccaaaaatcccaccccacttaacacgtatgagtgctcrtacagaaggcaaacatcgctctggggtarcacaagggacctaattggaacatttgtaacttaattttaaatcgttgttgtcattgtgggttaatatactgaaggaatcagtaaatatgctgaagaaattggtaggtagtaaaaacgaaggctatacaacagtttatagccagtggttctgtttaggcttaatccccgtaatgccgtgttaaaatttacaaaacagcttgtaattgcagga

SEQ ID NO: 85768 - DNA, 600 bp, Chicken  19866894385172_4
gttatgcagacccgtacaatagtttatgtgagaaaggaatctctgggcatcttctttccagcccctgctcacagcaggtgygtggttttgcrtgttgtcgttatctcacctgcatgtgatcgtgatgatttatgcaagaaagattaattaatcagaactttttttgtgtgtgcatgtgtagacaagaggcaagtgccaaagaggggtacaaactgagtccaaagtgttttacagaggtgrtggagatggcattgaagtgccaccaaaaatcccaccccacttaacacgtatgagtgctcrtacagaaggcaaacatcgctctggggtarcacaagggacctaattggaacatttgtaacttaattttaaatcgttgttgtcattgtgggttaatatactgaaggaatcagtaaatatgctgaagaaattggtaggtagtaaaaacgaaggctatacaacagtttatagccagtggttctgtttaggcttaatccccgtaatgccgtgttaaaatttacaaaacagcttgtaattgcaggagcttatttaaaccagctatttgtggttatgtctgctgaggaaacttaaacttcagcgttc

SEQ ID NO: 85769 - DNA, 600 bp, Chicken  19866894385172_5
gagaaaggaatctctgggcatcttctttccagcccctgctcacagcaggtgygtggttttgcrtgttgtcgttatctcacctgcatgtgatcgtgatgatttatgcaagaaagattaattaatcagaactttttttgtgtgtgcatgtgtagacaagaggcaagtgccaaagaggggtacaaactgagtccaaagtgttttacagaggtgrtggagatggcattgaagtgccaccaaaaatcccaccccacttaacacgtatgagtgctcrtacagaaggcaaacatcgctctggggtarcacaagggacctaattggaacatttgtaacttaattttaaatcgttgttgtcattgtgggttaatatactgaaggaatcagtaaatatgctgaagaaattggtaggtagtaaaaacgaaggctatacaacagtttatagccagtggttctgtttaggcttaatccccgtaatgccgtgttaaaatttacaaaacagcttgtaattgcaggagcttatttaaaccagctatttgtggttatgtctgctgaggaaacttaaacttcagcgttccccagccatctaatagcagcaaattgact

SEQ ID NO: 85770 - DNA, 600 bp, Chicken  19866894385179_1
ctttagttgggaataaaacaagatgtgctctgctacagtaaggctgtgaaatcagacagaaaggcaccaaggcaatttaaacaaatcagcagatttttttccaaataacaaaaaaatagctatatattttgttttgttttactttttctgaaggaggacaggatgctttaccccatatctaaatcatagatattgtttagtatcaacacacttcacttagatgtcataggaccttcctctgccttttcaaagtagaaactgctaccagaggaacaggcacagcaggcatcaagctacccrtatgccataataaatggaagctaacatgggcggtggcattgaggaagaaatgctgctgctggaatgaccacaaactggtgacagtgaggctgcaaatcatcaggtagccaactgttgggtggtagtgcaaaatgggcataaaaataccctgctgctgcactgttggtccagatttttctcctttaggaaaaaaaagtgtgtcctaaaatatagtgcatgaatccccaggctgaactcctgccaatccacaatacagcataaaaaaacagtaccaagaacagtcattttctttgcagcctt

SEQ ID NO: 85771 - DNA, 600 bp, Chicken  19866894385181_1
gattttatttgccactttcaactttatctcaaaacatccattctgcagggctgcgtctttcccaaagctgctactctgaaatacatatgaggttctttggggtatttggtaagagttttgctagtataaacaatgaacttttatgttcttatttcaaatgtaagttcaccgttaatatttggttacaaataatgattaatattaatggttgacctcttcctacagcaatgttgtattaatgtaactgtctagacattaattcataagaatataattttataagaacaaattaataaatckcgtawtatgcagtggtttgctacaggcaccagtcttccagagatgcctgtattcatctttaacaacatggatcaggataaaatcaggacaagagtgacttaataatttataaaaattgagcagaggggaaaaacaaagtcaaaaagacaaaattgtgcttttaaagctaacataataagtagtacattgcatgaagttatgcagcttttctgaaagttatatctatttttttcctgtaggattcggagtttcctgtagattctcaagtgaactcataccttgctcgtgccaaagagtgta

SEQ ID NO: 85772 - DNA, 600 bp, Chicken  19866894385181_2
tatttgccactttcaactttatctcaaaacatccattctgcagggctgcgtctttcccaaagctgctactctgaaatacatatgaggttctttggggtatttggtaagagttttgctagtataaacaatgaacttttatgttcttatttcaaatgtaagttcaccgttaatatttggttacaaataatgattaatattaatggttgacctcttcctacagcaatgttgtattaatgtaactgtctagacattaattcataagaatataattttataagaacaaattaataaatckcgtawtatgcagtggtttgctacaggcaccagtcttccagagatgcctgtattcatctttaacaacatggatcaggataaaatcaggacaagagtgacttaataatttataaaaattgagcagaggggaaaaacaaagtcaaaaagacaaaattgtgcttttaaagctaacataataagtagtacattgcatgaagttatgcagcttttctgaaagttatatctatttttttcctgtaggattcggagtttcctgtagattctcaagtgaactcataccttgctcgtgccaaagagtgtagtcaa

SEQ ID NO: 85773 - DNA, 600 bp, Chicken  19866894385182_1
gcatcaccggcacctttcaaatactgagtctgtattggttataactgcattgactagtggtaatgctgccctactccctgcctccccccagggttgtcagcagtggaggaaagtaacagcaatgatagtaaaggaagggattaatgaacttggaggtgtgtgctgaaaaccagggatgaatagaatctggaaaatatgtcagcatgcataaggataaaaccttagatataggtgactggcttcaaagaggcaagggtatcagcatgagcatttctgttaaggtatgatttatgtctatgyctacagaatgtccagcataaaggatcttcagyaaacacaggaaatgaatatctttcaccactctatatattttggaaattactacataaactgtgtctttctagcagatttaaatttaggatttcctaaatagtggcttccctggttaatgagaaaggaaactattcatcaggtcagttccagcactttgacagttttctcaagttaagcacaccctgaacagtatcatcagcaaaacaccatacatctttttaattaaaaaattgatcctgagggtatgctgccaaaaaaaaaaagaaa

SEQ ID NO: 85774 - DNA, 583 bp, Chicken  19866894385182_2
tattggttataactgcattgactagtggtaatgctgccctactccctgcctccccccagggttgtcagcagtggaggaaagtaacagcaatgatagtaaaggaagggattaatgaacttggaggtgtgtgctgaaaaccagggatgaatagaatctggaaaatatgtcagcatgcataaggataaaaccttagatataggtgactggcttcaaagaggcaagggtatcagcatgagcatttctgttaaggtatgatttatgtctatgyctacagaatgtccagcataaaggatcttcagyaaacacaggaaatgaatatctttcaccactctatatattttggaaattactacataaactgtgtctttctagcagatttaaatttaggatttcctaaatagtggcttccctggttaatgagaaaggaaactattcatcaggtcagttccagcactttgacagttttctcaagttaagcacaccctgaacagtatcatcagcaaaacaccatacatctttttaattaaaaaattgatcctgagggtatgctgccaaaaaaaaaaagaaaaaaaaaattaaaata

SEQ ID NO: 85775 - DNA, 599 bp, Chicken  19866894385186_1
  misc_feature (1)..(89): n is any nucleotide
nnnnnnnnnnnnnnnnnnnnnnnnnnnnnnnnnnnnnnnnnnnnnnnnnnnnnnnnnnnnnnnnnnnnnnnnnnnnnnnnnnnnnnnnntgatcatatttatgtcatcattggacctgatctaattcagacatgacaccattgtggattgtgtagaaaacccagcagcagttacactggacatctgtttcactgtgggaaaggaggtctgagaagagactcaacctactgtgtaggcccgtggagcctgagaatccccttgctgctcaagtccacacactgatacgatggtcctgtgcaytgagggtgttgggaaaaatcttgcttaaataggcttgctcaattatctttatcccaaaaagagacagaggagagtctmgcttttttattcaaataaarggagagttcaagggaacagtccccacagggtctctccaaatataagasacacagcctcctcttatccctactccttgacagcattgtccctccttccttcctcactagctgaagtacttagaggttacagtcttcccagtctacttaatgcacgttccctcttatatgtgatcccccyatatgtcatacattgcaagtgta

SEQ ID NO: 85776 - DNA, 599 bp, Chicken  19866894385186_2
  misc_feature (1)..(11): n is any nucleotide
nnnnnnnnnnntgatcatatttatgtcatcattggacctgatctaattcagacatgacaccattgtggattgtgtagaaaacccagcagcagttacactggacatctgtttcactgtgggaaaggaggtctgagaagagactcaacctactgtgtaggcccgtggagcctgagaatccccttgctgctcaagtccacacactgatacgatggtcctgtgcaytgagggtgttgggaaaaatcttgcttaaataggcttgctcaattatctttatcccaaaaagagacagaggagagtctmgcttttttattcaaataaarggagagttcaagggaacagtccccacagggtctctccaaatataagasacacagcctcctcttatccctactccttgacagcattgtccctccttccttcctcactagctgaagtacttagaggttacagtcttcccagtctacttaatgcacgttccctcttatatgtgatcccccyatatgtcatacattgcaagtgtaattaactttatgccacctagggcagagaagttaatattaattaacctattaagactgtgcagtgagtccaaagttctt

SEQ ID NO: 85777 - DNA, 600 bp, Chicken  19866894385186_3
ttatgtcatcattggacctgatctaattcagacatgacaccattgtggattgtgtagaaaacccagcagcagttacactggacatctgtttcactgtgggaaaggaggtctgagaagagactcaacctactgtgtaggcccgtggagcctgagaatccccttgctgctcaagtccacacactgatacgatggtcctgtgcaytgagggtgttgggaaaaatcttgcttaaataggcttgctcaattatctttatcccaaaaagagacagaggagagtctmgcttttttattcaaataaarggagagttcaagggaacagtccccacagggtctctccaaatataagasacacagcctcctcttatccctactccttgacagcattgtccctccttccttcctcactagctgaagtacttagaggttacagtcttcccagtctacttaatgcacgttccctcttatatgtgatcccccyatatgtcatacattgcaagtgtaattaactttatgccacctagggcagagaagttaatattaattaacctattaagactgtgcagtgagtccaaagttcttaagttcaagttgttgatcaac

SEQ ID NO: 85778 - DNA, 600 bp, Chicken  19866894385186_4
attgtgtagaaaacccagcagcagttacactggacatctgtttcactgtgggaaaggaggtctgagaagagactcaacctactgtgtaggcccgtggagcctgagaatccccttgctgctcaagtccacacactgatacgatggtcctgtgcaytgagggtgttgggaaaaatcttgcttaaataggcttgctcaattatctttatcccaaaaagagacagaggagagtctmgcttttttattcaaataaarggagagttcaagggaacagtccccacagggtctctccaaatataagasacacagcctcctcttatccctactccttgacagcattgtccctccttccttcctcactagctgaagtacttagaggttacagtcttcccagtctacttaatgcacgttccctcttatatgtgatcccccyatatgtcatacattgcaagtgtaattaactttatgccacctagggcagagaagttaatattaattaacctattaagactgtgcagtgagtccaaagttcttaagttcaagttgttgatcaaccttggtaacttaagccttatttggtgagagttttcaaaataagtacag

SEQ ID NO: 85779 - DNA, 600 bp, Chicken  19866894385186_5
cactgatacgatggtcctgtgcaytgagggtgttgggaaaaatcttgcttaaataggcttgctcaattatctttatcccaaaaagagacagaggagagtctmgcttttttattcaaataaarggagagttcaagggaacagtccccacagggtctctccaaatataagasacacagcctcctcttatccctactccttgacagcattgtccctccttccttcctcactagctgaagtacttagaggttacagtcttcccagtctacttaatgcacgttccctcttatatgtgatcccccyatatgtcatacattgcaagtgtaattaactttatgccacctagggcagagaagttaatattaattaacctattaagactgtgcagtgagtccaaagttcttaagttcaagttgttgatcaaccttggtaacttaagccttatttggtgagagttttcaaaataagtacagacatcaagctaagaggaatttgcaagcctctgcacaacttgtctgcaaggatagcttggtcacaaacctcttttatctcaattcctccttttctcttcttatcatctgattgtacttgcaaacttttact

SEQ ID NO: 85780 - DNA, 600 bp, Chicken  19866894385187_1
ccaggtttgcttacttcagccttcatatgcagatggaagcctgcatttatggctcagaactttaataggtgcaataagcaggttcccaaagacactcgtctaaactaaagcaagatatatctgtgatcattacaagtctccaaaggccgctgccatcaacaaggatcttcctgctctacttgtgctgagaccctggaccaaaagatctttgccagcataaaatgtttacaatctgaggccatgctgcacattgctgagctagacgacatgaagccttaatgctactgtgacaaacagagragctaatttaacctgtttgctttctttactcaacacagctcattagctcaagctgcatgcatgcactcttcagatgtgaagcagggcacagcagatacagggcgctaagaggatacaacaacacagmctaacagcactcaccacaatgcacagtaagttacagcacattagtagtattttgatttttgtagacatcaaagaaaagagttttcaggagggatttgaaggtacatagcaagggaatctgtttgccttctttgagtcagcaatcagtggggatgttctggagaaggggtgaaa

SEQ ID NO: 85781 - DNA, 600 bp, Chicken  19866894385187_2
cattacaagtctccaaaggccgctgccatcaacaaggatcttcctgctctacttgtgctgagaccctggaccaaaagatctttgccagcataaaatgtttacaatctgaggccatgctgcacattgctgagctagacgacatgaagccttaatgctactgtgacaaacagagragctaatttaacctgtttgctttctttactcaacacagctcattagctcaagctgcatgcatgcactcttcagatgtgaagcagggcacagcagatacagggcgctaagaggatacaacaacacagmctaacagcactcaccacaatgcacagtaagttacagcacattagtagtattttgatttttgtagacatcaaagaaaagagttttcaggagggatttgaaggtacatagcaagggaatctgtttgccttctttgagtcagcaatcagtggggatgttctggagaaggggtgaaaaagaagcagcaaaccagcagtatggttgtaagctccccctccccaaggcatcaccttattaggcaaaagtagaatgaattcggaggatgagaacagacaatatctgggacatgagcaaaccattttg

SEQ ID NO: 85782 - DNA, 600 bp, Chicken  19866894385190_1
gaaaaacaaattatttcttccatggtaccagacatagtaattccaagtgcacaaagcctaccttcccttcacatgtttcatcagcattattttgagcaagaaaatatatgtaaagcccaacaacagcatatagaaagcagagacctgctcagagcagcattttcatggggaagtgagtcagaaaattgaagagaaaaagtatgactttttcaaataatgttagctactgatacttacagcttaacttatgttttacagaagaagggatcttcgaacatatataccacaatgatccatttyagaatctggatctgaagtttggcatcccatattctgctatcacagtgaatttgtaacactcaatttaccggcttactgattgagcctttttggggatgagtctcagattatcgctctggaagattattgatgagcaccagaggcacagcagcaacccacagagaaactgattttttcccttttccttctgttcagtcatttttgttcaagattttcttttgtagttcagcatgtacataattttcttcctgtgtgttcaatttctctccaaaaaagagcagaaataatacccaagaggta

SEQ ID NO: 85783 - DNA, 600 bp, Chicken  19866894385190_2
tatcacagtgaatttgtaacactcaatttaccggcttactgattgagcctttttggggatgagtctcagattatcgctctggaagattattgatgagcaccagaggcacagcagcaacccacagagaaactgattttttcccttttccttctgttcagtcatttttgttcaagattttcttttgtagttcagcatgtacataattttcttcctgtgtgttcaatttctctccaaaaaagagcagaaataatacccaagaggtactcctgtggaggtaaagtagactgttttctcttccaygaatagagctgggtgtgttgcagtatcctaggatgaaaggtagagacataagaggtaaaaaacagtactgagaatacaaaaatgatctctccctgctaattttattttctcgttgcttcatgtttaaaagccaaaataatgtgataagaagaaaatatacaaaacaaaagccaaacactatgtgttctgattaaacaagctgtcaaaaaaatacaaacaaatgcacaaaaaaatctatactgtacattaccagtatccataaataatattttacctcatgtttccatcacttttctttgc

SEQ ID NO: 85784 - DNA, 600 bp, Chicken  19866894385191_1
tgatgggttttcagtcatttcatggtcacattctctcagactgaataaaatagagtggtaaatctttcatgtcagctcccaggcagacaacacacctttctgcagcgagactgtatgaagggtagaatcaatgacagttctgctccagtctctggaagttctgttgttttgtgccattgtcccacagctaatggagagcctgatcaggggaagggtctgtccttttaaccaatgggtttggggacagtcagcaagtactttgctccaactttgtgctgttgtgtaggctgtatctcttcyacacaccataggagaataagattggtggggaccttcaagscttctttattccttctcctgcctccagactggttcagctttacctgtgccagttcctggagaagcttgactaggttccttccccaagtggtgcacactttttcagatgcagagggccccaaaggagatgtgacatttcagatgaggcctttccagtgctgagcagagctgaaggattgccttgtgctgaccatccatttgcacatttggtaatgtggtccatttttttgcagcaaggagtcacgtcaagcttgtgataag

SEQ ID NO: 85785 - DNA, 600 bp, Chicken  19866894385191_2
ctgaataaaatagagtggtaaatctttcatgtcagctcccaggcagacaacacacctttctgcagcgagactgtatgaagggtagaatcaatgacagttctgctccagtctctggaagttctgttgttttgtgccattgtcccacagctaatggagagcctgatcaggggaagggtctgtccttttaaccaatgggtttggggacagtcagcaagtactttgctccaactttgtgctgttgtgtaggctgtatctcttcyacacaccataggagaataagattggtggggaccttcaagscttctttattccttctcctgcctccagactggttcagctttacctgtgccagttcctggagaagcttgactaggttccttccccaagtggtgcacactttttcagatgcagagggccccaaaggagatgtgacatttcagatgaggcctttccagtgctgagcagagctgaaggattgccttgtgctgaccatccatttgcacatttggtaatgtggtccatttttttgcagcaaggagtcacgtcaagcttgtgataagctacatctcccacctctaccctctacccacctcccaacag

SEQ ID NO: 85786 - DNA, 600 bp, Chicken  19866894385193_1
tctcatttaaggtatgtagtttcatatgtacctcaaagttttggcatagtgtatttctttggcatactacatttcttcaggctgaaattcatagtgaaaaacaattttgatcaatagttatatccttcagagttgttctacaaaactttgattgattaacccatcttttctttattcattcagcattggatgaaatgaggaacatcccataaaataagtgagatttgtccccctctgctcccctcattcttagtagttcccatttctgggccagaagaaacaagctgtttggtttacttstcaatttaagctctgaaagcttaaaaaaaaaaaaaaatctattccttccatagaaggatacctaccaagaatttatcagaagctcaaaaattccatcactttgggggttctatattcagccctatgaagaataaatcattcctatttgggatgaagccagctagaaggtattgcacagtaacataatctctgttgcttcctcaagggctcttctctgggtcattgtttggcctttctggatggggtttgtttgacaaaacctctgatgtaataatagacaggatagagaatatgatacca

SEQ ID NO: 85787 - DNA, 600 bp, Chicken  19866894385195_1
caccgtatgaaagctgtgttatagcaccaagggcattgttctgtactagtgcaattgacaccatgatgcaggctgttgtgccacagcatcctctacctctttgcacatcaggttactacctgtgaaataccacggtcatcctttgctctcaacgtttatccttctctgaggctgaagctcctctcacagcatcttcagctctggtgaatttatgtttgttctcttattatctcatactcagagtgtcagggaaaaaaatggctaaaaaagcaatgattgtaatgatcccctgtgggtgcragaagaccctctgttatctgaagcctatgatttctggcctttgcaggcagctggccagcacagcacactatgcaatgcctccagatgcttctctatcccaaataacaggaaattaatgtttgctttcgagtgttctcaggcagcagcttttcaggaagcagcggaacccctattatttatatagatctcattattacaaactagaactccacaccgccactgtaataaggcgttacccaggagaccactgaaaaacctgaacaaaatcctgtaatacactgggatgaaatccaaacacaa

SEQ ID NO: 85788 - DNA, 600 bp, Chicken  19866894385197_1
gtttttagggctaagacgacaggccatccttgacctacatagcttagaatgctatatcacattagtttattatgtgacttttacttcttccatcctacagcttcacctaagtaaaatataaaaaaaaaaccaaacctgtgagaagaattactctcactaattatgtgtcttacacaacacccttaattccagagaaaataattaactcttatctgaacaaataacttaccatactttatgtctatcagtaatgaattaaggaagaccaaacaaaaataagtgacagcagcaaggactcayattagcctgtggcaaacacatccattgtatttttcttagagacatttcaagtcaagtcaaatgtaagatatggactagcaatttctttgtttagcccagtcacttaatttataaaatatctaggttccctagatcacagtgtgtagggccaactcccagaagcagtagtacagtatcttcattgcatgcaattttcattataatagaccctaatataaaagctgagatttataaaataagtgaagtgtttatagaawtatttatagaagtgtgcctttagagttgtagaaaagcaagagc

SEQ ID NO: 85789 - DNA, 600 bp, Chicken  19866894385197_2
aaggaagaccaaacaaaaataagtgacagcagcaaggactcayattagcctgtggcaaacacatccattgtatttttcttagagacatttcaagtcaagtcaaatgtaagatatggactagcaatttctttgtttagcccagtcacttaatttataaaatatctaggttccctagatcacagtgtgtagggccaactcccagaagcagtagtacagtatcttcattgcatgcaattttcattataatagaccctaatataaaagctgagatttataaaataagtgaagtgtttatagaawtatttatagaagtgtgcctttagagttgtagaaaagcaagagccaagaccccaaatttctgtgttatacattcagatatcactgattttagtttgataacatgcattcttgctgtattaygtaaaaaaaaaaaagtagctgatacattttcaggaaaataaattaattcatgtgtatagcataaaaaaatggactttaccttttatgcgtttgattttataagccatgcttaactctgatattttccttgtgtgccatcctaataaaagttcatcagtcttaccaatgacatttaatcat

SEQ ID NO: 85790 - DNA, 600 bp, Chicken  19866894385197_3
gcaatttctttgtttagcccagtcacttaatttataaaatatctaggttccctagatcacagtgtgtagggccaactcccagaagcagtagtacagtatcttcattgcatgcaattttcattataatagaccctaatataaaagctgagatttataaaataagtgaagtgtttatagaawtatttatagaagtgtgcctttagagttgtagaaaagcaagagccaagaccccaaatttctgtgttatacattcagatatcactgattttagtttgataacatgcattcttgctgtattaygtaaaaaaaaaaaagtagctgatacattttcaggaaaataaattaattcatgtgtatagcataaaaaaatggactttaccttttatgcgtttgattttataagccatgcttaactctgatattttccttgtgtgccatcctaataaaagttcatcagtcttaccaatgacatttaatcattgatttttaatcattgtttataatcattgatattttattacttatattggtcatattgcattattattagaccacaatgcagtgtggcaaagggcagcaacgaataaagaacatattggg

SEQ ID NO: 85791 - DNA, 599 bp, Chicken  19866894385198_1
  misc_feature (1)..(230): n is any nucleotide
nnnnnnnnnnnnnnnnnnnnnnnnnnnnnnnnnnnnnnnnnnnnnnnnnnnnnnnnnnnnnnnnnnnnnnnnnnnnnnnnnnnnnnnnnnnnnnnnnnnnnnnnnnnnnnnnnnnnnnnnnnnnnnnnnnnnnnnnnnnnnnnnnnnnnnnnnnnnnnnnnnnnnnnnnnnnnnnnnnnnnnnnnnnnnnnnnnnnnnnnnnnnnnnnnnnnnnnnnnnnnnnnnnnnnnagctgcagaatccccagcatgcgggcacgctcctcagcactgacagctgtgcagtgagggagcgggctgkgacgtgctgggcagcccacgcgtcccccgctgggttttgcacccattctcctccccgacctccccacgttactcactgcagttctgggggtccgtgccttccgccccacagcctgcragtgccagaagcaccgcagtgctgagagccacgccgagcatcctcagaacctcagtgccagcggtgcccctctgacgctgcatcctctccgttctcagctgcctccagcagtgctgtgctcaccttctgctcccgggggcttatatacatgcctggccctggctcccaggggtggtgctcac

SEQ ID NO: 85792 - DNA, 599 bp, Chicken  19866894385198_2
  misc_feature (1)..(113): n is any nucleotide
nnnnnnnnnnnnnnnnnnnnnnnnnnnnnnnnnnnnnnnnnnnnnnnnnnnnnnnnnnnnnnnnnnnnnnnnnnnnnnnnnnnnnnnnnnnnnnnnnnnnnnnnnnnnnnnnnagctgcagaatccccagcatgcgggcacgctcctcagcactgacagctgtgcagtgagggagcgggctgkgacgtgctgggcagcccacgcgtcccccgctgggttttgcacccattctcctccccgacctccccacgttactcactgcagttctgggggtccgtgccttccgccccacagcctgcragtgccagaagcaccgcagtgctgagagccacgccgagcatcctcagaacctcagtgccagcggtgcccctctgacgctgcatcctctccgttctcagctgcctccagcagtgctgtgctcaccttctgctcccgggggcttatatacatgcctggccctggctcccaggggtggtgctcactgaccaatggggttgtggtgcagcaggatcgggagtggccctctcccttggcaccgggaccagcggaacgatgccaggacctgacaaacaagtctggtgcctggtactggtctcacg

SEQ ID NO: 85793 - DNA, 599 bp, Chicken  19866894385219_1
  misc_feature (1)..(68): n is any nucleotide
nnnnnnnnnnnnnnnnnnnnnnnnnnnnnnnnnnnnnnnnnnnnnnnnnnnnnnnnnnnnnnnnnnnnctgcaagatgttggcctcagtcctgcaacccctccttcatgcaggacgtatacggtggagaagagcacatgctttggcatctggaggacatagatcccattgtatccactgagacagaagggaagacctgcagaaggcaaacttcatcatctcccatagcaaaagaaatgatgaccacctgctcaagaacattaatttatgaacagataccatatcttccctgcatgcatcycaggtttggtctgatggcctttttcttcctgaaagttcctggcccttccccaggagtgcaaagcaattaaatgccaggctcgctgttgcaaacagggtggtgtaacacctgaatgcacattcccctttttgacttgtcttgctggagagctcagcaaagtgaagaaatctgctgtgtgtgtgtgtggtggagtggaacatagatgaacagattggctaatgacatcctggacatatgctgaaggtagcttgttccccactgacccagctgtgaaaaaaaggcctttgctgctttgtcct

SEQ ID NO: 85794 - DNA, 600 bp, Chicken  19866894385243_1
ttctccctgcagctccttgacctcacttcaagtttcttgtctggctgaatgggagctgtacatggctgtagagtttggatgcatttttagtgccagtggctccagctggtctgcctctgctccagagagctggtggagacggagtaggaaaatagcacaggaaaaagatgtgaccatggcttccttttgtaatccttgggtgctctgtttttaacctagctgggaaaaccctgagggatgtctccgcaaggaaaataaagagagagagagcactgagttgtcgaggtcaaccagctccaygtgtttcgggatggggcaggctgtgcagagccttggccacagacaaaaccttctctgagctgtggggtgaaaccaggcccaaggcagctcccatggactggaagaacaaaccatggtgttgccatcacgctacgggtgaactgagcccaagccagcccatgtgaacggtctgtttaagtcactgcatcttcaacctctgtcttctaggtcaggcaagaccttggagcaccaaggtctggaactgctgacgatggcaaggtgccatcatgctcaccggatcatagaatcattaaggctgga

SEQ ID NO: 85795 - DNA, 600 bp, Chicken  19866894385246_1
gtccttcaacagaaaaaaaaccaaaaagtgatgttctgtcttcttttggtttgttttggggtgtttttttttgttgttgttttgtttttggaatagcagcactgcagaattacctgctgtggtcatttgctccacaatcttcatttcaccttaggactcctcggtgagcatagcagggtgagatctgagtggggctccccatggtgcccacaggtgtgtgctgcaagcctcgcaccctggtgcagcagtgacctgcagctgtggtgttcatacacagatactgaaatgtctcctatggcrtatgcmtgatgtggaccatagagattttgtttgtttttaataatcctgcattaccttggatgtcttcttttgcttttttgggctgtgagcagttcaggctgtgtgttctgctcttctgtcccctcctgctcagaagccccaaatcacagggccttcattttggtcctcatgtccttcaggagcctgtggtctgtaygtcctggagccatgtctgcatcccctcaaagacagcaagttcttcagctgtcttttaaatacaaagtcttagaatgttaccaagtagtttsagcttgagggttt

SEQ ID NO: 85796 - DNA, 600 bp, Chicken  19866894385246_2
caacagaaaaaaaaccaaaaagtgatgttctgtcttcttttggtttgttttggggtgtttttttttgttgttgttttgtttttggaatagcagcactgcagaattacctgctgtggtcatttgctccacaatcttcatttcaccttaggactcctcggtgagcatagcagggtgagatctgagtggggctccccatggtgcccacaggtgtgtgctgcaagcctcgcaccctggtgcagcagtgacctgcagctgtggtgttcatacacagatactgaaatgtctcctatggcrtatgcmtgatgtggaccatagagattttgtttgtttttaataatcctgcattaccttggatgtcttcttttgcttttttgggctgtgagcagttcaggctgtgtgttctgctcttctgtcccctcctgctcagaagccccaaatcacagggccttcattttggtcctcatgtccttcaggagcctgtggtctgtaygtcctggagccatgtctgcatcccctcaaagacagcaagttcttcagctgtcttttaaatacaaagtcttagaatgttaccaagtagtttsagcttgagggtttttattt

SEQ ID NO: 85797 - DNA, 529 bp, Chicken  19866894385246_3
ccccatggtgcccacaggtgtgtgctgcaagcctcgcaccctggtgcagcagtgacctgcagctgtggtgttcatacacagatactgaaatgtctcctatggcrtatgcmtgatgtggaccatagagattttgtttgtttttaataatcctgcattaccttggatgtcttcttttgcttttttgggctgtgagcagttcaggctgtgtgttctgctcttctgtcccctcctgctcagaagccccaaatcacagggccttcattttggtcctcatgtccttcaggagcctgtggtctgtaygtcctggagccatgtctgcatcccctcaaagacagcaagttcttcagctgtcttttaaatacaaagtcttagaatgttaccaagtagtttsagcttgagggtttttatttggatattagaggggtgtcttttcagagcgaagctaaggaatatttttaaaagtagttgtaccgtcaagtcatgttatttctttaaaattaccttttatcagttattttatttcttcagt

SEQ ID NO: 85798 - DNA, 438 bp, Chicken  19866894385246_4
gtctcctatggcrtatgcmtgatgtggaccatagagattttgtttgtttttaataatcctgcattaccttggatgtcttcttttgcttttttgggctgtgagcagttcaggctgtgtgttctgctcttctgtcccctcctgctcagaagccccaaatcacagggccttcattttggtcctcatgtccttcaggagcctgtggtctgtaygtcctggagccatgtctgcatcccctcaaagacagcaagttcttcagctgtcttttaaatacaaagtcttagaatgttaccaagtagtttsagcttgagggtttttatttggatattagaggggtgtcttttcagagcgaagctaaggaatatttttaaaagtagttgtaccgtcaagtcatgttatttctttaaaattaccttttatcagttattttatttcttcagt

SEQ ID NO: 85799 - DNA, 600 bp, Chicken  19866894385255_1
ccaagcaggcagcaggcccggggtttgttttcaaaagagataaaggagacataaatcagcatagtttgtggcagcttgcagcctgcgtggggggaagctgggatgccatcatgacagccacttggtcacgcagaggctcagatcagcagagcctagtgatgatgcagcctgcagaagtttatatcatcatgtcctttcgcccgcatagtctggggctggtgatggatggctgctacagcctcccctccccagcgcctggctgcgctgtgaggccaggctgggcacagccaggctgtgacrccatgtgcgggagggggctgcacagggctgctccaaaggatttaaattccccaaccttctgtggggagtcaaaccctcctgtgctgcctgcattcagcgtgcccctggaagtgctggctactggcagattctgctcatgcatctgagcatgcgctggcactgctcacaactgcccccaaccacttactggtaccttccagatcccactccccatctactggctggggcactgggcactgcttgcttcatggataggaagggataagggcaaggaggaaccatgccagtgctgactgctgc

SEQ ID NO: 85800 - DNA, 600 bp, Chicken  19866894385260_1
gtaaaagctttaattactgggaacatccactgtagtccaagacctactcagtcccgtcactaaactacatcccatactgccatgtctacatgttccttaaatatctccagaggtgggaattgtgtggaaaaaaatcaacacagcttttggggagtaaaatctcaagaactgaggtatgagctggatgtcctggagtacctggagaaactcaaggtcaggggatggggctgtgagcacctgatggagctgaggtgtccctgttcactgcaggggagttggacctcatagcctttaagggcyccttccaactcaaccgattctgtaattctatgattctattccatgtcagtgctcttaaacaatggaagagtagcaaagacctcagaatgggctgaaacctccaataaatgaataaataaaagcctcacagcaaggaacctccaatggttcgggttcttctcggcactttgtgggtgacggggacaccagtgttgccaccattgctgatggtacgggctcaaaccaaccccaaagcacagcgggatggaaacagcatctcacagaaggcaccaaccaacaggaaacccagtgttgacagct

SEQ ID NO: 85801 - DNA, 600 bp, Chicken  19866894385264_1
agctgccagaatacaaaagaccagctctgcctggcatttagaatccctctgcagcttgcatgagttagtgctgatatgctgtgattgactggacaacttgttagtatcacaaagagtccattttgcaaagcagtccatggcccatctgatgggaacaagatactaggacgttttggttgctgtttatatccacttgagtgtggacaaatcctaattatccttggcattaagtgcaggctcctgagcaaatgtacaactgttagggctccttcttttggcatagaacttgtgttttgttcyagaagtcttctgcaagtggtgtttgtattcccaacctgttgcaactgtgcattgcttgttaagacaaaagcratgggaaaaggcattcctctcccctccggttctttccctgaggttttctcctcctcttcccaggcacagccgtgccagacaattctctattctccacttctgctttatcagccccagcagaaactcttggtcaggatyttcttggacaggtctgagttcttcagcaattgattctcctgctttttctcctgctgcatccaggagaggactgagctgtgctgcagaaaa

SEQ ID NO: 85802 - DNA, 600 bp, Chicken  19866894385264_2
gatatgctgtgattgactggacaacttgttagtatcacaaagagtccattttgcaaagcagtccatggcccatctgatgggaacaagatactaggacgttttggttgctgtttatatccacttgagtgtggacaaatcctaattatccttggcattaagtgcaggctcctgagcaaatgtacaactgttagggctccttcttttggcatagaacttgtgttttgttcyagaagtcttctgcaagtggtgtttgtattcccaacctgttgcaactgtgcattgcttgttaagacaaaagcratgggaaaaggcattcctctcccctccggttctttccctgaggttttctcctcctcttcccaggcacagccgtgccagacaattctctattctccacttctgctttatcagccccagcagaaactcttggtcaggatyttcttggacaggtctgagttcttcagcaattgattctcctgctttttctcctgctgcatccaggagaggactgagctgtgctgcagaaaatgtctcaggtcatgtatgggaaccagtatcatcctgcagcctgtattctctacatagatgcaagccatcact

SEQ ID NO: 85803 - DNA, 600 bp, Chicken  19866894385264_3
ctaattatccttggcattaagtgcaggctcctgagcaaatgtacaactgttagggctccttcttttggcatagaacttgtgttttgttcyagaagtcttctgcaagtggtgtttgtattcccaacctgttgcaactgtgcattgcttgttaagacaaaagcratgggaaaaggcattcctctcccctccggttctttccctgaggttttctcctcctcttcccaggcacagccgtgccagacaattctctattctccacttctgctttatcagccccagcagaaactcttggtcaggatyttcttggacaggtctgagttcttcagcaattgattctcctgctttttctcctgctgcatccaggagaggactgagctgtgctgcagaaaatgtctcaggtcatgtatgggaaccagtatcatcctgcagcctgtattctctacatagatgcaagccatcactacaaatgtaaatgagactgagacatatgcattatttatagtagaaagggtgtgttaattgaagtggctcagagatctactctttcttggctacatttttggtgattctttacctttttcgtggtgctgtgccctttat

SEQ ID NO: 85804 - DNA, 483 bp, Chicken  19866894385264_4
gacaggtctgagttcttcagcaattgattctcctgctttttctcctgctgcatccaggagaggactgagctgtgctgcagaaaatgtctcaggtcatgtatgggaaccagtatcatcctgcagcctgtattctctacatagatgcaagccatcactacaaatgtaaatgagactgagacatatgcattatttatagtagaaagggtgtgttaattgaagtggctcagagatctactctttcttggctacatttttggtgattctttacctttttcgtggtgctgtgccctttatggaaakattcaagtgtaaggacttgttgacctgaatgtccaggtgtatttgccattgctcctcgaaataattctttctctttatataaactaagtctttggagctttatccacagaaggataaagctcgaaaccctggattcaaaccctaatcaggtcatgaatgaaaatagattaggtgaggggaaga

SEQ ID NO: 85805 - DNA, 580 bp, Chicken  19866894385271_1
acgtggttttaattatcaacaagaagcctaaggacacaatcagattaaatttaaacatgcatgtgagaaacaaaataaatatagatataaggagataggaacagatacaaatcaatctcacgggaggtgagaaggaaagggattaataattaaaatggatatattgcttgtttattcatagaagcattgaatggcctgggttgaaaaggaccacaatgatcatctagtttcaaacacgctgctacgggcaggttcgccaaccactagaccaggctgcccagagccacatccagcctggcyatcaatgcctccagggatggggcatccacaacctccttgggcaacctgttccagtgcttcaccaccctttgtgtgaaaaamtttttcctaatatctaatctaaacctctcctgtctcagtttaagaccattyccccttgtcctatcactatccacccttgtaaacagccattccccttcttgtttatatgctcccttcaggtaatggaaggccgcaatgcggtctccctggagccttctcttctccaagctaaacaagcccagttccttcaacctttcct

SEQ ID NO: 85806 - DNA, 499 bp, Chicken  19866894385271_2
tagatataaggagataggaacagatacaaatcaatctcacgggaggtgagaaggaaagggattaataattaaaatggatatattgcttgtttattcatagaagcattgaatggcctgggttgaaaaggaccacaatgatcatctagtttcaaacacgctgctacgggcaggttcgccaaccactagaccaggctgcccagagccacatccagcctggcyatcaatgcctccagggatggggcatccacaacctccttgggcaacctgttccagtgcttcaccaccctttgtgtgaaaaamtttttcctaatatctaatctaaacctctcctgtctcagtttaagaccattyccccttgtcctatcactatccacccttgtaaacagccattccccttcttgtttatatgctcccttcaggtaatggaaggccgcaatgcggtctccctggagccttctcttctccaagctaaacaagcccagttccttcaacctttcct

SEQ ID NO: 85807 - DNA, 448 bp, Chicken  19866894385271_3
aggaaagggattaataattaaaatggatatattgcttgtttattcatagaagcattgaatggcctgggttgaaaaggaccacaatgatcatctagtttcaaacacgctgctacgggcaggttcgccaaccactagaccaggctgcccagagccacatccagcctggcyatcaatgcctccagggatggggcatccacaacctccttgggcaacctgttccagtgcttcaccaccctttgtgtgaaaaamtttttcctaatatctaatctaaacctctcctgtctcagtttaagaccattyccccttgtcctatcactatccacccttgtaaacagccattccccttcttgtttatatgctcccttcaggtaatggaaggccgcaatgcggtctccctggagccttctcttctccaagctaaacaagcccagttccttcaacctttcct

SEQ ID NO: 85808 - DNA, 600 bp, Chicken  19866894385272_1
atgtagtgataccctgggtcattcaagatatcaaccccattatgctccagggttttttcattactgtatgcctgaacctcatttcagcttgtctcaatacttcttgagaagattagctgacccagtcttctcattttattcaatttattcctcagatcctaaaaaggcagtcttggaaagctaccttagccttcaaagttgcagctctggatatctaatgtgcataatagcagttacactcagttcacctagaatttgagatatatgtgcaaatgtgagtctccaagtaatttaaacacrtgttctggagaagcaaaaactaaaagcttaatgtcagaaattaaaagcaaacaattcacaaattgacaggtagggaaacatcagctgctcccagacagttaattatttctccatttgcctttgtgggaggkgagtgtggaccataactaaagagtcaaagcaaggtttagaactcataagtckcccaagaatkaatgcattcaggtaaatattttaccattttcatgrattgaagtcttgcaatttttctagagcttgatgatgtacctcagagaaacagatgttttctcgtacactctg

SEQ ID NO: 85809 - DNA, 600 bp, Chicken  19866894385272_2
cattttattcaatttattcctcagatcctaaaaaggcagtcttggaaagctaccttagccttcaaagttgcagctctggatatctaatgtgcataatagcagttacactcagttcacctagaatttgagatatatgtgcaaatgtgagtctccaagtaatttaaacacrtgttctggagaagcaaaaactaaaagcttaatgtcagaaattaaaagcaaacaattcacaaattgacaggtagggaaacatcagctgctcccagacagttaattatttctccatttgcctttgtgggaggkgagtgtggaccataactaaagagtcaaagcaaggtttagaactcataagtckcccaagaatkaatgcattcaggtaaatattttaccattttcatgrattgaagtcttgcaatttttctagagcttgatgatgtacctcagagaaacagatgttttctcgtacactctgagatggtgcacagctgacattctgagtttgaacagaaaacatccatgtatgacagttctgatgaaatgtgtaactatgttatgctccagaaatgaaaatgtatttttggaggctgcaatggaggaattgtt

SEQ ID NO: 85810 - DNA, 600 bp, Chicken  19866894385272_3
ccttagccttcaaagttgcagctctggatatctaatgtgcataatagcagttacactcagttcacctagaatttgagatatatgtgcaaatgtgagtctccaagtaatttaaacacrtgttctggagaagcaaaaactaaaagcttaatgtcagaaattaaaagcaaacaattcacaaattgacaggtagggaaacatcagctgctcccagacagttaattatttctccatttgcctttgtgggaggkgagtgtggaccataactaaagagtcaaagcaaggtttagaactcataagtckcccaagaatkaatgcattcaggtaaatattttaccattttcatgrattgaagtcttgcaatttttctagagcttgatgatgtacctcagagaaacagatgttttctcgtacactctgagatggtgcacagctgacattctgagtttgaacagaaaacatccatgtatgacagttctgatgaaatgtgtaactatgttatgctccagaaatgaaaatgtatttttggaggctgcaatggaggaattgtttttgtatattttgtatgttaaagcccttatgtactgactgcttttttagtct

SEQ ID NO: 85811 - DNA, 600 bp, Chicken  19866894385272_4
caaagttgcagctctggatatctaatgtgcataatagcagttacactcagttcacctagaatttgagatatatgtgcaaatgtgagtctccaagtaatttaaacacrtgttctggagaagcaaaaactaaaagcttaatgtcagaaattaaaagcaaacaattcacaaattgacaggtagggaaacatcagctgctcccagacagttaattatttctccatttgcctttgtgggaggkgagtgtggaccataactaaagagtcaaagcaaggtttagaactcataagtckcccaagaatkaatgcattcaggtaaatattttaccattttcatgrattgaagtcttgcaatttttctagagcttgatgatgtacctcagagaaacagatgttttctcgtacactctgagatggtgcacagctgacattctgagtttgaacagaaaacatccatgtatgacagttctgatgaaatgtgtaactatgttatgctccagaaatgaaaatgtatttttggaggctgcaatggaggaattgtttttgtatattttgtatgttaaagcccttatgtactgactgcttttttagtctctgcttgtga

SEQ ID NO: 85812 - DNA, 600 bp, Chicken  19866894385272_5
agcagttacactcagttcacctagaatttgagatatatgtgcaaatgtgagtctccaagtaatttaaacacrtgttctggagaagcaaaaactaaaagcttaatgtcagaaattaaaagcaaacaattcacaaattgacaggtagggaaacatcagctgctcccagacagttaattatttctccatttgcctttgtgggaggkgagtgtggaccataactaaagagtcaaagcaaggtttagaactcataagtckcccaagaatkaatgcattcaggtaaatattttaccattttcatgrattgaagtcttgcaatttttctagagcttgatgatgtacctcagagaaacagatgttttctcgtacactctgagatggtgcacagctgacattctgagtttgaacagaaaacatccatgtatgacagttctgatgaaatgtgtaactatgttatgctccagaaatgaaaatgtatttttggaggctgcaatggaggaattgtttttgtatattttgtatgttaaagcccttatgtactgactgcttttttagtctctgcttgtgagaccagatagaaaaattttgatgatatttttctgt

SEQ ID NO: 85813 - DNA, 600 bp, Chicken  19866894385272_6
tttctgtatatatttcttagaaaaagaatgaaattcccaaacaagttctattttgcttattatcattgtaaaaatatccatcttgtccttttatatggctcatttcaagtaataaatagatgcttttctcaagagatcatcaatgcacacttctctttatctgtacaataaaaagatgccacactgtgagagttatagctttcctaatttcccacagacctggcagatattgattgtgcacatatcaatatttacatgaatcagctggggaagaatggcaccctgtgggagggaccccaygtggaagaggggcaaatgatgactgtgaaggagataaagcatcatggactgaccacagccctcattcccctgcaccacgtgggggagaagagtgtggatgggagaaaggtgtttttagtttgcttttagtttctcactgttctagtctgttagtaataggtaataaattacattaatctccctatgctgagtctgtctaatccatgatggtaattgatgagtgatatctctgtccttatctcatgcagtgagccttttttcattatattttctccccctgtatttataaagaggcagagt

SEQ ID NO: 85814 - DNA, 600 bp, Chicken  19866894385277_1
attattattattttgtgtgtgtctgtcagtgattcttagaagcaggaattggacttagatttttattttcatttttttaatctcctttgtattcccttgtgagagatgataaagcacaaagcgcaaaacccttatgaaaaaatgtaataaaactggaagaatggggtgaattggtttggagagactgaagcaacgctttactcattttcgttcacagtgcttcacctccccccccaaagtttgggtcggggtcacagatccgaaaggactcagtgggagctgcgggctgcacacattccraaccaaagcagaaaactccaatgaaaccactgccacttcttgttgtaatcgctgttccgttccctggcagctcatgtttaattaaaaccttaattttaaacagaaataaatgccgagaaatgccaacgcctcttaagtcagcagtgtttcttagcgataattagacaacgtctccattacgtgtagacatttgtcaaggcatttctcagcacatttgttgtccttttataactatctctgcattttgaccattcctaataagttctcacaggggagcatgttcttattgcatccctgcat

SEQ ID NO: 85815 - DNA, 591 bp, Chicken  19866894385281_1
acctgcacactgtcttttctcatcttgggaaaccataaccaaacagcacaaagccagcacgatacctttcacctctggccgatactgcatgccgtcgtctttctttccaactgcgtttgtgtcatctgcttctagatgataaatacatgcatggatagctattaggaaaggcttaattccaagccactgcatacacatcattgagaataatagtcaaaggaaaaagtgcagtacaagcgcacacagtcccacattgttcctcctatccagccatggcaggagcatgtagagtcaataatmccagactctagcctaacacagggcacacctcaagctgtaggttttgaacttaaatctcttccattgtatgggcctaggttattttggttgagatatgtattctttttggaaccattcaaattacagatttaaacgtaaccagcaaagagatggtggaaagctgttattacaacaggaaggtcctaagtgcaattcaccttgatctgactgaaatcaagactccaaaattgtggatgcctcctccctggaagcattcaaggccaggctagatgagacttcaagcaacatggt

SEQ ID NO: 85816 - DNA, 600 bp, Chicken  19866894385288_1
cccatctggatggttttttatccagcacacctgtccaagtcattggttgctagctttaagttgcatgaaaatgcatcttttttttttccttctgtttgttgatcagtcaagctgactaaactaatcatgagatgtggtaaaaaatacttggctgtatcgtttttaacctgctggtcattttacagtgagctgggcaggtctacatgtggaaccgggatgttgctgggacagtttggctgttaatgtggggtcattcatttttgtgaaagagggagagctgcagtgtgtacagaaaacatkgataagcaatgcttatcaatagctacaagttatttaaggcatattaactgaggaagctttaatcctaaatgtgagttttgaatcaaaatcattgaatcaaaatcaattagtcataactgcatatcatcattattactgccttcacttgtattctgacaaaatcaaaaacagaaattactatgctataacatacgagaagactaagtgagaaatctgtattttatattaggagggtctgcaaagttctgagaggaactagtaggacatcggagctaccttttactccagcttcttagaaac

SEQ ID NO: 85817 - DNA, 600 bp, Chicken  19866894385288_2
tgcctcatgatcctctgagtaaagaatgtcatcctaacatctaacccaaatttcacatgttttagtttaaacgctccccttgtcctatcatgtagatacagacatatagatttaaaacttaaaaatatgctataattgcgactcctgatgaaaatgtcttaaaatgaaactttttgttcctacaaagtatatctggtgccatctgctgataataattaaaaaatgtttgcttgtgagatttaagctgagaggtctagtacttctcccaaaataaattaaattgtattttcaaatactgtrtgattagttgaagatggtagtgaagtaaagcgtagtgaagctttaacactctgaacttataattttaagtctttacaggctttcatttcatactttttggtttttgtttgtgtgtttgttttaagcgaagttgttgatcagtaattttctccacttgacagtggaattacagctttgggcagatactcttgttcccagataataattaattctcataaaaaacaaatgccacttgaacattcattatgcaggaatcaggaaaaaacaataaataaagaacacctgtgtcagggtgttata

SEQ ID NO: 85818 - DNA, 600 bp, Chicken  19866894385288_3
ataattttaagtctttacaggctttcatttcatactttttggtttttgtttgtgtgtttgttttaagcgaagttgttgatcagtaattttctccacttgacagtggaattacagctttgggcagatactcttgttcccagataataattaattctcataaaaaacaaatgccacttgaacattcattatgcaggaatcaggaaaaaacaataaataaagaacacctgtgtcagggtgttatatgattgggaaagatttcttgtacatattctccagcacttagaatttccagaaactccwattaagttttataaattttagtagtttcagttgaaggagtgtcagaagataggccttcaacccaaaagcaatgtaattcataccttgcgtatggtctcttgaaaacaaattgtctagcatatactcaatctttgaaaatggcggagctccaccctaccttgtaaaagcagaccaaaaggcattggcaggagtcatcttggaacagtcgtctgtgtcaggcaaaccaaatacacgtatttgtaatgctttgcaacgctttcctggtgtttagcattaacctgaaacacttttttttttttt

SEQ ID NO: 85819 - DNA, 595 bp, Chicken  19866894385290_1
ctttctgcaagcatatttcagtggaatgtatacatgtccaacatatatgtgaatgcagaaattcaagtgaatgcatttttggctcacgtgcacctcattcctccttgttgtttcttggtaggtgaacaaagtacagaagctgtggctcttcctagtttccccctgttctttggacaacactgtctgctctggtattttgttggagtgcaaaagaaagctttagggttgtggttttcttcagaactttttttgagagcacaagctcaatagctaactacacttacgtgttaaattttaatrtaagcagtccaaattagcagatttccttgatatagaaataagcacctttctaatgtctccattttagtactccattgcagctaccagaaaaacaattataagaaaattgtacatactgtttaactgaaatttcattcagatttatttaatatttaaatgattatcctatttttgaaggttgacgtctggtcctgagaataccctcttccactatctatctttggaaacaatgcatggaatctttattactccgactcacaaggaagttgcacggctcgggggctccatccaccct

SEQ ID NO: 85820 - DNA, 599 bp, Chicken  19866894385311_1
  misc_feature (1)..(194): n is any nucleotide
nnnnnnnnnnnnnnnnnnnnnnnnnnnnnnnnnnnnnnnnnnnnnnnnnnnnnnnnnnnnnnnnnnnnnnnnnnnnnnnnnnnnnnnnnnnnnnnnnnnnnnnnnnnnnnnnnnnnnnnnnnnnnnnnnnnnnnnnnnnnnnnnnnnnnnnnnnnnnnnnnnnnnnnnnnnnnnnnnnnnnnnnnnnnnnnnnncctgttactgcttctgactctgtggtgcaggaaaaaaaaagctgcagcgtttgcagaaatcaaggacagtcatgtctgtgagcctcaaaggaattggcacagcgcrrtgctcaccacacagcagaggaagcacctgtaataatgagtttcaggacaaaaaagaccaarattttaaagtgcctgaagttcaaaaggaggaaaagaaaatcctctgcataaattgtagagtaagaaataatttctctcctgcagggtgtgctcacaattcagcaatgacagtgcatctcaggctgcagcatgctgcagaatgccccagggcaggttgcggaacagcccargaacaggacacacatccacaatgtactgcagcactttatgagggcactcgatgagctgcagccacca

SEQ ID NO: 85821 - DNA, 599 bp, Chicken  19866894385311_2
  misc_feature (1)..(193): n is any nucleotide
nnnnnnnnnnnnnnnnnnnnnnnnnnnnnnnnnnnnnnnnnnnnnnnnnnnnnnnnnnnnnnnnnnnnnnnnnnnnnnnnnnnnnnnnnnnnnnnnnnnnnnnnnnnnnnnnnnnnnnnnnnnnnnnnnnnnnnnnnnnnnnnnnnnnnnnnnnnnnnnnnnnnnnnnnnnnnnnnnnnnnnnnnnnnnnnnncctgttactgcttctgactctgtggtgcaggaaaaaaaaagctgcagcgtttgcagaaatcaaggacagtcatgtctgtgagcctcaaaggaattggcacagcgcrrtgctcaccacacagcagaggaagcacctgtaataatgagtttcaggacaaaaaagaccaarattttaaagtgcctgaagttcaaaaggaggaaaagaaaatcctctgcataaattgtagagtaagaaataatttctctcctgcagggtgtgctcacaattcagcaatgacagtgcatctcaggctgcagcatgctgcagaatgccccagggcaggttgcggaacagcccargaacaggacacacatccacaatgtactgcagcactttatgagggcactcgatgagctgcagccaccac

SEQ ID NO: 85822 - DNA, 599 bp, Chicken  19866894385311_3
  misc_feature (1)..(132): n is any nucleotide
nnnnnnnnnnnnnnnnnnnnnnnnnnnnnnnnnnnnnnnnnnnnnnnnnnnnnnnnnnnnnnnnnnnnnnnnnnnnnnnnnnnnnnnnnnnnnnnnnnnnnnnnnnnnnnnnnnnnnnnnnnnnnnnnnnnncctgttactgcttctgactctgtggtgcaggaaaaaaaaagctgcagcgtttgcagaaatcaaggacagtcatgtctgtgagcctcaaaggaattggcacagcgcrrtgctcaccacacagcagaggaagcacctgtaataatgagtttcaggacaaaaaagaccaarattttaaagtgcctgaagttcaaaaggaggaaaagaaaatcctctgcataaattgtagagtaagaaataatttctctcctgcagggtgtgctcacaattcagcaatgacagtgcatctcaggctgcagcatgctgcagaatgccccagggcaggttgcggaacagcccargaacaggacacacatccacaatgtactgcagcactttatgagggcactcgatgagctgcagccaccacagcatgagcagagccagagcacgaggcgtgctgtaaagcaaggagttcactgcaggatgct

SEQ ID NO: 85823 - DNA, 600 bp, Chicken  19866894385311_4
aagctgcagcgtttgcagaaatcaaggacagtcatgtctgtgagcctcaaaggaattggcacagcgcrrtgctcaccacacagcagaggaagcacctgtaataatgagtttcaggacaaaaaagaccaarattttaaagtgcctgaagttcaaaaggaggaaaagaaaatcctctgcataaattgtagagtaagaaataatttctctcctgcagggtgtgctcacaattcagcaatgacagtgcatctcaggctgcagcatgctgcagaatgccccagggcaggttgcggaacagcccargaacaggacacacatccacaatgtactgcagcactttatgagggcactcgatgagctgcagccaccacagcatgagcagagccagagcacgaggcgtgctgtaaagcaaggagttcactgcaggatgctgagcagccagcagtcacatgctgagatggcgccaactgcttggaaggcctttgggaagctgctctgtgtctgtgtctagcatagcggacaccaggcaataaatacacctaattacattacatacaacttcatttaaaccaagtgtttctttgcacataggagactgcattc

SEQ ID NO: 85824 - DNA, 600 bp, Chicken  19866894385311_5
aggacacacatccacaatgtactgcagcactttatgagggcactcgatgagctgcagccaccacagcatgagcagagccagagcacgaggcgtgctgtaaagcaaggagttcactgcaggatgctgagcagccagcagtcacatgctgagatggcgccaactgcttggaaggcctttgggaagctgctctgtgtctgtgtctagcatagcggacaccaggcaataaatacacctaattacattacatacaacttcatttaaaccaagtgtttctttgcacataggagactgcattctccracagacttcccgtagctctgtgaattaacttcttgtccctttccacaggaacacaatgcctcctggcacaccactcatgctgtcacatcatcagcacagatgacctttttagagagcagacgtcatcctatacgtactactgtctgctgggccaagtgattaccatgaygtgcatttccctttaccttctgctatttcacagaatcatttgagttggaagacagccttaaaggccatctagcccagctcccctgcattcaacagggatacctctatagctcgatcaggtgccagcctgat

SEQ ID NO: 85825 - DNA, 600 bp, Chicken  19866894385311_6
aggcctttgggaagctgctctgtgtctgtgtctagcatagcggacaccaggcaataaatacacctaattacattacatacaacttcatttaaaccaagtgtttctttgcacataggagactgcattctccracagacttcccgtagctctgtgaattaacttcttgtccctttccacaggaacacaatgcctcctggcacaccactcatgctgtcacatcatcagcacagatgacctttttagagagcagacgtcatcctatacgtactactgtctgctgggccaagtgattaccatgaygtgcatttccctttaccttctgctatttcacagaatcatttgagttggaagacagccttaaaggccatctagcccagctcccctgcattcaacagggatacctctatagctcgatcaggtgccagcctgatcttgaatgtctccaaggatggggcatccaccacctctctgggcaacatgtgccagtgtttcaccaccctcatgataaaaaaaaaaaaattcttccttatatccaatgacaatctcctctcttttagtctgaaaccatttccccttgttctgtcacaacagactctgcta

SEQ ID NO: 85826 - DNA, 600 bp, Chicken  19866894385321_1
gttctaacagtttctggaagctaggcttttcagtctcttctgctgatggcataatttaaccccatctcttgcaccaagtgggatgttactccaaccctgcatgtggcagctcactcaccctcctagcaggaaggtatcccacagagagcagagctctgccagctctcaggatgcactgcctggctggtgagcaaggaggggctgtgtcaggaggtgggaggggggcgggaaacaaaaaaagaataagaagttgcgggaacaaacaggaagaccacttggagcaaattgctattcatctcrttgcagtcgtactgcttcctcccagacaccacgtttttgcttccatactgttcttaaagctggtttggtcagggactacttgtcattaaatttactcagaaaataatattgctcagtgaatagggtctggagtcaggggacctgattcttattcctactctggtcctttttgctccacttgcaaaacacgggaaatgtcagtaaatcttcttatgcttctgaattctccatgtcattattggctgtttaaatctgagctctcccaggtagaggctggaacaatgaaaatctgatccttga

SEQ ID NO: 85827 - DNA, 600 bp, Chicken  19866894385323_1
tttatgtttttgttcatctctctttttctcttaatgttttaagacaatcattttaaattagaatgttttgttgcttacatattaattatgttgtacatttttcaaaggctgctccggaagtaatgcctcctatttcatgatgttggcccatgatatcagaggcagtggtggatatcagatggtggtggtggtacagcagtagagcttgaacctttccaccagtattccattaagtcttgttgctgtgttacagatggcaacagaggggcaatctgacagtatggtgtctgatgtggaaakgcatatgaaacaaagatgtatmattgaattcctccatgtggaaaaatttgcacccactgacattcaccagtacttgcttatggagacccagcagtgaatgtgagcacagtgaggcggtgggtgatgtgtttcagcagtggtgatagtgagtcacattcgctggtgcagattgttatggtcacagcatgccggctcttgttcattgctggcaaaaatgtagtgctaatggtgatgactatgttgaaaaatasggtgttttgtttctttctttctttctttcttttctgtatcaattcatgt

SEQ ID NO: 85828 - DNA, 600 bp, Chicken  19866894385323_2
tttttctcttaatgttttaagacaatcattttaaattagaatgttttgttgcttacatattaattatgttgtacatttttcaaaggctgctccggaagtaatgcctcctatttcatgatgttggcccatgatatcagaggcagtggtggatatcagatggtggtggtggtacagcagtagagcttgaacctttccaccagtattccattaagtcttgttgctgtgttacagatggcaacagaggggcaatctgacagtatggtgtctgatgtggaaakgcatatgaaacaaagatgtatmattgaattcctccatgtggaaaaatttgcacccactgacattcaccagtacttgcttatggagacccagcagtgaatgtgagcacagtgaggcggtgggtgatgtgtttcagcagtggtgatagtgagtcacattcgctggtgcagattgttatggtcacagcatgccggctcttgttcattgctggcaaaaatgtagtgctaatggtgatgactatgttgaaaaatasggtgttttgtttctttctttctttctttcttttctgtatcaattcatgttattgtgctctttgcagctgtt

SEQ ID NO: 85829 - DNA, 600 bp, Chicken  19866894385323_3
agatggcaacagaggggcaatctgacagtatggtgtctgatgtggaaakgcatatgaaacaaagatgtatmattgaattcctccatgtggaaaaatttgcacccactgacattcaccagtacttgcttatggagacccagcagtgaatgtgagcacagtgaggcggtgggtgatgtgtttcagcagtggtgatagtgagtcacattcgctggtgcagattgttatggtcacagcatgccggctcttgttcattgctggcaaaaatgtagtgctaatggtgatgactatgttgaaaaatasggtgttttgtttctttctttctttctttcttttctgtatcaattcatgttattgtgctctttgcagctgttgtcttttccatggaaataaataggagacattactttcggagcagcatatggatatgcaacccaagatgttttgtattcactaaatgctgcccaagcaagccaaaaggttgcttggtagtccaggacacccctggactagtgagagtttcctacaagacaaaaaatccaaatgctgtctagaaaacctgaattttgagcagttccgaagcatatttctccttagagggat

SEQ ID NO: 85830 - DNA, 600 bp, Chicken  19866894385323_4
aaaaaagttggatatcagattataaatacaactgtttgtaaactggagataagttgtttttggactttaggttctagactctcaaccttgagcacgattaatcctgcagctgcatggatacatccgtccctctcagaaagagtatttggtcatttctatggagttggacttctctgtcttttcctgatctgagtttatcttgactttgccattagtgactcaggggaatgtgtcactttatgaccatgatagttctctttagctaattggcatctgctgtactgaacatggatcctcatrgatttttatagcagctgtgtatgtggaacatatacttccatgctacattaatgttagagacatcttttagggaaaaataagatattgaatgataaggtgaagtatttttcgtatttaaaatgacatttactctaccataatctctttgtgaagatgataagatagtctatgaaaataatagcatctttggttgttcttaatggatttattcaccttagttcgatttctgctaatagaaggcctctgtacctttgtatttgctttttttttttttttttcttctcaactcctccaaaccac

SEQ ID NO: 85831 - DNA, 599 bp, Chicken  19866894385326_1
  misc_feature (1)..(138): n is any nucleotide
nnnnnnnnnnnnnnnnnnnnnnnnnnnnnnnnnnnnnnnnnnnnnnnnnnnnnnnnnnnnnnnnnnnnnnnnnnnnnnnnnnnnnnnnnnnnnnnnnnnnnnnnnnnnnnnnnnnnnnnnnnnnnnnnnnnnnnnnnntaaagggggatttgctgtgacagggcagagaaagagataaagaaaaaggaacatggatttgtctattaaagcaaaaggaaaaggtgctactggagaatgttgacatatgaattgtgcagggctgaacggctgacctactgaagtcttctgggctgaagcatrtaaaaggcttaaaatgttatagtggaaatacaggaggcagaacatgagattgtagtgaaattgctaaataggccgattggtgcataggaaatgtgtatgagaaaagtacgtaagagatgacctctgcacatagctacaaagaatcttgaggtgtggatgctgcttggcataggcacatctcacttcctcagaarttcccacctttaccattattaagtaaggcaacttccagcttactgatgcaggaagggtgggtgaatttcctgtactgcaacctttttgtccagatgtatgcattg

SEQ ID NO: 85832 - DNA, 600 bp, Chicken  19866894385326_2
atttgtctattaaagcaaaaggaaaaggtgctactggagaatgttgacatatgaattgtgcagggctgaacggctgacctactgaagtcttctgggctgaagcatrtaaaaggcttaaaatgttatagtggaaatacaggaggcagaacatgagattgtagtgaaattgctaaataggccgattggtgcataggaaatgtgtatgagaaaagtacgtaagagatgacctctgcacatagctacaaagaatcttgaggtgtggatgctgcttggcataggcacatctcacttcctcagaarttcccacctttaccattattaagtaaggcaacttccagcttactgatgcaggaagggtgggtgaatttcctgtactgcaacctttttgtccagatgtatgcattgaatgctgcattttatcaatcgctgcmttgtaaagggaaggaatgcagacagtcattgttgtgtcttttttttcctctcccactcccttgcagaacaaaacctttttccaccagttcagtctaaaggagaactggctgcagcacagaggaaccatgaatgaagcagaagaaagtaagtatgacttagttaagaatg

SEQ ID NO: 85833 - DNA, 600 bp, Chicken  19866894385326_3
aaatacaggaggcagaacatgagattgtagtgaaattgctaaataggccgattggtgcataggaaatgtgtatgagaaaagtacgtaagagatgacctctgcacatagctacaaagaatcttgaggtgtggatgctgcttggcataggcacatctcacttcctcagaarttcccacctttaccattattaagtaaggcaacttccagcttactgatgcaggaagggtgggtgaatttcctgtactgcaacctttttgtccagatgtatgcattgaatgctgcattttatcaatcgctgcmttgtaaagggaaggaatgcagacagtcattgttgtgtcttttttttcctctcccactcccttgcagaacaaaacctttttccaccagttcagtctaaaggagaactggctgcagcacagaggaaccatgaatgaagcagaagaaagtaagtatgacttagttaagaatgggaaaaaacctagcacggtgcttttaaatgtcagggcaaccttttttagtaagagctgcctgttaaggtacagtcttcttccaggcgtacagcttctgaacaggaccctggggcctcgaaaggagagagat

SEQ ID NO: 85834 - DNA, 599 bp, Chicken  19866894385327_1
  misc_feature (1)..(96): n is any nucleotide
nnnnnnnnnnnnnnnnnnnnnnnnnnnnnnnnnnnnnnnnnnnnnnnnnnnnnnnnnnnnnnnnnnnnnnnnnnnnnnnnnnnnnnnnnnnnnnnnactaccaagaagtgacaacacagtactgccatatgcataatgagttaaacagcacaaaccatatagcattgcagaaacaatcagttaccttcctaggagactgaatggagcaggaagaatacaatgggaaaaagcatttcacaagtggatcgaaaaaggcaggcatggatgttcagtgaagcaacaataaataacagcaaacaytgataacactcgatgatgactgatttctatccaaaacttcygacaatctatgcagactgatgaagattagtttgcagccatactccagaaggaaggggaagaaacaggacagcagtaccttctaaaccacccaaaatgtaggcttcttttgtgtcataagactccctatgacatccttgaaaagaaaagccagcatcagaagttcatcttcagcaagcaatgcaggagaacagctcagactgatgtgacccctggtgctgacccaccagcatcactctgtaagagccatggactctaga

SEQ ID NO: 85835 - DNA, 599 bp, Chicken  19866894385327_2
  misc_feature (1)..(55): n is any nucleotide
nnnnnnnnnnnnnnnnnnnnnnnnnnnnnnnnnnnnnnnnnnnnnnnnnnnnnnnactaccaagaagtgacaacacagtactgccatatgcataatgagttaaacagcacaaaccatatagcattgcagaaacaatcagttaccttcctaggagactgaatggagcaggaagaatacaatgggaaaaagcatttcacaagtggatcgaaaaaggcaggcatggatgttcagtgaagcaacaataaataacagcaaacaytgataacactcgatgatgactgatttctatccaaaacttcygacaatctatgcagactgatgaagattagtttgcagccatactccagaaggaaggggaagaaacaggacagcagtaccttctaaaccacccaaaatgtaggcttcttttgtgtcataagactccctatgacatccttgaaaagaaaagccagcatcagaagttcatcttcagcaagcaatgcaggagaacagctcagactgatgtgacccctggtgctgacccaccagcatcactctgtaagagccatggactctagataagccctcatcacagtgggaggctggctcaaagctttcca

SEQ ID NO: 85836 - DNA, 600 bp, Chicken  19866894385333_1
ggttggtaagagtgtgttgggatttttagtattctgcaatttgtccatcaggtgagacagatctcagccaagtagtagccacaaaaaagtagtcgttccttgcatgcaggctgtgtctatagagcatgtaatgtaagtagtgtatctgaagggacatgtggctgaatggacctgagttatccaatggcctgcatgtatacaatagctgtcatctgtgtgtgcatagctggtgtatctaaacccttgagtacatcaatatgtatgcatgcatctttttggaatgtgtgagcaatcagttayaagaactgtgggagaactgcagtgcagtgcatgtgcatgtatacagatgtattttctgaccagaaatcagatctagagatggatgaagtgcaaagcagtgctgaattgacccttggtttaccgaaagaatcttacaatggtattccaggggagatgaatgaacgtttcattggcaatgccactgtttaattatgtgcttatgcttagctttaagggtaagcatttaaaagcgtgtatatatatatatatattatgtatctataagtgagcatgatgtttctgtctttaggtaaaaacaat

SEQ ID NO: 85837 - DNA, 600 bp, Chicken  19866894385348_1
ctggcttatggtaagagaagaatcaagagaagagaaagcctggaggcctggtccttattttcccctcccactagccaactactccaggtgttctgacattatagatcctcaattagaaagcttagctctgacctaaccccctttctgctttgcagtatacttacttagacctcagacttgcaggaattttgggacaagctcattgtctcaaattggatcattcccaatttagttgctaagagccagtctcataaagtgcactgctagtagatatttaacaaacctttcaccagttacaamaagctccattatatattggctgtgcaatgaaaaaygcttacctctgttcctctagaaagaagctctctaacaaaaggaaagacgcctaaaattatgtctattccactgttatctgcgaaaattaaggcacatttatgagggggaccctcctgcaaaagaaaatcaatgcatttaagattgagttcacagttcatttcactgactagcttgtattatttagaaacactgtttttaagacccaagattttatacgcctatatttatctagtagtagcatagctcatcaaaactttatctacc

SEQ ID NO: 85838 - DNA, 600 bp, Chicken  19866894385348_2
aagcctggaggcctggtccttattttcccctcccactagccaactactccaggtgttctgacattatagatcctcaattagaaagcttagctctgacctaaccccctttctgctttgcagtatacttacttagacctcagacttgcaggaattttgggacaagctcattgtctcaaattggatcattcccaatttagttgctaagagccagtctcataaagtgcactgctagtagatatttaacaaacctttcaccagttacaamaagctccattatatattggctgtgcaatgaaaaaygcttacctctgttcctctagaaagaagctctctaacaaaaggaaagacgcctaaaattatgtctattccactgttatctgcgaaaattaaggcacatttatgagggggaccctcctgcaaaagaaaatcaatgcatttaagattgagttcacagttcatttcactgactagcttgtattatttagaaacactgtttttaagacccaagattttatacgcctatatttatctagtagtagcatagctcatcaaaactttatctacccttattttaattgaaatcagtttctttaacattgt

SEQ ID NO: 85839 - DNA, 600 bp, Chicken  19866894385351_1
tcggtgtcattatcaataatgcagctaatttaaattggtttccttatatttatggccatccacatttgtattactggtttaactggatggcctcattctgaaggaaatgagagtatattcaaatgaatcccatgcactgactgaagctcagagaccaccctagagcagcatagcagaaaaataacatttctgacatgagagaaagcggtttctgcatttaggactgcctcattcgaaaaccagtccttcatggttaatgcttctccttagagctaacactctcgttgcttgcaagcataycatcagttggtgccaggaggaaatatccaggcamagaatagggttytctttaaagtaggtgacaacagagggctgtgtttccttccagggagtgaaagccaactttgtaaatccccggtcttctatatgaaactcagaaggtgggtctgataaagtctaatttaacaccgaagaatagaccacataggaaaaaaagaaacagagaagaagaaaaaaagaaaagtataactcctcactagttcccttttcaggaaaaccatctgcgtaactctgtgtggagtggaagtgagacacatctgt

SEQ ID NO: 85840 - DNA, 600 bp, Chicken  19866894385351_2
ttggtttccttatatttatggccatccacatttgtattactggtttaactggatggcctcattctgaaggaaatgagagtatattcaaatgaatcccatgcactgactgaagctcagagaccaccctagagcagcatagcagaaaaataacatttctgacatgagagaaagcggtttctgcatttaggactgcctcattcgaaaaccagtccttcatggttaatgcttctccttagagctaacactctcgttgcttgcaagcataycatcagttggtgccaggaggaaatatccaggcamagaatagggttytctttaaagtaggtgacaacagagggctgtgtttccttccagggagtgaaagccaactttgtaaatccccggtcttctatatgaaactcagaaggtgggtctgataaagtctaatttaacaccgaagaatagaccacataggaaaaaaagaaacagagaagaagaaaaaaagaaaagtataactcctcactagttcccttttcaggaaaaccatctgcgtaactctgtgtggagtggaagtgagacacatctgtcccagctaagaaagttactttccttacttggaac

SEQ ID NO: 85841 - DNA, 600 bp, Chicken  19866894385351_3
tatttatggccatccacatttgtattactggtttaactggatggcctcattctgaaggaaatgagagtatattcaaatgaatcccatgcactgactgaagctcagagaccaccctagagcagcatagcagaaaaataacatttctgacatgagagaaagcggtttctgcatttaggactgcctcattcgaaaaccagtccttcatggttaatgcttctccttagagctaacactctcgttgcttgcaagcataycatcagttggtgccaggaggaaatatccaggcamagaatagggttytctttaaagtaggtgacaacagagggctgtgtttccttccagggagtgaaagccaactttgtaaatccccggtcttctatatgaaactcagaaggtgggtctgataaagtctaatttaacaccgaagaatagaccacataggaaaaaaagaaacagagaagaagaaaaaaagaaaagtataactcctcactagttcccttttcaggaaaaccatctgcgtaactctgtgtggagtggaagtgagacacatctgtcccagctaagaaagttactttccttacttggaacagttcagcagag

SEQ ID NO: 85842 - DNA, 600 bp, Chicken  19866894385359_1
gtttcaaaaccaaacgttttggggagcaggaaaggtgatttttttgaagaggtggttctctccaggtggacctcttgcagatggctgtgctgttggaggtgtgcctgcagctgcctgtgctcacagccaggcaggttctctgtgcatgccaggtcttgggggagccctgctgcgctggcatctgtgctggcatctgtgcctgcccatggctcctacagcaccggggcagggtgacctctttacaaacaggttgctccatgccttttctgtgcttggggtgtatcttatgagaataggatytggaggctcctggctcctgcctcatgccctctgtgtgttcctagagctgctgagcattgctgggckgtgaaacaggcagtggggtgtgtttgggggagtgctgccaaataacagcatgggaagatcttgtagcaaagatcatgtaagcttaaattggagatctgaggtgagtcagaggtttaatttaattagttctaaaattagaacagagtctctgtaaggggaaggcagggcaggaggaggaggaagatttaggggtgtgcttctcagtgagagtagaggagcataggctggagctgt

SEQ ID NO: 85843 - DNA, 600 bp, Chicken  19866894385359_2
tggacctcttgcagatggctgtgctgttggaggtgtgcctgcagctgcctgtgctcacagccaggcaggttctctgtgcatgccaggtcttgggggagccctgctgcgctggcatctgtgctggcatctgtgcctgcccatggctcctacagcaccggggcagggtgacctctttacaaacaggttgctccatgccttttctgtgcttggggtgtatcttatgagaataggatytggaggctcctggctcctgcctcatgccctctgtgtgttcctagagctgctgagcattgctgggckgtgaaacaggcagtggggtgtgtttgggggagtgctgccaaataacagcatgggaagatcttgtagcaaagatcatgtaagcttaaattggagatctgaggtgagtcagaggtttaatttaattagttctaaaattagaacagagtctctgtaaggggaaggcagggcaggaggaggaggaagatttaggggtgtgcttctcagtgagagtagaggagcataggctggagctgtttatgtagactgatagcagtgtccctgtgggtttaatatatttaataagcatgttttgagcacaaa

SEQ ID NO: 85844 - DNA, 600 bp, Chicken  19866894385359_3
ggctagtcaattaatttctggttttgcttcctgtgtgaacgatgctttcttgccttttgtctttcctctcttaatagtctctgcagaaaagagtattgcctttcagcatgtgcatattatccagtacctgacacaatggcagtggggcttgtagtgactgctgcagtgtaaataatcagcagtaatggtagctcatacacaaagaatgtgacaacacacttctggaggctttctcttattgtaaacgagctttaagtatcctagtgaatcatttggcctctttcacttcttgaagcaaaygctgacgtattttggtcaaggaacaaggtaagatgtgacccaagggtcttattggccygtcaggaaaacaagraagtttaggaatrgcttagggaatgaatcttttggagggaccgtatctgactgagaagagcagggtggaggttaagaagttggtggatccttaatcactttctcaatcattaagacacttcctgtagtgaatgctaagagccttcccagtccctgcgggccctggagtcctgctcttggctttgcctggggacttgattctgtttgggcygtgctgcaaacactgcc

SEQ ID NO: 85845 - DNA, 600 bp, Chicken  19866894385359_4
gtctttcctctcttaatagtctctgcagaaaagagtattgcctttcagcatgtgcatattatccagtacctgacacaatggcagtggggcttgtagtgactgctgcagtgtaaataatcagcagtaatggtagctcatacacaaagaatgtgacaacacacttctggaggctttctcttattgtaaacgagctttaagtatcctagtgaatcatttggcctctttcacttcttgaagcaaaygctgacgtattttggtcaaggaacaaggtaagatgtgacccaagggtcttattggccygtcaggaaaacaagraagtttaggaatrgcttagggaatgaatcttttggagggaccgtatctgactgagaagagcagggtggaggttaagaagttggtggatccttaatcactttctcaatcattaagacacttcctgtagtgaatgctaagagccttcccagtccctgcgggccctggagtcctgctcttggctttgcctggggacttgattctgtttgggcygtgctgcaaacactgcctgcagggatcgcagggartttgtgaggatgttgcatcactgtagggttaagtcaaacc

SEQ ID NO: 85846 - DNA, 600 bp, Chicken  19866894385359_5
atagtctctgcagaaaagagtattgcctttcagcatgtgcatattatccagtacctgacacaatggcagtggggcttgtagtgactgctgcagtgtaaataatcagcagtaatggtagctcatacacaaagaatgtgacaacacacttctggaggctttctcttattgtaaacgagctttaagtatcctagtgaatcatttggcctctttcacttcttgaagcaaaygctgacgtattttggtcaaggaacaaggtaagatgtgacccaagggtcttattggccygtcaggaaaacaagraagtttaggaatrgcttagggaatgaatcttttggagggaccgtatctgactgagaagagcagggtggaggttaagaagttggtggatccttaatcactttctcaatcattaagacacttcctgtagtgaatgctaagagccttcccagtccctgcgggccctggagtcctgctcttggctttgcctggggacttgattctgtttgggcygtgctgcaaacactgcctgcagggatcgcagggartttgtgaggatgttgcatcactgtagggttaagtcaaacccaataaccattatca

SEQ ID NO: 85847 - DNA, 600 bp, Chicken  19866894385359_6
aaaagagtattgcctttcagcatgtgcatattatccagtacctgacacaatggcagtggggcttgtagtgactgctgcagtgtaaataatcagcagtaatggtagctcatacacaaagaatgtgacaacacacttctggaggctttctcttattgtaaacgagctttaagtatcctagtgaatcatttggcctctttcacttcttgaagcaaaygctgacgtattttggtcaaggaacaaggtaagatgtgacccaagggtcttattggccygtcaggaaaacaagraagtttaggaatrgcttagggaatgaatcttttggagggaccgtatctgactgagaagagcagggtggaggttaagaagttggtggatccttaatcactttctcaatcattaagacacttcctgtagtgaatgctaagagccttcccagtccctgcgggccctggagtcctgctcttggctttgcctggggacttgattctgtttgggcygtgctgcaaacactgcctgcagggatcgcagggartttgtgaggatgttgcatcactgtagggttaagtcaaacccaataaccattatcaaagacattttggg

SEQ ID NO: 85848 - DNA, 600 bp, Chicken  19866894385359_7
cacttcttgaagcaaaygctgacgtattttggtcaaggaacaaggtaagatgtgacccaagggtcttattggccygtcaggaaaacaagraagtttaggaatrgcttagggaatgaatcttttggagggaccgtatctgactgagaagagcagggtggaggttaagaagttggtggatccttaatcactttctcaatcattaagacacttcctgtagtgaatgctaagagccttcccagtccctgcgggccctggagtcctgctcttggctttgcctggggacttgattctgtttgggcygtgctgcaaacactgcctgcagggatcgcagggartttgtgaggatgttgcatcactgtagggttaagtcaaacccaataaccattatcaaagacattttgggtgtttgggcatgctgagcatctgcaatatccaaatatgcatccttgattaggttgcataagtagagtggggttctctttgcttgttcccaaagtgtttttgagcagcttgggctcctctctacacccaaaacaaggggagagtttcaaaaggcaaatagctgatgacaatactcgagagatagctaacaaaaaggtt

SEQ ID NO: 85849 - DNA, 600 bp, Chicken  19866894385359_8
aggaacaaggtaagatgtgacccaagggtcttattggccygtcaggaaaacaagraagtttaggaatrgcttagggaatgaatcttttggagggaccgtatctgactgagaagagcagggtggaggttaagaagttggtggatccttaatcactttctcaatcattaagacacttcctgtagtgaatgctaagagccttcccagtccctgcgggccctggagtcctgctcttggctttgcctggggacttgattctgtttgggcygtgctgcaaacactgcctgcagggatcgcagggartttgtgaggatgttgcatcactgtagggttaagtcaaacccaataaccattatcaaagacattttgggtgtttgggcatgctgagcatctgcaatatccaaatatgcatccttgattaggttgcataagtagagtggggttctctttgcttgttcccaaagtgtttttgagcagcttgggctcctctctacacccaaaacaaggggagagtttcaaaaggcaaatagctgatgacaatactcgagagatagctaacaaaaaggtttgcagatagggaaacatccagaggaagaagaggaa

SEQ ID NO: 85850 - DNA, 600 bp, Chicken  19866894385371_1
agacctagtacaacagagaattgttgtaataaaacttttacgttatgttctttgtttaggggaaaaagtttatgaatagatttgactggagtatattgttgatcatctacagcaatggtataaaataatgtttaaacctgtgcctttgatttaaaggaagtaaatatttgtattgcacttgtttttacttatggagaataaattggaatctattggagacttttcatttgagtggcaggacatgcagcctcaagtttttgcagaaatgaaggctggttcaaatcctgattgtttgaggcrtgtaggggatggaagagcaatatatcacagagaaactattcaaactggaaacagcatgaattaactgtctaatatagtaaccatgccttccttagttgtttatagtttttaaattctccattttcacgagctgtaactgacaatctgaattcacataatcaggtagtttatcatttaacaagtcttacctagttaccagcaggaaatggaagcaaccaagcagctaatgtgcccttaccctttcctacattcacatagttatgatgtaataattctttacctcacagtaggcaagacttg

SEQ ID NO: 85851 - DNA, 600 bp, Chicken  19866894385374_1
tatcagtaaaataaaagacattaaaagaaaaaagcacctgtgggaatgcaatacatatactggcgcttaatgcttaccttcattaatacttctgatgtagtggcttggaggaaaggtagtggaagtgttgtttcatatcctgctggtcttcgtggccctgcagagcagacaaggatgggctcttccttctggtgctgattcatgaatcgccatcaggtctctgctccagagcatcctaaaaacctctgagcagatccagtcaggtgtgaggcataatggtaacaaggaccaactggggaktttccagcccaawcctcaccaaccagtctggaatcaccctaaatacatctactgttcctagctagttggacaatcctggaaacaacacaggattctgaaaggcatttgtggagacccttgcagactggatgacaaccatccatgtggcagatgtccaacataaatcactggtttctggcatcaggatcaagccactgtctactgttctattgaatcatatctgcctgctttttgagaagcactttgagactggtaaaataagacccatgtgcataataaatattgtaaataactgttcaa

SEQ ID NO: 85852 - DNA, 600 bp, Chicken  19866894385374_2
aaagacattaaaagaaaaaagcacctgtgggaatgcaatacatatactggcgcttaatgcttaccttcattaatacttctgatgtagtggcttggaggaaaggtagtggaagtgttgtttcatatcctgctggtcttcgtggccctgcagagcagacaaggatgggctcttccttctggtgctgattcatgaatcgccatcaggtctctgctccagagcatcctaaaaacctctgagcagatccagtcaggtgtgaggcataatggtaacaaggaccaactggggaktttccagcccaawcctcaccaaccagtctggaatcaccctaaatacatctactgttcctagctagttggacaatcctggaaacaacacaggattctgaaaggcatttgtggagacccttgcagactggatgacaaccatccatgtggcagatgtccaacataaatcactggtttctggcatcaggatcaagccactgtctactgttctattgaatcatatctgcctgctttttgagaagcactttgagactggtaaaataagacccatgtgcataataaatattgtaaataactgttcaagtaaaatctggag

SEQ ID NO: 85853 - DNA, 600 bp, Chicken  19866894385378_1
taacactgtggtaaggtgaaagtaggttgtataggttcagtttatagatgcaaaaatttgagggagggaatctgaagaactgtgggacttctttgtaccattttcaccagctacctgcagaagagaggtaacaaatgagatcacccacactcagatgataccaagctttttccgagtagctaaattcctctgccccactgtgacacaggtaggatgaagggcagcataggagattcagcacagagaatcatacagaaatgaatctatgctgagctcagtaagctgggagggcatgggccracagggccctgcgcaggcagaacgctgaggtgggctggggctccgcggcccagtcagtgcttgggacctcaccacagcagtgaaagccattcttgtgctgcgctgcactgcaagaaggaagagagggtgggatttagctcagatgtgtcttcatctggggatggaggaagcagcccagaggattgggaaagaatttggacctgaatcttgcagtacagatactgatgaggtgaaagctggctgggctcatcccaagtgcctgtgggggaggggccgcctctcagaaggccacagtggggt

SEQ ID NO: 85854 - DNA, 600 bp, Chicken  19866894385381_1
ttttatctttctaccacacctgctaacatggagtttgctttaaaaagattgttcttgataaactctgagttaatttctagtaaatatcagatggccattaggacaaatatgcatgcttccggtgtcgtggtaatttgcagtctttcttcttcatgcttcagcatgcatatgtggatgaggttgaatgtttgggaaaatatctcagaaagagtggtgctgcattggcacagctgcccagggagtgggggggtcaccactcctggaggtgtccaagaactgtagagatgtggcactgagggstgtggtcagtgggtatggtgggatgggttgggttgggagctgatgatcttagaggtctctgcttagtatgtagtaagttcataacacttctctttgcctggaggacagagacaagtggacatcacagaagtttgactcttggatgtggttgttttgcagagtgattctcaggatgggcagctttctgagagagagagagagagagatggctactaagaaggcttttgctttggccagactttggcagctctggatgctgcagaaaaggatgctgagcagcaggagtgggaggcagctgtg

SEQ ID NO: 85855 - DNA, 600 bp, Chicken  19866894385383_1
tacctggggtgacatatccattcagcgggggttgaagtatccatttgatcctcctttcattgtcttttcctcactatttcgtagaatcatagaattgtagaatggcctgggcttaaagggaccacaatgatcatctagtttcaaatcccctgctatgtgcagggacaccaattactaaaccaggctgcccagaaccacatccatcctggccatgaatctctccagggatggggcatccacgacctccttgggcaacctgtttcagtgtgtcaccaccctctgtgtgaaaaaacctcctcytaatatctaacctaaactttccctgtctcagtttaagaccattcccccttgtcctattgctatccagcctcataaacagctgttccccttcctgtttatatgctcccttcaagtactggaaggccaaaatgaggtctccctggagccttctcttctccaagctaaacaagcacagttccctcaacctttcctcacaggagaggtgctccagccctctgaccatcttagtggccctcctctggactcctccaagagctccaagtccttcccatagtggaggccccaggcctagatgcagta

SEQ ID NO: 85856 - DNA, 600 bp, Chicken  19866894385384_1
atgggcttcaacaaaagcaagtgctggattctgcacttggggtagggcaaactgaatactgtgtgcaggctcagaaaccagaatgtaaggaggacataaaactatatcagtgtccaaaggagggccatggagatgaagagtctggagggcaagatgcatgaggagcagctaaagtcccctgctttgctcatccagatgggaagcttcatggcagccctcagctcctcgtgaggaaagcagaaaagcagcacagatccctcccctctggcggcagcaacatcacctgaaagaactgcatgragctgtgtcaggggagggtcaggttgcaggttaggaaaaggtaattcaacagaaggtggctggacactggaacaggctccccaggacagtggccacagccccaagcctgcaggcattcaggaagcctttggaaaacatttaaytttaaagctgtctcccagctcttccctggtttagacagcttgttctttgttccgctgctttcccacgtgcctgtatacctccctgcacctaatatacatgagctaggctgcagcgttcgaatccatgtgagatgaagaaaaaaactaaaacacactc

SEQ ID NO: 85857 - DNA, 573 bp, Chicken  19866894385384_2
ggagggcaagatgcatgaggagcagctaaagtcccctgctttgctcatccagatgggaagcttcatggcagccctcagctcctcgtgaggaaagcagaaaagcagcacagatccctcccctctggcggcagcaacatcacctgaaagaactgcatgragctgtgtcaggggagggtcaggttgcaggttaggaaaaggtaattcaacagaaggtggctggacactggaacaggctccccaggacagtggccacagccccaagcctgcaggcattcaggaagcctttggaaaacatttaaytttaaagctgtctcccagctcttccctggtttagacagcttgttctttgttccgctgctttcccacgtgcctgtatacctccctgcacctaatatacatgagctaggctgcagcgttcgaatccatgtgagatgaagaaaaaaactaaaacacactcaaaagctgtaagggtagcaccagtacaatacagcagcttactttcttgtgacagcaaaaattttcaagtccctcagtctgcttttgatatttgcctaagttcatctcacaataaca

SEQ ID NO: 85858 - DNA, 600 bp, Chicken  19866894385387_1
tctaaagggaccaaaacctgaaaaggaaagtaggtgcttttacttatccttgcactgcaagtttagattagctgacaacaggtacatgaccacatgtttgtactttaatattttttgttatggaggttgatttatatatatatataaatttagcctctataacatttaagggaatagcattgaattttttcagatgtgctgacataatagctaatcctacaatccttatgaggtaaacttaactgaagctgctaaatgttctggagccaaaagaactgttcatgtaggtgatgatgttgrgagaatatcattagccacagaaatactactattaaattaaattgactggtatcaacactcccaggtcactgtcattatacctttcttactggtgagagctcaggaagatgaaagtacacgtctgaaagagtaacatttgatttcatttaattttatgattttttttggtgagatacttttttatttaacaaaaagacaaaaattgctttgatttggatgggcgttttgtcatttaaaagtctgatggaaaactcccaccgcctttattaatctcaattcctgttctcggtccattgtgtc

SEQ ID NO: 85859 - DNA, 599 bp, Chicken  19866894385388_1
  misc_feature (1)..(100): n is any nucleotide
nnnnnnnnnnnnnnnnnnnnnnnnnnnnnnnnnnnnnnnnnnnnnnnnnnnnnnnnnnnnnnnnnnnnnnnnnnnnnnnnnnnnnnnnnnnnnnnnnnnntgctccggcgcgcacgagcctcacatggagtagcgaaaagtaagttaaagtgaacatcgctttgcccgcagctccaccggcgttccttatgtggctcctcagcagagctctccctcaggcagacgagaagggctcttcccccggctccccgcagccccagcgctgcgcctcaggcagttctgcctctctcacgacaccaracttgtgccaaatttccgtctcaacgctgccatacccccaggaggcagctgcagatactcagggaaagataaccccagcagcacagcgagcccctccctgaagtgccgcaaattaaatgggaatgatcgaattacctttgctctcggtgagccggcagcagctcctgttcggcatgcacagacgggacggaaggcaatttgtgagtgagggaactcacctgaagcaccgtcatgtgcctcagcctgcgctgcaggcaccagctctgcattgcagaggcagcagcagaatgtgccctggt

SEQ ID NO: 85860 - DNA, 599 bp, Chicken  19866894385399_1
  misc_feature (1)..(27): n is any nucleotide
nnnnnnnnnnnnnnnnnnnnnnnnnnntgttgcatatcttgcgtgtccgaattattgttgatgactatacatagtacagtcaatacaatttcttcttaatttgagtattcatcaatgcaacccagcaatgaaactagaatattgcaaaactactctacaaatactgccatcatttcaagtggatttacttgtataccagattttttgttcacatttcatagaaacgtgagaaatttcattctcctggcaccagcattcatggtaaatggccttcaatgtgtcattgaagagattttgacraataacaaatttgcatttgcatgtttacatacttttgtttactctggaaaagcacatggacacgtccaactaggagggagaaagataatcatgtacctatatgacaaactacagctgatcaatgctacgtgactaacaagtatcttacagcctcagagacaattacaatcaatccaatctgctaaaaaagtgaaaaaaaatgttatttctaaggcaggtttgaacagcaagcacttctgaggcaactataatctgcttatggattttctacaagcagagggataaacaaaatttccctg

SEQ ID NO: 85861 - DNA, 599 bp, Chicken  19866894385402_1
  misc_feature (1)..(91): n is any nucleotide
nnnnnnnnnnnnnnnnnnnnnnnnnnnnnnnnnnnnnnnnnnnnnnnnnnnnnnnnnnnnnnnnnnnnnnnnnnnnnnnnnnnnnnnnnnnccaaaccacttttgtcacctgcaaatgagagtgtaagtgatcttgtggttgcttccagggtgtcagtgaagacatggagtagtgccagcgcctgttggcgcaaccccttctgtggggcacagtcctggcagacaaagcattcatacccacagctgacatgcctgtgccctatttgtccagctgtgtcttcatgctttaggctgatcaaragtccttttgtcttcaaagttttgatcctagctttggcgttttactgaaagggaggaaatagaatgtccatctcttcagaggctcataaatttgagacacagacacttcacagcaaaatgaacactcagacaaccctcatggtgtttgaagagccctcatcttcctcttgcaggaggataccggacaaagcaaatcagctcatcagacctcccaaaatgttactgtccgtctggcaaagctacaaaattggagagctttgtttcacagctggactgttaatctcattattacattyact

SEQ ID NO: 85862 - DNA, 600 bp, Chicken  19866894385402_2
caaragtccttttgtcttcaaagttttgatcctagctttggcgttttactgaaagggaggaaatagaatgtccatctcttcagaggctcataaatttgagacacagacacttcacagcaaaatgaacactcagacaaccctcatggtgtttgaagagccctcatcttcctcttgcaggaggataccggacaaagcaaatcagctcatcagacctcccaaaatgttactgtccgtctggcaaagctacaaaattggagagctttgtttcacagctggactgttaatctcattattacattyacttgtcacagaytgttaatagaaccaaatgaaaaatgttccttggcacaagctactgaaaacttaaaatgaagaattgaatgacactttcaaagcatctaamagatatgactgtaagctatgatgtatcttaaagaagggttgagtatcctttatgtgttttcagagctcagttaaatataaatcaaatgaaaatctagttagaaatcaagtgttcaatgagcacatcctatgtttttctttcaaatctatccatctctattggtattatttttgttggtgataacaagaatagaagca

SEQ ID NO: 85863 - DNA, 600 bp, Chicken  19866894385402_3
gtcttcaaagttttgatcctagctttggcgttttactgaaagggaggaaatagaatgtccatctcttcagaggctcataaatttgagacacagacacttcacagcaaaatgaacactcagacaaccctcatggtgtttgaagagccctcatcttcctcttgcaggaggataccggacaaagcaaatcagctcatcagacctcccaaaatgttactgtccgtctggcaaagctacaaaattggagagctttgtttcacagctggactgttaatctcattattacattyacttgtcacagaytgttaatagaaccaaatgaaaaatgttccttggcacaagctactgaaaacttaaaatgaagaattgaatgacactttcaaagcatctaamagatatgactgtaagctatgatgtatcttaaagaagggttgagtatcctttatgtgttttcagagctcagttaaatataaatcaaatgaaaatctagttagaaatcaagtgttcaatgagcacatcctatgtttttctttcaaatctatccatctctattggtattatttttgttggtgataacaagaatagaagcaaagtgggaactgg

SEQ ID NO: 85864 - DNA, 572 bp, Chicken  19866894385402_4
cagacacttcacagcaaaatgaacactcagacaaccctcatggtgtttgaagagccctcatcttcctcttgcaggaggataccggacaaagcaaatcagctcatcagacctcccaaaatgttactgtccgtctggcaaagctacaaaattggagagctttgtttcacagctggactgttaatctcattattacattyacttgtcacagaytgttaatagaaccaaatgaaaaatgttccttggcacaagctactgaaaacttaaaatgaagaattgaatgacactttcaaagcatctaamagatatgactgtaagctatgatgtatcttaaagaagggttgagtatcctttatgtgttttcagagctcagttaaatataaatcaaatgaaaatctagttagaaatcaagtgttcaatgagcacatcctatgtttttctttcaaatctatccatctctattggtattatttttgttggtgataacaagaatagaagcaaagtgggaactggacatgtgcaaagtataagctgaaaatttggtgaaggggtctctgcaggcagaaagaagaaat

SEQ ID NO: 85865 - DNA, 599 bp, Chicken  19866894385404_1
  misc_feature (1)..(50): n is any nucleotide
nnnnnnnnnnnnnnnnnnnnnnnnnnnnnnnnnnnnnnnnnnnnnnnnnncactaaggaacatatggatcttgctgaagttaaattttctactgctactcaactgaatacattaagttgctggagggtaagcatgtataaattggataactgctaaattgatccttcacattagatgctgagtacgttactgcaagtcccttcctcctaaacttagctcttgtgaacaactccttggagacaaaggattctcatcacagaaaacgtccttgagaactgttcagttcagcctctgcccttstctcacaccctgctttgcacgtccaggagcagtttgggcaaacccaaaattacagccaggtaccagtttcctggcaaagcatttgcctggatgcgttcattgccacacgatcatcatttgtgacctgttgcaaatcaggctggtttcagtacagagaacctggacaaaagcatatttgcaaccttagsctgtagtttaggcatcatacagaaggaaatacataaagcctgatgaaactgggtctcgtagccctaaggataatcagctgacagaagtgaaatcacatttcccagcctcat

SEQ ID NO: 85866 - DNA, 600 bp, Chicken  19866894385404_2
actgcaagtcccttcctcctaaacttagctcttgtgaacaactccttggagacaaaggattctcatcacagaaaacgtccttgagaactgttcagttcagcctctgcccttstctcacaccctgctttgcacgtccaggagcagtttgggcaaacccaaaattacagccaggtaccagtttcctggcaaagcatttgcctggatgcgttcattgccacacgatcatcatttgtgacctgttgcaaatcaggctggtttcagtacagagaacctggacaaaagcatatttgcaaccttagsctgtagtttaggcatcatacagaaggaaatacataaagcctgatgaaactgggtctcgtagccctaaggataatcagctgacagaagtgaaatcacatttcccagcctcattctgtagcagaagtagagctgtgctatagaagagctggcctcacctatcactgtcagcaggaagtcccacatttacccccgtgttcacagtagggttctgctttggcttagaaaagccagccctggcccattggtgctcttctttgggactgaagcacatgctaaactgacacacatttgagaatgtaa

SEQ ID NO: 85867 - DNA, 600 bp, Chicken  19866894385410_1
gctctcagccctctgatgcaaagacacagacgtgggctggtagaaatttcttgcctactcactgcctcagatcctccacatacaaactgaagaaaatatctaatcttgcttcatgatatattgttggatcaaacgtgtctacaactgcagggataggagaagcttggaagggaagcaaaaggcaactaaaatagagttggtgtctcctagcatggaaataaatacagactcccttcaaaaaccaggatgttccaaacagccttgagaacctccaaagagagacaacacagcaggtcacamgtcagctggactctgacatggrggaaagaaatgtgaaaactgctgtctcgctgccacctaccctacagtgtctgargaaccactcaagcacaggatggagagccaggagataaagttgccatttattacgtgacattgggtgagtcatttttctttccccatatctcagtttacccaatggcaagaaggaaaggaatggargaattggaagggtctcctctccccttcatcctaagcatgtggtttgccraaacagtgcatcataagtgcctcctggtccagcctcctgctaaaaagaga

SEQ ID NO: 85868 - DNA, 600 bp, Chicken  19866894385410_2
gacacagacgtgggctggtagaaatttcttgcctactcactgcctcagatcctccacatacaaactgaagaaaatatctaatcttgcttcatgatatattgttggatcaaacgtgtctacaactgcagggataggagaagcttggaagggaagcaaaaggcaactaaaatagagttggtgtctcctagcatggaaataaatacagactcccttcaaaaaccaggatgttccaaacagccttgagaacctccaaagagagacaacacagcaggtcacamgtcagctggactctgacatggrggaaagaaatgtgaaaactgctgtctcgctgccacctaccctacagtgtctgargaaccactcaagcacaggatggagagccaggagataaagttgccatttattacgtgacattgggtgagtcatttttctttccccatatctcagtttacccaatggcaagaaggaaaggaatggargaattggaagggtctcctctccccttcatcctaagcatgtggtttgccraaacagtgcatcataagtgcctcctggtccagcctcctgctaaaaagagactccctgctccattacagtgct

SEQ ID NO: 85869 - DNA, 600 bp, Chicken  19866894385410_3
cacatacaaactgaagaaaatatctaatcttgcttcatgatatattgttggatcaaacgtgtctacaactgcagggataggagaagcttggaagggaagcaaaaggcaactaaaatagagttggtgtctcctagcatggaaataaatacagactcccttcaaaaaccaggatgttccaaacagccttgagaacctccaaagagagacaacacagcaggtcacamgtcagctggactctgacatggrggaaagaaatgtgaaaactgctgtctcgctgccacctaccctacagtgtctgargaaccactcaagcacaggatggagagccaggagataaagttgccatttattacgtgacattgggtgagtcatttttctttccccatatctcagtttacccaatggcaagaaggaaaggaatggargaattggaagggtctcctctccccttcatcctaagcatgtggtttgccraaacagtgcatcataagtgcctcctggtccagcctcctgctaaaaagagactccctgctccattacagtgctggagccagcagccctgcaaggctccgtgcctgtctgccacactcaggcagccat

SEQ ID NO: 85870 - DNA, 600 bp, Chicken  19866894385410_4
gtctcctagcatggaaataaatacagactcccttcaaaaaccaggatgttccaaacagccttgagaacctccaaagagagacaacacagcaggtcacamgtcagctggactctgacatggrggaaagaaatgtgaaaactgctgtctcgctgccacctaccctacagtgtctgargaaccactcaagcacaggatggagagccaggagataaagttgccatttattacgtgacattgggtgagtcatttttctttccccatatctcagtttacccaatggcaagaaggaaaggaatggargaattggaagggtctcctctccccttcatcctaagcatgtggtttgccraaacagtgcatcataagtgcctcctggtccagcctcctgctaaaaagagactccctgctccattacagtgctggagccagcagccctgcaaggctccgtgcctgtctgccacactcaggcagccatctcagcacacagtcagaccctgggctgctccagtctattttatcacaatttactcggtaacaggttacaaatgtggcatctgatgaaaataatgagccttgatgtcacttagtgcacaagactcc

SEQ ID NO: 85871 - DNA, 600 bp, Chicken  19866894385410_5
tccaaacagccttgagaacctccaaagagagacaacacagcaggtcacamgtcagctggactctgacatggrggaaagaaatgtgaaaactgctgtctcgctgccacctaccctacagtgtctgargaaccactcaagcacaggatggagagccaggagataaagttgccatttattacgtgacattgggtgagtcatttttctttccccatatctcagtttacccaatggcaagaaggaaaggaatggargaattggaagggtctcctctccccttcatcctaagcatgtggtttgccraaacagtgcatcataagtgcctcctggtccagcctcctgctaaaaagagactccctgctccattacagtgctggagccagcagccctgcaaggctccgtgcctgtctgccacactcaggcagccatctcagcacacagtcagaccctgggctgctccagtctattttatcacaatttactcggtaacaggttacaaatgtggcatctgatgaaaataatgagccttgatgtcacttagtgcacaagactccctgagtgtgtgcagggaatagcaaacgagagccaggccagcctccctgc

SEQ ID NO: 85872 - DNA, 600 bp, Chicken  19866894385410_6
catgcatccaggagcatgcatctcccacctgcagaggcccaaatctaccaagggcaggagctggcccactgtgaggaaatgctccctcttcaggtcttaacactattaagtaggaaggtggatattttctgtgtaaaaaaaagtctcactgaagatcaagaggaaagatatccagctcctaggtgactaaggagcattcagagctggagaaaccaagctgtgctgaagacttgtgaggtggccctgaccaagtccctgtacccttccaagtcttggttttcttgctactgaatgaagacraaagcatccctctgctgtaagggatagcctaggagggcacctgtgacagagacagcctggtgctatagacaaagatgagggacctggcagctggtggcacagagagaagggtcagagatgatgtcataaccatggcaaagaacaaaggttaaatcagatacaggagtgaaagtgtaaaacgaaaagggaaagatagtagaacagagtcagggcatacagttttccactgatatttcagagttttgtaattttcatctttttttcttatagctaggatttaccagagattctcaaagcttt

SEQ ID NO: 85873 - DNA, 600 bp, Chicken  19866894385411_1
actgttatttcaatggaggtggaagacttcagagttgcatatcttttctagatgtgatcatcttcatatagatgtaagctggcaaggtacaaaattattgtaagtgattctaaattgtgattaacttgacagactgattatatttgattgtgttgattatggctattaaaataatttttctctgatgaaaaaaatacatcctcatagattaattgcgagtatccagaatgtagatttatcaaattgcatatgccttctacttaaaagttctcttctaagtgtgagggggagtggggaaasaaacagatgcaaaacataactgtttgttacagagtgctttgaaggaactcttctggagaacttagtttgataacatcctctttgctcctcactgaagcaatattaggctacaaatcattcaaaggaaaaattctgctgtcattttgagtagttcatagtgagtctttggttgtttcattggagaaaataagaaatgttactttttgttgtggaacggactgttcctgtaacaaaaggctatagctgcattgccagtgataccaggctcttgacttaatggacctcatcatcttcctcatc

SEQ ID NO: 85874 - DNA, 600 bp, Chicken  19866894385420_1
tctccttcatttcactgatttccaagtcgtgcactctccccccagaacacagctgctttgactgctgttttttgtttgcttttcttccagcagtcttgcctttctttggcctgtttttccatctcctcctcctcctcctcttctgagtcatatgttgacacaaccctgggttggccatagttgttatactggaggattgttgctgtgtataggtacaaagaaggatttctttcgtgctagacatatgaataccaaagctcccttcaatcctttttctttgaagtcaggtatttagtgtcraggtgttcagctggtatgagtttgcttgcacagagctgttccaatgtgcacacattggtcttgatggagatgatggccatggtgtgaattcattttccttgttttcggctgggacatcccttctctgaagtgatctttgttcacccccccagactggactggtgcaaattagcatcacaggtttgaaaggttccttttacagaggtgtctgattgcccaacacaacagtatgacgcagtgctgtggccgctgattatttttaagctctggatggtgttgtgggaagaggaccatttgtgt

SEQ ID NO: 85875 - DNA, 599 bp, Chicken  19866894385421_1
  misc_feature (1)..(36): n is any nucleotide
nnnnnnnnnnnnnnnnnnnnnnnnnnnnnnnnnnnnaatgctcccctggtgcagccagaatggggctggcacatccttcatggctgcagatacagacccaggcgatgcagcacatccccactatccctttccctggaggcagctgtccgggggtgatgcccaggtatggagcggctgccaacagtgcttgccctgcctggagagaggtctatgtttggagcataaaatgctgagaagtgatattctgggtgtgagggagagctgggggccgcaggtggtaatccatgtgtctctgccttwattctttttgaaatttcaggtgtttaggttcaaaatcatggcatttcaaatggaagcaaagatgtgaaactgtaatattgcatgcctttatatgcaggtctggttgttggtggagtcctgttttctttttcttgctcagggataactggaaaatattttcctatgaatttcacaggagacatcgcacctattttaccttcccacatttacagaatactctgagcacaaaggagggcatttaatgaacttaatgaatcaatcaattaaagaaaatttcgtatgcttttcatgatctcctt

SEQ ID NO: 85876 - DNA, 515 bp, Chicken  19866894385425_1
cccaggaatcaaaaccaaactccctaaagcatctccggagatgctttcgtgatcatactcaaaagtgagttgaacctaaagattcaggctcattcagcctggtcctctctgttcccacgcagtcctttctgtcatcaacataaaacaccacccactgtgggctttgttttcctttcttatttcatttattcatgtttgccaatagctctttctcttcctagcaattctttctcctccacacctgtgccccagttgtaattgtattcccgcagtgcttttcttaccctacatcatttggtytcrtggcctgtgaaagaaatacatgctctcccatgctactgtgctgtcccctgttgttattgcacaagaaaaccctctttctcatcacaccttgttcacaacctggattaggagcactcctttcattacactgcaaataaaaacttggtgttattttgctctcctgaaagacattaatccattaatctgagctacttagtggcattagaagtgga

SEQ ID NO: 85877 - DNA, 512 bp, Chicken  19866894385425_2
aggaatcaaaaccaaactccctaaagcatctccggagatgctttcgtgatcatactcaaaagtgagttgaacctaaagattcaggctcattcagcctggtcctctctgttcccacgcagtcctttctgtcatcaacataaaacaccacccactgtgggctttgttttcctttcttatttcatttattcatgtttgccaatagctctttctcttcctagcaattctttctcctccacacctgtgccccagttgtaattgtattcccgcagtgcttttcttaccctacatcatttggtytcrtggcctgtgaaagaaatacatgctctcccatgctactgtgctgtcccctgttgttattgcacaagaaaaccctctttctcatcacaccttgttcacaacctggattaggagcactcctttcattacactgcaaataaaaacttggtgttattttgctctcctgaaagacattaatccattaatctgagctacttagtggcattagaagtgga

SEQ ID NO: 85878 - DNA, 599 bp, Chicken  19866894385426_1
  misc_feature (1)..(166): n is any nucleotide
nnnnnnnnnnnnnnnnnnnnnnnnnnnnnnnnnnnnnnnnnnnnnnnnnnnnnnnnnnnnnnnnnnnnnnnnnnnnnnnnnnnnnnnnnnnnnnnnnnnnnnnnnnnnnnnnnnnnnnnnnnnnnnnnnnnnnnnnnnnnnnnnnnnnnnnnnnnnnnnnnnnnnntaaaaagaagttggtttgaacgttacatgaacacttctgtatcactagagacgagagacagcaataatccaccaaaaatggcctgagcaacaatgcacaagggtacactgtgagacaaggtagaaaagtgcaamgactctaagaattactgtctttagccagygttaaaataaggacgcaaagagatgaacaataactcagtccatatgcctgccacacatttagtttaaagttacccttttcttggcacttggttatcaatatttgtttgcatagcgttcaatctcacacccacagaggctggtgggagcttgctatttccttccatagctgtgtgatgaggccccaaataactggtgtttgtgctcaaggcttttcagtgccaaatataatgaacactattgttcttgatacaacttaatttgataatcca

SEQ ID NO: 85879 - DNA, 599 bp, Chicken  19866894385426_2
  misc_feature (1)..(137): n is any nucleotide
nnnnnnnnnnnnnnnnnnnnnnnnnnnnnnnnnnnnnnnnnnnnnnnnnnnnnnnnnnnnnnnnnnnnnnnnnnnnnnnnnnnnnnnnnnnnnnnnnnnnnnnnnnnnnnnnnnnnnnnnnnnnnnnnnnnnnnnnntaaaaagaagttggtttgaacgttacatgaacacttctgtatcactagagacgagagacagcaataatccaccaaaaatggcctgagcaacaatgcacaagggtacactgtgagacaaggtagaaaagtgcaamgactctaagaattactgtctttagccagygttaaaataaggacgcaaagagatgaacaataactcagtccatatgcctgccacacatttagtttaaagttacccttttcttggcacttggttatcaatatttgtttgcatagcgttcaatctcacacccacagaggctggtgggagcttgctatttccttccatagctgtgtgatgaggccccaaataactggtgtttgtgctcaaggcttttcagtgccaaatataatgaacactattgttcttgatacaacttaatttgataatccaatttccctgaccaactgaactgcaatttt

SEQ ID NO: 85880 - DNA, 600 bp, Chicken  19866894385426_3
atcaatatttgtttgcatagcgttcaatctcacacccacagaggctggtgggagcttgctatttccttccatagctgtgtgatgaggccccaaataactggtgtttgtgctcaaggcttttcagtgccaaatataatgaacactattgttcttgatacaacttaatttgataatccaatttccctgaccaactgaactgcaatttttgcctcagtctttcctgaatacaagtcagcttttaccccgtgcctcgtttttccctctcatttctttcagtcatgctaccaagggccttctttktcttacagaygctgaaaagccattttgccttggagtaayaggagccagcttggaccctgaatattatagaaggcaatggatgacagaaattaaagattttggctatgtctgtgtacagcacaagcatgactgaagcaggttcctatagcattctcttctccacactaaacagtctggaagccatgtccaagagtctgcagaggcattaacatttataaatgatttccacttcaccctttcagctcagagtagcaataaagaaaaggatgaacaaggaaaggaatgtctatgaagaaaacc

SEQ ID NO: 85881 - DNA, 600 bp, Chicken  19866894385426_4
gtttgcatagcgttcaatctcacacccacagaggctggtgggagcttgctatttccttccatagctgtgtgatgaggccccaaataactggtgtttgtgctcaaggcttttcagtgccaaatataatgaacactattgttcttgatacaacttaatttgataatccaatttccctgaccaactgaactgcaatttttgcctcagtctttcctgaatacaagtcagcttttaccccgtgcctcgtttttccctctcatttctttcagtcatgctaccaagggccttctttktcttacagaygctgaaaagccattttgccttggagtaayaggagccagcttggaccctgaatattatagaaggcaatggatgacagaaattaaagattttggctatgtctgtgtacagcacaagcatgactgaagcaggttcctatagcattctcttctccacactaaacagtctggaagccatgtccaagagtctgcagaggcattaacatttataaatgatttccacttcaccctttcagctcagagtagcaataaagaaaaggatgaacaaggaaaggaatgtctatgaagaaaaccaagctacgaa

SEQ ID NO: 85882 - DNA, 600 bp, Chicken  19866894385426_5
agaggctggtgggagcttgctatttccttccatagctgtgtgatgaggccccaaataactggtgtttgtgctcaaggcttttcagtgccaaatataatgaacactattgttcttgatacaacttaatttgataatccaatttccctgaccaactgaactgcaatttttgcctcagtctttcctgaatacaagtcagcttttaccccgtgcctcgtttttccctctcatttctttcagtcatgctaccaagggccttctttktcttacagaygctgaaaagccattttgccttggagtaayaggagccagcttggaccctgaatattatagaaggcaatggatgacagaaattaaagattttggctatgtctgtgtacagcacaagcatgactgaagcaggttcctatagcattctcttctccacactaaacagtctggaagccatgtccaagagtctgcagaggcattaacatttataaatgatttccacttcaccctttcagctcagagtagcaataaagaaaaggatgaacaaggaaaggaatgtctatgaagaaaaccaagctacgaacagtatgtaagctataagctggcttttac

SEQ ID NO: 85883 - DNA, 600 bp, Chicken  19866894385427_1
tggaatatctcgatttatcacctgtttagtgaacatttttagattctgtagttgcatggatcaccatagcagagggtattccgacctccatcaggaaggatgaggaattacaccccttccttctgcactgggctcagtaagctgcatttgcacaaatcataaaggcgagagcactctgagcactctggtgagtgcttcaggacaagaacctggatgaaacagtagagaaatttacaccagacccagatcagccttaggaagcaacgggttttgttccactccgcctactgagggcgcagstttgccagcatcgcttctggagcgctgcctccccagagagcagagagcttcccgccgtcagcgcgtcgcctaggagaccgcgtcgccacgcccatcagcaggccggcagccaatcggaggcgtgggcgcgagaggagggcgggcttcgctgcgcaggggcgtcggccatgttggttacctcagggtgcgatgctcagcgccggtatcaacagtgactgccagttgaacagagctgctggaaatgacttgcaaaaatcaattagaaacgtgggtgtgaggcagaatgcgcccctctgaccg

SEQ ID NO: 85884 - DNA, 600 bp, Chicken  19866894385436_1
atagaatcacacgcagccatcccacagagtcactcggtggtataaagctgcactctaaattgtgttttacaacaaataccttcggtcaagcaggttttgttcttttcttaatgcagacttaaatctgtaagcacatctgtaagcatatagattcgtgcctcctgggacatgcctaatgggctctgaattcactctggctcatttctttgtaaagcattggctgtacagtgggaaaactgaataggggctttcactgatggatgatttttcattttgaatttaaatgtacaaactgagatygcgggttattattgccatgagaaagaacaacagaaaaggcaagagtcatagattagggagtcagtgacacagaaacagtcaaggacaggatgagctaattaatgttaccctctgccctctaaattacccatatatttacttaagtgcttctgctcagcatcagctgaagggagcttggaggcagcaaagcctgtctgccagccaggtacacctcctcctgcttcatatgatgtgctgtaccgtgaagatgacagacagaaagcatcagaaagaggggtgctgagctcagcaatagggctg

SEQ ID NO: 85885 - DNA, 600 bp, Chicken  19866894385438_1
actaagtaattcaaagtaatttcatttagagaaatcaagaagggacaaatatcaaaactcccatcaaaagaaattcaatatttgttatttgttcacatctgaatattcagaagtcatgaatttttatgatggtgcacaacctttgtctttttatttctccacaatacaaaattaatttcattacctgagtatcttatctaaacagtactacggagttgcagttttgtgacagtccctgaaaatacgaagttgttatttaacaaatctagcagcacaatattgcataatggattaatgtaytgttttaattcaactttagttgagttatttaataagagtttttaktttaaatgccctccagatttatctagagtttaaaattaacaaaacaaaatatggagtaagaactcagaaataaatatcctttttttctttttttttttttacagttatcaagtttttactattagcactaagtatttcttgaaaatatattaaaaatataaaaaattgtgttttgcgttattagttgcctgcactttgaaattgattcttaatcctcagcagttaagttgatcaaaactaggacaagtatctcat

SEQ ID NO: 85886 - DNA, 600 bp, Chicken  19866894385438_2
caaatatcaaaactcccatcaaaagaaattcaatatttgttatttgttcacatctgaatattcagaagtcatgaatttttatgatggtgcacaacctttgtctttttatttctccacaatacaaaattaatttcattacctgagtatcttatctaaacagtactacggagttgcagttttgtgacagtccctgaaaatacgaagttgttatttaacaaatctagcagcacaatattgcataatggattaatgtaytgttttaattcaactttagttgagttatttaataagagtttttaktttaaatgccctccagatttatctagagtttaaaattaacaaaacaaaatatggagtaagaactcagaaataaatatcctttttttctttttttttttttacagttatcaagtttttactattagcactaagtatttcttgaaaatatattaaaaatataaaaaattgtgttttgcgttattagttgcctgcactttgaaattgattcttaatcctcagcagttaagttgatcaaaactaggacaagtatctcatccaacgttgtttttcaacaatgttttcctcttcaatacatctttg

SEQ ID NO: 85887 - DNA, 600 bp, Chicken  19866894385439_1
acgttagctgcagactgcttgctcccctggaagctcgagctctgtcacctttcaaaaacctggtgaggaaaaggcttcttggcaagtgctctaacccctgccacatcagcttcttaaactgagaaaatctacaaggaccagagcaacagaaaagtgcccacaaatcagcatctggagagtggtatcattcgtggaggaggaagaacttgtgcttatctctttaaaaggaaaactctattttggaagtgatggccaacatttattgtctggagtaccaagggcagctgaacagaacatttytattgaagcatgctgtgtgttagaggtaastgccwagcaaaccacacaaagaaacaaaatgaaagaactcctgtgtcactttgttttgccactgacatgtggcatggctgtcaaagactccgatgtgctgggtaagtcatgactttgtttcagtgccacagtctgtaaaatgagaataacgtttacttcccactggaatgtcacgaagaacagcaactgtacagtcatgtgaatatcaaacgtgctatgacacattctgcttagattggaaaaatcttgctacagtcaaacctttcaccc

SEQ ID NO: 85888 - DNA, 600 bp, Chicken  19866894385439_2
aagctcgagctctgtcacctttcaaaaacctggtgaggaaaaggcttcttggcaagtgctctaacccctgccacatcagcttcttaaactgagaaaatctacaaggaccagagcaacagaaaagtgcccacaaatcagcatctggagagtggtatcattcgtggaggaggaagaacttgtgcttatctctttaaaaggaaaactctattttggaagtgatggccaacatttattgtctggagtaccaagggcagctgaacagaacatttytattgaagcatgctgtgtgttagaggtaastgccwagcaaaccacacaaagaaacaaaatgaaagaactcctgtgtcactttgttttgccactgacatgtggcatggctgtcaaagactccgatgtgctgggtaagtcatgactttgtttcagtgccacagtctgtaaaatgagaataacgtttacttcccactggaatgtcacgaagaacagcaactgtacagtcatgtgaatatcaaacgtgctatgacacattctgcttagattggaaaaatcttgctacagtcaaacctttcaccccagacagtcggagctgttaatacacagcag

SEQ ID NO: 85889 - DNA, 600 bp, Chicken  19866894385439_3
cgagctctgtcacctttcaaaaacctggtgaggaaaaggcttcttggcaagtgctctaacccctgccacatcagcttcttaaactgagaaaatctacaaggaccagagcaacagaaaagtgcccacaaatcagcatctggagagtggtatcattcgtggaggaggaagaacttgtgcttatctctttaaaaggaaaactctattttggaagtgatggccaacatttattgtctggagtaccaagggcagctgaacagaacatttytattgaagcatgctgtgtgttagaggtaastgccwagcaaaccacacaaagaaacaaaatgaaagaactcctgtgtcactttgttttgccactgacatgtggcatggctgtcaaagactccgatgtgctgggtaagtcatgactttgtttcagtgccacagtctgtaaaatgagaataacgtttacttcccactggaatgtcacgaagaacagcaactgtacagtcatgtgaatatcaaacgtgctatgacacattctgcttagattggaaaaatcttgctacagtcaaacctttcaccccagacagtcggagctgttaatacacagcaggctga

SEQ ID NO: 85890 - DNA, 600 bp, Chicken  19866894385439_4
tggtgaggaaaaggcttcttggcaagtgctctaacccctgccacatcagcttcttaaactgagaaaatctacaaggaccagagcaacagaaaagtgcccacaaatcagcatctggagagtggtatcattcgtggaggaggaagaacttgtgcttatctctttaaaaggaaaactctattttggaagtgatggccaacatttattgtctggagtaccaagggcagctgaacagaacatttytattgaagcatgctgtgtgttagaggtaastgccwagcaaaccacacaaagaaacaaaawgaaagaactcctgtgtcactttgttttgccactgacatgtggcatggctgtcaaagactccgatgtgctgggtaagtcatgactttgtttcagtgccacagtctgtaaaatgagaataacgtttacttcccactggaatgtcacgaagaacagcaactgtacagtcatgtgaatatcaaacgtgctatgacacattctgcttagattggaaaaatcttgctacagtcaaacctttcaccccagacagtcggagctgttaatacacagcaggctgactgctaccccagatgcttaccaatg

SEQ ID NO: 85891 - DNA, 600 bp, Chicken  19866894385452_1
ttgaggaaattatctgagttgttggaaacaattgcattgatcagaacaaatgatccaacccccctcttgtaatagcaaggccttttaaaagtgcattgcaaagcttttagggatttgaaggtcatagtgtttgcatcacagaaaacagcgtatgctttaaaacaaaagtgcagcaaggaatgtatatatgagttctcttcagctgtaaggtagggcagcatatccccatcacacaacatttggcatctctagcatttatactttggaaaacccagtcaccagacatttgccatttaattmattggtggcaagaatgatgtcaacagcaatttgaagagattgctgcagaaaacaggagctgatttataagtttttcctgatgtgtttgrttgaacatctctgcgctctgaggtagagtctgaattcyttgttctgctgctgggaaacaagtttgaaggcattagacatgagcaagactgagatataaagtaagtgatccctaaatgattttcttgttgcagaagtaaattgctttagaaaacagttcattgttctagagatattgagaacatagatgttaacttagtgcataatttaaag

SEQ ID NO: 85892 - DNA, 600 bp, Chicken  19866894385452_2
agtgcattgcaaagcttttagggatttgaaggtcatagtgtttgcatcacagaaaacagcgtatgctttaaaacaaaagtgcagcaaggaatgtatatatgagttctcttcagctgtaaggtagggcagcatatccccatcacacaacatttggcatctctagcatttatactttggaaaacccagtcaccagacatttgccatttaattmattggtggcaagaatgatgtcaacagcaatttgaagagattgctgcagaaaacaggagctgatttataagtttttcctgatgtgtttgrttgaacatctctgcgctctgaggtagagtctgaattcyttgttctgctgctgggaaacaagtttgaaggcattagacatgagcaagactgagatataaagtaagtgatccctaaatgattttcttgttgcagaagtaaattgctttagaaaacagttcattgttctagagatattgagaacatagatgttaacttagtgcataatttaaagtaatatgcaaacctaaatttacagagaaaccattctttttaattattattatctattctcacaaagcattgacaagagtctgtaaaatt

SEQ ID NO: 85893 - DNA, 600 bp, Chicken  19866894385452_3
tgtttgcatcacagaaaacagcgtatgctttaaaacaaaagtgcagcaaggaatgtatatatgagttctcttcagctgtaaggtagggcagcatatccccatcacacaacatttggcatctctagcatttatactttggaaaacccagtcaccagacatttgccatttaattmattggtggcaagaatgatgtcaacagcaatttgaagagattgctgcagaaaacaggagctgatttataagtttttcctgatgtgtttgrttgaacatctctgcgctctgaggtagagtctgaattcyttgttctgctgctgggaaacaagtttgaaggcattagacatgagcaagactgagatataaagtaagtgatccctaaatgattttcttgttgcagaagtaaattgctttagaaaacagttcattgttctagagatattgagaacatagatgttaacttagtgcataatttaaagtaatatgcaaacctaaatttacagagaaaccattctttttaattattattatctattctcacaaagcattgacaagagtctgtaaaattccttgtcttttctgttgtggtttttttttccatttacc

SEQ ID NO: 85894 - DNA, 600 bp, Chicken  19866894385458_1
ttttagtgagaaaaggaagaccaagcaatgaacaaagttatttacgtgcagaggggcattaaaattaagtaaagtgcatgtgtgtttttaagatttaaattttgtttttacacgtacaaaccagtgtcaggaaaaggcctgaatcatacaattccattgtatacatttccggctgtatgtcagcctacggggaaaagaattatctaaatgaacgctgattgaaaaagagcagcctgtcaaccatgctctcaagacttgcccaactttagaaaagcttagagaagactgaagggagcaggmgtggctccaacgggagtaggtggaagagattaggaaagcaattaactcttatcctaagacctctaccttctatgtcgttcttatgttattctttggaattatttatatacctatagcatataggcagagaaggctgtaacagacctatgacatttgcatatataaaattttagtttattcttacttagtgtcattgatacccagtttagcataccagccattttatgcttgaatactacatgaactaatgacagctggcggttttggctggttctctgggcgctagcaggatgcaaatat

SEQ ID NO: 85895 - DNA, 600 bp, Chicken  19866894385462_1
ggctttgctcattatgaatttctgttcactctttgtagcaccactcaagtggcaataacagacagctttggcttgaaatcatggagggatggaggaggaaaagtggccgttgcatgacttgaattgaaggtcagaaatgagattctgatgctgtgttctgaccctaatctttctgtgtgcagcaccacagtaatgaagagagccacaagaccattgagtacctcttctctcctgctgatgctgtctcattaattaacagagaaatgaactctgcctggttcctggatggtatcaggcacsagataaaaatcaggttgctggaggtgggtcaagtcatacactggtttttatggtagccttstgtacagtacttcagggttgtctgagtacttcattgcttaccagtggctggaggaaagcagagtgtactgcaggcaaggcaaccttgggaaaagaaaaggggaaaaaaaaaagactgcttaggtccctgctgctaaaacctcctgctttcagtcaatgccaccaactctagagataaaatttagtactcgttttgcatggggaccacttctgaatgcattagttcactctgcatgttat

SEQ ID NO: 85896 - DNA, 600 bp, Chicken  19866894385462_2
acagctttggcttgaaatcatggagggatggaggaggaaaagtggccgttgcatgacttgaattgaaggtcagaaatgagattctgatgctgtgttctgaccctaatctttctgtgtgcagcaccacagtaatgaagagagccacaagaccattgagtacctcttctctcctgctgatgctgtctcattaattaacagagaaatgaactctgcctggttcctggatggtatcaggcacsagataaaaatcaggttgctggaggtgggtcaagtcatacactggtttttatggtagccttstgtacagtacttcagggttgtctgagtacttcattgcttaccagtggctggaggaaagcagagtgtactgcaggcaaggcaaccttgggaaaagaaaaggggaaaaaaaaaagactgcttaggtccctgctgctaaaacctcctgctttcagtcaatgccaccaactctagagataaaatttagtactcgttttgcatggggaccacttctgaatgcattagttcactctgcatgttatgtagaaacattgaccagatggagatgaggccatctgaaactggctgcgaagaaagctgtca

SEQ ID NO: 85897 - DNA, 600 bp, Chicken  19866894385463_1
ttcagtctggaacaattacgttatttgcaatggtaacttcttagtaaaccctagaatagtttatgtggttaaaaaccttttcaattgaaaaattatgttatcccatcgattgtttaaaggattccatgtggtacagttctttgaatatatgggaagcaaatgaagccaaaaaagaaaatttggcaggcaaaaattgaagtgcttgcattggctctagatctagctatctgaacattaatgatctcattggagagatgtctatattaagattcaaaagctttctgggttcccaaggggcaractcattgaatactgtgatgcaccatgaaactaaacaatttttcttattgcaaaataaccaagraatcagaaactcattacgtgtgcataacaaaggacacattaagaggatagtcttatgggtaaccttgcttagcaatagttcattggaattgtcattgcagggaggcccagaacaacactgctttgtacttagatgttgttttattgaaagatctaaaagtatgccataactcattcagactcacaacatctatattagcaacgttatctgcatctgtctgcagatgtacagggaag

SEQ ID NO: 85898 - DNA, 590 bp, Chicken  19866894385463_2
gtggttaaaaaccttttcaattgaaaaattatgttatcccatcgattgtttaaaggattccatgtggtacagttctttgaatatatgggaagcaaatgaagccaaaaaagaaaatttggcaggcaaaaattgaagtgcttgcattggctctagatctagctatctgaacattaatgatctcattggagagatgtctatattaagattcaaaagctttctgggttcccaaggggcaractcattgaatactgtgatgcaccatgaaactaaacaatttttcttattgcaaaataaccaagraatcagaaactcattacgtgtgcataacaaaggacacattaagaggatagtcttatgggtaaccttgcttagcaatagttcattggaattgtcattgcagggaggcccagaacaacactgctttgtacttagatgttgttttattgaaagatctaaaagtatgccataactcattcagactcacaacatctatattagcaacgttatctgcatctgtctgcagatgtacagggaaggatgcagtggggttcagccaaccttcccatagtggtttaaatttctagtgctat

SEQ ID NO: 85899 - DNA, 599 bp, Chicken  19866894385466_1
  misc_feature (1)..(164): n is any nucleotide
nnnnnnnnnnnnnnnnnnnnnnnnnnnnnnnnnnnnnnnnnnnnnnnnnnnnnnnnnnnnnnnnnnnnnnnnnnnnnnnnnnnnnnnnnnnnnnnnnnnnnnnnnnnnnnnnnnnnnnnnnnnnnnnnnnnnnnnnnnnnnnnnnnnnnnnnnnnnnnnnnnnngactgaagtgagaaaaggtcctgcaactgatggtgcctgaccttaactgtggtgtgtagtgctgctggaaacatggacaagtcacttgctgtactttaaatctagatctctctaaaagagagtaactgttgtcctycttgttcaaacttaattgagattttttaggacaagggctgtctttcactgttcatgttcatcctggttatactcttactctttaccaacctgttattgcttcctttagctcttccagacagtgactaatgctctcaatggagtacattttctattatatgtgagacaggctgtgccagcctagtggagattgttgaacattggccctaaaaccctgtttttatttgcttataaatttggaatatctataagttcctcaagacagatcctagcatcagagaagctctttcttcttccacc

SEQ ID NO: 85900 - DNA, 600 bp, Chicken  19866894385467_1
acggaagtaggagtgaagaaaacaaacagggggataaactgaaaaaggcataaaatgcaccagtcaagtgtacaactgtgcaggtcagtatgctcacctggttgagctctgaacctgatcaccaccatccgccctctcatcttttatctacttattacatcttttcttgtctatcttgctgcatactctcactttctactctgtgtgtttgcgtgcagaaaggtctagctgtgagctcctggtgagacctgtatgcacgtgagtgaaaaaaatggtgccagctccttaagtcagaccaarggagtaggcgctcccaacttcaggtgccggctaccgcagctggcgggggtctttaaattccagctactgtggcatcccaaaaaccagctaccagaggaacggtgtgagggatgcaagcgaaggccttggggaatccgtgaatgcatgcatgcttgagaactcagagtgccacatttgtgccttcactggtaaacttctgtctctatcagctgaagaggaggaagaggacatagctggtctacgtgtatgttttaggggagtcctgtacgtaagcactattgaaggtagccccctgtctgc

SEQ ID NO: 85901 - DNA, 600 bp, Chicken  19866894385468_1
atattgcaacatactggaaacgtgaacagcagaatcaaatacgcacagagattaatcacatactgcactaatcaatttttcatatttaattaaagaaagtgtttttctttggaaagttgccatgagagctgcataatttccattccagtccccgtggactggtaccaaacccaacaaacctcactgcatggtatgcggggctggtggatgtcagagggagcttcttggttttcctcagtgtatggagatggctgagatatgtctcttattccctagacagatgatttagtaagtatcacrcatggctgtataattttacatcagctatgagaacctggtcttgtgtttcagggacaaaaggaatattttgagatgagagaaagacagagttatgaagaacctggaaaagggaaactacgcacactactgaacgcacgcccttgctgaaatatttaagtactactatgctctttgctatcgttacacaaaggcagttaattacacggacttcattaaggcaccattcattgtacaaccactagagcaagcatgcaagtgtgctgttcattttgttttctctccttggagttgaaattcagc

SEQ ID NO: 85902 - DNA, 600 bp, Chicken  19866894385480_1
attgtgggcgactcccttctcagaggaactgaaggccccatatgcagaccagacccaagccattgggaagtgtactaccttcctggggcccaggtcagggacataactagaaaactgccaaagctggttaggtccattgattatttttcgttactcatagttcaggtgggcagtgatgaaattgcccagagaggcttatgaactatgaaaagagatttccagggtttaaggcatttaatttacagagtgggagcgcaagtgatcttttgttctatgccttcaggagcagtgagggacacmgagtgggcttggaaagtacaagtaatgaataatyggctcagaggctggtgtcaaggcagaaactttgggttctttgatcatgtggcagtttacttggcccctggcctattgtctgtgcatggaacccacctatctcaaagggggaaatgaatcctattgcaggagcawgcagggcttatcaaaagagctttaaactagctatgatgggggaaggggacaaaacagcactcaccagagatgttcctagcagaacaatgcttgagctggggggtgaggcagatgactcagctgaagtgcatc

SEQ ID NO: 85903 - DNA, 600 bp, Chicken  19866894385480_2
gccccatatgcagaccagacccaagccattgggaagtgtactaccttcctggggcccaggtcagggacataactagaaaactgccaaagctggttaggtccattgattatttttcgttactcatagttcaggtgggcagtgatgaaattgcccagagaggcttatgaactatgaaaagagatttccagggtttaaggcatttaatttacagagtgggagcgcaagtgatcttttgttctatgccttcaggagcagtgagggacacmgagtgggcttggaaagtacaagtaatgaataatyggctcagaggctggtgtcaaggcagaaactttgggttctttgatcatgtggcagtttacttggcccctggcctattgtctgtgcatggaacccacctatctcaaagggggaaatgaatcctattgcaggagcawgcagggcttatcaaaagagctttaaactagctatgatgggggaaggggacaaaacagcactcaccagagatgttcctagcagaacaatgcttgagctggggggtgaggcagatgactcagctgaagtgcatctacaccaatgcatgcagcatgggcaacaagcagg

SEQ ID NO: 85904 - DNA, 600 bp, Chicken  19866894385480_3
ggcagtgatgaaattgcccagagaggcttatgaactatgaaaagagatttccagggtttaaggcatttaatttacagagtgggagcgcaagtgatcttttgttctatgccttcaggagcagtgagggacacmgagtgggcttggaaagtacaagtaatgaataatyggctcagaggctggtgtcaaggcagaaactttgggttctttgatcatgtggcagtttacttggcccctggcctattgtctgtgcatggaacccacctatctcaaagggggaaatgaatcctattgcaggagcawgcagggcttatcaaaagagctttaaactagctatgatgggggaaggggacaaaacagcactcaccagagatgttcctagcagaacaatgcttgagctggggggtgaggcagatgactcagctgaagtgcatctacaccaatgcatgcagcatgggcaacaagcaggaggagctggaagygattgtgcagcaggctaactatgacctagttgctattactaaaacatggtgggaccactcccatgactggagtgctgggatggatggctaaaagatcttcagaagggatagacaaggaagg

SEQ ID NO: 85905 - DNA, 528 bp, Chicken  19866894385480_4
gtgtcaaggcagaaactttgggttctttgatcatgtggcagtttacttggcccctggcctattgtctgtgcatggaacccacctatctcaaagggggaaatgaatcctattgcaggagcawgcagggcttatcaaaagagctttaaactagctatgatgggggaaggggacaaaacagcactcaccagagatgttcctagcagaacaatgcttgagctggggggtgaggcagatgactcagctgaagtgcatctacaccaatgcatgcagcatgggcaacaagcaggaggagctggaagygattgtgcagcaggctaactatgacctagttgctattactaaaacatggtgggaccactcccatgactggagtgctgggatggatggctaaaagatcttcagaagggatagacaaggaagggtgggtgtgtccctttatattaaagagtgttttatattaaagagtgtttttgatggttgaagagcttgggggttgggaaatgatgaaattgagtatctatagataaa

SEQ ID NO: 85906 - DNA, 600 bp, Chicken  19866894385493_1
tggatgaagccctggataatcatgatctagtacttgatctagcagctggcaaccctgcctgtggcagggaggttgaaacttgatgatccttggggtcccttccaatccaagccattctatgtttctatgatgattctatgattcacaagccagctgtagctgtactgtctttatataataaggagacatttaacagtgtccacatactgcctgtgcttacacagaatttttcattactggaaataaagtttaaggttgtgtaaatcaactgaattataataacttagggagaaagtgttkttctttcaacaagataaatacaaataacatatgcatgtaattttgttgttaaatttctgtttggtctccgtacttgggtgcactcagaaaagttacttctttcacacaatttcaataaattgtccatctaactcttctgcagttttctgatgataaatattcatctgatttgtacttaagccttctgaaagattttaaatgaaatagataattcatactgattgcctacaaattgctttcttctcttcctgctttcttattagaaaaaagggctacattgggataaagctccaaggaata

SEQ ID NO: 85907 - DNA, 600 bp, Chicken  19866894385493_2
cctgctttcttattagaaaaaagggctacattgggataaagctccaaggaatattcttttaaaaattataaacaagaagcaagcaaatcttggtgaaagaagaatagatgataaattttatactgcaaaggaaaatcctcagggactcatttctacttcttgaccacaacctaactgtgagaagatcagggtctttacacttcactactctgaaaactgattttgcccttggaaagtctgtacttcctctcaatgcctactttcaatcatgtcctttcttcccagctcacaaattatgcyatatagcctcttggcaattaactctgatatttctttagtagctgacatgtaggagggagatattctatcacaagtcttcatgcatgtaactacaaacagtacaggtaattaacagtgattacacatccaagatgtctggtaatgattgtgcttttaagagaacattaacaacttaactaaacagagaataaatatctgtgtagcagcattctgattgctctacattcctattagaccgtttctatcaagataaatttcaatcagaatatgaatttgaatatgccattgtaagtatattca

SEQ ID NO: 85908 - DNA, 600 bp, Chicken  19866894385495_1
ccccgcattgtcctaattccatcttgttactatcccattcttctagtggcctctgcatatttgcttctgtaagctaatccttttacccttagtttatgcagacccctttttactgaatcctttcttactcttcactgccacaggcaactcccataccaagctactttggttccccaagtgcccttacacaataggtttgaggctctagaatgtaaggggtgaccgaggatgcagtggaaggtccaacaaagaggttgcctaaggtgaggaggtttattccatgtctcaagactgcctccrccaagaaggaaagatgtggcaagagagctgcgggctcccttgctggtgcagaagaactaagaaccacctttattgtaggtgcttacaacctcttatacccgtgcaacaacaacttggtcacatgtaggagccaggtacctcgtgtgtgtttagtctggctcaagttactactgtgcttatttactcattagcaaggtaatgactttctttgtcccacagaaagatctacaattgtcgtagctgactcccttctgaggggaacagagggccatttragttggtcagatcctacccataggg

SEQ ID NO: 85909 - DNA, 600 bp, Chicken  19866894385495_2
attccatgtctcaagactgcctccrccaagaaggaaagatgtggcaagagagctgcgggctcccttgctggtgcagaagaactaagaaccacctttattgtaggtgcttacaacctcttatacccgtgcaacaacaacttggtcacatgtaggagccaggtacctcgtgtgtgtttagtctggctcaagttactactgtgcttatttactcattagcaaggtaatgactttctttgtcccacagaaagatctacaattgtcgtagctgactcccttctgaggggaacagagggccatttragttggtcagatcctacccatagggaaytgtgctgccttcctggggctgggtaagggatattcttagaaaacttcctcgtctgatttgcccctctgattattatcccttattgatagttcaggctggcagcgatgaagacagtgagaaaagtttaaggactatcaaaagaaacttcagggcattggggcagttagttgatggagcaggagtacaggtggtgttttcctctgtcccctcagtggcagcaaaggatattgaaaggagcaagagagcccatctcataaatacacagctgagag

SEQ ID NO: 85910 - DNA, 600 bp, Chicken  19866894385495_3
agaaggaaagatgtggcaagagagctgcgggctcccttgctggtgcagaagaactaagaaccacctttattgtaggtgcttacaacctcttatacccgtgcaacaacaacttggtcacatgtaggagccaggtacctcgtgtgtgtttagtctggctcaagttactactgtgcttatttactcattagcaaggtaatgactttctttgtcccacagaaagatctacaattgtcgtagctgactcccttctgaggggaacagagggccatttragttggtcagatcctacccatagggaaytgtgctgccttcctggggctgggtaagggatattcttagaaaacttcctcgtctgatttgcccctctgattattatcccttattgatagttcaggctggcagcgatgaagacagtgagaaaagtttaaggactatcaaaagaaacttcagggcattggggcagttagttgatggagcaggagtacaggtggtgttttcctctgtcccctcagtggcagcaaaggatattgaaaggagcaagagagcccatctcataaatacacagctgagagggtggtgcaattgcaggaaatttgtttt

SEQ ID NO: 85911 - DNA, 518 bp, Chicken  19866894385499_1
ctgagacactgatggtaaaggatgaggtgaagaaggcaccaagtacctcaggctgtgaagttaggttctgtgctccattcagcagcttaccttttccttaatcttccttcagtagcctctgtagctataaaaggcctcactgcttttcacctcaattaaaaattttatctcttgagtctgagctttggcttaattctttccctccctgtgcagtactgctgcagtactgctatcttccttttgggtagcataaccacacttctacctctgagtgtttccattgtatgccagggctgtcargagttcccctctgccagagctcctcaacttcctggatggcagggtgggtacttattgtgcttagggaaggttttccttcaaaatattctgtgatacagcaaatttaattgaaactacagctcatatagttctaaatgactggttttaagtgattgacctctacgagtacctaaaattcaacacagccattcagaaaatcttgatttgtcttgtattag

SEQ ID NO: 85912 - DNA, 599 bp, Chicken  19866894385501_1
  misc_feature (1)..(239): n is any nucleotide
nnnnnnnnnnnnnnnnnnnnnnnnnnnnnnnnnnnnnnnnnnnnnnnnnnnnnnnnnnnnnnnnnnnnnnnnnnnnnnnnnnnnnnnnnnnnnnnnnnnnnnnnnnnnnnnnnnnnnnnnnnnnnnnnnnnnnnnnnnnnnnnnnnnnnnnnnnnnnnnnnnnnnnnnnnnnnnnnnnnnnnnnnnnnnnnnnnnnnnnnnnnnnnnnnnnnnnnnnnnnnnnnnnnnnnnnnnnnnnnatgctaagaacctaagcaggtgttttatcctatttaaatggctattgaagttacttctctrcatcctaatatttacatacatgttgctggcaattgttgcaaactcgaagacatattttttcctaaaagtgcaattaagaaacaaacaaaacaaaacaaaaaaacttgacactataataaatcaaagcaacaacaaaattgtaaaaatcattcgtaatgacatattttgttgctgtacttgcttgctagattagatttctgctaaaggtaattgaagaaaaaattgttctggttagagggataaaatacattgaaattaaatgagcttcttgaactctgcttaggctttaagatgtcata

SEQ ID NO: 85913 - DNA, 600 bp, Chicken  19866894385501_2
tatttacatacatgttgctggcaattgttgcaaactcgaagacatattttttcctaaaagtgcaattaagaaacaaacaaaacaaaacaaaaaaacttgacactataataaatcaaagcaacaacaaaattgtaaaaatcattcgtaatgacatattttgttgctgtacttgcttgctagattagatttctgctaaaggtaattgaagaaaaaattgttctggttagagggataaaatacattgaaattaaatgagcttcttgaactctgcttaggctttaagatgtcatatcaaggaamraaacactaaacaagcttactagttaaagtgtggggctgaccatgaactaccatacacactagcctttctgttgtgttgatgtgagcccttaggtaatgaccatgacatttgggcaaaatgtccatgtgtttaccaccctacctccaaattttgcaccttcatgttccctggcacaagcaytgtgttggctatctagctgaagagcaagctggtacagttcacagggcacagagagaagcatygtgmaactcaatgagcatgctcctcctgctgcttcaagggagggaaggtctctgggt

SEQ ID NO: 85914 - DNA, 600 bp, Chicken  19866894385501_3
atttacatacatgttgctggcaattgttgcaaactcgaagacatattttttcctaaaagtgcaattaagaaacaaacaaaacaaaacaaaaaaacttgacactataataaatcaaagcaacaacaaaattgtaaaaatcattcgtaatgacatattttgttgctgtacttgcttgctagattagatttctgctaaaggtaattgaagaaaaaattgttctggttagagggataaaatacattgaaattaaatgagcttcttgaactctgcttaggctttaagatgtcatatcaaggaamraaacactaaacaagcttactagttaaagtgtggggctgaccatgaactaccatacacactagcctttctgttgtgttgatgtgagcccttaggtaatgaccatgacatttgggcaaaatgtccatgtgtttaccaccctacctccaaattttgcaccttcatgttccctggcacaagcaytgtgttggctatctagctgaagagcaagctggtacagttcacagggcacagagagaagcatygtgmaactcaatgagcatgctcctcctgctgcttcaagggagggaaggtctctgggtt

SEQ ID NO: 85915 - DNA, 600 bp, Chicken  19866894385501_4
ttagatttctgctaaaggtaattgaagaaaaaattgttctggttagagggataaaatacattgaaattaaatgagcttcttgaactctgcttaggctttaagatgtcatatcaaggaamraaacactaaacaagcttactagttaaagtgtggggctgaccatgaactaccatacacactagcctttctgttgtgttgatgtgagcccttaggtaatgaccatgacatttgggcaaaatgtccatgtgtttaccaccctacctccaaattttgcaccttcatgttccctggcacaagcaytgtgttggctatctagctgaagagcaagctggtacagttcacagggcacagagagaagcatygtgmaactcaatgagcatgctcctcctgctgcttcaagggagggaaggtctctgggttctggctgctgggatgttaggctttttgggtkgtggttccragaccagaagttgaggtaaattaatattacttaagtgtttttcttttggagaaaagcatttttgtgcttcttccaaacactaaataatgaaataactaattatttggaaaacaaataggagacaacttaaagcatcagta

SEQ ID NO: 85916 - DNA, 600 bp, Chicken  19866894385501_5
gaaattaaatgagcttcttgaactctgcttaggctttaagatgtcatatcaaggaamraaacactaaacaagcttactagttaaagtgtggggctgaccatgaactaccatacacactagcctttctgttgtgttgatgtgagcccttaggtaatgaccatgacatttgggcaaaatgtccatgtgtttaccaccctacctccaaattttgcaccttcatgttccctggcacaagcaytgtgttggctatctagctgaagagcaagctggtacagttcacagggcacagagagaagcatygtgmaactcaatgagcatgctcctcctgctgcttcaagggagggaaggtctctgggttctggctgctgggatgttaggctttttgggtkgtggttccragaccagaagttgaggtaaattaatattacttaagtgtttttcttttggagaaaagcatttttgtgcttcttccaaacactaaataatgaaataactaattatttggaaaacaaataggagacaacttaaagcatcagtaatcttcgaagtattgttcttgagaaagatggagtgtacaaaactttttctacttgttccaaa

SEQ ID NO: 85917 - DNA, 600 bp, Chicken  19866894385501_6
ttaaatgagcttcttgaactctgcttaggctttaagatgtcatatcaaggaamraaacactaaacaagcttactagttaaagtgtggggctgaccatgaactaccatacacactagcctttctgttgtgttgatgtgagcccttaggtaatgaccatgacatttgggcaaaatgtccatgtgtttaccaccctacctccaaattttgcaccttcatgttccctggcacaagcaytgtgttggctatctagctgaagagcaagctggtacagttcacagggcacagagagaagcatygtgmaactcaatgagcatgctcctcctgctgcttcaagggagggaaggtctctgggttctggctgctgggatgttaggctttttgggtkgtggttccragaccagaagttgaggtaaattaatattacttaagtgtttttcttttggagaaaagcatttttgtgcttcttccaaacactaaataatgaaataactaattatttggaaaacaaataggagacaacttaaagcatcagtaatcttcgaagtattgttcttgagaaagatggagtgtacaaaactttttctacttgttccaaaacag

SEQ ID NO: 85918 - DNA, 600 bp, Chicken  19866894385501_7
ggggctgaccatgaactaccatacacactagcctttctgttgtgttgatgtgagcccttaggtaatgaccatgacatttgggcaaaatgtccatgtgtttaccaccctacctccaaattttgcaccttcatgttccctggcacaagcaytgtgttggctatctagctgaagagcaagctggtacagttcacagggcacagagagaagcatygtgmaactcaatgagcatgctcctcctgctgcttcaagggagggaaggtctctgggttctggctgctgggatgttaggctttttgggtkgtggttccragaccagaagttgaggtaaattaatattacttaagtgtttttcttttggagaaaagcatttttgtgcttcttccaaacactaaataatgaaataactaattatttggaaaacaaataggagacaacttaaagcatcagtaatcttcgaagtattgttcttgagaaagatggagtgtacaaaactttttctacttgttccaaaacagtgcacctttaaaaatgtgtttaattcctcatgtctgaatttggaagtagcatatactttttgagaacttttaagtatgtttttca

SEQ ID NO: 85919 - DNA, 600 bp, Chicken  19866894385501_8
catgaactaccatacacactagcctttctgttgtgttgatgtgagcccttaggtaatgaccatgacatttgggcaaaatgtccatgtgtttaccaccctacctccaaattttgcaccttcatgttccctggcacaagcaytgtgttggctatctagctgaagagcaagctggtacagttcacagggcacagagagaagcatygtgmaactcaatgagcatgctcctcctgctgcttcaagggagggaaggtctctgggttctggctgctgggatgttaggctttttgggtkgtggttccragaccagaagttgaggtaaattaatattacttaagtgtttttcttttggagaaaagcatttttgtgcttcttccaaacactaaataatgaaataactaattatttggaaaacaaataggagacaacttaaagcatcagtaatcttcgaagtattgttcttgagaaagatggagtgtacaaaactttttctacttgttccaaaacagtgcacctttaaaaatgtgtttaattcctcatgtctgaatttggaagtagcatatactttttgagaacttttaagtatgtttttcaacctaatct

SEQ ID NO: 85920 - DNA, 600 bp, Chicken  19866894385505_1
gaaaggtcatgaataataactggaaatgaataatatatgcacagttagctcacaagatactatgctgtagtgcctcatgtttatttaactcagcggtgcattgactttttattcttcgccagataatagcagaaagaattagagggactgtaatctctattaattcaacataacagatcacaacaggcagctgatccttctgcagggaggctgctgtgccctaacaccaaaaaagcagggattcccctctgctctcctcttcactctctctctgtgacactcattcactgccagcactcwgagaacgtcagatttagaaggagccacagcagagccagagataaactcatggcaggtgagggcamccagcccgacatgggcaggcatgtgcccagatctctggtgacatccccaagtgacaaacagggggaggcgagccgtgtgctgtgtgcacacacagacaaatttgttttggttccatctgttaggactaatttattaattattaaatagataatttatcatcgctgactgtttgatcggtgtttattatccactgtctgaggcaaacggagtgctgtgtgaataaagaagggatta

SEQ ID NO: 85921 - DNA, 600 bp, Chicken  19866894385505_2
tgtagtgcctcatgtttatttaactcagcggtgcattgactttttattcttcgccagataatagcagaaagaattagagggactgtaatctctattaattcaacataacagatcacaacaggcagctgatccttctgcagggaggctgctgtgccctaacaccaaaaaagcagggattcccctctgctctcctcttcactctctctctgtgacactcattcactgccagcactcwgagaacgtcagatttagaaggagccacagcagagccagagataaactcatggcaggtgagggcamccagcccgacatgggcaggcatgtgcccagatctctggtgacatccccaagtgacaaacagggggaggcgagccgtgtgctgtgtgcacacacagacaaatttgttttggttccatctgttaggactaatttattaattattaaatagataatttatcatcgctgactgtttgatcggtgtttattatccactgtctgaggcaaacggagtgctgtgtgaataaagaagggattaattaataatgaaaagttcaggcaactgcaaacttgtggtggttgcttccaggtcccgaacaacaa

SEQ ID NO: 85922 - DNA, 600 bp, Chicken  19866894385508_1
aaatccttacatcacggcagtgtttgtctattactcactacagaagaattagtcccgatgatgttccagttgagtggggacactggaggggtgacagggagagactgtggttgtccctgtgtagctgcagctgtgtcacctgcaaaagcttccattcttcagatctctgacagtgttcttgcttgaacaagagtatcctttagggcaaaaggagccaagctggccaaggattagtgtgggagtggttgacatcagcacagctcatgctgactgaggacaagtttgagttggtctgtgggytgatggctgctgtaatttctgtgttgattagcccaggtgttttcttttgcttgtgcagtacaggggcaggcagaggtgagtcgttcatacagaagatgggctgtaataagaacagttgcagacagagagggtggcagcagcaggccaggctcaaaactgcttttagaaaaatacaatttctgttttcttgacttgtagctgtaggacactgttgtctattattgtggcaggtcttgattgcactaacatctgttccattactgaacgcatgttaatagctgttcagatatgtcttgtcct

SEQ ID NO: 85923 - DNA, 600 bp, Chicken  19866894385508_2
gcccaggtgttttcttttgcttgtgcagtacaggggcaggcagaggtgagtcgttcatacagaagatgggctgtaataagaacagttgcagacagagagggtggcagcagcaggccaggctcaaaactgcttttagaaaaatacaatttctgttttcttgacttgtagctgtaggacactgttgtctattattgtggcaggtcttgattgcactaacatctgttccattactgaacgcatgttaatagctgttcagatatgtcttgtcctgtaggcagctaaaatacagatccagaaatyggctgcttggtattaaaccagtactgtagaggtaagaatcttgcagaagagcatgcagctgtcatggcaagactgttattgaattacttaaaggcaatattactggggaaatctgtagtctgaacacaactgagcaaccttgatggctttttaatgagccatcccaaacgagatctggtggcaggctggaatgaagcaaacaaaatgcactctttaaactgctgatgatttgttctacacctctgcaggtggtcatgtcccatcttgtgcctgtgtccgtggcttgtcagccagggcagg

SEQ ID NO: 85924 - DNA, 554 bp, Chicken  19866894385512_1
tcacaaaagcatggaaaagaaaaggtgggcttgtgcttaactacttccgtgctgtagtcacacgctgactaataccgactttgaaggtttgaagtgacatttcccccctctcggatagcagtgctccacttcttcgtactgcactgtctcaaccgcagaatcatcggtatctctacaaataataacgtaaaaggtttactgcaaatgcacagcgctgtgactttggagagttagagtatatggaatacttgcacgccatttgcacaaactgtaataggaattgttgtgaagagcaaaacrattgtaatgtccttgtttaaaaacaaaacaacrcaagttgtcttgtacacaattaatgaaatctctgcgttctaccagaatagtaaaaaatagcatttcccataacttcctgaggattgtgcttattattgtgtgaatgtgagccttaaatcagttttgcagacgattgctgattttttttccctccaagaatacgcatctcagcacactgtaggacaactaatgaaaactgtgcctttaatgaaagcctttca

SEQ ID NO: 85925 - DNA, 521 bp, Chicken  19866894385512_2
tgcttaactacttccgtgctgtagtcacacgctgactaataccgactttgaaggtttgaagtgacatttcccccctctcggatagcagtgctccacttcttcgtactgcactgtctcaaccgcagaatcatcggtatctctacaaataataacgtaaaaggtttactgcaaatgcacagcgctgtgactttggagagttagagtatatggaatacttgcacgccatttgcacaaactgtaataggaattgttgtgaagagcaaaacrattgtaatgtccttgtttaaaaacaaaacaacrcaagttgtcttgtacacaattaatgaaatctctgcgttctaccagaatagtaaaaaatagcatttcccataacttcctgaggattgtgcttattattgtgtgaatgtgagccttaaatcagttttgcagacgattgctgattttttttccctccaagaatacgcatctcagcacactgtaggacaactaatgaaaactgtgcctttaatgaaagcctttca

SEQ ID NO: 85926 - DNA, 600 bp, Chicken  19866894385522_1
tataaataaaatggaaaaagatcaggtagatattaaacctcactatatattactgagttcattttttaacattctacaccttttttgtctaggtattagtttaagtcaagcccacactactgctttatcagtagatgcttgtgtccagaaacactgaacagaaacaagcaagtgatatttgggcatttcctcctaatccaaagagggaggaaaaatcaatttatgtaaatctctgatttcctaggcaaggatgatgcaaatcaatgcaattctatcaagttttgtgttgtcaggagcatycacataactatctgatttactttcatgagggaatatttgttgtttttccttttcactccaagctctaggtaaagataggacaaatgrgtaacagcaataaagaaatgatattgttgaatgtatctgtaaccatgagacttacaagcaagaggtcccattctgaagcacaacatggttaaaataaatagggagactcctgcagttaattagctgaaatatgtacagcattggtggtacttctcctcttttctctgtctctagaagaacagatacttctacaatggtaaaatctgaattaga

SEQ ID NO: 85927 - DNA, 600 bp, Chicken  19866894385522_2
tctaggtattagtttaagtcaagcccacactactgctttatcagtagatgcttgtgtccagaaacactgaacagaaacaagcaagtgatatttgggcatttcctcctaatccaaagagggaggaaaaatcaatttatgtaaatctctgatttcctaggcaaggatgatgcaaatcaatgcaattctatcaagttttgtgttgtcaggagcatycacataactatctgatttactttcatgagggaatatttgttgtttttccttttcactccaagctctaggtaaagataggacaaatgrgtaacagcaataaagaaatgatattgttgaatgtatctgtaaccatgagacttacaagcaagaggtcccattctgaagcacaacatggttaaaataaatagggagactcctgcagttaattagctgaaatatgtacagcattggtggtacttctcctcttttctctgtctctagaagaacagatacttctacaatggtaaaatctgaattagaaatctggaatatcatatattctgaggcaagattatctacagatttctcagatcagatctactcttgtacagaacttctaggaaagcc

SEQ ID NO: 85928 - DNA, 600 bp, Chicken  19866894385525_1
aatgtgtgtggatatgccttgctcctatacaaccttctctccaaactgtcagctttaatacttctatgcaaccttaatacttttatccagtctaatttcaccttacttagtacacctctaattactgtacacgctcccctctttgaatttatttttctcttgaaatctattggtaataataagcacaagacacttgttaaacctgactagagctttttagatcttaagttctttaaggcagactctttgttctttgtcagatttgttttggtaaaatgtcaagtaggtttggagctgcgygcaaataacagattatcctgttgacttttcccattaatattgcatcaagttggcagaactgcaacakttctggacaagatgattgtgccactacttgaagcatcttttataaaatgattattcttttactgataataaccaaaacgcataactcatatgggataaggactaagcattagccataagtgctagtccaaatactaaaactgtattgcattgtgcctgattatgtgattctgggtcacatgctagcaatgctacatgctggaatacaaagtgaaatctactttaaatactaat

SEQ ID NO: 85929 - DNA, 600 bp, Chicken  19866894385525_2
gcaaccttaatacttttatccagtctaatttcaccttacttagtacacctctaattactgtacacgctcccctctttgaatttatttttctcttgaaatctattggtaataataagcacaagacacttgttaaacctgactagagctttttagatcttaagttctttaaggcagactctttgttctttgtcagatttgttttggtaaaatgtcaagtaggtttggagctgcgygcaaataacagattatcctgttgacttttcccattaatattgcatcaagttggcagaactgcaacakttctggacaagatgattgtgccactacttgaagcatcttttataaaatgattattcttttactgataataaccaaaacgcataactcatatgggataaggactaagcattagccataagtgctagtccaaatactaaaactgtattgcattgtgcctgattatgtgattctgggtcacatgctagcaatgctacatgctggaatacaaagtgaaatctactttaaatactaatgggagccacagccggtgccattggcttttgagagaagtccactctgtttccaatctgcttgtgacac

SEQ ID NO: 85930 - DNA, 600 bp, Chicken  19866894385528_1
atagattcgcaagtgcttcattataacaaatccaaagaaaatctcttcagttgtccttctaaagaggaatttcaaacatgttcttctcagatagagcaaccgaaaaagcgcccagttctttctgccactgtcatcaaaaataagcccaatgctgaagagaggaaaaaaatggaaatgcttcagcccaaatctaaaaaatgccttgatagcgcaataatgacatgtgaaaatacagtgccattatacacaaagactgaaatatctgaacatcttccggtcataggtccagtttcagctggraataagtgtcccagtgacaaagtaagctcgtctactgaatcaacttctttgtgtcgtaagaggaaaaatgaagtatatatggaaaaaaatagagttttgggcccagtgcatgtggaagaagtggaaagaaaaagagctcttacatctagcgtggacaataaaacgcatactaccgtgagaccatcagccttcaaacatacaacccgagagagaatggggcagaacaggaaagctggtgagctgtaatttcatttatcacttctggaaaatgccttcgtttataaatttgcatagcaaact

SEQ ID NO: 85931 - DNA, 600 bp, Chicken  19866894385530_1
ttgtcaagctcctgaagtcagaaagcatcaaaaacactggagggattgaggtgcaacttttcccatctgggagagcgaggaggagggggctgctggttgggtttgggtcgtttagacccagcgtcattggatgttgtgttgagggacatggtttagagataactattggtgataggtagacggttggactggatgatcttgtaggtcttttccaaccttggtgattctgtggtttatgggcatgcgtgacagctgtgggtatttgggtacactggccatggtcctgccacagatgggcartgtgatggagctgatacccaccatttgagtgaagcaccccatgcctctgggtgtaccaggacaaaaggcttcttcctttcctttcagtgctggaaatggagagttgagctgtctcattgccaagggtgtacttgagccccttttaaaataaaaggaaatggcaatcacaacactccaggtaacatcagccctccaggagctccccagcaacttcacagaatggtttgggttggaagggaccttgaagctcacccagtcccaaccccctgctgtagacagggacacatcccatagcccagg

SEQ ID NO: 85932 - DNA, 600 bp, Chicken  19866894385531_1
tttttaatttgatttcactctgcattattagaaaaaaaaaatctatttcattacagaccttctcacaagcttaaaaactgccattcataacccagttgctgggaaaaccatttattctctttttctgtgatgcttcaggaattattaagcataaggaaacgattctttgttaaaaatgaaattgtgtagaaacagagaagtcttaagtttggaaaattgcttggaaagaaagaccccgaaatgcattttagcattgaatcagagcttctatgaaaaagctcttttctcaaagaagccctrttttaggcaatcgtttttcggattcaaaatgctttcaggtatgtaattataattttcaggtgttcgtactgaaagggttttctttgctaaattaccacaaattttgcttcagttgcygaagcacctctgaagactcatttgctgcattaaatgtttattttttacaccttatgggtaggaaatgcgttcaggcccaggtgtgcagctgctgatgacagcgccgttccattgctttaggcactgcttcagaaagcatcacttcatcgttttgttttgcattcaacaaattccgtttcttca

SEQ ID NO: 85933 - DNA, 594 bp, Chicken  19866894385531_2
tctttttctgtgatgcttcaggaattattaagcataaggaaacgattctttgttaaaaatgaaattgtgtagaaacagagaagtcttaagtttggaaaattgcttggaaagaaagaccccgaaatgcattttagcattgaatcagagcttctatgaaaaagctcttttctcaaagaagccctrttttaggcaatcgtttttcggattcaaaatgctttcaggtatgtaattataattttcaggtgttcgtactgaaagggttttctttgctaaattaccacaaattttgcttcagttgcygaagcacctctgaagactcatttgctgcattaaatgtttattttttacaccttatgggtaggaaatgcgttcaggcccaggtgtgcagctgctgatgacagcgccgttccattgctttaggcactgcttcagaaagcatcacttcatcgttttgttttgcattcaacaaattccgtttcttcaaaattggctgggcagtctgaccactgtatggaaacagattccctcacctgctttaaacacttccttactccttactttaaacgaaattcctcgttacttcctcaccatgaa

SEQ ID NO: 85934 - DNA, 600 bp, Chicken  19866894385538_1
tgggcgtcctgagccgggggagcacatcgtcatcatgcacacacacacagctcccagccaggacacagcagttcccctggccggtacccggctgtgcatccccagctctcaccacactgctgtgcccggggccggcagcaccgccacaacggcagcacttcagtccttgcagctctggaggaatgactgctcatcccaccggcacacagctgtgttcatttggtgactcagccattctagaactttctgccccatttggctattttaagagagttaccggaaagaaacacaaactttttyccccaggtgaccactcatttgatctattagaatgtcagcatcttcacttccaatttgcattgcgatgttggtttggtcccagtttgtttatttctgtacaccaggaacaaggaaaatggtgaaacaaatgactcttaaacagaccagatgggctacatactgaccggttgttaaagaaattcctgctggctgtcacctgctgaccgataaaagtagcagacctgaaagacagatgccaacatccaaaagggtggactgctcattctgaactgagatgaacaaaggattataactccccgt

SEQ ID NO: 85935 - DNA, 600 bp, Chicken  19866894385538_2
tgttggtttggtcccagtttgtttatttctgtacaccaggaacaaggaaaatggtgaaacaaatgactcttaaacagaccagatgggctacatactgaccggttgttaaagaaattcctgctggctgtcacctgctgaccgataaaagtagcagacctgaaagacagatgccaacatccaaaagggtggactgctcattctgaactgagatgaacaaaggattataactccccgtgtgtcacggcgggcactgtacgacgcctcacgtgcacacgaatgaaatcagtgtgatgtaaacamtgaggaaaacggtcaatttctgggagcctgcagttcacccccacatcacgggaataaccaggagaactgcgggtgaaatggcacatggggtgatttcacggggtgtaagctttatgaagatgtgaatcaattcaagatctgaaaataagatgagagtcatttcttgaatcccatctggcagataattgttccctattaaaaaacaatttggaaagaaatatggggacacaaagattgaaatatttaggaacgcttcggaagtgtttaaagctgtctttgaagtctttggaaaatggatca

SEQ ID NO: 85936 - DNA, 599 bp, Chicken  19866894385542_1
  misc_feature (1)..(33): n is any nucleotide
nnnnnnnnnnnnnnnnnnnnnnnnnnnnnnnnntggacggggggaagagggaaaaatctttaagttttggatgcctaaatgttgggctaaatatctaatagtgataaagagagccactgtgctggagcccagtaggatagtctctggttgctaatcaaaccagttcaaactgctcaaaaaattttatctacgaaacagtagctgctgttctaacactgccatgagtgacttcatagcacttggtctgactgaacaaggtatcaagtacttgcctggccttgttataacctaagctttgcwagcactcaaatggaaaaagattcattgcttacctgttcatgctctgctagggagaacagatacaatatatttccaggctctgagacaaaggtgagtgaggaaggctctctcacttactggatggacatggcacatagcctcattgggcaagctgtgattggaggcagtgtaaaaaaggcaggtcaaggctaaggaggatgtgctgtctgcatgttttgaaagtgtagatagcctgcagggaatttttgctcctgaggatagctggtgctcttggctttatgtatgctatactacatttc

SEQ ID NO: 85937 - DNA, 600 bp, Chicken  19866894385549_1
ttaactgtagatttgaattggcctaaatgagatttccagaacactgcctatagtggcaatgcttcagtctcagaacatgtttttaatcacatgataatctcacgtgttttccaaactgttggctgactcattcaaaagaaaatattcaaataatagagaacctgaccagttatctctctatattttgcaaagatcaaacaaaacccattaaactgttactgcttcaaactttgtactgaaggacccactataaaaagctctgtcattagacccctgcaaggacctactagactctgacaygagtcatttcatacagaagatgcagccaccaaatggtrttattgtatgaagtgaaagcatgggacattagctgagggtaaggctcgatgatctctagaggttkcttccagcctcaaagattctttgattctgtgataactgcgtttttggcatgcatgtacatccttctgctgcaccatgatttctccatcggtttgccagtactatcactgtactttctttattaacaacaacaaaaactgaatttggctttctaaacatttcaaatgttttactattatgtcaaagagagctgtggca

SEQ ID NO: 85938 - DNA, 600 bp, Chicken  19866894385549_2
gaacactgcctatagtggcaatgcttcagtctcagaacatgtttttaatcacatgataatctcacgtgttttccaaactgttggctgactcattcaaaagaaaatattcaaataatagagaacctgaccagttatctctctatattttgcaaagatcaaacaaaacccattaaactgttactgcttcaaactttgtactgaaggacccactataaaaagctctgtcattagacccctgcaaggacctactagactctgacaygagtcatttcatacagaagatgcagccaccaaatggtrttattgtatgaagtgaaagcatgggacattagctgagggtaaggctcgatgatctctagaggttkcttccagcctcaaagattctttgattctgtgataactgcgtttttggcatgcatgtacatccttctgctgcaccatgatttctccatcggtttgccagtactatcactgtactttctttattaacaacaacaaaaactgaatttggctttctaaacatttcaaatgttttactattatgtcaaagagagctgtggcaaatgggtctggtatatttgaaggaagcatgatgagcag

SEQ ID NO: 85939 - DNA, 600 bp, Chicken  19866894385549_3
gtgttttccaaactgttggctgactcattcaaaagaaaatattcaaataatagagaacctgaccagttatctctctatattttgcaaagatcaaacaaaacccattaaactgttactgcttcaaactttgtactgaaggacccactataaaaagctctgtcattagacccctgcaaggacctactagactctgacaygagtcatttcatacagaagatgcagccaccaaatggtrttattgtatgaagtgaaagcatgggacattagctgagggtaaggctcgatgatctctagaggttkcttccagcctcaaagattctttgattctgtgataactgcgtttttggcatgcatgtacatccttctgctgcaccatgatttctccatcggtttgccagtactatcactgtactttctttattaacaacaacaaaaactgaatttggctttctaaacatttcaaatgttttactattatgtcaaagagagctgtggcaaatgggtctggtatatttgaaggaagcatgatgagcagtgattctcaaaatggagtcctttagagatggattaaataacctgctgataatggagtaatgcgca

SEQ ID NO: 85940 - DNA, 599 bp, Chicken  19866894385557_1
  misc_feature (1)..(72): n is any nucleotide
nnnnnnnnnnnnnnnnnnnnnnnnnnnnnnnnnnnnnnnnnnnnnnnnnnnnnnnnnnnnnnnnnnnnnnnncagcgccaccctgcggccgccacgggcagcgcagagacgggccggtatcccaagaaccatcaaataccaacactcttttcctttctttttcttccacccctccctttttaaattattttttatttttttacttttttttttcttttccttatttatttacttattacttttcaactcaatccttggacttaagctgctagcaatctgtacaataacttagctggcaarctcagggaccccctggcagcaaggtgcagcaaagaagtgtgcgctcctatattgaagggcagctttgcacgtgcaactcagtgtgttttgcgaaggtcactctttctactctcagtttacaggtgctgaaaatgaggcacgaggggctgcagcaggtactgtaaccaatagtacctgctttgaactgtaaactagaagaggggagatgttaggtgagatgttaagaaattctttactcagagagtgtgaggctctggaacagctgcccagagaagctgtggtgccccatccctggaggc

SEQ ID NO: 85941 - DNA, 600 bp, Chicken  19866894385563_1
tctaaaacatcaaatttatttatttaactttacttgtatctgaacactgggagagttataaccagtaatccactgtcaccactaaaggctccatccagtgaaagttaactggcactgttctcttaagtgagacagctgataaatcctaaagggttccttttcacagcattaaacaatacaactccctacagtaaggacaggaatggaacagaatacagcagcacgtgcacagcagcctaattacagaagtcttaacagcttagtatttatcgtggggagatgtgagggagaagtgaatcrcttatcagacaggaggatcacctcaaagccccctgacataagaataaataaaatcaagtagcacagtacacaagtaaaaaccagagctcctctactgtgtcactcttgcctgaccgtctgtatgtgttcagagagatcactcttacaggagtatgtttacacaacagttaacccttatagtaattttttttatgttattttaggacaagccactttctcttacaaaacaaaccaacaaccagataaagagtatctggacaagacagaagattacatttctcttaggtaggaattcatatt

SEQ ID NO: 85942 - DNA, 600 bp, Chicken  19866894385570_1
tctgcagcctccaagagccaacgcagtaccctggcttccccggaacccagttctcccattcctctgaccgctgactgagtcattttgcagcataacattccctttgtaaaacactggttcccaaaccacggtcctcagaaagctggctggctacatgctgctggcgctggtcctcacttccaacagctgcatggctttaaagacaaccaggatgcattatacactttcctggtactaatttcccacgttagatgctacgttagttgctgcagggcaactgcgttcttgtgaatgagcgartaggtgcttcaaaacaattctagggttgtccacatgtgggggggcagaggaaaaaccatgggaagccttgctctagatatcgtgtctgtcctccatgcaaatctcacttatccagaaagtctggaactggagtgaaaccaggaattatctccagctctaccatatggagatgcaagacaccaggccagttgcttgttttatttaaacatgtgtttcttttaccagcagtattaacattgctttgttcctgtttatatttaaagaaatgagaaaataaactaagtaacttttttcctctcg

SEQ ID NO: 85943 - DNA, 600 bp, Chicken  19866894385571_1
tactgcagagcatgggtagaaggagtaatggagccagtgagcagcactctatcaatggcagcagctgtccagtaccttgagcatacatgcatttttgaactcagagggatgcactgttaatcagtgactcacctcctccttatctatctatctatttatttattttttccgtagaagggatcgttacctttatttaagaaaaacgtgacaagtctgaaataccacaggtgaaatggaaagtagataagatagaatcttccctttattcccaatagataaactctatttgtttcctgttamtagaagattgtcaggactgaaattagcacatacactttttattcagaatagcctggaaccattaattttcttaagaaatatactatcattaagctacctttgtgatatggctaccatgtaggctgtaaaatagccagttctcaacaaatgtttctcttaatacgctgattttcagaaggtatataaatgatatcatgttcctgtggctctagaaagatcttgatttctgaatttctggcacgrctgtttggcctccagtagcaactccaataacacctactttttacattagtcactcac

SEQ ID NO: 85944 - DNA, 574 bp, Chicken  19866894385571_2
ataagatagaatcttccctttattcccaatagataaactctatttgtttcctgttamtagaagattgtcaggactgaaattagcacatacactttttattcagaatagcctggaaccattaattttcttaagaaatatactatcattaagctacctttgtgatatggctaccatgtaggctgtaaaatagccagttctcaacaaatgtttctcttaatacgctgattttcagaaggtatataaatgatatcatgttcctgtggctctagaaagatcttgatttctgaatttctggcacgrctgtttggcctccagtagcaactccaataacacctactttttacattagtcactcactgactcgctgaccatttatacatatatatatttaagaaaactgcagaagaaaaaatggttccagttacatgattggcatttgaaattttattccttgggcaacagtaactgaagttatgagtttagcttgttaaacatgcccatactcagtgggaaagataaaaacaaacatgacattttatccttgtgaagacaggtaataagttagaagaatttc

SEQ ID NO: 85945 - DNA, 600 bp, Chicken  19866894385588_1
tttgctcaccgctggcaaccggagcaggttcattacatgggagcctcccttgttccagctcatgctgctggtgctgggagccagagctaactcatcacaagggagttccctcttcctggcttcctttcccccagcgacagccagggctgcaatggagcctgctgctcccagctgctgccttgtgctcggaggtagggccactctcccctgagccaggcaaacatggcaggcatgtctgagtgtggccatgtcaaaggacagtcttgacattttagtgctgagctttatttgagctgaggyttacagaaaagcagaagtcaggtttgcgggcatgggtattcgtagcacaggcaggtaggttatcttcttagctgagcacagctgactgcatccgaaccagcccacatcccaagcgacatggggaattaaacagaaagctggatggctccargcagagcagcatgccatgtgctgggagaaagtcctgcagcctgctggctgctcacagtgcactcacagtgtgcgtttgttgagatatggactcgttgttcttcaactcccagctcaggagttgagtgagaagcttgaatggtcttaaat

SEQ ID NO: 85946 - DNA, 600 bp, Chicken  19866894385588_2
atggagcctgctgctcccagctgctgccttgtgctcggaggtagggccactctcccctgagccaggcaaacatggcaggcatgtctgagtgtggccatgtcaaaggacagtcttgacattttagtgctgagctttatttgagctgaggyttacagaaaagcagaagtcaggtttgcgggcatgggtattcgtagcacaggcaggtaggttatcttcttagctgagcacagctgactgcatccgaaccagcccacatcccaagcgacatggggaattaaacagaaagctggatggctccargcagagcagcatgccatgtgctgggagaaagtcctgcagcctgctggctgctcacagtgcactcacagtgtgcgtttgttgagatatggactcgttgttcttcaactcccagctcaggagttgagtgagaagcttgaatggtcttaaatattgtggtcttgttttatttgttgttgaaagtaaagctggaagttgtatctcttggccccaaactcaggggttttgaggtgggaaaggttgcaagctccacccttttaagggtggcagtggggaagctttgggggatgttttaggagccca

SEQ ID NO: 85947 - DNA, 600 bp, Chicken  19866894385595_1
ttcgtaacatggttgtatgttgataaatacatctccattataattactgcattagtgcagtgtcagagagcaagagttggccactaccatatgttttgaataagatttgggcattataagaaggtttgatgtagtttaattttgtttgttggcaatatgtgtgtggcttcaacaaaaataaaaagcatctttggctagcagaatgatcctatctatgattctatgattctatgatccaattcaaataaaggaaatattccttaagaattaattgaatcaaagctaattttactttttggytttgtattacagtcatttccagaatatgagcccatcctgatatgtatatgcattctaaacttcctttctctttacaacctagtaagaaatgagatatatttgtggcagasagagaaatacaccacagtgctccttcagtcctcagctgcagcagttatacttacccttcaatacaaaggaaattacagagtccagtgaattagagatcactaagggtcagaaagaaatcgctttaatatcatggtggttctctttcttctcaacagatgacatattaaaatatgaaactgaaagactgct

SEQ ID NO: 85948 - DNA, 600 bp, Chicken  19866894385595_2
gcattataagaaggtttgatgtagtttaattttgtttgttggcaatatgtgtgtggcttcaacaaaaataaaaagcatctttggctagcagaatgatcctatctatgattctatgattctatgatccaattcaaataaaggaaatattccttaagaattaattgaatcaaagctaattttactttttggytttgtattacagtcatttccagaatatgagcccatcctgatatgtatatgcattctaaacttcctttctctttacaacctagtaagaaatgagatatatttgtggcagasagagaaatacaccacagtgctccttcagtcctcagctgcagcagttatacttacccttcaatacaaaggaaattacagagtccagtgaattagagatcactaagggtcagaaagaaatcgctttaatatcatggtggttctctttcttctcaacagatgacatattaaaatatgaaactgaaagactgctgtgaagttgtttccagctgtgcagtgctctttcttggaatcccaacatcatgccagttacaaatacatttttctcagctgagagaggtagatggcccccgactttatcca

SEQ ID NO: 85949 - DNA, 599 bp, Chicken  19866894385596_1
  misc_feature (1)..(26): n is any nucleotide
nnnnnnnnnnnnnnnnnnnnnnnnnntctgacctgctgtattgttgtgatattgtcttatgatctaggcttttggttgggccttgtcatcttctgtggatttattctgcctgcattgcttatttacctggaagactgggctgtggctgaagaggccctcctaatgagtgtgggatcactgtgttcctggttcacctgttcttagtgagtagccatgaacttgttagtccttgacaaaagcctgaaaggacattgtaccccaaaagttggaaatatgtccttcatttcagagacttaaaasttactttacatcttgcgttgactttgcatctattgacaccaggcagaatcaaaaagatgtcacttggtccaaaataaatgtaggaaaaaataaataaggaagaacagaaaaaaatctgttcagasaaatgctttggggaaaccacctatacataaaaaacaagcaaacaaacaaacaaacaaaaagcaatataaaaataagttggaatgtcaaaataaaaatgggcctagacgttgaacagatgaaaaaggctgtgataaaatggacctcaaacctagaggaagataaagatacagaaa

SEQ ID NO: 85950 - DNA, 599 bp, Chicken  19866894385596_2
  misc_feature (1)..(25): n is any nucleotide
nnnnnnnnnnnnnnnnnnnnnnnnntctgacctgctgtattgttgtgatattgtcttatgatctaggcttttggttgggccttgtcatcttctgtggatttattctgcctgcattgcttatttacctggaagactgggctgtggctgaagaggccctcctaatgagtgtgggatcactgtgttcctggttcacctgttcttagtgagtagccatgaacttgttagtccttgacaaaagcctgaaaggacattgtaccccaaaagttggaaatatgtccttcatttcagagacttaaaatstactttacatcttgcgttgactttgcatctattgacaccaggcagaatcaaaaagatgtcacttggtccaaaataaatgtaggaaaaaataaataaggaagaacagaaaaaaatctgttcagasaaatgctttggggaaaccacctatacataaaaaacaagcaaacaaacaaacaaacaaaaagcaatataaaaataagttggaatgtcaaaataaaaatgggcctagacgttgaacagatgaaaaaggctgtgataaaatggacctcaaacctagaggaagataaagatacagaaag

SEQ ID NO: 85951 - DNA, 599 bp, Chicken  19866894385596_3
  misc_feature (1)..(24): n is any nucleotide
nnnnnnnnnnnnnnnnnnnnnnnntctgacctgctgtattgttgtgatattgtcttatgatctaggcttttggttgggccttgtcatcttctgtggatttattctgcctgcattgcttatttacctggaagactgggctgtggctgaagaggccctcctaatgagtgtgggatcactgtgttcctggttcacctgttcttagtgagtagccatgaacttgttagtccttgacaaaagcctgaaaggacattgtaccccaaaagttggaaatatgtccttcatttcagagacttaaaattsactttacatcttgcgttgactttgcatctattgacaccaggcagaatcaaaaagatgtcacttggtccaaaataaatgtaggaaaaaataaataaggaagaacagaaaaaaatctgttcagasaaatgctttggggaaaccacctatacataaaaaacaagcaaacaaacaaacaaacaaaaagcaatataaaaataagttggaatgtcaaaataaaaatgggcctagacgttgaacagatgaaaaaggctgtgataaaatggacctcaaacctagaggaagataaagatacagaaagg

SEQ ID NO: 85952 - DNA, 600 bp, Chicken  19866894385596_4
cctggaagactgggctgtggctgaagaggccctcctaatgagtgtgggatcactgtgttcctggttcacctgttcttagtgagtagccatgaacttgttagtccttgacaaaagcctgaaaggacattgtaccccaaaagttggaaatatgtccttcatttcagagacttaaaatttactttacatcttgcgttgactttgcatctattgacaccaggcagaatcaaaaagatgtcacttggtccaaaataaatgtaggaaaaaataaataaggaagaacagaaaaaaatctgttcagasaaatgctttggggaaaccacctatacataaaaaacaagcaaacaaacaaacaaacaaaaagcaatataaaaataagttggaatgtcaaaataaaaatgggcctagacgttgaacagatgaaaaaggctgtgataaaatggacctcaaacctagaggaagataaagatacagaaaggaaaagcaaaacaagggaaatctgttttggggaccacagtagggggggaccctgtgattattcaggtaagaagtctggggctagcagaaggtgatttgtgaaataagagccataatgtaaatctg

SEQ ID NO: 85953 - DNA, 600 bp, Chicken  19866894385597_1
ctgtgcaagtaataacatcaccttaactgttgttaaatacgtacatttgtggaggaataaagtgtgatgaaatctaacgttctttgaagagctaggatactaacagacttttagaagacaaataattcataggaacattgtttcagtatatcccaaaatttctttggaatcttcctctgtgaaaattacatgaaaaactcgtatataaaaaaagcaaacatgctttagttaaatcagttactgctgacatttgtttaccattaataaatggaccttggcagtatgttttttgttttcttstgtgggagtgtcaggatcaatgggtaggccyttgtgttccgtctgcctcatctgtgccctattaaccatcagattgaagaggttccccatgtacatgctagctctgtgctttgaaatcgtaaagtattaatgagacctcttccttgatattgataattgagcatctacagtgtttcttctcttgcagtaactgaaaattaaagttcagtagaaagctctgaaggtgttaaggggattttttgcagaggtctttgtatgccctgggcttgatttatcatttgcacgattctaactgagaat

SEQ ID NO: 85954 - DNA, 600 bp, Chicken  19866894385597_2; identical to SEQ ID NO: 85953

SEQ ID NO: 85955 - DNA, 600 bp, Chicken  19866894385597_3
gttaaatacgtacatttgtggaggaataaagtgtgatgaaatctaacgttctttgaagagctaggatactaacagacttttagaagacaaataattcataggaacattgtttcagtatatcccaaaatttctttggaatcttcctctgtgaaaattacatgaaaaactcgtatataaaaaaagcaaacatgctttagttaaatcagttactgctgacatttgtttaccattaataaatggaccttggcagtatgttttttgttttcttctgtgggagtgtcaggatcaatgggtaggccyttgtgttccgtctgcctcatctgtgccctattaaccatcagattgaagaggttccccatgtacatgctagctctgtgctttgaaatcgtaaagtattaatgagacctcttccttgatattgataattgagcatctacagtgtttcttctcttgcagtaactgaaaattaaagttcagtagaaagctctgaaggtgttaaggggattttttgcagaggtctttgtatgccctgggcttgatttatcatttgcacgattctaactgagaataatactgacaaagtgagaaaagaatcaggcc

SEQ ID NO: 85956 - DNA, 600 bp, Chicken  19866894385607_1
agattgtcagttggacggctctcagctgtcaaaactgagctgtaatcacagacctctctgggggaatatctggtatttgtcgagtgttagaaatcaaagtaaggtaccttagaagagaagatgatggtgctaataaggaacacaaggaactaaagcgggtgtacaaagtgatctgatggtgggcagttcttatagccattctgcaaatactggggaaagcagtacttcagtgcatccccagaacaactctgtctctgcagagcactgtgcaggtggggctgaacagcttcctgacctgcrcagctgattttcatgatgtaaagcactgcccgtttggggtcttaacactcagccaaagccttgccctgctcctgtgttgcctgagcgcgagcttcacgtttgggcaggatcgttgcgctctttggttggacacttcacttgttctccctcctccatccctgtgcccagcactaacagggtttgaggcatgtcactttacatacccactggctctagtggagtcacacggataaacccataagacaagaagacagacggctcgatccctgatgaaaccctactgcagcaaagagaagagac

SEQ ID NO: 85957 - DNA, 600 bp, Chicken  19866894385607_2
agctgattttcatgatgtaaagcactgcccgtttggggtcttaacactcagccaaagccttgccctgctcctgtgttgcctgagcgcgagcttcacgtttgggcaggatcgttgcgctctttggttggacacttcacttgttctccctcctccatccctgtgcccagcactaacagggtttgaggcatgtcactttacatacccactggctctagtggagtcacacggataaacccataagacaagaagacagacggctcgatccctgatgaaaccctactgcagcaaagagaagagacrgagatcacagtgggggctcttcgtccccatctccaggagggaatttctcaccccacatcactgagccagaggtgggagaagattaaggaaacatcaccccttacgctgcaccataatactgcatccaggcagctttgcttttggtggtggctgcccagttgtgctgtatttcagcacagttcagcacagggaattacacagcaagcaccacacagtggaaaacacctgacagtatactgttcagtgggcttgagagaggccaaaaataccatatgcatttgcaaaagactgcatatgagc

SEQ ID NO: 85958 - DNA, 600 bp, Chicken  19866894385621_1
ctgatattttatctccactgttttgcaagaattctgctgtgtttgtaaaaagcttttttgctaataaaatgctacaaaatagagttgcacaaggtaaacttacttgctgataagttacttttgtaatcacatgagtacaacccagaaaaaacatccaagtaatacttcaccgttaggtactgataagataatcccctactaagcacactaggagaattatgtcacattatcactgccagcctcattgcctgcacggcacagaggtgcttgctggaagatcattcacagtattttattttmttttttactttatccaaagggtttccttcccctccactttcacgtacaaactctccaggagagaattaaagatgtatttaccccagattgttgaaggatagtatcagcaaaatctcctggcattatcagggctgcacaactggcagctgaggatggctgtgccatccaaagccaagatgttctcaggggctgtttctgacagtgcactgtagtaacgacaagctgcaacacagcagaggctttgtagcacatgttccttgccagcataatattgcccaccacactactgtgtaagagcaa

SEQ ID NO: 85959 - DNA, 599 bp, Chicken  19866894385624_1
  misc_feature (1)..(36): n is any nucleotide
nnnnnnnnnnnnnnnnnnnnnnnnnnnnnnnnnnnnttgtaagaaaaccttaactgattaaagcagccaaagatttagccattatggggcttacaaatgtattgagtttacaaacgtacctatagtcttgtaagaaatgcatgtaggcttcaattttgcttttagtctttgcctttggatgaaggatgtgggaaaagacattgtcatttacagctccaggactgaagggagaaccaagagtgttcaccgatctccctcccagctggagtctggaaaggaatgtatgtacctggaacaggmtatcagggagatctatctgtgactcattagcagtgttccgctgagatcttgggtcacgagcctggcaccaagtgrgcccccagactttaagaggactgcctgcttctcatcaccttaaagtgctgtttctgcatatctgtcttaacctcatccttactctcttttgtcacctctctttcctatctcagtaagagcaccttcttacctctgcctctwtttttttttttttttttcccctttggggataaatcataaaactatcaaacctttcattgcttttcctttttatgagtcagaaa

SEQ ID NO: 85960 - DNA, 600 bp, Chicken  19866894385624_2
tagccattatggggcttacaaatgtattgagtttacaaacgtacctatagtcttgtaagaaatgcatgtaggcttcaattttgcttttagtctttgcctttggatgaaggatgtgggaaaagacattgtcatttacagctccaggactgaagggagaaccaagagtgttcaccgatctccctcccagctggagtctggaaaggaatgtatgtacctggaacaggmtatcagggagatctatctgtgactcattagcagtgttccgctgagatcttgggtcacgagcctggcaccaagtgrgcccccagactttaagaggactgcctgcttctcatcaccttaaagtgctgtttctgcatatctgtcttaacctcatccttactctcttttgtcacctctctttcctatctcagtaagagcaccttcttacctctgcctctwtttttttttttttttttcccctttggggataaatcataaaactatcaaacctttcattgcttttcctttttatgagtcagaaatttgtttggtgttctgcaccagtcaratccctttccagggaaagggaactttccagttctttggcacatgagaagt

SEQ ID NO: 85961 - DNA, 600 bp, Chicken  19866894385624_3
caggactgaagggagaaccaagagtgttcaccgatctccctcccagctggagtctggaaaggaatgtatgtacctggaacaggmtatcagggagatctatctgtgactcattagcagtgttccgctgagatcttgggtcacgagcctggcaccaagtgrgcccccagactttaagaggactgcctgcttctcatcaccttaaagtgctgtttctgcatatctgtcttaacctcatccttactctcttttgtcacctctctttcctatctcagtaagagcaccttcttacctctgcctctwtttttttttttttttttcccctttggggataaatcataaaactatcaaacctttcattgcttttcctttttatgagtcagaaatttgtttggtgttctgcaccagtcaratccctttccagggaaagggaactttccagttctttggcacatgagaagtacaaggagaaagaaagctaaaacagtagaagaaatagttactgtcctacttttggtcaccgtggtccaatgataatgtacagtcttaacctcagttcttgtagtatgttttagaatgaattaggggtaggtaagacatttt

SEQ ID NO: 85962 - DNA, 600 bp, Chicken  19866894385624_4
attagcagtgttccgctgagatcttgggtcacgagcctggcaccaagtgrgcccccagactttaagaggactgcctgcttctcatcaccttaaagtgctgtttctgcatatctgtcttaacctcatccttactctcttttgtcacctctctttcctatctcagtaagagcaccttcttacctctgcctctwtttttttttttttttttcccctttggggataaatcataaaactatcaaacctttcattgcttttcctttttatgagtcagaaatttgtttggtgttctgcaccagtcaratccctttccagggaaagggaactttccagttctttggcacatgagaagtacaaggagaaagaaagctaaaacagtagaagaaatagttactgtcctacttttggtcaccgtggtccaatgataatgtacagtcttaacctcagttcttgtagtatgttttagaatgaattaggggtaggtaagacattttctcctttaattccttttgtacagcattgcagtaataattctgtgttgatggagaagaactggagtggaactagcaggatgggaggtatgaagggagtggagaagacaga

SEQ ID NO: 85963 - DNA, 600 bp, Chicken  19866894385626_1
atacagtcctattgatgtaaactgtcagaactcccgtagtctgtaaggtgcatgcctccctctaactattgctggtgccgtgcactaataggtcatctagcagtacaaatgtgtgtgtgtgaagtaaatcctttggaaggagatccaattggacagcaatgcaggacgacttttatgccatattagccaaaatatacgagacagaacttacccacattgtgctacagcatactgcctggtacctggcttgtttggtgtcatgcacctgcccatcagctgagtgctctacacgatgttggytctgtagcattgcaaggatgygtgtggtagatcacgtggaaggagaaccagttgtagccactacctgggaaacttgggagaagcatcaagcccagtgtcagtatgtcatttacatactcccactgaccagccactaaaatggtgaaaaatgggaaaagccatttttatctccttgtttttctgcctgatcagcctggaggaacaagcagcaaccagtggtaaaaggccttcattttgttatatgaaattttgtgcccactgcagaaattcagtttgtcctttctgtgcacgtatctgcta

SEQ ID NO: 85964 - DNA, 600 bp, Chicken  19866894385626_2
ctgtcagaactcccgtagtctgtaaggtgcatgcctccctctaactattgctggtgccgtgcactaataggtcatctagcagtacaaatgtgtgtgtgtgaagtaaatcctttggaaggagatccaattggacagcaatgcaggacgacttttatgccatattagccaaaatatacgagacagaacttacccacattgtgctacagcatactgcctggtacctggcttgtttggtgtcatgcacctgcccatcagctgagtgctctacacgatgttggytctgtagcattgcaaggatgygtgtggtagatcacgtggaaggagaaccagttgtagccactacctgggaaacttgggagaagcatcaagcccagtgtcagtatgtcatttacatactcccactgaccagccactaaaatggtgaaaaatgggaaaagccatttttatctccttgtttttctgcctgatcagcctggaggaacaagcagcaaccagtggtaaaaggccttcattttgttatatgaaattttgtgcccactgcagaaattcagtttgtcctttctgtgcacgtatctgctaatctgtttcagagttgttgcc

SEQ ID NO: 85965 - DNA, 600 bp, Chicken  19866894385639_1
agaggatgtctctacaatagcagaggataaacacagttccttccttatcttcaaagcaagctcaggcccctcagcagcattttagagatcagttatacagtaagtgtctttgaccagaccatcattttagtaattgccttaaaccaaccgttccattttagcaatgtggaagcacacagcatccagcctgtcaggatgccatgcagaattcacatggccagctgaggtatttacttcctgtgctatttgtactctgtcaggaagaccaagatccagtccctagataccccacatagcatkaagacagccagaaatacttcagcattttaagaacatagaaaatggcctggctaacaccagcagcttgtgtttgcatgttgataaaaggaggaaaaagccccaatgaataaaatgtatcaaactttcaggcttctcccctacctgtgacaactatacttgtgataatcaaccccctgcactcagcgagggaaaatataccacccacatcatgggcagctcacctaccctacacttctccttgggaacacacacttctatccccttggctatagagggggagagacagctgagtgagggtgc

SEQ ID NO: 85966 - DNA, 600 bp, Chicken  19866894385642_1
gcaagcttgagttccattccagtacatagctacgtgaggcactaattcttccactgatggggctgtacagagttgcagaacaatgacataagacgtcaggcagagatggcacatcaatgagcagctattctcctttccagttctaaacttgggaggaattagctcgatcctgtcttgagatggtcttgtgctcctaacctggacaagcctatccatcagtgccttattctgatgggtacgtaaactgtcaatgatactgtatggatgtgtacttcatgctaatcacctgagttcttgtgrtgtctggattctcatttgtgctttctggctttctgacactagttgtgtcagtagagatgcatggayggtgagcaatctaattacattcccgaagaatgggatctatgagcatctcagagcatttactcaaaagggtaaatattaaggattaatttgcaataaaaacagaagaacaggggaagttatagaagactaaatgtattaaattcttgaggtctgcatcagtctgaaattgaagatgtaagtcaaagaatattactagagatgaatatttcacacagttcaagacaagtatcacaa

SEQ ID NO: 85967 - DNA, 600 bp, Chicken  19866894385642_2
acagagttgcagaacaatgacataagacgtcaggcagagatggcacatcaatgagcagctattctcctttccagttctaaacttgggaggaattagctcgatcctgtcttgagatggtcttgtgctcctaacctggacaagcctatccatcagtgccttattctgatgggtacgtaaactgtcaatgatactgtatggatgtgtacttcatgctaatcacctgagttcttgtgrtgtctggattctcatttgtgctttctggctttctgacactagttgtgtcagtagagatgcatggayggtgagcaatctaattacattcccgaagaatgggatctatgagcatctcagagcatttactcaaaagggtaaatattaaggattaatttgcaataaaaacagaagaacaggggaagttatagaagactaaatgtattaaattcttgaggtctgcatcagtctgaaattgaagatgtaagtcaaagaatattactagagatgaatatttcacacagttcaagacaagtatcacaagccaaggtgaagctgaggtgtagccaataagagacatcttgatgagaagtcattatgaacattgta

SEQ ID NO: 85968 - DNA, 600 bp, Chicken  19866894385654_1
aaaacatcagtgctttacctagaaattcttgtccacgtgctaaaatacttacaaccaagttcttctcctgtgatgagtgacaaaattcgccccactttacagaattactgcactccagagatgaagacaggagaccagatgtttgacttcctttttgcacctaacacttaggggaaagacctgttgtgtttccccaggttgtttcttaactgagtgcacagcaatttttttttcttaaagcatagatacatgtaaatgttctgccctcttaatattccaaaataaattctccccagaaargagaatagagatagctatttatcctcctagtaactaacaaagcagacaagaacacaaaagatgactagcagaccastcacagtagcattatgtatgcagatacagtttgaaatttctgcactttcaggtcatacaatagatccatactacatttgggcccaattcatcataaatgacagtatcagcagccagactctgcaaattgtttcagtaccttgaaaaatgaaacatctatgagacttaaacacttagagacacagaagtacactcttcctgtgttaaacaaataattcaacgcag

SEQ ID NO: 85969 - DNA, 600 bp, Chicken  19866894385654_2
gtgacaaaattcgccccactttacagaattactgcactccagagatgaagacaggagaccagatgtttgacttcctttttgcacctaacacttaggggaaagacctgttgtgtttccccaggttgtttcttaactgagtgcacagcaatttttttttcttaaagcatagatacatgtaaatgttctgccctcttaatattccaaaataaattctccccagaaargagaatagagatagctatttatcctcctagtaactaacaaagcagacaagaacacaaaagatgactagcagaccastcacagtagcattatgtatgcagatacagtttgaaatttctgcactttcaggtcatacaatagatccatactacatttgggcccaattcatcataaatgacagtatcagcagccagactctgcaaattgtttcagtaccttgaaaaatgaaacatctatgagacttaaacacttagagacacagaagtacactcttcctgtgttaaacaaataattcaacgcagaggctatgaatgaatttcatttttctgttttccagactcaaagggcttattctttatggaaacttttagaattatt

SEQ ID NO: 85970 - DNA, 600 bp, Chicken  19866894385657_1
aggaccacatacttctccatgtgttccttcacataatttgtcacatgcctctcttttcttaagaaaaaagacctgtatttaacagtcatgctgatagtttctgtcttccactttcttaaggttttgttagatgttttatccatgacaaatgattccattttatctagtcttgattgacggttctgttttctctaagcaagaggtatgcatgaaaaaaataaaaatacatatctatcttacaataaaatcaaaacaagattgtttctttcaaattgttataagtagctttgttttaatgcytactgggaaacatggcactgaagtaagctgtgaccacttcagaaagatcttgagaccatttagcttcatgacattgaggcaggacttgtgttgggatgtggtggatggctaattgttaaaattcatcttcccaaattggtcccctgactttctgctattatggaaaaagtgaaaatgtatgccttcctcagtaccaaatattttaacgaaacctgctcctactgtctctccaaattgctaaaagcctcacctgtcacagctttgcactttctttgacaaattatgtaatgacatctcata

SEQ ID NO: 85971 - DNA, 600 bp, Chicken  19866894385677_1
tatacattctctaaatgatgcagcagcttaattaatttaataagtatttaatgtactgaattgtgtatggattttataagtatcttctaaagttgttctgcaggaggtaattcacttcctctggaataaaggtgtttcttggcagaagaacttgtttcattgcttaattggtagcttacttcttggtgtactgttctgttgagtagtgagttagtcatgagcaatgactaagtaacacaaaggcgtacacatgtgtgcttacacacagatgtaagcactagactgcaattaccagtactrttcagtttgttagcatgatccctggtatcctgggatctrtaacactggctctgagcaacttacacgtcaatcttttccactgatgagtttcaaatatgagtacaccaatgtgcattcaaaagctatggatgagtgacagtacagacttggtgacccaggagcaaagacttttyttctttatcactgccttccttctttgcatattgttggtaggccaacatctctgacaggaccagttccygctcagagaacaggctgttctgggagaaagtggtttgattaggggaaggtggtatatct

SEQ ID NO: 85972 - DNA, 600 bp, Chicken  19866894385677_2
ataagtatttaatgtactgaattgtgtatggattttataagtatcttctaaagttgttctgcaggaggtaattcacttcctctggaataaaggtgtttcttggcagaagaacttgtttcattgcttaattggtagcttacttcttggtgtactgttctgttgagtagtgagttagtcatgagcaatgactaagtaacacaaaggcgtacacatgtgtgcttacacacagatgtaagcactagactgcaattaccagtactrttcagtttgttagcatgatccctggtatcctgggatctrtaacactggctctgagcaacttacacgtcaatcttttccactgatgagtttcaaatatgagtacaccaatgtgcattcaaaagctatggatgagtgacagtacagacttggtgacccaggagcaaagacttttyttctttatcactgccttccttctttgcatattgttggtaggccaacatctctgacaggaccagttccygctcagagaacaggctgttctgggagaaagtggtttgattaggggaaggtggtatatctcctgtgccatgagaggtttgtctgggtgtgcagtgtaaa

SEQ ID NO: 85973 - DNA, 600 bp, Chicken  19866894385677_3
gcttacttcttggtgtactgttctgttgagtagtgagttagtcatgagcaatgactaagtaacacaaaggcgtacacatgtgtgcttacacacagatgtaagcactagactgcaattaccagtactrttcagtttgttagcatgatccctggtatcctgggatctrtaacactggctctgagcaacttacacgtcaatcttttccactgatgagtttcaaatatgagtacaccaatgtgcattcaaaagctatggatgagtgacagtacagacttggtgacccaggagcaaagacttttyttctttatcactgccttccttctttgcatattgttggtaggccaacatctctgacaggaccagttccygctcagagaacaggctgttctgggagaaagtggtttgattaggggaaggtggtatatctcctgtgccatgagaggtttgtctgggtgtgcagtgtaaatatccttggcactgaaggtccagactgctgaaataggaactaggaaggatggaatgtgtcccttttgcttacttacctgtccctatgcacacctggatgatatctacttaagtaacaattaaagatgtgggtat

SEQ ID NO: 85974 - DNA, 600 bp, Chicken  19866894385677_4
ggcgtacacatgtgtgcttacacacagatgtaagcactagactgcaattaccagtactrttcagtttgttagcatgatccctggtatcctgggatctrtaacactggctctgagcaacttacacgtcaatcttttccactgatgagtttcaaatatgagtacaccaatgtgcattcaaaagctatggatgagtgacagtacagacttggtgacccaggagcaaagacttttyttctttatcactgccttccttctttgcatattgttggtaggccaacatctctgacaggaccagttccygctcagagaacaggctgttctgggagaaagtggtttgattaggggaaggtggtatatctcctgtgccatgagaggtttgtctgggtgtgcagtgtaaatatccttggcactgaaggtccagactgctgaaataggaactaggaaggatggaatgtgtcccttttgcttacttacctgtccctatgcacacctggatgatatctacttaagtaacaattaaagatgtgggtattttttcttttatttctcttcccttccttgcttaaacagttttttttttaagagatttgcaaagaggag

SEQ ID NO: 85975 - DNA, 600 bp, Chicken  19866894385679_1
cgtaagtatgttttattttctgcctctgactgatctatgaaggcatgcaagaagagcacatatctcatcaggggaccagtaatggcatacagaacctctgactttgcaggtcactggtttaaattccatgcaagccattgtgacagaatactactgtcatctggtggcagtttcattacctacgtaaaatatggaagtaacgtcagtctatttcttattaagagctagcagttctctttgtgtaagtcatgaatctcttaataaataggctctgcctgtacgattgcaggagagaaaagwctttttagctaagctgagtgaacatctcggttcactgaaggaagactggatcaagtttggtcagtgtaactgacctaatttgtgttcttatggatggtgtggatttctttattcaaaaaggtttaaacatctgaggaatgaggcggtggctattccatgctgtgggattacattagcagataggatgattggcttcttaaacacaaattaatgacgtgaaaagagaaaaatggtcattatgaagatttttcaatgacatttactaaatgtcttctaggtgcttcataggactgtaacagc

SEQ ID NO: 85976 - DNA, 600 bp, Chicken  19866894385685_1
aggatggagctgatagagacaaaccagccaaaatgatgctgctaatgatttcttttccctcaggggaagcactgaggaaggataatagatatactttgcaacactgttcccaagggactttatctaagcagggagaagaattaataggcagcctttcagggagagacaaatatgcaaaaatatcgcagtgctaaggagttctgctgacatagcaagcacctaaaggtgtctgtgcagggctcagtccatgtcctggcactgagtcgacacaggcagtgccagcagggtcagctcactgcytgaggacctgtccatgccaccctttccacccaagttggtctggacagaatgttggaatttttgcctgcttgtaaattaatgggtcttggactgtgcggactccaggctgcatacatggtgaaacaggaggtgatgtaaatccaggagaagcacagtgcttagtctgcataggaaagaatttgtcaaggctaggacgttagtgaaccatttaaagccagggaatcatatataatacaatgaaaggagggaatttctctggctttcctccagaagccaagtattattcattgatcagaaacc

SEQ ID NO: 85977 - DNA, 600 bp, Chicken  19866894385685_2
tgaaacaggaggtgatgtaaatccaggagaagcacagtgcttagtctgcataggaaagaatttgtcaaggctaggacgttagtgaaccatttaaagccagggaatcatatataatacaatgaaaggagggaatttctctggctttcctccagaagccaagtattattcattgatcagaaaccagatctccatctccactgagaacactttttcctccatttgctaagtagaaaatgacaaacgagctcgctgtgccctctcccacatccttccctctcccatctgcccaggcatccctgyccctctgcccacttacccggcaccaccagcagcctggggggcggcgggggaggaggtggcggtggcggcggtggtggtggcctgcattggcagatctgctggcagctctccgggacttcatctgctacaggcttggagcatgacttctggggctcaccctgagtgatctgtggagaaacaagtcatggcacaagcagcagaaagwgggaaaactgattttccaggaacatgcttcttgaacttgagttcccaattggcacctcagcccctggagagaactgagctcctgccactgctgtt

SEQ ID NO: 85978 - DNA, 600 bp, Chicken  19866894385685_3
actttttcctccatttgctaagtagaaaatgacaaacgagctcgctgtgccctctcccacatccttccctctcccatctgcccaggcatccctgyccctctgcccacttacccggcaccaccagcagcctggggggcggcgggggaggaggtggcggtggcggcggtggtggtggcctgcattggcagatctgctggcagctctccgggacttcatctgctacaggcttggagcatgacttctggggctcaccctgagtgatctgtggagaaacaagtcatggcacaagcagcagaaagwgggaaaactgattttccaggaacatgcttcttgaacttgagttcccaattggcacctcagcccctggagagaactgagctcctgccactgctgttcctcactgaggacacaaggtcacttccctgtgatgtctcagctttatgttttacttaacacagtatcttcaagacctctttacttctgactgtggccggctggtttctgaattattatggggtagagtgcaggcgggtagtggcagacaatgtggttgcgtaagccttctttccttaggaaagctgtctaatagcatgcattatt

SEQ ID NO: 85979 - DNA, 600 bp, Chicken  19866894385685_4
ctgtggccggctggtttctgaattattatggggtagagtgcaggcgggtagtggcagacaatgtggttgcgtaagccttctttccttaggaaagctgtctaatagcatgcattattcacagggttgttgctgcaagccaaagagagctaataaaaattgcaagacatttagggtcaggattattctcattttccttatggcggaaccaagagccagagatctctcctgttttgccagcttccctttcacgtttggagtcatgcttcgcttcccaccatggtgaggtgcagccccatctaytcatctgcagactgcatggaagacttggtcaaaatggaaatgccacagcccgtgccttgcagcttcctgttggttgtcagtgaagctgaagagaaggcactgcagaacccaagtgtaaccattggtgaacccacatgtaggcattgcttggcactggccgatgatttagccaggatgcatacattcagcactgtgatctagtcgtgacaaggaacacatgttaatacatatttttcttaccagaaataatatttatatgtctaggaacatgtaaataaggatattcagtaactgtaaaat

SEQ ID NO: 85980 - DNA, 599 bp, Chicken  19866894385687_1
  misc_feature (1)..(10): n is any nucleotide
nnnnnnnnnntatgctccagtccataatattcatttcactctgaattcatggaaaaggactgcacgattgttgttaaaaaaaaaaaaaaaaaaaaaaaaaaaaaaaaaaggccaacagattcttcactgaaattctcaactctgtggctgtagggctaatctagtaaagaaaacaatctttgaatctccatgtatttccagtagtctttgagtcttgtaagctgcactgtgataccaggaacatcttttgttagtttgatagcctttttagtatctttacttcttcagttgttcttcttsaggcatagatttcctgatcagatttataacagttcagatgagcacaagtctttgtgcagctggttgatcatacagacatctctgctcaggtgatggtagtttaagcaataatgaaaaatttcctatgggttgcaactctgagtaaatataaggtgaaaaattaagagaaagaaaggatcacaaatttctctcatgattttaagcttactgaataaatagatccatatcaaatagtctagtagtatgcaaaaaaaaaaaaagtatatactaagctgaatgtatcttacttagtgatactt

SEQ ID NO: 85981 - DNA, 600 bp, Chicken  19866894385689_1
atttatcttatccattattccatttgatgtaaggttttactctcctatgctatttatgtctaaagtatatgccgccaagttattgatgaatccctaagaattttgtttttgtattttcttctactatcaaaatacagtgcggtgttatacttgaatattaccattaatctgatttcccctgttccttgggaaatgagagtcgcttctactcaatattgctaagatccagtattagaaatagttgatagctttagatgagtctatgcttcttcagcagttgcactaacaggaaattctcakatgctataagcttacagatttgggccaaaagaaatctagctttgtacagaggtttgcagaaataaatagatataatgttttctatagtgctttattttttgtggagtactgccaatatgactgggaagatcactcatgagataagcctacggatcgattaaaatgtttactttgcataactgaagaacaaaaagcaaaataatgagagaagaagaatgaacatcatttagctgtgtttttatcaaattcactacattcactcacatttgataatataatatccagctccttgttttcctt

SEQ ID NO: 85982 - DNA, 600 bp, Chicken  19866894385693_1
gctgatctgggaaagcatggcagctctgtgaattgggaactgctccccgtccagccttccatccattaccaggcaatgcccacccactgctttttgcaccagagtgctgtttgtgtgatgactgaaataaaaatgtctatgtgccaaggtcaggatgtgatgccccattccctatggagcctgactcgtgttgctttctgacagccatctgaaagagctgaagacattatgaagggatacaattttaaattaaaaattataatagtcccttctcacactgtgatatgaactggagttgcraagtttagcagatcacctaagtttgggaaacagtattttcactgcaaaatttcttggaccatagaaaatactgtattgtatagaagtctgttgaaattcaaggactgtgatgagtgaaaatttaaagaacctgtttcatatggcattcagacactcaactccatgtacagtgaggagcagtaaacaactgagggctacatcctggtggagcgagtgctggaacaacaagcacaatgccatcttccctggagagcttcttcccaggcctggggagaacacctgttgtaggtaaacagaact

SEQ ID NO: 85983 - DNA, 600 bp, Chicken  19866894385697_1
aggcctagaatgatgttcaattttgtacagttaacagaaggtaagcagtaaaaataaaagaaacgtcatattatagtgatcttctgtatagaaactgacataggtgaaagatctactgatcatgattaatgagtgtcttaatctgtatatatgaaaaggaagaaaaaaatcactgatgttgacaaaaagcattacagctactaaagcaatactccactccacaggagacagcattttcatacttcacagttaaacttgtcagccttgattatatattctgatggacacagtggggacacwaaataaatgctgtctggcatacttcagagaactatgggaagagtagggtagatcagaataagaaagaaacatcataatgaagtcttacaaaacaatgtggacctgaagatgtgaggtctttttttaactgaggcacaattttctccaaaaatccctgtccacctgagactgatttagaaaatacacattggaatgtagtataatctgctccttctctacagagaattggactgttctgtagatactaccggtatgtgcagttgtagttggtacttttgaaaagtttataaggcatttatg

SEQ ID NO: 85984 - DNA, 599 bp, Chicken  19866894385699_1
  misc_feature (1)..(73): n is any nucleotide
nnnnnnnnnnnnnnnnnnnnnnnnnnnnnnnnnnnnnnnnnnnnnnnnnnnnnnnnnnnnnnnnnnnnnnnnncctagacaaggacactgcttgtctgtatactcttagcctttggcaaacatgatataatttaatttagctaccaggaaagaagcgtcagctaggtctcaggatcttgtgctcatggtaggctaaaaggctgcacagaaatggttatcactggtcaggtgacatgcagtaaattgtttaaccattgatacatgagcatgtgcttcaaaactgctatgtcatagagatgyggtggtggattttttttggagaagcattcacaccagatttcaattaaggaaaacagttataccaatgaaggcaatatcctttcttatgtggaattagcaggagcaaagacaccgatatacagagccatatccagacagtgtggggaccagcagcaacactctttgtgtggaacatctggaaaagraaggactgcttttcttagtactgaaatttcaaagtctactgtaccatggaaataaacaaggcacttccactcttctattcacygtttcaggttatctgtggatttggaagtgtt

SEQ ID NO: 85985 - DNA, 600 bp, Chicken  19866894385699_2
tggtaggctaaaaggctgcacagaaatggttatcactggtcaggtgacatgcagtaaattgtttaaccattgatacatgagcatgtgcttcaaaactgctatgtcatagagatgyggtggtggattttttttggagaagcattcacaccagatttcaattaaggaaaacagttataccaatgaaggcaatatcctttcttatgtggaattagcaggagcaaagacaccgatatacagagccatatccagacagtgtggggaccagcagcaacactctttgtgtggaacatctggaaaagraaggactgcttttcttagtactgaaatttcaaagtctactgtaccatggaaataaacaaggcacttccactcttctattcacygtttcaggttatctgtggatttggaagtgttgtcttctctactgacacctaaaagtccagtaactatctgtcacttaaaaagtaaatctcaagatctgctgcagatttctgtggcctgggcatattcctgggtgaaaacagaataacttgtagctttgtgagaattttcatgcttctttgataagatattattaggagtgtattactaatacagcag

SEQ ID NO: 85986 - DNA, 600 bp, Chicken  19866894385699_3
tgtgcttcaaaactgctatgtcatagagatgyggtggtggattttttttggagaagcattcacaccagatttcaattaaggaaaacagttataccaatgaaggcaatatcctttcttatgtggaattagcaggagcaaagacaccgatatacagagccatatccagacagtgtggggaccagcagcaacactctttgtgtggaacatctggaaaagraaggactgcttttcttagtactgaaatttcaaagtctactgtaccatggaaataaacaaggcacttccactcttctattcacygtttcaggttatctgtggatttggaagtgttgtcttctctactgacacctaaaagtccagtaactatctgtcacttaaaaagtaaatctcaagatctgctgcagatttctgtggcctgggcatattcctgggtgaaaacagaataacttgtagctttgtgagaattttcatgcttctttgataagatattattaggagtgtattactaatacagcagaggacagattcccaacagcttgagacagggaaagaaattacctttgctgacacccagggacatcatggttctcagaattgcct

SEQ ID NO: 85987 - DNA, 600 bp, Chicken  19866894385702_1
gtcacctagtcagtctactgctaaggttagtttaaaaacacaggacagaatacagttgcatatttcttttttattaacctacttcattttaaataaactcgatggtatcttttttttttttactatgaacttctccattttttctttatcttttttcctctttgtttcctcagcagtcactcagaaatatctccttactatactacttatttacatgtagcttggctttaagatctgtgtttccacatgacctggattccagttatatattcttattcagctccatatttgttgttgctrctatcaagtggaactggtgtatgatatccacttttatgttaataggaaatggtctgcgtatgtatacttatttctttgggactgtatgcactctgaaaagacaaggcttcttcaaacaacttttcacatttattcaggctatctgaattagatgcaattagagcaccaaggaactaatgagtattttgctgctgaagcaaaagtgaaatcttgctaccaaggcatggaacagctccagtagcacagtcaccttttctcatcatggtgtgtgcttccaacattgcagagctttatgactgc

SEQ ID NO: 85988 - DNA, 599 bp, Chicken  19866894385713_1
  misc_feature (1)..(2): n is any nucleotide
nngaagttcatcagtaagatccgctgtcatttggcacaataggattataaggtcagcaattagatgttgtcatgaagacaatatacttatcactggcatttcttattcatttctcatttacaaattacttttggtttttagttgattttttttttctcattgattaactgcataggctttaaatatttgggcttagctgcatcagtgttacagtaataaacttaattcagctggtacccccgtgtggggacaaatttattgtgaataacagagagagatatactgttgacgtagatggcraaatcctatagctctatttgtgggtgttttttgttgttatctgttttcccttgttatttgtcttgtttatttgcttgtttgttttggttgtttggttgatttcagcttgtttgttggatttccttctgaatattttattcatttgaggtgaggcacattgatggtcttagctcataacatcactgagtgattttgttcgttctgctaaccacagacttgtccccagtctcatctatgtcattcctctttcttttttctcttcctttttcttctctctaaacattcattctttgtgttgt

SEQ ID NO: 85989 - DNA, 599 bp, Chicken  19866894385719_1
  misc_feature (1)..(224): n is any nucleotide
nnnnnnnnnnnnnnnnnnnnnnnnnnnnnnnnnnnnnnnnnnnnnnnnnnnnnnnnnnnnnnnnnnnnnnnnnnnnnnnnnnnnnnnnnnnnnnnnnnnnnnnnnnnnnnnnnnnnnnnnnnnnnnnnnnnnnnnnnnnnnnnnnnnnnnnnnnnnnnnnnnnnnnnnnnnnnnnnnnnnnnnnnnnnnnnnnnnnnnnnnnnnnnnnnnnnnnnnnnnnnnnntcagcaactacagttccttttgccagaagctcttaaccaatgcacacaaaagaaaacagcaccagtaaatcaaaargttctaytaggcacctcataacattgattgrcattttgtggctgttcatgtgttcaaagcaacatgcacaaawtacccaatcaatccaakctgttcaggtttcacctgtcccatctcaccagccagctccatgtctgctgcacagcccaggactttgtgtcaggagaatatggatgcttcgacctgccagtgcccaactgcctccagcccttccagccagaggaaaagtgcatggtattcaatcaagccaaagatcactttccccagcaagttattccaaggacagacaatgatctgaa

SEQ ID NO: 85990 - DNA, 599 bp, Chicken  19866894385719_2
  misc_feature (1)..(217): n is any nucleotide
nnnnnnnnnnnnnnnnnnnnnnnnnnnnnnnnnnnnnnnnnnnnnnnnnnnnnnnnnnnnnnnnnnnnnnnnnnnnnnnnnnnnnnnnnnnnnnnnnnnnnnnnnnnnnnnnnnnnnnnnnnnnnnnnnnnnnnnnnnnnnnnnnnnnnnnnnnnnnnnnnnnnnnnnnnnnnnnnnnnnnnnnnnnnnnnnnnnnnnnnnnnnnnnnnnnnnnnnntcagcaactacagttccttttgccagaagctcttaaccaatgcacacaaaagaaaacagcaccagtaaatcaaaargttctaytaggcacctcataacattgattgrcattttgtggctgttcatgtgttcaaagcaacatgcacaaawtacccaatcaatccaakctgttcaggtttcacctgtcccatctcaccagccagctccatgtctgctgcacagcccaggactttgtgtcaggagaatatggatgcttcgacctgccagtgcccaactgcctccagcccttccagccagaggaaaagtgcatggtattcaatcaagccaaagatcactttccccagcaagttattccaaggacagacaatgatctgaagctgtca

SEQ ID NO: 85991 - DNA, 599 bp, Chicken  19866894385719_3
  misc_feature (1)..(193): n is any nucleotide
nnnnnnnnnnnnnnnnnnnnnnnnnnnnnnnnnnnnnnnnnnnnnnnnnnnnnnnnnnnnnnnnnnnnnnnnnnnnnnnnnnnnnnnnnnnnnnnnnnnnnnnnnnnnnnnnnnnnnnnnnnnnnnnnnnnnnnnnnnnnnnnnnnnnnnnnnnnnnnnnnnnnnnnnnnnnnnnnnnnnnnnnnnnnnnnnntcagcaactacagttccttttgccagaagctcttaaccaatgcacacaaaagaaaacagcaccagtaaatcaaaargttctaytaggcacctcataacattgattgrcattttgtggctgttcatgtgttcaaagcaacatgcacaaawtacccaatcaatccaakctgttcaggtttcacctgtcccatctcaccagccagctccatgtctgctgcacagcccaggactttgtgtcaggagaatatggatgcttcgacctgccagtgcccaactgcctccagcccttccagccagaggaaaagtgcatggtattcaatcaagccaaagatcactttccccagcaagttattccaaggacagacaatgatctgaagctgtcattgtacaggctgaaaagcagccct

SEQ ID NO: 85992 - DNA, 599 bp, Chicken  19866894385719_4
  misc_feature (1)..(151): n is any nucleotide
nnnnnnnnnnnnnnnnnnnnnnnnnnnnnnnnnnnnnnnnnnnnnnnnnnnnnnnnnnnnnnnnnnnnnnnnnnnnnnnnnnnnnnnnnnnnnnnnnnnnnnnnnnnnnnnnnnnnnnnnnnnnnnnnnnnnnnnnnnnnnnnnnnnnnnntcagcaactacagttccttttgccagaagctcttaaccaatgcacacaaaagaaaacagcaccagtaaatcaaaargttctaytaggcacctcataacattgattgrcattttgtggctgttcatgtgttcaaagcaacatgcacaaawtacccaatcaatccaakctgttcaggtttcacctgtcccatctcaccagccagctccatgtctgctgcacagcccaggactttgtgtcaggagaatatggatgcttcgacctgccagtgcccaactgcctccagcccttccagccagaggaaaagtgcatggtattcaatcaagccaaagatcactttccccagcaagttattccaaggacagacaatgatctgaagctgtcattgtacaggctgaaaagcagccctgtggcgctgtgtgtcaggcaaagccagacagcagtttgcagg

SEQ ID NO: 85993 - DNA, 599 bp, Chicken  19866894385719_5
  misc_feature (1)..(134): n is any nucleotide
nnnnnnnnnnnnnnnnnnnnnnnnnnnnnnnnnnnnnnnnnnnnnnnnnnnnnnnnnnnnnnnnnnnnnnnnnnnnnnnnnnnnnnnnnnnnnnnnnnnnnnnnnnnnnnnnnnnnnnnnnnnnnnnnnnnnnntcagcaactacagttccttttgccagaagctcttaaccaatgcacacaaaagaaaacagcaccagtaaatcaaaargttctaytaggcacctcataacattgattgrcattttgtggctgttcatgtgttcaaagcaacatgcacaaawtacccaatcaatccaakctgttcaggtttcacctgtcccatctcaccagccagctccatgtctgctgcacagcccaggactttgtgtcaggagaatatggatgcttcgacctgccagtgcccaactgcctccagcccttccagccagaggaaaagtgcatggtattcaatcaagccaaagatcactttccccagcaagttattccaaggacagacaatgatctgaagctgtcattgtacaggctgaaaagcagccctgtggcgctgtgtgtcaggcaaagccagacagcagtttgcaggaccagctgaacacactc

SEQ ID NO: 85994 - DNA, 600 bp, Chicken  19866894385724_1
aaaatatatatatccttgctttcagaggcacactcacgatgcctcagtctgaaacatctctatgattgatctattcaggctgcaaagctttaggcaagtgcttgattagacatgagttttacactcctcaagctatttaagttatacatacagtatgaacagggtgcacctttcattgcaaaattctttgattcttagagccattactaaatatgaatatttgacctaggttaactaaaacaacccctgggtctggacagactttcacattcacctgagcctaatcttcaggctcaaatstattatctcacgtagtctggtttaagtaatacaatgaacagatcattcacaggataaggacttgactggatggttgcactcagagagctgtggccaacagctcaatgtcaaagtggagtctggtgacaagtggtgttcctcagggatcagtgctgggattggtgctatttaacgtcttcatagatgacacgatcagtaggatcaasaacactcttggcaagtttgcagatgacaccaagctgagtggcacagctgacgtgctagagggaagagatgccatccagaaggatctggacaggc

SEQ ID NO: 85995 - DNA, 600 bp, Chicken  19866894385724_2
ctaaatatgaatatttgacctaggttaactaaaacaacccctgggtctggacagactttcacattcacctgagcctaatcttcaggctcaaatstattatctcacgtagtctggtttaagtaatacaatgaacagatcattcacaggataaggacttgactggatggttgcactcagagagctgtggccaacagctcaatgtcaaagtggagtctggtgacaagtggtgttcctcagggatcagtgctgggattggtgctatttaacgtcttcatagatgacacgatcagtaggatcaasaacactcttggcaagtttgcagatgacaccaagctgagtggcacagctgacgtgctagagggaagagatgccatccagaaggatctggacaggcttgagaggtgagtccactccaaccccgtgaagttcagcaaggccaagtgcaaggtcttgcatcttgctggggcaatcccaagcacagatacaggttgggcagagaatggattgagarcagccttgaggagaaggatttgagagtgtcagttgatgaaagactcaacgtgagccagcaatgtgaactggcagcccagaaggccaacc

SEQ ID NO: 85996 - DNA, 600 bp, Chicken  19866894385724_3
gtctggtgacaagtggtgttcctcagggatcagtgctgggattggtgctatttaacgtcttcatagatgacacgatcagtaggatcaasaacactcttggcaagtttgcagatgacaccaagctgagtggcacagctgacgtgctagagggaagagatgccatccagaaggatctggacaggcttgagaggtgagtccactccaaccccgtgaagttcagcaaggccaagtgcaaggtcttgcatcttgctggggcaatcccaagcacagatacaggttgggcagagaatggattgagarcagccttgaggagaaggatttgagagtgtcagttgatgaaagactcaacgtgagccagcaatgtgaactggcagcccagaaggccaaccatatcctgggttgcttcagaagaagcatgaccagcaggtcaggggaggtgattctgcccctctactctgctctcatgagaccccacgtggagtactgtgtccagttctggggaccccaacatgagaagaacactgaactgttggagtgggtccagaggtgggacacgaaggtgatcagaggtctggagcacctctcctatgggaacaggct

SEQ ID NO: 85997 - DNA, 600 bp, Chicken  19866894385735_1
gtctaattgaaattgcattaatggtatgattccattacaggcaagcaagatgcttgcttcaagaacactcccagtgggccctgaatcagctgcaatagataatttataaagtgctgtggatcttctcaaagctccagtgttaagtacaggagacacagggctatccattattaacaagatattatgctttttgttcagcagaaagtgtgggtctgggatgagctaaggtctatcaaaggtgagatttgagactgccagtttgactgaactattcctcagacactgcctctaagtctgtgycagcttttgaactctctttgaaagatagctttcacatctctrttctgacctggtattccaagagttctctttggatttgcttgctttgcattttaacctttgtgaaaaggctgtgagtggaaagaactactagctgcttttgagttaggccagtgataaagcagccagtcaggttcctctgaacccagccctctgtcatcacaaacttgagtttccctccctacttccacttgttcatatatacttcctagtctgaatcttcagtaagcttctggtagcctatgcctgggatagcaatga

SEQ ID NO: 85998 - DNA, 558 bp, Chicken  19866894385735_2
aagcaagatgcttgcttcaagaacactcccagtgggccctgaatcagctgcaatagataatttataaagtgctgtggatcttctcaaagctccagtgttaagtacaggagacacagggctatccattattaacaagatattatgctttttgttcagcagaaagtgtgggtctgggatgagctaaggtctatcaaaggtgagatttgagactgccagtttgactgaactattcctcagacactgcctctaagtctgtgycagcttttgaactctctttgaaagatagctttcacatctctrttctgacctggtattccaagagttctctttggatttgcttgctttgcattttaacctttgtgaaaaggctgtgagtggaaagaactactagctgcttttgagttaggccagtgataaagcagccagtcaggttcctctgaacccagccctctgtcatcacaaacttgagtttccctccctacttccacttgttcatatatacttcctagtctgaatcttcagtaagcttctggtagcctatgcctgggatagcaatga

SEQ ID NO: 85999 - DNA, 600 bp, Chicken  19866894385736_1
aaaaacaagcgtcattagtcatgtagagtggctacctgactaacctggctttctttatccttcactatccatcgttttctaatggctttggcatttgagaagagtactctccgagtgccgtgtcctgtgcagagaagggtaggggggttaggttttttgtactgaggttttcacctggggtttgtatttttctgttttgtgtgccagccctggatcagaccattagaagcaagttaccttttgtcctggggttatttagctacaggagttgattgctctgttaacgggacatgctcctasagcttcacccycctgactgatcctttgcttgcagctattgtcagaaaatggctttatttggtaatctataagttttggtgccccacaggctgttttaccttccttcttttcagagacgttacaaagaacttctgccacctcacagccatctcaaattctaatttccagcccttcggtgtgtcaccaaccatacacttcgcactgcattccattttgtctttcatgcggtagtggattttattttagttgcaacacatatggaaagggagcagttggacctcaagagagctttccgttttg

SEQ ID NO: 86000 - DNA, 600 bp, Chicken  19866894385736_2
tcattagtcatgtagagtggctacctgactaacctggctttctttatccttcactatccatcgttttctaatggctttggcatttgagaagagtactctccgagtgccgtgtcctgtgcagagaagggtaggggggttaggttttttgtactgaggttttcacctggggtttgtatttttctgttttgtgtgccagccctggatcagaccattagaagcaagttaccttttgtcctggggttatttagctacaggagttgattgctctgttaacgggacatgctcctasagcttcacccycctgactgatcctttgcttgcagctattgtcagaaaatggctttatttggtaatctataagttttggtgccccacaggctgttttaccttccttcttttcagagacgttacaaagaacttctgccacctcacagccatctcaaattctaatttccagcccttcggtgtgtcaccaaccatacacttcgcactgcattccattttgtctttcatgcggtagtggattttattttagttgcaacacatatggaaagggagcagttggacctcaagagagctttccgttttgaaatataagcg

SEQ ID NO: 86001 - DNA, 599 bp, Chicken  19866894385741_1
  misc_feature (1)..(58): n is any nucleotide
nnnnnnnnnnnnnnnnnnnnnnnnnnnnnnnnnnnnnnnnnnnnnnnnnnnnnnnnnnagacctggtttgtctctcctgtccttaccgttacaagtcagaattctgtgtaagtgacgttatctttctgtttaattctgtgtcttgctccaggcaaagaaatcactttgttgatgcagaccctgaacaccctgagcactccagaggagaaactggcagcactgtgcaagaaatacgctgagctggtgagtccttgtttcttcattccaggctctggggcagtgggaggacactgctgcagygagcactgggacagttggccacgtgctcagagctctgctctgtttaagcartgtatgcatggaggttctgaaggaatgtgcactcctcacaaattccagtaggatgctaattcaggaaggagaaaggctgtgtgtagggagacctygggttctgtattgatcttactgtgcttttgtattataaagctcwtgtccttctctcagagtagtcaggacacctatttgatccttgtgtgcccttatatgggcrcagcattgccctggtctgttctgctgcatctgtgccctctgctctccta

SEQ ID NO: 86002 - DNA, 599 bp, Chicken  19866894385741_2
  misc_feature (1)..(7): n is any nucleotide
nnnnnnnagacctggtttgtctctcctgtccttaccgttacaagtcagaattctgtgtaagtgacgttatctttctgtttaattctgtgtcttgctccaggcaaagaaatcactttgttgatgcagaccctgaacaccctgagcactccagaggagaaactggcagcactgtgcaagaaatacgctgagctggtgagtccttgtttcttcattccaggctctggggcagtgggaggacactgctgcagygagcactgggacagttggccacgtgctcagagctctgctctgtttaagcartgtatgcatggaggttctgaaggaatgtgcactcctcacaaattccagtaggatgctaattcaggaaggagaaaggctgtgtgtagggagacctygggttctgtattgatcttactgtgcttttgtattataaagctcwtgtccttctctcagagtagtcaggacacctatttgatccttgtgtgcccttatatgggcrcagcattgccctggtctgttctgctgcatctgtgccctctgctctcctactctagctggaagagcaccgtaactcccagaaacagatgaagattttgcag

SEQ ID NO: 86003 - DNA, 600 bp, Chicken  19866894385741_3
tccaggcaaagaaatcactttgttgatgcagaccctgaacaccctgagcactccagaggagaaactggcagcactgtgcaagaaatacgctgagctggtgagtccttgtttcttcattccaggctctggggcagtgggaggacactgctgcagygagcactgggacagttggccacgtgctcagagctctgctctgtttaagcartgtatgcatggaggttctgaaggaatgtgcactcctcacaaattccagtaggatgctaattcaggaaggagaaaggctgtgtgtagggagacctygggttctgtattgatcttactgtgcttttgtattataaagctcwtgtccttctctcagagtagtcaggacacctatttgatccttgtgtgcccttatatgggcrcagcattgccctggtctgttctgctgcatctgtgccctctgctctcctactctagctggaagagcaccgtaactcccagaaacagatgaagattttgcagaagaagcagacacagctggtgcaagagaaggaccacctgcagagcgagcatagcaaggccatcctggcccgcagcaagctggagagcctgtgccgt

SEQ ID NO: 86004 - DNA, 600 bp, Chicken  19866894385741_4
tgagcactccagaggagaaactggcagcactgtgcaagaaatacgctgagctggtgagtccttgtttcttcattccaggctctggggcagtgggaggacactgctgcagygagcactgggacagttggccacgtgctcagagctctgctctgtttaagcartgtatgcatggaggttctgaaggaatgtgcactcctcacaaattccagtaggatgctaattcaggaaggagaaaggctgtgtgtagggagacctygggttctgtattgatcttactgtgcttttgtattataaagctcwtgtccttctctcagagtagtcaggacacctatttgatccttgtgtgcccttatatgggcrcagcattgccctggtctgttctgctgcatctgtgccctctgctctcctactctagctggaagagcaccgtaactcccagaaacagatgaagattttgcagaagaagcagacacagctggtgcaagagaaggaccacctgcagagcgagcatagcaaggccatcctggcccgcagcaagctggagagcctgtgccgtgagctgcagagacacaaccgcaccctcaaggcaagtgtgtcctg

SEQ ID NO: 86005 - DNA, 600 bp, Chicken  19866894385741_5
cttgtttcttcattccaggctctggggcagtgggaggacactgctgcagygagcactgggacagttggccacgtgctcagagctctgctctgtttaagcartgtatgcatggaggttctgaaggaatgtgcactcctcacaaattccagtaggatgctaattcaggaaggagaaaggctgtgtgtagggagacctygggttctgtattgatcttactgtgcttttgtattataaagctcwtgtccttctctcagagtagtcaggacacctatttgatccttgtgtgcccttatatgggcrcagcattgccctggtctgttctgctgcatctgtgccctctgctctcctactctagctggaagagcaccgtaactcccagaaacagatgaagattttgcagaagaagcagacacagctggtgcaagagaaggaccacctgcagagcgagcatagcaaggccatcctggcccgcagcaagctggagagcctgtgccgtgagctgcagagacacaaccgcaccctcaaggcaagtgtgtcctgggactgctgcaggagctgcttcatcccaaacacttgggtcacctgctgcagggctgcgag

SEQ ID NO: 86006 - DNA, 600 bp, Chicken  19866894385742_1
gaatctatcactcagccctgaagcaaatctctgtgcttctcttacaaaaacagctataactctcagaaactcgacagtctttccaggtaagcattaggttacaaagcatgttttcctgtggaagccacaacggttttattagtactataaatgctgttttatctttccaactgctatttttatgtttccatttttattctacggtgctcagtttaggacaagcatttgcttggaggaggaatgtttgcagtcgctgctcccccgcctgctccgcgctggctgcagggctggcggcctggygctgtgatgggagcagtgcacsrgcagcaaccccagctctggagcagctgcaggactgtgcggaagccccgcgctcccagagtgggccagtgaagcagtgtgcactgagagctcagcaatgagaaccttcatgagagcagccctccctgcaggtggggctgggaaagcagacctcaaaaaccagtgggtgggacagagaactaaactgggaccactaacaatgtgagaccagcattttgctcgttggctccatggttcctcttctttggttcatctgcccttgccatctacttccaaagc

SEQ ID NO: 86007 - DNA, 600 bp, Chicken  19866894385742_2
gcaaatctctgtgcttctcttacaaaaacagctataactctcagaaactcgacagtctttccaggtaagcattaggttacaaagcatgttttcctgtggaagccacaacggttttattagtactataaatgctgttttatctttccaactgctatttttatgtttccatttttattctacggtgctcagtttaggacaagcatttgcttggaggaggaatgtttgcagtcgctgctcccccgcctgctccgcgctggctgcagggctggcggcctggygctgtgatgggagcagtgcacsrgcagcaaccccagctctggagcagctgcaggactgtgcggaagccccgcgctcccagagtgggccagtgaagcagtgtgcactgagagctcagcaatgagaaccttcatgagagcagccctccctgcaggtggggctgggaaagcagacctcaaaaaccagtgggtgggacagagaactaaactgggaccactaacaatgtgagaccagcattttgctcgttggctccatggttcctcttctttggttcatctgcccttgccatctacttccaaagcccgcggtgggataaggcaggct

SEQ ID NO: 86008 - DNA, 600 bp, Chicken  19866894385742_3
caaatctctgtgcttctcttacaaaaacagctataactctcagaaactcgacagtctttccaggtaagcattaggttacaaagcatgttttcctgtggaagccacaacggttttattagtactataaatgctgttttatctttccaactgctatttttatgtttccatttttattctacggtgctcagtttaggacaagcatttgcttggaggaggaatgtttgcagtcgctgctcccccgcctgctccgcgctggctgcagggctggcggcctggygctgtgatgggagcagtgcacsrgcagcaaccccagctctggagcagctgcaggactgtgcggaagccccgcgctcccagagtgggccagtgaagcagtgtgcactgagagctcagcaatgagaaccttcatgagagcagccctccctgcaggtggggctgggaaagcagacctcaaaaaccagtgggtgggacagagaactaaactgggaccactaacaatgtgagaccagcattttgctcgttggctccatggttcctcttctttggttcatctgcccttgccatctacttccaaagcccgcggtgggataaggcaggctt

SEQ ID NO: 86009 - DNA, 600 bp, Chicken  19866894385744_1
accccgtcttgatgccgataacccttttacttacatgttgtccagacaagtttaatacatattccagcatctaacgtgctccgtttccaacacagttttctacatatttctcttgctaaaaagtaatttatttatatactgcatttttatctgcttttagactggctctgcctccttggtctggaaccacaaaaatactgcagccaaaagaaatctgcctgattgtagatcactgatttggaacatccactctaaagctctgcctcaaatcggcactgagatttatctccctgttgaggyggtcttttctagctagctttaaaaagctacacgtgataaaagcaagccggctsgctccctgaaacttttaaatgtcattatctacatgtgcatcttatgatcgaatctaatgtgtgtgtgagctcaattcctactgcagctctgagttacactaacttaaacctagcaaggagtgctattcacaaccattatttcaaaagaaaccctcttttgagttaccctcgtgatcagggctcctcttcagcgagcgaatttcatggtcctgcagaattaggccttacattactgcaattacgtgca

SEQ ID NO: 86010 - DNA, 600 bp, Chicken  19866894385744_2
aatacatattccagcatctaacgtgctccgtttccaacacagttttctacatatttctcttgctaaaaagtaatttatttatatactgcatttttatctgcttttagactggctctgcctccttggtctggaaccacaaaaatactgcagccaaaagaaatctgcctgattgtagatcactgatttggaacatccactctaaagctctgcctcaaatcggcactgagatttatctccctgttgaggyggtcttttctagctagctttaaaaagctacacgtgataaaagcaagccggctsgctccctgaaacttttaaatgtcattatctacatgtgcatcttatgatcgaatctaatgtgtgtgtgagctcaattcctactgcagctctgagttacactaacttaaacctagcaaggagtgctattcacaaccattatttcaaaagaaaccctcttttgagttaccctcgtgatcagggctcctcttcagcgagcgaatttcatggtcctgcagaattaggccttacattactgcaattacgtgcagaaatgacatgaccttgttttgtatttccttgacataaaatggcgcatttccc

SEQ ID NO: 86011 - DNA, 600 bp, Chicken  19866894385746_1
actccacagcaagttcactaaaacaaatttgtacgtatgttctggaagtgcaatattttgtaatcaccttatttatttattaaataccattgcatgagttctagaagtcttaccttctttggagtccctaatacttggcaaattttgaagatctcatctacttcacttgtgcctgggaaaaggggtcttagtgtgtataattcagccattatgctgccaactgcccaaatatcaataggtgagctataaatagatgatcgcagcaaaacttcaggagcacggtacctatgaggatgggawaaagtaacacaawttaaaacagtaatcasagaaaggtagttcattaagataacgtattaacttcatcgtatacttaccacctggtagacacataatctgtatatggtggctgagatctcagctctctagccaaaccaaaatcagctatttttacaagttctggaccaatgcaaagaaggttttcaggcttcatgtctctatgaaaaaatcctacaggaaattaaagagaaattacagtaaattgtgtaatcatttcataaatagcaaggtccaacagtcatccaaaattttggccttttt

SEQ ID NO: 86012 - DNA, 600 bp, Chicken  19866894385746_2
ttcactaaaacaaatttgtacgtatgttctggaagtgcaatattttgtaatcaccttatttatttattaaataccattgcatgagttctagaagtcttaccttctttggagtccctaatacttggcaaattttgaagatctcatctacttcacttgtgcctgggaaaaggggtcttagtgtgtataattcagccattatgctgccaactgcccaaatatcaataggtgagctataaatagatgatcgcagcaaaacttcaggagcacggtacctatgaggatgggawaaagtaacacaawttaaaacagtaatcasagaaaggtagttcattaagataacgtattaacttcatcgtatacttaccacctggtagacacataatctgtatatggtggctgagatctcagctctctagccaaaccaaaatcagctatttttacaagttctggaccaatgcaaagaaggttttcaggcttcatgtctctatgaaaaaatcctacaggaaattaaagagaaattacagtaaattgtgtaatcatttcataaatagcaaggtccaacagtcatccaaaattttggcctttttttttcttcttgat

SEQ ID NO: 86013 - DNA, 600 bp, Chicken  19866894385746_3
tgtacgtatgttctggaagtgcaatattttgtaatcaccttatttatttattaaataccattgcatgagttctagaagtcttaccttctttggagtccctaatacttggcaaattttgaagatctcatctacttcacttgtgcctgggaaaaggggtcttagtgtgtataattcagccattatgctgccaactgcccaaatatcaataggtgagctataaatagatgatcgcagcaaaacttcaggagcacggtacctatgaggatgggawaaagtaacacaawttaaaacagtaatcasagaaaggtagttcattaagataacgtattaacttcatcgtatacttaccacctggtagacacataatctgtatatggtggctgagatctcagctctctagccaaaccaaaatcagctatttttacaagttctggaccaatgcaaagaaggttttcaggcttcatgtctctatgaaaaaatcctacaggaaattaaagagaaattacagtaaattgtgtaatcatttcataaatagcaaggtccaacagtcatccaaaattttggcctttttttttcttcttgattcaacataaatgaatg

SEQ ID NO: 86014 - DNA, 599 bp, Chicken  19866894385747_1
  misc_feature (1)..(157): n is any nucleotide
nnnnnnnnnnnnnnnnnnnnnnnnnnnnnnnnnnnnnnnnnnnnnnnnnnnnnnnnnnnnnnnnnnnnnnnnnnnnnnnnnnnnnnnnnnnnnnnnnnnnnnnnnnnnnnnnnnnnnnnnnnnnnnnnnnnnnnnnnnnnnnnnnnnnnnnnnnnnnattagggaatcatgcttttagcagtacagagtgagcttggtttgttgtcagatggttgtgaggatataggaggaaaaacagctcatgtttttgctcactttggtgtacccaattgtagagattaaactgagaagttgtttatyctttgtatgctgtttatatcggtgcatcacagctctgctagrattgttgcaaatattctgaagtcgttctttttcctagataagctttttatttaaaaaatacaaatttttgctgtttctgttgttcctcctcagttgaatatttccgtttgaaacaaatggtagatgggcccacaaacttaaagaactgtgtctaaatcttcttaacgctttgtgtttgttaaggaagtgcgagtataatataagttgttttgttcaatagcttaatagctttgctgtgatctgaaargtgtgcctaa

SEQ ID NO: 86015 - DNA, 599 bp, Chicken  19866894385747_2
  misc_feature (1)..(115): n is any nucleotide
nnnnnnnnnnnnnnnnnnnnnnnnnnnnnnnnnnnnnnnnnnnnnnnnnnnnnnnnnnnnnnnnnnnnnnnnnnnnnnnnnnnnnnnnnnnnnnnnnnnnnnnnnnnnnnnnnnnattagggaatcatgcttttagcagtacagagtgagcttggtttgttgtcagatggttgtgaggatataggaggaaaaacagctcatgtttttgctcactttggtgtacccaattgtagagattaaactgagaagttgtttatyctttgtatgctgtttatatcggtgcatcacagctctgctagrattgttgcaaatattctgaagtcgttctttttcctagataagctttttatttaaaaaatacaaatttttgctgtttctgttgttcctcctcagttgaatatttccgtttgaaacaaatggtagatgggcccacaaacttaaagaactgtgtctaaatcttcttaacgctttgtgtttgttaaggaagtgcgagtataatataagttgttttgttcaatagcttaatagctttgctgtgatctgaaargtgtgcctaaagttgctggtaagctggatacatcctgtgtctgatgatttcc

SEQ ID NO: 86016 - DNA, 600 bp, Chicken  19866894385747_3
agttgtttatyctttgtatgctgtttatatcggtgcatcacagctctgctagrattgttgcaaatattctgaagtcgttctttttcctagataagctttttatttaaaaaatacaaatttttgctgtttctgttgttcctcctcagttgaatatttccgtttgaaacaaatggtagatgggcccacaaacttaaagaactgtgtctaaatcttcttaacgctttgtgtttgttaaggaagtgcgagtataatataagttgttttgttcaatagcttaatagctttgctgtgatctgaaargtgtgcctaaagttgctggtaagctggatacatcctgtgtctgatgatttccaggagagtgaggtgtctgctatgtcttcagagtaatttagcaaaggctcttagagttggttggaaattataatgtgctttcaatattgaaacaagcctgttgacattggaagctgatgggttaatattttgtattagtgcttagtcatgtagtctgtaagacttgagaatcgatcattgtgctgtgctgtaactcatgatttgcattaaaaaaaaaaaagggagaaaaaaagcagattttatgggatt

SEQ ID NO: 86017 - DNA, 599 bp, Chicken  19866894385750_1
  misc_feature (1)..(43): n is any nucleotide
nnnnnnnnnnnnnnnnnnnnnnnnnnnnnnnnnnnnnnnnnnntatgataacattatatcttgctccttcaatactgctagaaaggtattcactagggttaactttcacactgagttgtccaacctattgagttcttccttcatagctacaaagagagccacgcttatccaagtgcaggctcagaggaaattacttcaggttcctgttctgggtggtccctgcatggtcaccccaattttacaggtaggacttagggaagtgtatctccctggacttaaagtacatacatcaagtgcaayagatagtaattttacaatgacagagaaggctttccattctaacattaagctggtattcagtgttgagaccaaagattcattattcctttttttaaatttttataaaccttcatacactatctaaagaaggaaagaaagaagtatgttaactatatttacaggcaaatcaaacattataattaggaatatacaaagtcaaaagatgaaaatcaatctcaaaggatttgtcataaaatcattatcttgtattgytcaagtatgaaatttactgcacacattctcagctgaaaagctgacat

SEQ ID NO: 86018 - DNA, 600 bp, Chicken  19866894385750_2
tagggaagtgtatctccctggacttaaagtacatacatcaagtgcaayagatagtaattttacaatgacagagaaggctttccattctaacattaagctggtattcagtgttgagaccaaagattcattattcctttttttaaatttttataaaccttcatacactatctaaagaaggaaagaaagaagtatgttaactatatttacaggcaaatcaaacattataattaggaatatacaaagtcaaaagatgaaaatcaatctcaaaggatttgtcataaaatcattatcttgtattgytcaagtatgaaatttactgcacacattctcagctgaaaagctgacattctatgaattgcaagtgcaaactactttttgagtagtttcatccagggaaagacaagaacaaagtatttttgcttggcctttgtagcatctgcatgtggggccagtaattgcatgtttctgtcagttcaaaatacaaatactcgaatagtaattaccaaaatgcaaatgtatcagtttatctaatcatgatgtacatttattttcctcaggaggctgtttcttcagtcagaaatcctttcctccacctttccc

SEQ ID NO: 86019 - DNA, 600 bp, Chicken  19866894385750_3
ggaaagacaagaacaaagtatttttgcttggcctttgtagcatctgcatgtggggccagtaattgcatgtttctgtcagttcaaaatacaaatactcgaatagtaattaccaaaatgcaaatgtatcagtttatctaatcatgatgtacatttattttcctcaggaggctgtttcttcagtcagaaatcctttcctccacctttccctgcaaaatccactgtccatcagcaatgcaggacgtacacagaaagttcatatcccattgaaatgaccttttctgaccaagatatctttaggartatgggaaaataattaaaacagggcatttacctctctcgtggtttatgtgattgaacatgaacatcttcctgtgtgttgaatctacccttagcacttaccttcgcagaagaaatgagaaggcaatattttctgcttgcttttatgctactatttcaaccctcaaatgttgcatcaagtaatttcatgccttagaaaagtcagcaactagaatagtcaaaccatgttttctatgaatgttatgcaagctgctacttacaatccgaggtttgaagggtggctttgattttcctttgttctag

SEQ ID NO: 86020 - DNA, 600 bp, Chicken  19866894385755_1
ggttggcttaaaattaaggaggaaaaaaatagactgtatgatgcttgtacctcagctgtggcagtgctgtaagttcccatgagagaatagaaatgcaagtattgctctttttcagcaggtacaatcttggctgtgcctacagacttccagagggtcctaacgttacaacttggcgtgccaggaaaagtcagaggtatcaaaccctccttagaatcactaaataaagtctcatgctgtggctggagccaatgccgaagaaacctgcagtcagttaaacacaacacaaatgtttgtgaaacrtttttcatttcttgtggcccctgggaaatccaaaatacacgagaaaaagaaatgcaatggagcacagcagggaacgcaaaggaggtttttgcccaccagtattggttctgcaggctcccttgccagcatctgtgatgcaawgttaaacaaccttgagaggtcacttttaaatgctgataatttgctgcttaaaaaatattcccatgaaacaaattccagatcatttccccactcgccttcgtttgtaagcaaggtttgcagcgtgcaggaggtgtctggggcactgacatgtagctgccc

SEQ ID NO: 86021 - DNA, 600 bp, Chicken  19866894385755_2
gacttccagagggtcctaacgttacaacttggcgtgccaggaaaagtcagaggtatcaaaccctccttagaatcactaaataaagtctcatgctgtggctggagccaatgccgaagaaacctgcagtcagttaaacacaacacaaatgtttgtgaaacrtttttcatttcttgtggcccctgggaaatccaaaatacacgagaaaaagaaatgcaatggagcacagcagggaacgcaaaggaggtttttgcccaccagtattggttctgcaggctcccttgccagcatctgtgatgcaawgttaaacaaccttgagaggtcacttttaaatgctgataatttgctgcttaaaaaatattcccatgaaacaaattccagatcatttccccactcgccttcgtttgtaagcaaggtttgcagcgtgcaggaggtgtctggggcactgacatgtagctgcccaccccacatccaggtgatgtgtgtgtgctgcacacagtggtcccttgaccagtgggtccggtgccaccagtgagagtgatcccacactgggggcccttcattaactgcttgtggtcccagtaatgatctggctgcagagcc

SEQ ID NO: 86022 - DNA, 600 bp, Chicken  19866894385763_1
acatagcatacaccgttcttcctgactgatttttagtctaatatacttctgataggcattctatacaagttacctgtcatcgaggatagttataagttctccagctttaaaggttaattcgttgtcttcagcagcctcgaaatcatagattgcacgaacctttcggccctcgtgtttgtgatttgttaaaaggcttgaggtgctcggatacaaactggaaagtgttgtttgctgttgtctttgctcttttagtgacagttcaattgctacaaaagaagagttatttagatgaaaattccytatataaatgtgtagaatgatttgaaaacttaactcaatgaaaatatttagtataatyccattcctgttgcaccataaccaatttctgcctctcatgtaaaaatatgataacaaattaaaagatgttttacaactgtagagcaaaattctgctcctacattgttttcatcttattagatatttaccttcaaattctttgggtcagcaagtaaatgcactcacctttagactaaatcttcttcttctttcttgttagctactgcaccaggatctttggcaacgagggctggacttgctttt

SEQ ID NO: 86023 - DNA, 600 bp, Chicken  19866894385763_2
ttctatacaagttacctgtcatcgaggatagttataagttctccagctttaaaggttaattcgttgtcttcagcagcctcgaaatcatagattgcacgaacctttcggccctcgtgtttgtgatttgttaaaaggcttgaggtgctcggatacaaactggaaagtgttgtttgctgttgtctttgctcttttagtgacagttcaattgctacaaaagaagagttatttagatgaaaattccytatataaatgtgtagaatgatttgaaaacttaactcaatgaaaatatttagtataatyccattcctgttgcaccataaccaatttctgcctctcatgtaaaaatatgataacaaattaaaagatgttttacaactgtagagcaaaattctgctcctacattgttttcatcttattagatatttaccttcaaattctttgggtcagcaagtaaatgcactcacctttagactaaatcttcttcttctttcttgttagctactgcaccaggatctttggcaacgagggctggacttgcttttgcctgctcagcagcctagccaaaaataaaagatgcagaagtaaaatcattgaaaaact

SEQ ID NO: 86024 - DNA, 600 bp, Chicken  19866894385769_1
tatattaagtatgttcggtttttgaagtgggtgtttcaaatgtcttctcttaattatcactctgtaactgaagaaaaagtacaaactcacagcccctaaatgtgaagactattttgatttggttttgttttgatattgtttttcacatataaatcataaagaaacatctgtgactgaaatggggataagcctcctgctggtatcttatttcttaattgtaggctctcattttacaagccatgtgttgacttggtcctttccttgtcatgccctcctccattgtttacttgcttatatacyggcaaagctgtttatattaggctgagcaagcttgaaaaatgcatgtcaaatttgttttaattcagaaaccattttctttagctacacatgtacgcttgctccattttttttttatttttcctttttcatgctggagtcatagaaatgtctcccctgggtagcagaaggaggcaggtgttattgagaataatttttctgaagaagtgggaccattattaaagatactttcagataaatgtcactttttgtactttctgatatttaactcacatttcaacatttttctacttgagtatctgt

SEQ ID NO: 86025 - DNA, 600 bp, Chicken  19866894385776_1
acagagcctctgtcggcagcagctgaagcactgcactcatggccattttctgcccctttgtggggatgaagagcttcccttcctcacttcatctggactgatgatgctgatgaaaccctgcttgggaggaagtagtgaaaaagctgctgctactgctgcacttcagtcctctgaagtgttcttcttcccgcactgagggaccactacagatcaaacttcctccacagcaaagtggcatcccaggtttcctgctcgcatcccagcctcacgtaccacagtgaggaagtaaggccccagcayaagtgatgtggcaactgaacagcattactgagacaaaacaggtctgacaaggcccatagccattagtcttgatcctccttttcctactgacagtttccctgaggaagtcctcaccctgcatcagaatgcaatgtgagtttgggagcttaccttcaggtgggattgggttggcagctttacacggtggtgcctgaaacaagaagtggaagagcagatagcagctgttagtgcagactaacctctcaagtgaacactgtgggctgcgcagatctcttctaagcacagttctagacatgagcc

SEQ ID NO: 86026 - DNA, 600 bp, Chicken  19866894385776_2
tgatgtggcaactgaacagcattactgagacaaaacaggtctgacaaggcccatagccattagtcttgatcctccttttcctactgacagtttccctgaggaagtcctcaccctgcatcagaatgcaatgtgagtttgggagcttaccttcaggtgggattgggttggcagctttacacggtggtgcctgaaacaagaagtggaagagcagatagcagctgttagtgcagactaacctctcaagtgaacactgtgggctgcgcagatctcttctaagcacagttctagacatgagccacrtaaatttgtcygtggcagccagggctggccagctctgaaggaatacaaaagttcatgttcagctgagcctggccatcacacagccttctcctctccaggccagcagtgctttgctttaggtagacatttgccctgctcatactgcagggtccctggctgtgagtctctaagaaattaggctctctgaggctcgctctcaaagggtgaccttttctgtgaagcttgtgaaaggtcaaatacttaaacgcacactgagcagccaacagccaagcaacaggtcagaaatgcagcccttcacac

SEQ ID NO: 86027 - DNA, 600 bp, Chicken  19866894385776_3
ctgaacagcattactgagacaaaacaggtctgacaaggcccatagccattagtcttgatcctccttttcctactgacagtttccctgaggaagtcctcaccctgcatcagaatgcaatgtgagtttgggagcttaccttcaggtgggattgggttggcagctttacacggtggtgcctgaaacaagaagtggaagagcagatagcagctgttagtgcagactaacctctcaagtgaacactgtgggctgcgcagatctcttctaagcacagttctagacatgagccacrtaaatttgtcygtggcagccagggctggccagctctgaaggaatacaaaagttcatgttcagctgagcctggccatcacacagccttctcctctccaggccagcagtgctttgctttaggtagacatttgccctgctcatactgcagggtccctggctgtgagtctctaagaaattaggctctctgaggctcgctctcaaagggtgaccttttctgtgaagcttgtgaaaggtcaaatacttaaacgcacactgagcagccaacagccaagcaacaggtcagaaatgcagcccttcacacaaagcctggtt

SEQ ID NO: 86028 - DNA, 600 bp, Chicken  19866894385779_1
tttctgaactcagaattcataattcacattatctctgaaaataacatgtctaaattatttacctccttctggtcaagctgcagagaagattttatcaaatcacgaagagcagtaagttgtttcttttcttcatcttgtgtctgctttatctatagaaaaagactattatactctagatgctatttaaagttcctatgcattctaatacatcattagaagtgttccgagcaaccagctcaactattctgtaatacagtttatttcatgaactgttttctcataatgtgttcaccttcttcrcatgtattacttcaaaaagctggaaagaatacacaactctgtataccctgttctgttagactttagtggttcattatgtttaatgtaactaagtcagtcactgaaatwttaatttaataactccagtaagcttgacatattaaggaatgaaaatactgcttaatctagccaccaactagaacagcaaatagaattactgtaattctgattatagagtacaaaagcacttgggtgacaaatgaagtttgattctacattattacacgcctcccattaacaccacaagcaagttaattaact

SEQ ID NO: 86029 - DNA, 600 bp, Chicken  19866894385779_2
gcagtaagttgtttcttttcttcatcttgtgtctgctttatctatagaaaaagactattatactctagatgctatttaaagttcctatgcattctaatacatcattagaagtgttccgagcaaccagctcaactattctgtaatacagtttatttcatgaactgttttctcataatgtgttcaccttcttcrcatgtattacttcaaaaagctggaaagaatacacaactctgtataccctgttctgttagactttagtggttcattatgtttaatgtaactaagtcagtcactgaaatwttaatttaataactccagtaagcttgacatattaaggaatgaaaatactgcttaatctagccaccaactagaacagcaaatagaattactgtaattctgattatagagtacaaaagcacttgggtgacaaatgaagtttgattctacattattacacgcctcccattaacaccacaagcaagttaattaactcaaactgcgatgcgatcaagcagtttgttacaaaaaaaaagtgcaagcagcaggacaactagcatccaatacctagatgaacaaaaaaaaaatatcaatttttagaca

SEQ ID NO: 86030 - DNA, 600 bp, Chicken  19866894385789_1
aagaaaaacctcctcgtccccttctgagcagcaaaagtgtggaccagcaaatacctttcacgcttagctctagtgcagcagtacccaattcgatacagcagaggctctcccactgtttgaatgagctcccttggacaagcgcagcccgtgcaagctccctttctgcacacctcagtcatgacagagggtaaaagagttgttgcacagcacatttcctgcttggtttccttgctgaggacatgccatccaggatagaaatggtgtcagaccatcagcacagacacactgcattcctacagmccctctaaccgtactgctatcatgtcaccgctcatagtaatggactgcatgcagrgcattggcctcatcttcaggtctttgggttgaaacaggtgacttgggtcctgtctgtgccaggaaatcctgctgagagatggctcaagtaaaatccctgagcctgtccyagaagaacatactgcctgcctacaagcgagtacctcgtatatcatagagggctggggacagcagcatcgtaggacaagatatcttccacatgggctagtcactcagaggctccctttatggcamgtaacatatata

SEQ ID NO: 86031 - DNA, 600 bp, Chicken  19866894385789_2
tttcacgcttagctctagtgcagcagtacccaattcgatacagcagaggctctcccactgtttgaatgagctcccttggacaagcgcagcccgtgcaagctccctttctgcacacctcagtcatgacagagggtaaaagagttgttgcacagcacatttcctgcttggtttccttgctgaggacatgccatccaggatagaaatggtgtcagaccatcagcacagacacactgcattcctacagmccctctaaccgtactgctatcatgtcaccgctcatagtaatggactgcatgcagrgcattggcctcatcttcaggtctttgggttgaaacaggtgacttgggtcctgtctgtgccaggaaatcctgctgagagatggctcaagtaaaatccctgagcctgtccyagaagaacatactgcctgcctacaagcgagtacctcgtatatcatagagggctggggacagcagcatcgtaggacaagatatcttccacatgggctagtcactcagaggctccctttatggcamgtaacatatatatatgaataaatatacacacacagtgtgatccagctcctcctaaagtatgcatcta

SEQ ID NO: 86032 - DNA, 600 bp, Chicken  19866894385789_3
gcacacctcagtcatgacagagggtaaaagagttgttgcacagcacatttcctgcttggtttccttgctgaggacatgccatccaggatagaaatggtgtcagaccatcagcacagacacactgcattcctacagmccctctaaccgtactgctatcatgtcaccgctcatagtaatggactgcatgcagrgcattggcctcatcttcaggtctttgggttgaaacaggtgacttgggtcctgtctgtgccaggaaatcctgctgagagatggctcaagtaaaatccctgagcctgtccyagaagaacatactgcctgcctacaagcgagtacctcgtatatcatagagggctggggacagcagcatcgtaggacaagatatcttccacatgggctagtcactcagaggctccctttatggcamgtaacatatatatatgaataaatatacacacacagtgtgatccagctcctcctaaagtatgcatctaaaataggactgagaagtcatgtccttaatgcaccttgttctcccaccgatcagaaagggagcctagcacatacagatatctaaagttactctccatgcagagaggttgc

SEQ ID NO: 86033 - DNA, 600 bp, Chicken  19866894385789_4
cattcctacagmccctctaaccgtactgctatcatgtcaccgctcatagtaatggactgcatgcagrgcattggcctcatcttcaggtctttgggttgaaacaggtgacttgggtcctgtctgtgccaggaaatcctgctgagagatggctcaagtaaaatccctgagcctgtccyagaagaacatactgcctgcctacaagcgagtacctcgtatatcatagagggctggggacagcagcatcgtaggacaagatatcttccacatgggctagtcactcagaggctccctttatggcamgtaacatatatatatgaataaatatacacacacagtgtgatccagctcctcctaaagtatgcatctaaaataggactgagaagtcatgtccttaatgcaccttgttctcccaccgatcagaaagggagcctagcacatacagatatctaaagttactctccatgcagagaggttgctcatggccatttaatttctctgtgtatcgtgggttcctagccaagcctgaagtacaacatacacatttagcagtggccaatgcacttcagaggctcaaggctttctcatcaagacttgtgagtt

SEQ ID NO: 86034 - DNA, 600 bp, Chicken  19866894385798_1
cggcccctgtcagccatcagaggcctggcgtgaaatcaaaggatgtttgtccagcgttctgagagcctcgactggaagaagatatagaaatgcaaagcgcaggattcttttttccttggcaaatagcctagaaaagtaacaaaaagaggcagaaatgccaaaaagcaaaccacctactgttgtctcctggagataaagcagaacattgttccaagaggcagaatgctgctgtcatttctcgtggaagtggagatagcgtcaccgggtcctggggaggggcaggaggtggggggagaaggmatgaacagctcgaatgaacctcttgcagggaagttaaggtagtgcctttagtgcagaaytatgygatatcatgtatttagagaaatcacggctgcggggagttaacacagacacagacattcacgacattcactggttacaatagcttgttgtagattattactcccactcctgaggagagttcttctccacatgagtcataaggaccgtgccygtctatgttgttatgtcccatggcaccctattgtctattatgttttcttcccccacacaaaaaatgccgactttcaagtgtatgat

SEQ ID NO: 86035 - DNA, 600 bp, Chicken  19866894385798_2
tgagagcctcgactggaagaagatatagaaatgcaaagcgcaggattcttttttccttggcaaatagcctagaaaagtaacaaaaagaggcagaaatgccaaaaagcaaaccacctactgttgtctcctggagataaagcagaacattgttccaagaggcagaatgctgctgtcatttctcgtggaagtggagatagcgtcaccgggtcctggggaggggcaggaggtggggggagaaggmatgaacagctcgaatgaacctcttgcagggaagttaaggtagtgcctttagtgcagaaytatgygatatcatgtatttagagaaatcacggctgcggggagttaacacagacacagacattcacgacattcactggttacaatagcttgttgtagattattactcccactcctgaggagagttcttctccacatgagtcataaggaccgtgccygtctatgttgttatgtcccatggcaccctattgtctattatgttttcttcccccacacaaaaaatgccgactttcaagtgtatgatttctgacattcagcgcatacaacgaggacagaaccccaggcacaggggctcggtcactg

SEQ ID NO: 86036 - DNA, 600 bp, Chicken  19866894385798_3
gcctcgactggaagaagatatagaaatgcaaagcgcaggattcttttttccttggcaaatagcctagaaaagtaacaaaaagaggcagaaatgccaaaaagcaaaccacctactgttgtctcctggagataaagcagaacattgttccaagaggcagaatgctgctgtcatttctcgtggaagtggagatagcgtcaccgggtcctggggaggggcaggaggtggggggagaaggmatgaacagctcgaatgaacctcttgcagggaagttaaggtagtgcctttagtgcagaaytatgygatatcatgtatttagagaaatcacggctgcggggagttaacacagacacagacattcacgacattcactggttacaatagcttgttgtagattattactcccactcctgaggagagttcttctccacatgagtcataaggaccgtgccygtctatgttgttatgtcccatggcaccctattgtctattatgttttcttcccccacacaaaaaatgccgactttcaagtgtatgatttctgacattcagcgcatacaacgaggacagaaccccaggcacaggggctcggtcactgcactg

SEQ ID NO: 86037 - DNA, 600 bp, Chicken  19866894385798_4
gaggcagaatgctgctgtcatttctcgtggaagtggagatagcgtcaccgggtcctggggaggggcaggaggtggggggagaaggmatgaacagctcgaatgaacctcttgcagggaagttaaggtagtgcctttagtgcagaaytatgygatatcatgtatttagagaaatcacggctgcggggagttaacacagacacagacattcacgacattcactggttacaatagcttgttgtagattattactcccactcctgaggagagttcttctccacatgagtcataaggaccgtgccygtctatgttgttatgtcccatggcaccctattgtctattatgttttcttcccccacacaaaaaatgccgactttcaagtgtatgatttctgacattcagcgcatacaacgaggacagaaccccaggcacaggggctcggtcactgcactgcttccactcggccagtctttgctgttaagagtctctggagtacaatggtagcttttaagctagatccctctgtttgatttagtatcagtctgtgtttgctaaagccaagccccgtcactaatgaaattaacaccgggctcagaaagactt

SEQ ID NO: 86038 - DNA, 600 bp, Chicken  19866894385802_1
gcagaacagcagtggttctccagtcgctttggcctctgaaatgtaggattcctctttgtacgtccatcccgttccgctgacaatcggtggagttttactgctgggatgatagcggtaacataaaagcatttcagagggagatcggatgggtcttttcttgcttcccttccagaagccgtggctgtgtgcacaggattccctaaggttggctttttaaccgagttgtgtttgttgttcctgcagcagcagatgatgtaacgacgtacagaggatggtaaacctgcacgttttagactataygtttaagtcatctgtgtcatcatctgacatcagcattgcataatctgttgactgtcccctttttatgtaatgtatgtctgtagtttgttttaaaatgtacaaatatttttttccactgcgtgcttctgctcagctctctcatatttgtctctccgttgccctcttcagttagaaacttgtaagacaccattttggtagccgggtccatccgagtgctacatcttcctcttttaggagcggtctccatggcagctctggatgtgccctttccaggtaagcgggctgctcgcagccccgacc

SEQ ID NO: 86039 - DNA, 600 bp, Chicken  19866894385807_1
cctggtgctacctctttatcttaggaaatccatctctgcaagtgtatttgcagctttatctggggaaactagccttcagagttcacaagaactgtaagaaatcatagtgtgaactgagttctttctatctgagctcagtagccacttaccctaatgcacttcagcagggagtcttgcccactagatatttaatgaagaataaagaccagttctacctctgtggtgttgaaagtgggagttattcttgaaacagaaatgctgacctttgatcagccctaaaagtagtggtgaaagctattstgtttttatgcagttttcttttctttctgttacgastaggggtggaagaaaaggcacaaagattgaccctgcacccatataaatagtrtatctgtgaaaaccatccttcctgatgaaaggaaaataatgtcctaagcaaatagatacgatatactgtgaggaaaaaaataagacaagatgkatctctagctatgtctttgttcagaagcatgagggaaggctctatgggaagtctcttaaagacagatctttaatcaaagagctttctctcttgcaggatttctcctaatatatcatcag

SEQ ID NO: 86040 - DNA, 600 bp, Chicken  19866894385807_2
tgcaagtgtatttgcagctttatctggggaaactagccttcagagttcacaagaactgtaagaaatcatagtgtgaactgagttctttctatctgagctcagtagccacttaccctaatgcacttcagcagggagtcttgcccactagatatttaatgaagaataaagaccagttctacctctgtggtgttgaaagtgggagttattcttgaaacagaaatgctgacctttgatcagccctaaaagtagtggtgaaagctattstgtttttatgcagttttcttttctttctgttacgastaggggtggaagaaaaggcacaaagattgaccctgcacccatataaatagtrtatctgtgaaaaccatccttcctgatgaaaggaaaataatgtcctaagcaaatagatacgatatactgtgaggaaaaaaataagacaagatgkatctctagctatgtctttgttcagaagcatgagggaaggctctatgggaagtctcttaaagacagatctttaatcaaagagctttctctcttgcaggatttctcctaatatatcatcagtgttcaagtaccctttttcctccagagttaaggatc

SEQ ID NO: 86041 - DNA, 600 bp, Chicken  19866894385807_3
gaactgtaagaaatcatagtgtgaactgagttctttctatctgagctcagtagccacttaccctaatgcacttcagcagggagtcttgcccactagatatttaatgaagaataaagaccagttctacctctgtggtgttgaaagtgggagttattcttgaaacagaaatgctgacctttgatcagccctaaaagtagtggtgaaagctattstgtttttatgcagttttcttttctttctgttacgastaggggtggaagaaaaggcacaaagattgaccctgcacccatataaatagtrtatctgtgaaaaccatccttcctgatgaaaggaaaataatgtcctaagcaaatagatacgatatactgtgaggaaaaaaataagacaagatgkatctctagctatgtctttgttcagaagcatgagggaaggctctatgggaagtctcttaaagacagatctttaatcaaagagctttctctcttgcaggatttctcctaatatatcatcagtgttcaagtaccctttttcctccagagttaaggatctgatttcagatgtctttattgttaaaagacaaaactttcaatttaatagatt

SEQ ID NO: 86042 - DNA, 600 bp, Chicken  19866894385807_4
tagatatttaatgaagaataaagaccagttctacctctgtggtgttgaaagtgggagttattcttgaaacagaaatgctgacctttgatcagccctaaaagtagtggtgaaagctattstgtttttatgcagttttcttttctttctgttacgastaggggtggaagaaaaggcacaaagattgaccctgcacccatataaatagtrtatctgtgaaaaccatccttcctgatgaaaggaaaataatgtcctaagcaaatagatacgatatactgtgaggaaaaaaataagacaagatgkatctctagctatgtctttgttcagaagcatgagggaaggctctatgggaagtctcttaaagacagatctttaatcaaagagctttctctcttgcaggatttctcctaatatatcatcagtgttcaagtaccctttttcctccagagttaaggatctgatttcagatgtctttattgttaaaagacaaaactttcaatttaatagatttctcaccagtgttcttgggagaaatatcaactggacgtagttacttgtacttcagggcagacttcttacttttcctcagggctgtatcctctg

SEQ ID NO: 86043 - DNA, 600 bp, Chicken  19866894385811_1
ttgcggcttgaggtattttttccctgtgcagattggcattactttttttttttttttagatgtgctttttataaaatgtaccacattttaaacaaacaaaatgccactatttttatttgattttgacagctacaagtctaaacactggggtaaagaacagagatattatgtttgcgctgccaaaatcttactcataaggtaccttatcacattattttttccatctcttttgtttctttgggattattgcagcagcttaagagtttgatttatttcctctaaagcataggcaaagaattygggaagaatgagaactgcttaaaaccaattttaagtgctgaaatattctattgatgaaagtacttcctgaatttgctgaatgaggaaggagagagatagggttattttttatgtcaattctccactgtactgagtatttaaatacatcactgtcaattggtgcataatagcatacacattttggtgaccaacgatttctggtaaattgcatttgcctttttattcctatgaaaacaaaatatcaagtactaaattaaattcttgtgtaacttggcactattttctattttaatcaaactc

SEQ ID NO: 86044 - DNA, 600 bp, Chicken  19866894385816_1
ttgtgttgttgatacacacaaacatttaagtacgtgaacacatctggaactgatgaagaggtcggcttctgctctacaaggaactgaaaggaacacatcttctggcagtccatgaggaaagcagacatgctttgtgtcagtcaatggcagatactcatacaggaatggagcagataagggctaaatcgttttttcaccatgatcaggacctgctggtattcgacaccactgagaacacagaacagaggtaagaatgtaggtctcactaacagaaaatgtgctatctttatgctgcatctstttgatgcaaggctcgtccagcacaatwcaaaacagaaggatgaaccagcagatgattcctctgccgcgtgcagtcagaatctgtgctgcattccaggagccgtctcaccgccctgtccttccatcgatcctctgacaaaaccactggggatttcctctctgggaagtacctggcagatggatcgggggcccgtattttctcacgcagcccgacagtccgcatctgtccagcaaaattatgcatctccagatgctcaaggctgaaagtattctcccatttttacgtgggggtttgatttc

SEQ ID NO: 86045 - DNA, 589 bp, Chicken  19866894385816_2
agtacgtgaacacatctggaactgatgaagaggtcggcttctgctctacaaggaactgaaaggaacacatcttctggcagtccatgaggaaagcagacatgctttgtgtcagtcaatggcagatactcatacaggaatggagcagataagggctaaatcgttttttcaccatgatcaggacctgctggtattcgacaccactgagaacacagaacagaggtaagaatgtaggtctcactaacagaaaatgtgctatctttatgctgcatctstttgatgcaaggctcgtccagcacaatwcaaaacagaaggatgaaccagcagatgattcctctgccgcgtgcagtcagaatctgtgctgcattccaggagccgtctcaccgccctgtccttccatcgatcctctgacaaaaccactggggatttcctctctgggaagtacctggcagatggatcgggggcccgtattttctcacgcagcccgacagtccgcatctgtccagcaaaattatgcatctccagatgctcaaggctgaaagtattctcccatttttacgtgggggtttgatttccccagcccgtcccttgg

SEQ ID NO: 86046 - DNA, 598 bp, Chicken  19866894385827_1
  misc_feature (1)..(170): n is any nucleotide
nnnnnnnnnnnnnnnnnnnnnnnnnnnnnnnnnnnnnnnnnnnnnnnnnnnnnnnnnnnnnnnnnnnnnnnnnnnnnnnnnnnnnnnnnnnnnnnnnnnnnnnnnnnnnnnnnnnnnnnnnnnnnnnnnnnnnnnnnnnnnnnnnnnnnnnnnnnnnnnnnnnnnnnnnnaggcggggcggggcaaggagactaggatagacggagcgaggcaaggcggggcgagtgggggcggggcaaagcaaagagactaggcgagacagagcgaggcgaggcggggcggggctaggtgtggcaaaaygaggcagagcgaggcggggcgaggcgaagcatggcaggcgaggcagggtggggggaggcgagaggaagcgaggcggggtcagactaggcctggcatggccaggcggggcgaggcaagttgaggcaaggcggggcgaggcaaggcggggcgaggcaaggcgaggcagggcaagtcggggcgtgtcgaggcgtggctgggcgtggcaggaaaggcggggcggggcggggcgaggagaggctgggctaggggaggccaggcaaggcacggctttggtggagcgaggcgggttgaggcgagg

SEQ ID NO: 86047 - DNA, 600 bp, Chicken  19866894385833_1
gcttcctttccagtctacgttttacttccatgctcatttctgttaaaggtttcaatttttgttccttcacttttgtagaacgcagtggttttacgaattcccttttgccacagatgtcggtggcatttctgattgcagctcatgtgtcagcctccagtttacatgaccttaagtgtttccttgggttttcctcacgctttgttctcaaaataaataaaacgagagttaattctgttccacatgaagcagtctggcagacccctctcagccaccggttatttttgttatttgtaactcttygaatataacacaactgcactgttttccttctactctcaatttctttaacaaagaataactggaatttttaaagctaatttgtccagaagtcacgtgtgcttaggcccaattcagrtaccttaggccatatagcattaggtatagctgtgctggttaaagatggtcctgctgggagctgataatcaccacacttgaaccagaaattgccacacgtgagccagaaattaccacactaataggtcagccgagagcaggggttgtgtgagtgcgcagttatgtgcctcagacaaaatcagctgg

SEQ ID NO: 86048 - DNA, 600 bp, Chicken  19866894385833_2
gtcggtggcatttctgattgcagctcatgtgtcagcctccagtttacatgaccttaagtgtttccttgggttttcctcacgctttgttctcaaaataaataaaacgagagttaattctgttccacatgaagcagtctggcagacccctctcagccaccggttatttttgttatttgtaactcttygaatataacacaactgcactgttttccttctactctcaatttctttaacaaagaataactggaatttttaaagctaatttgtccagaagtcacgtgtgcttaggcccaattcagrtaccttaggccatatagcattaggtatagctgtgctggttaaagatggtcctgctgggagctgataatcaccacacttgaaccagaaattgccacacgtgagccagaaattaccacactaataggtcagccgagagcaggggttgtgtgagtgcgcagttatgtgcctcagacaaaatcagctggtttgcatcatagtcacctttaacagagrgttgaattagccwggctgactttatgtagaagggatcagaagtcattcacatgttggtgagctcaggttagggctgtggaaataatt

SEQ ID NO: 86049 - DNA, 600 bp, Chicken  19866894385833_3
tctactctcaatttctttaacaaagaataactggaatttttaaagctaatttgtccagaagtcacgtgtgcttaggcccaattcagrtaccttaggccatatagcattaggtatagctgtgctggttaaagatggtcctgctgggagctgataatcaccacacttgaaccagaaattgccacacgtgagccagaaattaccacactaataggtcagccgagagcaggggttgtgtgagtgcgcagttatgtgcctcagacaaaatcagctggtttgcatcatagtcacctttaacagagrgttgaattagccwggctgactttatgtagaagggatcagaagtcattcacatgttggtgagctcaggttagggctgtggaaataattagctctggcatggtggcagtgataaacatctgggagtgataccagcttcatctagcatcactgtttgcacaatgaacatctgcttaggctgtatctgctaactgggactggatgctgtatcctaaattagcttataaaagccaaatgtgtaaatacctttaaagttatttttcttgaagtctaatgtagtttgtttctaaccactactggata

SEQ ID NO: 86050 - DNA, 600 bp, Chicken  19866894385833_4
tctttaacaaagaataactggaatttttaaagctaatttgtccagaagtcacgtgtgcttaggcccaattcagrtaccttaggccatatagcattaggtatagctgtgctggttaaagatggtcctgctgggagctgataatcaccacacttgaaccagaaattgccacacgtgagccagaaattaccacactaataggtcagccgagagcaggggttgtgtgagtgcgcagttatgtgcctcagacaaaatcagctggtttgcatcatagtcacctttaacagagrgttgaattagccwggctgactttatgtagaagggatcagaagtcattcacatgttggtgagctcaggttagggctgtggaaataattagctctggcatggtggcagtgataaacatctgggagtgataccagcttcatctagcatcactgtttgcacaatgaacatctgcttaggctgtatctgctaactgggactggatgctgtatcctaaattagcttataaaagccaaatgtgtaaatacctttaaagttatttttcttgaagtctaatgtagtttgtttctaaccactactggataatgagatgtttct

SEQ ID NO: 86051 - DNA, 600 bp, Chicken  19866894385834_1
gatgtgggatttcacttgcagcaacggctcatgctctccatgggagcctctgtcacgttttttctctgtgccaatccgtccccctgtggagagagtttatagcaaccaacaatgaatggagaggattgaggcagatgtgaataaagggctagtgaacatttttagctcaaaagaatgagctgtgatcacttggttcctaagcaggcggaattgcagcgtctggttggtatatattgtatgcttcttgtacgacatactctgactaattcctgtcttcatgattatcgctagtaacattaygtttgattaaaataccttaattgccaaaaataagaaacctcacacacaaatattattagttgcctcttgctggtccttttgagttactttttatgctgatgttcttaatgataatctgtgtcagctatttcagacttgtgtttaacagtttaaacgtgcacagatgtatttcatataactaatacaatgatgtccatatgtgatgctctatatatgataatgcttatattaaggattctgttaacagtctcacattatatttccattgtatgaagatgcataatttattcacacaccaat

SEQ ID NO: 86052 - DNA, 600 bp, Chicken  19866894385842_1
gaagcacagtcccacagaagttactagccaggatgctgcagtctgtaagctgtaagaacaggctctgagcagctgatttgctgacctgcacaaagcgctgtgaacgcagaacatcactcttaagggacatgaaatatacactgaggcatcactaaggtgaacccacaaattgagcttgtagcattttcctttctaaagcaccactgagaccaggggaaggtggttcagggattgaacgtgaacataagccttaacagatcctacttcagcctcgtgttccactgctactttttcttaatstaaatttaggtaagacgtttaaatatggatcattaaaaatacctgtgttccattttgctcagtactgcagtgctttgtgcccagacaacctgggaatgtaagtcttgagactccagaagctcaagctgcacttgagccctcagcagctgtgctttcagactatcatgggagaatagtactttaggacagaagagtgtccttggggaactgggaaataaactccactgaatcaccaacctgcccaggagtgacccgrtgtgaaagatgtttgcatgataaaacagcagccccacatgcctg

SEQ ID NO: 86053 - DNA, 600 bp, Chicken  19866894385842_2
gatcctacttcagcctcgtgttccactgctactttttcttaatstaaatttaggtaagacgtttaaatatggatcattaaaaatacctgtgttccattttgctcagtactgcagtgctttgtgcccagacaacctgggaatgtaagtcttgagactccagaagctcaagctgcacttgagccctcagcagctgtgctttcagactatcatgggagaatagtactttaggacagaagagtgtccttggggaactgggaaataaactccactgaatcaccaacctgcccaggagtgacccgrtgtgaaagatgtttgcatgataaaacagcagccccacatgcctgtctgcctggcagaaggcagrggcagtttctatcccatyccatcccaatcaccmcawcccatcccaactgaaaccaccacctgcccatgccttcctgcagtgcccctgcatgcctccagctcttccctggatggataccctttgagatcccttctccatgtaggagaatagatccccttttctggtctccaccagtgactatttccctgacacattytgcatgagctgcatgagttcagataatgaagatctgtctg

SEQ ID NO: 86054 - DNA, 600 bp, Chicken  19866894385842_3
aaatatggatcattaaaaatacctgtgttccattttgctcagtactgcagtgctttgtgcccagacaacctgggaatgtaagtcttgagactccagaagctcaagctgcacttgagccctcagcagctgtgctttcagactatcatgggagaatagtactttaggacagaagagtgtccttggggaactgggaaataaactccactgaatcaccaacctgcccaggagtgacccgrtgtgaaagatgtttgcatgataaaacagcagccccacatgcctgtctgcctggcagaaggcagrggcagtttctatcccatyccatcccaatcaccmcawcccatcccaactgaaaccaccacctgcccatgccttcctgcagtgcccctgcatgcctccagctcttccctggatggataccctttgagatcccttctccatgtaggagaatagatccccttttctggtctccaccagtgactatttccctgacacattytgcatgagctgcatgagttcagataatgaagatctgtctgtatgtaatgtggtgggctttactctaccgtaagttactccagctttaaagcaaggctgaatcaa

SEQ ID NO: 86055 - DNA, 600 bp, Chicken  19866894385842_4
atacctgtgttccattttgctcagtactgcagtgctttgtgcccagacaacctgggaatgtaagtcttgagactccagaagctcaagctgcacttgagccctcagcagctgtgctttcagactatcatgggagaatagtactttaggacagaagagtgtccttggggaactgggaaataaactccactgaatcaccaacctgcccaggagtgacccgrtgtgaaagatgtttgcatgataaaacagcagccccacatgcctgtctgcctggcagaaggcagrggcagtttctatcccatyccatcccaatcaccmcawcccatcccaactgaaaccaccacctgcccatgccttcctgcagtgcccctgcatgcctccagctcttccctggatggataccctttgagatcccttctccatgtaggagaatagatccccttttctggtctccaccagtgactatttccctgacacattytgcatgagctgcatgagttcagataatgaagatctgtctgtatgtaatgtggtgggctttactctaccgtaagttactccagctttaaagcaaggctgaatcaatctgtttctcacaaaata

SEQ ID NO: 86056 - DNA, 589 bp, Chicken  19866894385842_5
tttgctcagtactgcagtgctttgtgcccagacaacctgggaatgtaagtcttgagactccagaagctcaagctgcacttgagccctcagcagctgtgctttcagactatcatgggagaatagtactttaggacagaagagtgtccttggggaactgggaaataaactccactgaatcaccaacctgcccaggagtgacccgrtgtgaaagatgtttgcatgataaaacagcagccccacatgcctgtctgcctggcagaaggcagrggcagtttctatcccatyccatcccaatcaccmcawcccatcccaactgaaaccaccacctgcccatgccttcctgcagtgcccctgcatgcctccagctcttccctggatggataccctttgagatcccttctccatgtaggagaatagatccccttttctggtctccaccagtgactatttccctgacacattytgcatgagctgcatgagttcagataatgaagatctgtctgtatgtaatgtggtgggctttactctaccgtaagttactccagctttaaagcaaggctgaatcaatctgtttctcacaaaatattat

SEQ ID NO: 86057 - DNA, 586 bp, Chicken  19866894385842_6
gctcagtactgcagtgctttgtgcccagacaacctgggaatgtaagtcttgagactccagaagctcaagctgcacttgagccctcagcagctgtgctttcagactatcatgggagaatagtactttaggacagaagagtgtccttggggaactgggaaataaactccactgaatcaccaacctgcccaggagtgacccgrtgtgaaagatgtttgcatgataaaacagcagccccacatgcctgtctgcctggcagaaggcagrggcagtttctatcccatyccatcccaatcaccmcawcccatcccaactgaaaccaccacctgcccatgccttcctgcagtgcccctgcatgcctccagctcttccctggatggataccctttgagatcccttctccatgtaggagaatagatccccttttctggtctccaccagtgactatttccctgacacattytgcatgagctgcatgagttcagataatgaagatctgtctgtatgtaatgtggtgggctttactctaccgtaagttactccagctttaaagcaaggctgaatcaatctgtttctcacaaaatattat

SEQ ID NO: 86058 - DNA, 426 bp, Chicken  19866894385842_7
aaactccactgaatcaccaacctgcccaggagtgacccgrtgtgaaagatgtttgcatgataaaacagcagccccacatgcctgtctgcctggcagaaggcagrggcagtttctatcccatyccatcccaatcaccmcawcccatcccaactgaaaccaccacctgcccatgccttcctgcagtgcccctgcatgcctccagctcttccctggatggataccctttgagatcccttctccatgtaggagaatagatccccttttctggtctccaccagtgactatttccctgacacattytgcatgagctgcatgagttcagataatgaagatctgtctgtatgtaatgtggtgggctttactctaccgtaagttactccagctttaaagcaaggctgaatcaatctgtttctcacaaaatattat

SEQ ID NO: 86059 - DNA, 600 bp, Chicken  19866894385843_1
agtaacggacgaagcgagtgcgcttcaccaggaggtgaaggatgaagcacgtcagctccatgccgatggagatgaagaagaagatgaccgtgttctccttctcatccgacagcagcagcttggtgaagatgcggctgagcgagatgatgaccccggcggtgcctggtggcacaggagtgctgttggcgccgggtcccactgagccctatggcttagagacctccctgcattgggtatggtgctccatgcatagaggaccatccctggaggggttcaagagccatggaggtgtggcactgrgggacatggttagtgggcacaggatgcgttggggttggagtagatggtgttacaggtctcttccaaccttaatggtgccgtgcacgtgatcagacaccactgaacatcctgctttgctcaggatcagtcggggatgtccccaagttgctggcaaccccaaagccaccaggacacagtcctgggcagccttctctaggtgagcagggaggtgggaccacatggacacaaaggtcccttccaaccaggggctctgtggctctgtgctagggcagtgggttgctgcacgtgggggccggcggt

SEQ ID NO: 86060 - DNA, 600 bp, Chicken  19866894385847_1
gcactcatttgacaatatgaagatatacacgactccactctcaggaggtcttactttactttctttttaaattgctaatgtacagaactgaactgatgggctttctatttcaggatgttaaacatattgggctccaagagcaattaagagatgactaatacatttgtgctcttcttccttcgctcgttttttttgctgtagtttatttttccaatttgcttgcttgtcaaggtggttctttaacctctccaggggagtgcattggcttttgttacaatattcccaagagcaaatgtgtakggagtctggttcctcacgctgaggtttaaagatattaaaagaagcagaacagagtcagctggaggccaatgkctctgctgaacttgtcaatacctcatctaggctggggaaagcagagggagaaatttttccagttccttctgccaccacagaacttccttcagcaaacttcacaacttggctctgctacagtcaattcccaaagcatgtctgtgaaygtctaaacctaaacaaacaggaagcaatgacagtcttggggactattggctgctgtgaactcagactaaggggaaagtttgg

SEQ ID NO: 86061 - DNA, 600 bp, Chicken  19866894385847_2
tgctaatgtacagaactgaactgatgggctttctatttcaggatgttaaacatattgggctccaagagcaattaagagatgactaatacatttgtgctcttcttccttcgctcgttttttttgctgtagtttatttttccaatttgcttgcttgtcaaggtggttctttaacctctccaggggagtgcattggcttttgttacaatattcccaagagcaaatgtgtakggagtctggttcctcacgctgaggtttaaagatattaaaagaagcagaacagagtcagctggaggccaatgkctctgctgaacttgtcaatacctcatctaggctggggaaagcagagggagaaatttttccagttccttctgccaccacagaacttccttcagcaaacttcacaacttggctctgctacagtcaattcccaaagcatgtctgtgaaygtctaaacctaaacaaacaggaagcaatgacagtcttggggactattggctgctgtgaactcagactaaggggaaagtttgggggctcaagaatatgggaaagttttgctcgtatttcttgctgctagactggcaaatgaagactatccagttg

SEQ ID NO: 86062 - DNA, 600 bp, Chicken  19866894385847_3
cttgcttgtcaaggtggttctttaacctctccaggggagtgcattggcttttgttacaatattcccaagagcaaatgtgtakggagtctggttcctcacgctgaggtttaaagatattaaaagaagcagaacagagtcagctggaggccaatgkctctgctgaacttgtcaatacctcatctaggctggggaaagcagagggagaaatttttccagttccttctgccaccacagaacttccttcagcaaacttcacaacttggctctgctacagtcaattcccaaagcatgtctgtgaaygtctaaacctaaacaaacaggaagcaatgacagtcttggggactattggctgctgtgaactcagactaaggggaaagtttgggggctcaagaatatgggaaagttttgctcgtatttcttgctgctagactggcaaatgaagactatccagttgttgtagtgagtgggggaactcctaacatcagctggctcttakgcctaaatgcatcctgaaattcatatgcatgaccacacaaggactggaaaataaacctctagactaaagagtgttgctgatcaaacacacatcaggttattgct

SEQ ID NO: 86063 - DNA, 577 bp, Chicken  19866894385847_4
agagggagaaatttttccagttccttctgccaccacagaacttccttcagcaaacttcacaacttggctctgctacagtcaattcccaaagcatgtctgtgaaygtctaaacctaaacaaacaggaagcaatgacagtcttggggactattggctgctgtgaactcagactaaggggaaagtttgggggctcaagaatatgggaaagttttgctcgtatttcttgctgctagactggcaaatgaagactatccagttgttgtagtgagtgggggaactcctaacatcagctggctcttakgcctaaatgcatcctgaaattcatatgcatgaccacacaaggactggaaaataaacctctagactaaagagtgttgctgatcaaacacacatcaggttattgcttttcccaggcaatgtgatttcctaaagaagaaatctttgcaacttgagttaaaagacccaaggcaggctatttaattgtgctactccaagactggtgatgttttgctgggagactcatctcctgctgagtctctccctgcacccctttgtactgtgtgtatattcaacactat

SEQ ID NO: 86064 - DNA, 600 bp, Chicken  19866894385856_1
tcaattcgttcaatagcacataaaacaattaaagaagatgatttaccaaaatcccatcattacaaaacccaaacaagaaagactcatctattttaagtgcatatttaatagcaactggtcacaagccatcaaaactggagaaggaaagtcctaacattgcttttctaatcagtttctaaaacattatctaagttttagcatttgttaactaagcacaaatttgagagcattgaggggaagcaatatgctcaaagcagattatagagtcaagaatatgctgatactaaaggcactgaaaarctattttttatgccaagaaagaaaagaagccttggggtatgacctggaaatttgaacacttgaagaacaagggttcagcattttttttatttttcatttttggcacactccattcactccaatttactgctcatgcacttggacacagattcaactgtctcctgtatccaaggataatgacctaccactccagtgatttagtaaacctcaactctgctcaaccactcaatcagtgatgggctaatcccttaatggccatttgtgtctttccagtgcatcctaaggagttctgcaacactc

SEQ ID NO: 86065 - DNA, 600 bp, Chicken  19866894385859_1
gtgctttagatgcgctgtgtggttttgatttggttatagttagttacatttttagtcatctgtactctgttgtaagaggaaaagcagctgacaaatattccttttcctttttctctcctgtatatcaggtgaagattaaacccagtcaacagttttccagctgtcagtgtgtacgttgttttacaggcagaagtacatacgcctttgtgtttatataaacatgcgtaaaacatttaaatctcaaatctctttgagatttttaaatgggggtaggcaaacagtaatggtacagtggccttktaaaacaaacagatctgtttagtagatgcttcattttaaaaatgaccaccagaaagtttatggtagattatttattgcttgagttgaattatttttagaaaatacaaagatctattagtgctagatacaaacatggggaattcttctgaatcgttttgttctgaacattttaatgttagtggtgtaatgtcaggttatttcttaatgcagaaaacactggcttactgtaatgctgtgtttgaaaaatggaaagatcggattcgtacttggatgtgttgctgatgtgaggctgttcttgct

SEQ ID NO: 86066 - DNA, 597 bp, Chicken  19866894385866_1
cctgggtgctgcgaggctctggaaaatcaaacatttgtaaagtcctggtgcatgatttcacacggcagcagggctgccctgcagctccacgtggtgccccttggctgctctccacatcctgctcacagccccacctggaaccaccatttgcattcaagggagagaaaaaattcgggtatttccagaacacagcagcaggaaaaggcatcaggcttcaacactgccaaatcctggagacgtggcagaagatatgtaaggaatttcacaaaggattcttcttgtttgactgtcatcatttgkgggcttttctgtatgtatttaaaaatatatataattgcagattttaaaatgctaacttctcttaggactaacatctggatttactagattaacatggcatgtgtttgcagtagagactgaactgctttcattcaaccaatgccaacataagcttttgggggatttgaaaaactgaaagccttcaaaaacagaacagaagggtaagatgccaactcaagtaagcaggctgacatgggaaaccctgtgcataaaaggctataaataatggaccctcgctgcctcaacccaggactccaa

SEQ ID NO: 86067 - DNA, 599 bp, Chicken  19866894385872_1
  misc_feature (1)..(129): n is any nucleotide
nnnnnnnnnnnnnnnnnnnnnnnnnnnnnnnnnnnnnnnnnnnnnnnnnnnnnnnnnnnnnnnnnnnnnnnnnnnnnnnnnnnnnnnnnnnnnnnnnnnnnnnnnnnnnnnnnnnnnnnnnnnnnnnnnacacgcagacgtgatttgcttaaatctgggtctcaggctggctttgaaacactggaaaagccatggccaggcttgagcacacctgacaacaccggtacgtaccagctacagctggggtcaccaggtaacctactgaaggctgagatgctcttgtctaaggacagtgactgmtacagtcaaatcacatatctatctaacaagaattccaaagacgactttacttacaattacaaaggtgcagttggaaataccacggttacagaatacaactcatcgtaagtactctgtcagaaaggaggaattttttcagtgaaacaactgactgtaagaacggcgttccttcattcacaaacatatgggatttttcatgttgtaggtttaacttgcttttaggctgaggatttcttttggctcttttaccaaactcccattagtgacgtgtgacattatagaaatcacagaatggtaac

SEQ ID NO: 86068 - DNA, 599 bp, Chicken  19866894385878_1
  misc_feature (1)..(100): n is any nucleotide
nnnnnnnnnnnnnnnnnnnnnnnnnnnnnnnnnnnnnnnnnnnnnnnnnnnnnnnnnnnnnnnnnnnnnnnnnnnnnnnnnnnnnnnnnnnnnnnnnnnngatgttcatttcgtgctgattatcatattttttaaaacgtaatgaatttatggagataattcaatccccactgactgggagtgtggcttacttctgccacgagtaaagccgctgcgtgtgtgaaaatggaaattgctgcggcactttccatgtcttttgcctgtcttcccctaccaaaggatcccaaaatgctttgcacrctctatctactggggagatcgaccagaatcgcagcacttcatagaaacacagccacygctgggctggaacacagaaactctttaactagaaacagaaatgtaatcagattaattaagtaagtacaattccgaggcaagaaagtcaattaaatgaatcatacgtcaatatgtaaataaaaggagctggctttgaagcaggattagagataggagtgacaatcaagagcgctgctccttgcagagagtgctcaaacaccctctaagagccacttcttggggccacccctgcagctgggatg

SEQ ID NO: 86069 - DNA, 599 bp, Chicken  19866894385878_2
  misc_feature (1)..(43): n is any nucleotide
nnnnnnnnnnnnnnnnnnnnnnnnnnnnnnnnnnnnnnnnnnngatgttcatttcgtgctgattatcatattttttaaaacgtaatgaatttatggagataattcaatccccactgactgggagtgtggcttacttctgccacgagtaaagccgctgcgtgtgtgaaaatggaaattgctgcggcactttccatgtcttttgcctgtcttcccctaccaaaggatcccaaaatgctttgcacrctctatctactggggagatcgaccagaatcgcagcacttcatagaaacacagccacygctgggctggaacacagaaactctttaactagaaacagaaatgtaatcagattaattaagtaagtacaattccgaggcaagaaagtcaattaaatgaatcatacgtcaatatgtaaataaaaggagctggctttgaagcaggattagagataggagtgacaatcaagagcgctgctccttgcagagagtgctcaaacaccctctaagagccacttcttggggccacccctgcagctgggatggggatggctccatgtgagtgtcacacacacagggacactccagcagctccatcccca

SEQ ID NO: 86070 - DNA, 600 bp, Chicken  19866894385882_1
tttttaaaggagcatagaaaattaaatccattaaaaacttgatagtgagacatattagtattccagagggaggttgtatcctaccaaacagggtcagtcggtactgttttggggtcagaagagttcaggatgctgtacaagattgtctctgcactgcactcgtgtttgtgtgtgcatctgcctatgcatcctgccactgcactagcactggcctgaaagctttgcacaatggaaattgtttttaccaaatcctggagtatattacttattgagcccaaaaactcagtttcacatacatgytgattgtcactattaagcgaagtaaaagcaattatacctattataatagatactccagagcaggaaaggtggaaattaactcagaggctaaggcacctagatttttgtgctgtctagcttctatccagaatgtaacagaggttttcatcttgggctcagtctggttctgcacacatagatgactagtgccagctgggatatgcaggtattccttataacctaccagtgttactgcagagttacagaggtctcctttagctcctttgcctcatctccgatcctaatggagatgtttctgat

SEQ ID NO: 86071 - DNA, 600 bp, Chicken  19866894385882_2
gaggttttcatcttgggctcagtctggttctgcacacatagatgactagtgccagctgggatatgcaggtattccttataacctaccagtgttactgcagagttacagaggtctcctttagctcctttgcctcatctccgatcctaatggagatgtttctgatgccttagtgcacaggtgtccaacattttggcttgcctgggctacactgagtaaagaggaattgtctcaggctgcgtatgtgtaggtcgctccaaaagtaatgcttcctatttatttccagggaaactaaaacagatrcaatgagcagagtagtactttttggttagagcaaattctcagctgcagaataccctttttcaacatagtyactgccattagccatgcattttcatgagcagtgaacaatagccygcactccatgctcgcaacaatctgcaccagcaaagatgacttgctgtaactgttgccactactgaaatggaccacccactcctcactgtgctcacatccactgctgggtatctgtaaatattctgcaaatgccagaaatctcaatgggtgccatttttttgggcatggaggaattcagggacacac

SEQ ID NO: 86072 - DNA, 546 bp, Chicken  19866894385882_3
attccttataacctaccagtgttactgcagagttacagaggtctcctttagctcctttgcctcatctccgatcctaatggagatgtttctgatgccttagtgcacaggtgtccaacattttggcttgcctgggctacactgagtaaagaggaattgtctcaggctgcgtatgtgtaggtcgctccaaaagtaatgcttcctatttatttccagggaaactaaaacagatrcaatgagcagagtagtactttttggttagagcaaattctcagctgcagaataccctttttcaacatagtyactgccattagccatgcattttcatgagcagtgaacaatagccygcactccatgctcgcaacaatctgcaccagcaaagatgacttgctgtaactgttgccactactgaaatggaccacccactcctcactgtgctcacatccactgctgggtatctgtaaatattctgcaaatgccagaaatctcaatgggtgccatttttttgggcatggaggaattcagggacacacttttgcttcatatgtg

SEQ ID NO: 86073 - DNA, 502 bp, Chicken  19866894385882_4
cctttagctcctttgcctcatctccgatcctaatggagatgtttctgatgccttagtgcacaggtgtccaacattttggcttgcctgggctacactgagtaaagaggaattgtctcaggctgcgtatgtgtaggtcgctccaaaagtaatgcttcctatttatttccagggaaactaaaacagatrcaatgagcagagtagtactttttggttagagcaaattctcagctgcagaataccctttttcaacatagtyactgccattagccatgcattttcatgagcagtgaacaatagccygcactccatgctcgcaacaatctgcaccagcaaagatgacttgctgtaactgttgccactactgaaatggaccacccactcctcactgtgctcacatccactgctgggtatctgtaaatattctgcaaatgccagaaatctcaatgggtgccatttttttgggcatggaggaattcagggacacacttttgcttcatatgtg

SEQ ID NO: 86074 - DNA, 600 bp, Chicken  19866894385893_1
gatgctcagctcacagcagtgcacaccgcagcacgtggtgaggatgggctgtttgctgcactgctgcctttggagtcgcgcatccttccaccatcccttctgatgcagacatgcctgcccatgggcagcgatgcctcgggctatccgcctttgtgcaattgctttgtttcagtctggccttaagcataaacaggaaaagcaacagcagtcagaaccgcttgcagcctgaccccatccgggcccccaggagcacatcagccccaagcaagcaaccctctgccctgcacccacccactgctygccccacacggcagcacccaccctgctctgcatccataggcagtgagcagcaagctggcaacggcacatctcagccctgcctcagtgctgagctattactgctgcttattcgtgggaattattattgatacaagcagagctgcgctgcgcgccgtggcccatccatcccagttctaaatcgtagctgtctgccaacagaacggctgcaaatcttccgtgttgtttgtgggcagagccacataaaaccacagcgtgaatcgttgtgggcattttgcacaaactcgttcacaaataaaactt

SEQ ID NO: 86075 - DNA, 600 bp, Chicken  19866894385893_2
tggcagaaatacgtattgcaccacattgccacgttcccattagcgctgtgcaccggtgggtgtttatctcaagtgctgcggagtggggattcatctgggagccactgggccagcaacaggaaaaccaattgctgtcggatgaggctcctcttatttcgcctcttgtttgtgccctgcaggaactcagtgtcaggagatggcagtgagccccagcagtgggctgcaccgctccttcatgcccagcactgataattgggtgcattcagactgatcacacccacggagcagctgattgaagcrccctgcagtgcagggagcagccccagctctctgctggctccccgctcttccctccctggtgcatccccaggaactcatttgctgtcactgtgatccctgtgacaccccgaggttcaacgagtggtygttccctctctgaggatcttccttaaataaaagatgggaagagccccaatgctccccgctttggcccagctccctgcttggggttccctaccagcattcccagcacagcggtgctgtgggcagagctgtgcccagcagggcagctacacctggggatgccccaataggggatga

SEQ ID NO: 86076 - DNA, 600 bp, Chicken  19866894385893_3
aattgctgtcggatgaggctcctcttatttcgcctcttgtttgtgccctgcaggaactcagtgtcaggagatggcagtgagccccagcagtgggctgcaccgctccttcatgcccagcactgataattgggtgcattcagactgatcacacccacggagcagctgattgaagcrccctgcagtgcagggagcagccccagctctctgctggctccccgctcttccctccctggtgcatccccaggaactcatttgctgtcactgtgatccctgtgacaccccgaggttcaacgagtggtygttccctctctgaggatcttccttaaataaaagatgggaagagccccaatgctccccgctttggcccagctccctgcttggggttccctaccagcattcccagcacagcggtgctgtgggcagagctgtgcccagcagggcagctacacctggggatgccccaataggggatgaacatctgggtgctgccagacagagcctggataacaacccggcaaagcacgcgctatttacctgtatctcaggcaacgcacacctaattagtttatgtaaacactgagctcagattggcaaaataag

SEQ ID NO: 86077 - DNA, 600 bp, Chicken  19866894385894_1
ctagcactgactccttggggacactactcatcactgatctccatccaaacacagagccattgaccaccactctctggcttcaatcctgcagccacttttttgtccatcaaatggtccacccatcaaatccatatcttttcaatttggtgagaaggatattgtggggtaccatgtcaaaggccttactctgaagttctggtcgatgacattagtgaccctccccttaaccactgatgcagttacaccatcgtagaagtccactagggtagtcaagcaggatttgcccttgttaaagacatygtgcttctcttgtatcgcttccctgtgttcttccctgtatcacacactccctgtgtgccttagcatagtttccaggaggagctgttccttgaattttcctggcacagaagtgagcctgacagggcatcctttttgctgccttaaaaaatgggtgtgatattgccttttttccagtcatcaggggcttcacctgtctaccatgacttgtcaaatgtcactaagagtagcttggagactgcatcagccaattccctcaggactctggaatgcctctcatcaggacccatagacctgtggaca

SEQ ID NO: 86078 - DNA, 521 bp, Chicken  19866894385896_1
aacattttcatatataacgccagttactggaaatgagcctggatagttgagtaaccgaagcatgcttgaaaggagaagcagagcttgtctacaaaatactaacacttggctgagtctgcagcctgggaggagagcaccgggtgaattttctggacttttttcatggctgacttgggatatgcctgcactgtcactgagtgtgttgacctctctccttgacgcatattgctcctgacagtccctctgccttccccgcaggccatggaggcgcagatccagaacttcgggcagacgccatcrcagttgctcattgagccccatccgccgcggagctctgccatgcacctggtgagacatagctgctggttgggaattcattccctttgaaccagaggcttctttataggtcatcaaatatccacttaagcaagactttcatgccctccactgcccatacaaccatacacagtgcaacagagcaagggtggaatttgactagccttatcttcctatagtcctga

SEQ ID NO: 86079 - DNA, 600 bp, Chicken  19866894385899_1
agaatttgaggatataagccccctgaagtgagagtatgtgcttttctaagcatgtggctttctttgtaagcatggcaagtgctgctgccaaagagcagtggttatagacacgtcccttctgatgaggactcctcaagcaacaggaatttccttgtatggatatttaattggtgtgaggagagacccagggaggtaagcaggaaggggcactaccaacagttcagtgaatggaaaggaaagaaaaaaagaaggaaaagaatcagctttgattgtgaaacaagtaattatttctgcagggcrttttatcctaagagaacgtagctgttcggtttctggagatcagttttaacttctgctttcagtagcagattgcagggtgcaagtgagctgagcctctgcataccaggcctagttgtcttcattaaagcaacgataaacttaaaaagagcaaatccaaatgtattcgattctgttcattaagagactggcaggtttctggctttgttgtcttttaatacaccaagaacagatgcaggttgacaagtggcatcagccaggggacacagctttataaggttgtgttgaagttgggcttggaaa

SEQ ID NO: 86080 - DNA, 600 bp, Chicken  19866894385903_1
agatcatctcgtccaaccatccacctaccaccaatactgctcactaaatcatgtccctaagtactacatttaccctttccttaaatacctccagggatgggactccatcactacagccattacctcctgtcctgtcgctagttacctgggaaaagaggtagacccctaccctcgacacaaaatttactgccccttagacctaagatgcgaggagtctgatcctttctgttccaaacacatcactggatgcacagctttatttaaagttatatgactacattttgaagtgtagcagttgcygcctgacaacaaaaatgcagcattatgattttgcattttatttcaatgggaagtatctggtataccaaaccacctgatgtgtttctactaaagcatctaagaagttgtgtttactctccatgtcatagtatactacagagaaaatctacatgcttccagtcattgccccacacacccatgatacagaggcaattacaaatctggtcccttaaaatggatggaattgggatttttgtaggaggaatcctctraggaagaactgtgcatagaatcacagaatcatttgaatyggaagggacg

SEQ ID NO: 86081 - DNA, 600 bp, Chicken  19866894385903_2
cagctttatttaaagttatatgactacattttgaagtgtagcagttgcygcctgacaacaaaaatgcagcattatgattttgcattttatttcaatgggaagtatctggtataccaaaccacctgatgtgtttctactaaagcatctaagaagttgtgtttactctccatgtcatagtatactacagagaaaatctacatgcttccagtcattgccccacacacccatgatacagaggcaattacaaatctggtcccttaaaatggatggaattgggatttttgtaggaggaatcctctraggaagaactgtgcatagaatcacagaatcatttgaatyggaagggacgcttaaaggtcatctagttcaacttcctgcaataaacagggacacctacagctagatcagggtgctcagagccctgaccagtctgaccttgaatatctccagggatgggccttccaccatctctctggaaaacctgtttcagtgcctcaccaccattattgtaatttttttttttccttctattcagtctaaattttcactcttctaatttgaaaccatttttctttgtttcaaaccatttccccttgcata

SEQ ID NO: 86082 - DNA, 600 bp, Chicken  19866894385903_3
agcagttgcygcctgacaacaaaaatgcagcattatgattttgcattttatttcaatgggaagtatctggtataccaaaccacctgatgtgtttctactaaagcatctaagaagttgtgtttactctccatgtcatagtatactacagagaaaatctacatgcttccagtcattgccccacacacccatgatacagaggcaattacaaatctggtcccttaaaatggatggaattgggatttttgtaggaggaatcctctraggaagaactgtgcatagaatcacagaatcatttgaatyggaagggacgcttaaaggtcatctagttcaacttcctgcaataaacagggacacctacagctagatcagggtgctcagagccctgaccagtctgaccttgaatatctccagggatgggccttccaccatctctctggaaaacctgtttcagtgcctcaccaccattattgtaatttttttttttccttctattcagtctaaattttcactcttctaatttgaaaccatttttctttgtttcaaaccatttccccttgcataacctcttctgtttgatactgtagacctgtctgtggaatg

SEQ ID NO: 86083 - DNA, 587 bp, Chicken  19866894385903_4
ttttaggtagtcttatgtggagatgggagttggactcaatgctccttgtgggtcccttccatcatgtggcaaagtacaaccaagatctctgttatatgtagcagctagggcagcacccccagtatccccaaaatctcaacatcagggatctgtgtggttgggtgggtaagtgcatactggtgtgggtacagctgttcaaataatgtgctgaaagttctttaggctgcatgatattatagggatggcttcgtcctctctgggtgctgccactcattttaatgaatgggagtctctctgtcratgacagctggaggatgctgacaaagtgtcacaagctgaaccaaggaacctctggttttctcagcttgacaagtgctccttctcagacatccattagttggtgtcaaaaattcagaacagagatatgactgcataactgagaagggtacaaaagggtgttgtatttactgtgtcagggaaattactagggagctatgcatcaaaacagtcttccagtctttgtgttgattgctttactaggtagaggtgttaacagtgtccagctcttcttttgtagaggaattaca

SEQ ID NO: 86084 - DNA, 599 bp, Chicken  19866894385915_1
  misc_feature (1)..(58): n is any nucleotide
nnnnnnnnnnnnnnnnnnnnnnnnnnnnnnnnnnnnnnnnnnnnnnnnnnnnnnnnnnggatgcttgtgggaaggttaacctctactgtctactaccaacatcaccctctggtgtcatgggccaacataatataataggaggcattacttttggagcagccctggtatctgttctgctggaatagataacacctcatttggaaagtagctcttcagcaatgtgtcaacaattattaaccttaaaattgaaatgcttgagtctaatattaaaaattaacagcaccagtaaagctggagttygtctgcattgattttacagaccccactgtggctctgcaaggatcgacctcagctccagcaaactaaagagccaaaattgccccagagcagtgcccagagacagggcttcaagacctactctggactaagaaaacatggatctcttgcacccaatgccttcactgacacctgagaagcctctaggcatctcctgaacacagatacattcaagcacaycatctactgctaataattttcttcagctgcacctctgccttcrggaggagaaggaagtttgggacacacaaatatatatgata

SEQ ID NO: 86085 - DNA, 600 bp, Chicken  19866894385915_2
caatgtgtcaacaattattaaccttaaaattgaaatgcttgagtctaatattaaaaattaacagcaccagtaaagctggagttygtctgcattgattttacagaccccactgtggctctgcaaggatcgacctcagctccagcaaactaaagagccaaaattgccccagagcagtgcccagagacagggcttcaagacctactctggactaagaaaacatggatctcttgcacccaatgccttcactgacacctgagaagcctctaggcatctcctgaacacagatacattcaagcacaycatctactgctaataattttcttcagctgcacctctgccttcrggaggagaaggaagtttgggacacacaaatatatatgatatgcaatggcaaatatatatgagaccagcacgcatgcatagcttacaaaataattttgtacattccactatccaatatttacacagacttaacattgcaaaggaacttgcttttaagtatgttcctcagaattgtgtctaaaaggcttgcaactttcagtcaaaccacaaatctactcaattttcatgtccctgttcttatttaaaacaatttctatc

SEQ ID NO: 86086 - DNA, 600 bp, Chicken  19866894385915_3
tctaatattaaaaattaacagcaccagtaaagctggagttygtctgcattgattttacagaccccactgtggctctgcaaggatcgacctcagctccagcaaactaaagagccaaaattgccccagagcagtgcccagagacagggcttcaagacctactctggactaagaaaacatggatctcttgcacccaatgccttcactgacacctgagaagcctctaggcatctcctgaacacagatacattcaagcacaycatctactgctaataattttcttcagctgcacctctgccttcrggaggagaaggaagtttgggacacacaaatatatatgatatgcaatggcaaatatatatgagaccagcacgcatgcatagcttacaaaataattttgtacattccactatccaatatttacacagacttaacattgcaaaggaacttgcttttaagtatgttcctcagaattgtgtctaaaaggcttgcaactttcagtcaaaccacaaatctactcaattttcatgtccctgttcttatttaaaacaatttctatctacacacactcctataacatttaagcttcatattgaaattaca

SEQ ID NO: 86087 - DNA, 600 bp, Chicken  19866894385923_1
ctttagttgtttatgtgtgttctttaagatggttgttaaacatgcaggctgaatgtgctaattaagagaaaaagtagcagtttgccttgtggaaacttaagggagagaagggggagaaagtcaaattgttcatcagtcctcagtattgtatggcatcacacatatgaaatcagaaagaatgcttccttaaagacatgagccattctgcgttgagatgactcagaaagagattaacttttgtcctgtaatcttggatgcccaagtagatgtataagtagagaagaaaggcctgtggcagaygaagaagcagtcatgacaaaatcaaccctgtttaaatgaatagtaggaggtaagattccagccaaagctaaaataatgaggtagagcataactgctcttcatatttgttcaggaagaacatatattgttaagagcaatgttagtgatgtattaagatgtattaataatgtattctatgactgacctctatttataaagtaaattaattttactccataatctcrtccagcaatagatctggatagtcatctggtatttggcaagatattccttacccccatttgctacaaaccttaaaag

SEQ ID NO: 86088 - DNA, 600 bp, Chicken  19866894385923_2
aagagattaacttttgtcctgtaatcttggatgcccaagtagatgtataagtagagaagaaaggcctgtggcagaygaagaagcagtcatgacaaaatcaaccctgtttaaatgaatagtaggaggtaagattccagccaaagctaaaataatgaggtagagcataactgctcttcatatttgttcaggaagaacatatattgttaagagcaatgttagtgatgtattaagatgtattaataatgtattctatgactgacctctatttataaagtaaattaattttactccataatctcrtccagcaatagatctggatagtcatctggtatttggcaagatattccttacccccatttgctacaaaccttaaaagcataccactaattgatagagtaccagcaagagaaacaatatgagcagaccatgaaggctgaaagaattaaaggaggtattttttatcttaaatgaaagaaaaagtccattgaactgttcattgctcttaaagagtcattcagtatgttatgagaaaataatttcttggccagcaatacattgcatgtaggctacagatactctgaagccaaaagagaaaatatt

SEQ ID NO: 86089 - DNA, 600 bp, Chicken  19866894385939_1
cctccctttgtccatcagtgtcatcaccccatcacagaaggccaccaggtgggtcaggcacactctgcccttggtgaagccgtgctggctgtctcggatcaccacctcatcacacgtgtggtgagccatttaatagctggactcacctcctggctgtatacaagcaactgcaattacacatctttaatgcaggaatggaaaaataaattgctcagtaaagcattatggctttcactttaacagtccctttttcttcagctggaagagttcttataggaaaactcttccaggcagcattasaagtacaagtagtctcatcctgggggtgatttaacagccagtgctgctgaaccccttttttttttttctgtttatccttctcaaagaagggagaggagaaaggaggaataaaacaaagtgtgatttctgtttctgaaccagctcttctctatttgagcagaatagaccagcacagcagctcaacaaggcagtaggcctgggcaagaaatcaactgttttgtattgctaaggaagaccaaatgtaatgtttgcaaaaggaaaggaaaatatatatatatattataatctccataaatgcag

SEQ ID NO: 86090 - DNA, 448 bp, Chicken  19866894385945_1
agtcagtgaccacactgagcaggtcaaaactgaattatgaagcaggtggctcaatctgtaccctaagcacgtacaaatgttcgtactgctagccattctgcttgtcaccatttcacctcactgccattataggctatttttattaatgaggcaggaaacagtgtggctttaagatgtccaccgctaggtccatagcattgttagtggaataacatttggcatgctaggaatgcaacgaagacattttaaagctgaagaggaaacagtcacattttacggtgcctgctctaccctccttcytctgggctgcaaacaatacaaaatacttcaaatgtttccagcagcaagagcctacccacatgcttttaccaaaaactaactgggacatagttgcttactgactttgagcatggtgtcgtgccacaagacacacaagttgtttattgag

SEQ ID NO: 86091 - DNA, 481 bp, Chicken  19866894385951_1
gagaaaaaataataagcctcatttttccagtctgataggacttcatgtgttatgtattgtgattgctatgattctattttcatttgtaataaattgaaaaacatgctgtttattattcagtcatcctctgccaactgtctaacaacagtcccttgtatttcctagtttccatgtatttcttcccgtgcaaagttggttttgttctgtatgtgttaatttgctccctcttcctacaacatttcacctgcttcacttgtcattccccatttcttaactctgtcttaagcaccctgcattacwtttcagaaatacctactattttaggttgttaacagagcagaagatttgctttcagttagtgggaatttgtgccaaatgttttatttttccccgactggttttgcaagggtttatttcttgattttatgttgtgctccggattcaaagaaacctgaaaagtaaaaccacactcttaccttca

SEQ ID NO: 86092 - DNA, 600 bp, Chicken  19866894385956_1
aaaaacagctgccacccatttgtctttttctgaccctgggcttcaggtagagcatctctcaaagatctacagctgtcaggtctgaactgctgggtcagcaaagggcactggacccatccgtgaggtgttgtagccatcacagtagcagtgaaattaataacacagtaacagaaactcatgtcctctaaaaatctcgtttgtcatcttacatgatttaaacggctttgatatttgatatattatgtctagcaatgttagaatattttgaagtcttcatttagctgtgtagctaaatatggrtataagtaatatcatcctgcatwttttgcagaggttatgtatttgaagtatatttaattaaatgaatgtattagcactttcttttgctacaataactgatgctttttggtttacgtataattaataattgataaataattatatacaattatttcgtatttttctgaaggttttctctatttattatatatcattaaatcgtgaaataatccttttcatacagtagttatgcttgcattttttagcatcactaaataaatccaaagagatctgaaatacagtggccttcctagttcagat

SEQ ID NO: 86093 - DNA, 600 bp, Chicken  19866894385956_2
ctttttctgaccctgggcttcaggtagagcatctctcaaagatctacagctgtcaggtctgaactgctgggtcagcaaagggcactggacccatccgtgaggtgttgtagccatcacagtagcagtgaaattaataacacagtaacagaaactcatgtcctctaaaaatctcgtttgtcatcttacatgatttaaacggctttgatatttgatatattatgtctagcaatgttagaatattttgaagtcttcatttagctgtgtagctaaatatggrtataagtaatatcatcctgcatwttttgcagaggttatgtatttgaagtatatttaattaaatgaatgtattagcactttcttttgctacaataactgatgctttttggtttacgtataattaataattgataaataattatatacaattatttcgtatttttctgaaggttttctctatttattatatatcattaaatcgtgaaataatccttttcatacagtagttatgcttgcattttttagcatcactaaataaatccaaagagatctgaaatacagtggccttcctagttcagatcttccagaattcctcgactacct

SEQ ID NO: 86094 - DNA, 600 bp, Chicken  19866894385961_1
tttctgtctgcatgaatctgcatgacgttttctgcccattccatcagggattcacctcgcggaactttcaccctttcatgcttcaggcgccccactctgaactctcccggatcatcacgtcgcactgtgcttgtggttcttgttctttcaacagtggcttcgcgtctgttttgtagccacacaattgctctagaaaaaaaaaaaaaaccagaaagcagttgtttaaaacttgaaagtatccacaattaaaaagttactttgttaagtgccaatcacctttttcagaattatccaaagcgyacaagtatgggctgctttacatttcmtgaatttagcaaactaaataatttttcattactatgaagggtcaaacataatgtctaatataataaatagcaacaatgaaaacatttaatatatgacgggaattactatagctttaaygttacagtggaatgaacagagggcatcatactttatatcacaatgcagaaaaccctacagtttctttctaatggtagatggccattacaagttacactatactgcaggacagttgtgcatgagcccattaatactgaccaagtgttacagcaccat

SEQ ID NO: 86095 - DNA, 600 bp, Chicken  19866894385961_2
gttttctgcccattccatcagggattcacctcgcggaactttcaccctttcatgcttcaggcgccccactctgaactctcccggatcatcacgtcgcactgtgcttgtggttcttgttctttcaacagtggcttcgcgtctgttttgtagccacacaattgctctagaaaaaaaaaaaaaaccagaaagcagttgtttaaaacttgaaagtatccacaattaaaaagttactttgttaagtgccaatcacctttttcagaattatccaaagcgyacaagtatgggctgctttacatttcmtgaatttagcaaactaaataatttttcattactatgaagggtcaaacataatgtctaatataataaatagcaacaatgaaaacatttaatatatgacgggaattactatagctttaaygttacagtggaatgaacagagggcatcatactttatatcacaatgcagaaaaccctacagtttctttctaatggtagatggccattacaagttacactatactgcaggacagttgtgcatgagcccattaatactgaccaagtgttacagcaccatttacttgcttacacaataatcagaga

SEQ ID NO: 86096 - DNA, 600 bp, Chicken  19866894385961_3
ctttcaacagtggcttcgcgtctgttttgtagccacacaattgctctagaaaaaaaaaaaaaaccagaaagcagttgtttaaaacttgaaagtatccacaattaaaaagttactttgttaagtgccaatcacctttttcagaattatccaaagcgyacaagtatgggctgctttacatttcmtgaatttagcaaactaaataatttttcattactatgaagggtcaaacataatgtctaatataataaatagcaacaatgaaaacatttaatatatgacgggaattactatagctttaaygttacagtggaatgaacagagggcatcatactttatatcacaatgcagaaaaccctacagtttctttctaatggtagatggccattacaagttacactatactgcaggacagttgtgcatgagcccattaatactgaccaagtgttacagcaccatttacttgcttacacaataatcagagaagcattaaaccaaagctgaagtgcagtcattcacatattaaatgacattaagttataataattagagtaataataagactcttacctatgtagttacaggaaagagtacaaaaggaaa

SEQ ID NO: 86097 - DNA, 600 bp, Chicken  19866894385980_1
aaaaatcctgggtctcttcagggatatatgagtctatagaagcttagctaatgctagctttttgcaaacaactaatgtgtcctcacttggagtgggatttcagccatctaaaatttaggcctctactctaagctggttgcccagcctttgtaacaaacaacaggagtgtctgcttcatggggtggttattgtaagatgtatcgtaagacacatgttttgatatggacaatgagttctccctcttgagttgcctgctcctcagagataaaaacatagctttacacttctcccttcaatacrcatattacaattgcatgattccacctacaacaagcacaactcaagcatatctaaaattgtctgcaacaacaattataagctctttaatacaataactataaaaacagtaaaaaactgaaagactgaaattagaaaatgaagaagacttaatcttaaggaaataagtagaaaaagcaattgtacttgtgcgtcactctgacagaactgggttgacctatagcatcagtgccatcagcaaccatcgtgtcaccgggagcaccatcagtttcctctgctttttttgtcattttcagcattgtg

SEQ ID NO: 86098 - DNA, 600 bp, Chicken  19866894385981_1
catactccactatcaaggaagtttggataacggtactgaatattgtttgaaaaacattctctgatgactaaaacctagcatttggattttttacatttaccaggtgtttgccattagtctgaaagaaaatctccttccattccattcctttgagtcctagctggcattgaatattccctaaatattaagcgaaactaagaaaaagtacagcacttcagttttatggttaaaatatttcacacataggtacagtgccattttctgctccagagtttcactgttcatataaaaacagagcascagtaactgtagaaacaaagaggtttccttaacatctcttgaatacaatttcttccctcataaatgcccaaaagcctttagtctcatggtctgggaactcttctgagcaaaaggaaggtcgacagattatcagaaataaatcagaattgaacaaattcatcacaacaaacacatgccttctttgaagcaaactagcacctgacagaatcaaggaaaccactgagcactccacacattttacatatttgcagtgaaattcttctcttaggtacatgagtaacaagttggattacaaggcat

SEQ ID NO: 86099 - DNA, 600 bp, Chicken  19866894386005_1
caaagcaggatgcctagattgcctagtgaattgcattttctgcaatttccagtgaagaaaggcaaggaagctgcacaaagaccacgacagaaaattccctttcctcaggttgagctgaagagctagaaggcccgtgcaaacctgcaactgcatcctctatttttttaaaccaacttttcttctgaaagggcagaggaggcaagaaaggagagaaaaagggtactgaaatggcatcatctctaaccatcagaactcctggagatcctcctcgagattatgtacttagagtgaccaactatragttcataacaggactttagagtagcattacctgttcactgatgacttggaattccctcatctcatcttctgttagtggagcatatatttcatcattttcactatcttcctgccagcccatttcctttaacagccttagaaataaaataagaaacgtgagggaatttctacacgcacaaagatagttcaagttcttcccatataggtatgtgcaaatgtgtaataaacgtactagttcactattttttaaaacagatttctaacccacttttatgcaagaattttatggtaagttctata

SEQ ID NO: 86100 - DNA, 599 bp, Chicken  19866894386009_1
  misc_feature (1)..(90): n is any nucleotide
nnnnnnnnnnnnnnnnnnnnnnnnnnnnnnnnnnnnnnnnnnnnnnnnnnnnnnnnnnnnnnnnnnnnnnnnnnnnnnnnnnnnnnnnnntgtctttggtttgtgtggaatcatgtaacatgtattgttgctgttcagggctttctttaatggtaatttcatcttttctattgcattgcctgtgcagcctcaactgttaagtttgttatttctagttttatttgtgtgtgctcttgtttgtataacttagtttggacattaagcagtgcttgtcaggctcatttgcagggaaagaactgmagaattgtgctgcaatatatttgggtgagaagtcgctcttcatctggttgaggtaatagacccagaatcgcttcactggttgtcaaagagygaaacacgggactgcctgtcagtgggtgtgagcaggtgcacactcctttctgaaagggaaacaaatgagcagcatgtcaaaactaaatctgagttttgccaaagtaagttgcatattgccttactcatcaaaggcagagcagaggcagcactctccttcagaggttcctcaaaagctatggaaatggcctttctctcccgctggcggt

SEQ ID NO: 86101 - DNA, 600 bp, Chicken  19866894386009_2
gtctttggtttgtgtggaatcatgtaacatgtattgttgctgttcagggctttctttaatggtaatttcatcttttctattgcattgcctgtgcagcctcaactgttaagtttgttatttctagttttatttgtgtgtgctcttgtttgtataacttagtttggacattaagcagtgcttgtcaggctcatttgcagggaaagaactgmagaattgtgctgcaatatatttgggtgagaagtcgctcttcatctggttgaggtaatagacccagaatcgcttcactggttgtcaaagagygaaacacgggactgcctgtcagtgggtgtgagcaggtgcacactcctttctgaaagggaaacaaatgagcagcatgtcaaaactaaatctgagttttgccaaagtaagttgcatattgccttactcatcaaaggcagagcagaggcagcactctccttcagaggttcctcaaaagctatggaaatggcctttctctcccgctggcggtagaggaagattcctgttactgtcagactcctttgctacacttgtgcaaggatctgttgtggtgctctgtgaaaataatggttgagtatctcc

SEQ ID NO: 86102 - DNA, 600 bp, Chicken  19866894386016_1
gctgtgtgcatttgtcaacagccaggtgtccaggtgcaaaaatgatgaatggactcatcaggagaacagggagactgaggtttcagggttagcatttttccttctaagctaagtgaagtgaacagaattaactgtctaaggacaggtacaattcttagatttacatgtatactgacacagctctgtattaactctcccaatgaaagaggcaaaagctactgtagctacctacaggcattgtcatggtggttctcctgcagtgttccaatttgtcagagagaaactttcacaaaactttcstaacttgaaacaccaaagaagagactttttaaaaaacaaaaccaaatgaaaaacaaagccaacctgacaaatgataaaactaaaatggagatttctctgatttgtttcatctggcagttacttgtggttaggctttatgtacctgttttaagaacaatacctgctattgacataaaattaacctctcctagaacaaagtagtgagggaacaagatcaaatggtgtaaactcattcatcttaatgagatttaagagaggtgtcacaagggagacctcttctggttttttttaaacaaggtg

SEQ ID NO: 86103 - DNA, 600 bp, Chicken  19866894386019_1
gaaggcttaaagttctcagtgattaattctactcatattctgccacaaactggtggcaccagaccggtctggtgcatggaaccactctgcaggctgagcagccagagaagatcccgaaacctgaaggccatggcaggagtcccatcactgtaaatgctggagcagtgcagaagtcccatccatttcatacaggggtaggggaagagaaatacccactttgggacataaggaagaaatttttcattacgagcatgatgaggccctggcactggctgcccagagaagttgtggatgccccayccctggaaatgttaaaagctgggttggaaagtgctttgagcaaacagacctagtggaaggtgtccctgtccatggcagaggatgaactggatgaactttaaggtctcttccaaccccaaccattctatgatctgagttgttgagcacagagctccgatactgaatgggccagcaggttttggctattgattgcccatgcatcaacagatgacttttgggaaatagttttctatgccagaatcttagaaagacaaaggatctattttgacaaaacgtgtctgttcaacagaacactttaaa

SEQ ID NO: 86104 - DNA, 443 bp, Chicken  19866894386030_1
gaatgattactagggtcagtgacctggagaataaggataaacgtcctgtgttatgagcagaactttcaaataatatggggaacatagagatccatgagggaaaatagcagagttatcctacagtggaaagggagagcttgtttaacaagatgctttctcctttccagaaggaacagttctagtggtagaatactgcacaaagctgtctgcagctctgccagcctgtactctcagatgagcccaaagtcatggcattgagttaaaaaccccagaaccatgcaggtagaaagagtgcagacstctggaaggcccaaccagctgctcagagcaagttcacatcatctcacactggttcactcagggctttactcagtatgggcttagaaacttctaaggcttgagatagcacaacttcaatgtgccatcaattcaagaaaattcaa

SEQ ID NO: 86105 - DNA, 529 bp, Chicken  19866894386033_1
agtcaatgaggagatctgaggatttctatagacttcctaatcttcaaaggatttttaaaatattaaggttttttatcatttataacttcttatatgggacagagcagatataaaaagcctctaggcaaacataaaacaaaaatactttcaaaaaaaatcaaaacattgaaaagtagcccacctccctcagagaagaaggcaatctcagatttatcatcttatccaaggtaataacaaaattccagtcctgctcagtggcaattcagaacagaagggcagtagttttgagagtaaattgtragactgtgaactgtcaagtgacacaggtaagcacagccccttggagtggaaattgaacacagaaccaaaatgttgtaacagaatattctcttagcatgctaaacaaagctaaaactaattagcatgcctgctcttccctttrccattgatgtctgtgatcccacgggagttttaatggagcaatatactgcaaactgcccgatttttggtactggttttactgctaatg

SEQ ID NO: 86106 - DNA, 387 bp, Chicken  19866894386033_2
tactttcaaaaaaaatcaaaacattgaaaagtagcccacctccctcagagaagaaggcaatctcagatttatcatcttatccaaggtaataacaaaattccagtcctgctcagtggcaattcagaacagaagggcagtagttttgagagtaaattgtragactgtgaactgtcaagtgacacaggtaagcacagccccttggagtggaaattgaacacagaaccaaaatgttgtaacagaatattctcttagcatgctaaacaaagctaaaactaattagcatgcctgctcttccctttrccattgatgtctgtgatcccacgggagttttaatggagcaatatactgcaaactgcccgatttttggtactggttttactgctaatg

SEQ ID NO: 86107 - DNA, 600 bp, Chicken  19866894386034_1
agctcagcagagcgaggtgctttcatttgcagacgtatctctcgacagtcctctcacactttttacaggtgacatagcagcaccagtggtatttgcagtggcaccgctccaccactttgtccatgtaggggttgtagcctctgccgcagcacatcaggtcacagctgtcgctcccattggaggtcttgttgcattgcctggaggaaaggaaacacggtgagtgagtgtgaagcccagcagggctttctgaaccaatgatgacaagctctgcaattggacctattggagcaggtcaggagragtccacgaggatgctcagagactggagcatatctgctatggagacaggcagagagctgggggttgctgagcctgaagagggctctgagaagaccttacggtggctttccagtgcctaaagggtctgtagaagagctggaagggtctacactgtcagggatgtagtgacacaacaagtagaaatggctttaagctcctgagcagactcttacagccattatttagctctgaacttatcaggaaaatcacaaccaatacacaaacatcacactcatttttaagaaggttaagaaggatgac

SEQ ID NO: 86108 - DNA, 599 bp, Chicken  19866894386041_1
  misc_feature (1)..(164): n is any nucleotide
nnnnnnnnnnnnnnnnnnnnnnnnnnnnnnnnnnnnnnnnnnnnnnnnnnnnnnnnnnnnnnnnnnnnnnnnnnnnnnnnnnnnnnnnnnnnnnnnnnnnnnnnnnnnnnnnnnnnnnnnnnnnnnnnnnnnnnnnnnnnnnnnnnnnnnnnnnnnnnnnnnnnttttacctgcatttggtcagggctgaaggacatatattccctgaaacaaaaagatatggcaagtgattcataaacaccatcatataagagtgcatagcatatatggctgatggcaaaaaagcaaccagctcacacyatagttttcatcagcaaaggtggtttcctcaaatgttttatattggctttaacagctgacattgtgctcttgacacttgtcatctaaagacagagaatttgatgagggtcatttcacagaaggaagctacactcaggcgctgatacgtggcatttgggacgtggccaggacaggtactgaatcccatctttcagactggctgagcccaggactaggtgagcggtgaggaatgggaatgttagttctaagctgggacctggattttgagcttattccyttctgcttctctaatggaaaag

SEQ ID NO: 86109 - DNA, 600 bp, Chicken  19866894386041_2
caaaaaagcaaccagctcacacyatagttttcatcagcaaaggtggtttcctcaaatgttttatattggctttaacagctgacattgtgctcttgacacttgtcatctaaagacagagaatttgatgagggtcatttcacagaaggaagctacactcaggcgctgatacgtggcatttgggacgtggccaggacaggtactgaatcccatctttcagactggctgagcccaggactaggtgagcggtgaggaatgggaatgttagttctaagctgggacctggattttgagcttattccyttctgcttctctaatggaaaagcccaaatcctgtaagtgaatgccctcaagcttcaagacccctaagctgtggtggcatctgttccaaacacctcaaaaggataacagaagattacccttgagccagtaggctgtacaaacctccatgtactccctctatttgccaaaggcaccaaatgggctttggtcagttgttcaactgttcttggtttaagccaagagaacttaaggctgtaacagctgccatatccttgcaccgctgtgtctagcccctgcaattgggcaaggcctcaaggatag

SEQ ID NO: 86110 - DNA, 567 bp, Chicken  19866894386044_1
gtttagcaagcttaaccttgatgttcagaagaccccaaggatgtcataacacagacataatgcagaggtgtgggagaacatgacaccttaatatttcttgaactagtgttggcatatgggggatacagattgtgtctctttttaacacatctctgcaccgggatcagccttacacctgaaatatgtttccttcctcccttcctgcagggcaaatgaaaatatgaaggctctgagatgatgctgtgttgtcacagttggttacagttcttatgctatacagctctgaagaaattcaaagcygttcctttccctaaagtcttccttcaaagctgaaactgagcatctctctctgcatgttctctcattgctctgttttcttgctgtgccactgctgactggaagacaggttctgccctcccaggagaaaagcagttcccggggggctctcaagctgtgtggaagtatgagaaagcagcaggctcacaaaatagtgcctgttcctctgagattttgctcatgtcccgggctgcttccattattgctgatctgttgcaaggtccctcgcag

SEQ ID NO: 86111 - DNA, 599 bp, Chicken  19866894386046_1
  misc_feature (1)..(223): n is any nucleotide
nnnnnnnnnnnnnnnnnnnnnnnnnnnnnnnnnnnnnnnnnnnnnnnnnnnnnnnnnnnnnnnnnnnnnnnnnnnnnnnnnnnnnnnnnnnnnnnnnnnnnnnnnnnnnnnnnnnnnnnnnnnnnnnnnnnnnnnnnnnnnnnnnnnnnnnnnnnnnnnnnnnnnnnnnnnnnnnnnnnnnnnnnnnnnnnnnnnnnnnnnnnnnnnnnnnnnnnnnnnnnnnttgtgaagtattgagcagaaaagctgtttcgggaagggagcggtgacaacattaattttttcccactaaaacatccygggaactcagctttatggctttaggcattaaggaaaaaaaaaaatgcatttcttatcagtgtgagtgtatcactgagtcagagcttggcaagcctagcatcaagggtcaatctaacttttatgtgaacattaacgacttacmcagatcctcccaagattactctactctgtcccacagttgaaagtcttttctttcattattccatgtagtttgtatctaaaaaacatcctcacctgaaagtatggaaacttttcgaatcaaagtatcctgtttgcgcgccagtatgcacttctgtcca

SEQ ID NO: 86112 - DNA, 599 bp, Chicken  19866894386046_2
  misc_feature (1)..(81): n is any nucleotide
nnnnnnnnnnnnnnnnnnnnnnnnnnnnnnnnnnnnnnnnnnnnnnnnnnnnnnnnnnnnnnnnnnnnnnnnnnnnnnnnnttgtgaagtattgagcagaaaagctgtttcgggaagggagcggtgacaacattaattttttcccactaaaacatccygggaactcagctttatggctttaggcattaaggaaaaaaaaaaatgcatttcttatcagtgtgagtgtatcactgagtcagagcttggcaagcctagcatcaagggtcaatctaacttttatgtgaacattaacgacttacmcagatcctcccaagattactctactctgtcccacagttgaaagtcttttctttcattattccatgtagtttgtatctaaaaaacatcctcacctgaaagtatggaaacttttcgaatcaaagtatcctgtttgcgcgccagtatgcacttctgtccagtaagtttatctgcttgatcagtcaatccctggatttcatccaaggcctagaaaaatgtcaggaaaattatttmtaaacaaagaacacacaaaattacacaatatttttccttccaagaaagctttatgaaatttatttaga

SEQ ID NO: 86113 - DNA, 600 bp, Chicken  19866894386046_3
tgagtcagagcttggcaagcctagcatcaagggtcaatctaacttttatgtgaacattaacgacttacmcagatcctcccaagattactctactctgtcccacagttgaaagtcttttctttcattattccatgtagtttgtatctaaaaaacatcctcacctgaaagtatggaaacttttcgaatcaaagtatcctgtttgcgcgccagtatgcacttctgtccagtaagtttatctgcttgatcagtcaatccctggatttcatccaaggcctagaaaaatgtcaggaaaattatttmtaaacaaagaacacacaaaattacacaatatttttccttccaagaaagctttatgaaatttatttagacattttcatcacygtgagaaagcaggactcagaatgagaatgtaaagtatatcacataaagctagctttcccaaaatgcaagctgaaaagcaatraacatactggtcaccctccctttcccaagttcctccattttaaagaaaaaaagtcttttatctcaccatgtcagggaacagctgacaaacataattatgtatctacaacttatgggtttggttcttgacatttacat

SEQ ID NO: 86114 - DNA, 554 bp, Chicken  19866894386046_4
agattactctactctgtcccacagttgaaagtcttttctttcattattccatgtagtttgtatctaaaaaacatcctcacctgaaagtatggaaacttttcgaatcaaagtatcctgtttgcgcgccagtatgcacttctgtccagtaagtttatctgcttgatcagtcaatccctggatttcatccaaggcctagaaaaatgtcaggaaaattatttmtaaacaaagaacacacaaaattacacaatatttttccttccaagaaagctttatgaaatttatttagacattttcatcacygtgagaaagcaggactcagaatgagaatgtaaagtatatcacataaagctagctttcccaaaatgcaagctgaaaagcaatraacatactggtcaccctccctttcccaagttcctccattttaaagaaaaaaagtcttttatctcaccatgtcagggaacagctgacaaacataattatgtatctacaacttatgggtttggttcttgacatttacatgatggggggcagtgcaagttaacagatgacacaaa

SEQ ID NO: 86115 - DNA, 472 bp, Chicken  19866894386046_5
gaaagtatggaaacttttcgaatcaaagtatcctgtttgcgcgccagtatgcacttctgtccagtaagtttatctgcttgatcagtcaatccctggatttcatccaaggcctagaaaaatgtcaggaaaattatttmtaaacaaagaacacacaaaattacacaatatttttccttccaagaaagctttatgaaatttatttagacattttcatcacygtgagaaagcaggactcagaatgagaatgtaaagtatatcacataaagctagctttcccaaaatgcaagctgaaaagcaatraacatactggtcaccctccctttcccaagttcctccattttaaagaaaaaaagtcttttatctcaccatgtcagggaacagctgacaaacataattatgtatctacaacttatgggtttggttcttgacatttacatgatggggggcagtgcaagttaacagatgacacaaa

SEQ ID NO: 86116 - DNA, 538 bp, Chicken  19866894386051_1
tctctgctttcactgcttaaacacacacatcattcactagtaaccatttactctgctgtcaaaactgtttcaagagagtgctacatttgattaatagtaaaatgcatgcatgcaaaaaaaaagcatgcctcccctgaggtactcattttggacaattttttgcatgtactttttaatttttccatgctacaaatatgcctgtaatattccaagagagctgtgttgcttgtagtaaagtcctttttatttagaaagcttagtgcactaaccctaattctagttaaaactctttctcactgwggcatatcacagcatcctcagactcttgtgctaaagaaaaagtgaccagcacaaacgtgtgtagcccatgattcatagtgcttctctctgaattgtccagtgggtaattgcagtacaaaaaccagagaaacagatgtagaccctaaacctcggctgtaaatttttgttttatgattatgggtttcaaatgtgctatgtcacactgacaaatatacagtaacaccaaaggaaatagatt

SEQ ID NO: 86117 - DNA, 599 bp, Chicken  19866894386053_1
  misc_feature (1)..(228): n is any nucleotide
nnnnnnnnnnnnnnnnnnnnnnnnnnnnnnnnnnnnnnnnnnnnnnnnnnnnnnnnnnnnnnnnnnnnnnnnnnnnnnnnnnnnnnnnnnnnnnnnnnnnnnnnnnnnnnnnnnnnnnnnnnnnnnnnnnnnnnnnnnnnnnnnnnnnnnnnnnnnnnnnnnnnnnnnnnnnnnnnnnnnnnnnnnnnnnnnnnnnnnnnnnnnnnnnnnnnnnnnnnnnnnnnnnnntgccctcctcccaggcagagtgaaagcacagagcctgcagctttcgtcccatctctgcctcctgcagctccyaggacaccctgtgctcagtgacagcgagcccctgcccttcatctcccagcatccccctgcaaacatgtcccggcatggggttattccatctcatcctctgggagaggggtcccagcatcctgtgcctgcaccctggtgaccctacgggatccctcaccagtaggtagggagcactgggggcacgggccgtgcactggctcacaccacctcaaccaggctgtggttgcagcgtcgtggcgctcaggcgttgcggtttgcaggcagcggcgcgcacaaaccagaaagaacaaactgttcag

SEQ ID NO: 86118 - DNA, 599 bp, Chicken  19866894386056_1
  misc_feature (1)..(169): n is any nucleotide
nnnnnnnnnnnnnnnnnnnnnnnnnnnnnnnnnnnnnnnnnnnnnnnnnnnnnnnnnnnnnnnnnnnnnnnnnnnnnnnnnnnnnnnnnnnnnnnnnnnnnnnnnnnnnnnnnnnnnnnnnnnnnnnnnnnnnnnnnnnnnnnnnnnnnnnnnnnnnnnnnnnnnnnnntggtctgctataatttatttttagatgccttttatgcctgcttttttttttagatggagtacctgagaagcatacatccttacatcttaaccctcacttgattgtagttgtgtttctaatatatctttgcytttttttttatagaagctgggcccttatctgtgattaagtaatagaagtggtatgtaggtgtgccaaccaaccatttacaacatgacttcattgtgatgccaatgatgtaatagctagccagcatattgctcagggtacagtgtaatgtccaagtataccttattcagtatttttacatgtaattaaaaagcaaagattaaagtaatattgggtgagtttttaactggtcccctaayactgaagttctagatcaaactagtattcacatggttgctgcaagaagagctgtcctactgag

SEQ ID NO: 86119 - DNA, 600 bp, Chicken  19866894386056_2
agcatacatccttacatcttaaccctcacttgattgtagttgtgtttctaatatatctttgcttttttttttatagaagctgggcccttatctgtgattaagtaatagaagtggtatgtaggtgtgccaaccaaccatttacaacatgacttcattgtgatgccaatgatgtaatagctagccagcatattgctcagggtacagtgtaatgtccaagtataccttattcagtatttttacatgtaattaaaaagcaaagattaaagtaatattgggtgagtttttaactggtcccctaayactgaagttctagatcaaactagtattcacatggttgctgcaagaagagctgtcctactgagtggtgttgtggaatgaactgtaaggaattgctgccttttctttctactctggagaaaatctagttyggaagatttgaatagagttaaattgtaaaacagtttatttttaagcccctttcatatgcttgctcaagtgaggaattgaatggtatgaagtatcttcagtgttgatggctcaccatagcaaaatgaaggatgggaagtctaccctctataagggtttatagctaaaagactg

SEQ ID NO: 86120 - DNA, 481 bp, Chicken  19866894386056_3
aaccaaccatttacaacatgacttcattgtgatgccaatgatgtaatagctagccagcatattgctcagggtacagtgtaatgtccaagtataccttattcagtatttttacatgtaattaaaaagcaaagattaaagtaatattgggtgagtttttaactggtcccctaayactgaagttctagatcaaactagtattcacatggttgctgcaagaagagctgtcctactgagtggtgttgtggaatgaactgtaaggaattgctgccttttctttctactctggagaaaatctagttyggaagatttgaatagagttaaattgtaaaacagtttatttttaagcccctttcatatgcttgctcaagtgaggaattgaatggtatgaagtatcttcagtgttgatggctcaccatagcaaaatgaaggatgggaagtctaccctctataagggtttatagctaaaagactgtgggtagat

SEQ ID NO: 86121 - DNA, 600 bp, Chicken  19866894386057_1
tgcagctcagcagtgctctgcttacaaaacctgccacagccgtagccccgagtcttattatcatcctataagccagcccttgttattatattatgccaaaataataattaaaatgcgtacaaggaaaacagagaggctcaaaagtaattaatgttacttgatattcgtgttagatcttgcattgcatttactggtgaattttcactactgtgctatcttttcccttcccatccctttttacctacttggatatcatcgtgagctattcgtagctactacagcagcctctaaaacaaagtraacgcttcttccagaacctctgtatgatatgggtcaagagcaatctgctccccccagaaaatcctcctctgctccaaaggttccttttagccatttccattttggtgaacactgacactgcacatcaagctagaggaccgagaaaacctggtaccgcagccactaaatggctgcctcttattgcagggaaataatgagctactcatttaatcacttccagcccagctcaatatatcaaaaggcaattccacctcgtccttagcttgaattctaaagatccaactgtgatgaaaaatttca

SEQ ID NO: 86122 - DNA, 600 bp, Chicken  19866894386059_1
tttccttagcatttttgagctactagttttcagcaacaatccgaattgtgtttttgtggatggtggacgatgtagaccctatgtatacagagatagagagagatacctattgcttgtttaggtgccgtgtagcattggtaaggctgtattattccactgtatagttgagctttcatttttaacaggaatttatatataaaacgtggacttctagagaaacagtgtgtttttctctggggcaatcactgatggaggtgaggggctttgtttcaaaagccccagttgctgttatctttaaarggttcttggctttgttcattcctgttgtaagatactctaactacttccttttgatgagcacatcagcaagtaatacaaacaaggggaaatacaaaattaaatggagattgagttccagtttcgatgcctggttacttctgtgttagcccttcctttccagttttgactgtgagcagaacatggctgaatatctagacagggtttttcggtcaacaacagatacctgcgtaaaggttgttgatgaagtgcaggagacttcttgttctgaagaacctgcatgcacatctaggcactgaagtt

SEQ ID NO: 86123 - DNA, 600 bp, Chicken  19866894386059_2
tcctgttgtaagatactctaactacttccttttgatgagcacatcagcaagtaatacaaacaaggggaaatacaaaattaaatggagattgagttccagtttcgatgcctggttacttctgtgttagcccttcctttccagttttgactgtgagcagaacatggctgaatatctagacagggtttttcggtcaacaacagatacctgcgtaaaggttgttgatgaagtgcaggagacttcttgttctgaagaacctgcatgcacatctaggcactgaagttaaaatctaagtttctgctwtggacacttggagggagatttagtgctgctttcatgctagttctgttgaggatgcagacataggtttcagaaggcatccttccattagaagcatatggaatctacaaacagagtgtgattgcaagtggcttgtgggaaagtgaggatgttcggtgctctcaactgcatcctttttgttcccaggaaactgaattaattcagctggaggcaacatgttaatacatttaaaaacaaaagaaatacaggcatgggtgtcgagaatttgttaccaaagcctactttctattatttgctttgttt

SEQ ID NO: 86124 - DNA, 568 bp, Chicken  19866894386059_3
gaggatgcagacataggtttcagaaggcatccttccattagaagcatatggaatctacaaacagagtgtgattgcaagtggcttgtgggaaagtgaggatgttcggtgctctcaactgcatcctttttgttcccaggaaactgaattaattcagctggaggcaacatgttaatacatttaaaaacaaaagaaatacaggcatgggtgtcgagaatttgttaccaaagcctactttctattatttgctttgtttttttgagatggttcaaactgcaggtgtggtgaagatggggctgagcrgagggggaggaaggctgggactgcaggcctgwggtgcagcaggtgcatgtgggtaaagaactgtccatcctctatctctccgaactgtttctgctttcactgggtacctggggagattattatgaggggaagaagcttagttcctgaatcccagatcagctgaagcaagggtttagtacaatacgtgaggaacggggcttgctcccctactgctggtaatgcaggttctgtaacatggatttctgggcacagaaagtacaacttttta

SEQ ID NO: 86125 - DNA, 536 bp, Chicken  19866894386059_4
ttccattagaagcatatggaatctacaaacagagtgtgattgcaagtggcttgtgggaaagtgaggatgttcggtgctctcaactgcatcctttttgttcccaggaaactgaattaattcagctggaggcaacatgttaatacatttaaaaacaaaagaaatacaggcatgggtgtcgagaatttgttaccaaagcctactttctattatttgctttgtttttttgagatggttcaaactgcaggtgtggtgaagatggggctgagcrgagggggaggaaggctgggactgcaggcctgwggtgcagcaggtgcatgtgggtaaagaactgtccatcctctatctctccgaactgtttctgctttcactgggtacctggggagattattatgaggggaagaagcttagttcctgaatcccagatcagctgaagcaagggtttagtacaatacgtgaggaacggggcttgctcccctactgctggtaatgcaggttctgtaacatggatttctgggcacagaaagtacaacttttta

SEQ ID NO: 86126 - DNA, 600 bp, Chicken  19866894386060_1
acctttaaactttcttgtttcaaattcataaacactgggaaaaaatagaaatacgctgtagctgaatgctagaagaatatgatttatgaaatgtcaagtgattgtcactcatgtaagtggaacgtagcttgtaatttttctattatttggaggagtgcagtagtatttttgctaaatatgtagtatgtgtcttatgcagaaatacaggtttggtgctcccacaaaacatgggttcattacgctggttttgagaaatgctgggggttgtttttcacaccctcccccagctgaaagtactcycgagtctcagactgcctcccgctgcttagctctcagcaaacccgttattgctggctaaaggaatactttaaaacctctcaaacaatctacagcaaatctaattttaacgtgatttagttgacctctgaaaggtggtgccgaagaatgacagttctgcacttcaagctcttggagagatgtctacagctgcaatctggcatgtataataaattaggtttcctgcaagtgtgtttgagctgcttggtgtgactgtttggttagggaaaatagcggccttagatgttttgtgatgagaaagtt

SEQ ID NO: 86127 - DNA, 600 bp, Chicken  19866894386072_1
ttctgcagtgtgctcacagcttttcctagttaaaaagctggacagctggcagctcagagcagtttgcaccatcccatcctgctgggttcatcaccgcagctcagtggctctcatcaaaatacaagcaaaccccattcccaggcttcccacaatctcttctccctcccatctcatcagaactgaaagagtgctccaaaaaaatcagcaccatttgtgatgtgcttatgtcctcagctacgaacaaagctctcttcccaagagatccagcagtttgcaatgctcctgcacgaatatcgcaayggagcctcgatacacgagttctgcatcaacttgaagcagctctatggggacagtaggaagttcctgctcttgggtgagtgtcttccctctgtgtctggctttgcttgtgcctgctgctggttgtcttctgagttccgtatgagctccttggctcctgaaacaccttggtttggtggcttaatggtagcactcgatgtccctgcatccctggagcagatgctgggtcctggccaagcactgaggtgttcaacacagtacagttttgggtgttcagcttgttggactgatgagggtgcctca

SEQ ID NO: 86128 - DNA, 600 bp, Chicken  19866894386075_1
atattgtgatatgacagtgtggattgaaatttgggtgcagttgtaattccagcaacgttatagcatgcttctgttttcataatactgtaaaggatgaatgaaagtcaatctcttgtttcacaacctgatgagaaagtgaatactttcattggaatcctatggagatatatgatacatctaatggaaggatacatccagcaaggcttaggagcaggacctgtgtaatgatgcatcatgtagacagttaaatgcaggatggttgaatgttgtaggaaaaaaactagtgcttgctcacttgcrgaaagatacattattttagacactgaaaaaatcagataaggaatttaatcaatgtcattcttaaatgaggcccattttcagcattttttttttcttctgagtgtggagaattcacacacaggcatgagcttttgatattgttccttactttccagtataaggtacccacatgccaaatgaagatctctgttctcagtcatcagtattttcctactgccagtgcacattctacttagcccattttcaagggaatctgtggcacttcggccacaataaccccatgcagtgctataggcttgg

SEQ ID NO: 86129 - DNA, 600 bp, Chicken  19866894386078_1
gtgtatcaaaatccatgaacttatttgccataacttgagttatcactgcgctgtgccttgtgtccgtgttttagcccagagagggttaacaacacactgatgtctggttggtgctgatgtgaattaccttctgttagagcatacgctttccataaagctacgcttctgttgttgctgtttagaaagctttccaaatgctttcatgacttaattggttagtctgaatcaattggttgaataggtttattaagagcaatgaatgaaaattaaaaaattacttgatttgaggatttaaactgstgggaattataattctatatctacatgtataatcaagtttgactcataccctaatttatgtttggttcttaatagtgawcagtaacaattakagtggtgcagatttccaagctgtatctctaaaatcaaggctttctctgtgtctacactgtaacattaaactttaattatacattatttaggaaacctactgataagggttttttaaagccaaattcaggccataattagcatgcttttcatatttaatataatgacaccgttaacacctttctagtttctacatttcaaaaaatgttc

SEQ ID NO: 86130 - DNA, 600 bp, Chicken  19866894386078_2
agagggttaacaacacactgatgtctggttggtgctgatgtgaattaccttctgttagagcatacgctttccataaagctacgcttctgttgttgctgtttagaaagctttccaaatgctttcatgacttaattggttagtctgaatcaattggttgaataggtttattaagagcaatgaatgaaaattaaaaaattacttgatttgaggatttaaactgstgggaattataattctatatctacatgtataatcaagtttgactcataccctaatttatgtttggttcttaatagtgawcagtaacaattakagtggtgcagatttccaagctgtatctctaaaatcaaggctttctctgtgtctacactgtaacattaaactttaattatacattatttaggaaacctactgataagggttttttaaagccaaattcaggccataattagcatgcttttcatatttaatataatgacaccgttaacacctttctagtttctacatttcaaaaaatgttctctagttatcttttttttgtcsagagctccattgttttgttcactgagtgcttccacttcctttgcaaattctgtaaaa

SEQ ID NO: 86131 - DNA, 600 bp, Chicken  19866894386078_3
cacactgatgtctggttggtgctgatgtgaattaccttctgttagagcatacgctttccataaagctacgcttctgttgttgctgtttagaaagctttccaaatgctttcatgacttaattggttagtctgaatcaattggttgaataggtttattaagagcaatgaatgaaaattaaaaaattacttgatttgaggatttaaactgstgggaattataattctatatctacatgtataatcaagtttgactcataccctaatttatgtttggttcttaatagtgawcagtaacaattakagtggtgcagatttccaagctgtatctctaaaatcaaggctttctctgtgtctacactgtaacattaaactttaattatacattatttaggaaacctactgataagggttttttaaagccaaattcaggccataattagcatgcttttcatatttaatataatgacaccgttaacacctttctagtttctacatttcaaaaaatgttctctagttatcttttttttgtcsagagctccattgttttgttcactgagtgcttccacttcctttgcaaattctgtaaaactaactggccctt

SEQ ID NO: 86132 - DNA, 600 bp, Chicken  19866894386078_4
acatgtataatcaagtttgactcataccctaatttatgtttggttcttaatagtgawcagtaacaattakagtggtgcagatttccaagctgtatctctaaaatcaaggctttctctgtgtctacactgtaacattaaactttaattatacattatttaggaaacctactgataagggttttttaaagccaaattcaggccataattagcatgcttttcatatttaatataatgacaccgttaacacctttctagtttctacatttcaaaaaatgttctctagttatcttttttttgtcsagagctccattgttttgttcactgagtgcttccacttcctttgcaaattctgtaaaactaactggcccttaatgtcgtggctgtcaggtgaggtcctggatgactcgaggaaggatcacatcactcccatttataagaaggggagcaaggaggacctggggaacwacaggccagtgaccctcacctctgtacctggggagatcatggaacagatcctcctggacaacatgcttgatcacacgaggaatgagcgtgtgatccgagacagccagcacggcttcacaagggggaggtcatgct

SEQ ID NO: 86133 - DNA, 600 bp, Chicken  19866894386078_5
ctactgataagggttttttaaagccaaattcaggccataattagcatgcttttcatatttaatataatgacaccgttaacacctttctagtttctacatttcaaaaaatgttctctagttatcttttttttgtcsagagctccattgttttgttcactgagtgcttccacttcctttgcaaattctgtaaaactaactggcccttaatgtcgtggctgtcaggtgaggtcctggatgactcgaggaaggatcacatcactcccatttataagaaggggagcaaggaggacctggggaacwacaggccagtgaccctcacctctgtacctggggagatcatggaacagatcctcctggacaacatgcttgatcacacgaggaatgagcgtgtgatccgagacagccagcacggcttcacaagggggaggtcatgcttaaccaatctggtggccttctatgttggagtgacggcattggtggacaaggggaaggacactgatgtcatttaccgggactcgagcaaggcctttgacatgctcctcccacaacatcctgatctccaaattggacagatgtggatttgatgggtggaccacccag

SEQ ID NO: 86134 - DNA, 599 bp, Chicken  19866894386083_1
  misc_feature (1)..(239): n is any nucleotide
nnnnnnnnnnnnnnnnnnnnnnnnnnnnnnnnnnnnnnnnnnnnnnnnnnnnnnnnnnnnnnnnnnnnnnnnnnnnnnnnnnnnnnnnnnnnnnnnnnnnnnnnnnnnnnnnnnnnnnnnnnnnnnnnnnnnnnnnnnnnnnnnnnnnnnnnnnnnnnnnnnnnnnnnnnnnnnnnnnnnnnnnnnnnnnnnnnnnnnnnnnnnnnnnnnnnnnnnnnnnnnnnnnnnnnnnnnnnnnncggggtgagcgtcggaacggagctcccgctgcccccggccccacgcgcagagtgccaccckctcacccccagcacgtgcccttcgccaggcacgctgctctcaccagggcccaggcgtccccccctcaaaccggcggcacatcgagcagcgccgcccggcccgcaggcagccccccctgccctgcccctgccaggtaggtgccagccccgctctccccgtacccgatgggcaacagctccgtggcatcacccagcttctctcctgttgcccgcagaggtgtgggagcggccgtgccccaggtccgcagcacctccccgccagccgccgtgctgcagaatgggctggtgagtgtggggggc

SEQ ID NO: 86135 - DNA, 600 bp, Chicken  19866894386084_1
aacccaaatgtgcctcaccccgaaacgtggagggcagaatgcctgggtgcatcctcttggctgcagagctggcacccccgcagccagccagccagggatggcccaccccattgctccattcctcagcaagcctcaactggtccatgggagcacacagacccagcactgcccacagcgtgcccacacagacaccggtgtgagcgctgcccagcacctgcctgcacaagcatgctgaccccgtgctcccaccccacgctgccctgcagccaccacccagcagggctgctctccatcagctcstgggatggtgtgagcacgacgtgagtggcctcgctctgcacaaagcacctctcctggctggttggacccttccccgtgggtcacactggtcacctcccaccctgagtgcagcctcagcctctcaggtggtgcagggcaggcactggctggcttggttggtgaacacacatcagaaacatcaccagaaggccacgctgtcccagcagggcaggtttgcaggtggcttggaatgcttgagraatcccagataggcgctgcctctctgacaaccccaagtttgagcagaacagaccatgrgaa

SEQ ID NO: 86136 - DNA, 600 bp, Chicken  19866894386084_2
gtgctcccaccccacgctgccctgcagccaccacccagcagggctgctctccatcagctcstgggatggtgtgagcacgacgtgagtggcctcgctctgcacaaagcacctctcctggctggttggacccttccccgtgggtcacactggtcacctcccaccctgagtgcagcctcagcctctcaggtggtgcagggcaggcactggctggcttggttggtgaacacacatcagaaacatcaccagaaggccacgctgtcccagcagggcaggtttgcaggtggcttggaatgcttgagraatcccagataggcgctgcctctctgacaaccccaagtttgagcagaacagaccatgrgaatggtgtcatatccaagggagatgctcccatggggagggaagaggaacrtgcagaggttggaatgtctttacgcctgatacacaagctccaggcacagttgccttaagcaataccagccctttgactgtgctggctgaatcactttggcctcccaagatggggacactggatcgtgcacagacctgtacctctgagggctgtgagtctgccgagactgtcttgtgcaaggatcctggtgt

SEQ ID NO: 86137 - DNA, 600 bp, Chicken  19866894386084_3
tcstgggatggtgtgagcacgacgtgagtggcctcgctctgcacaaagcacctctcctggctggttggacccttccccgtgggtcacactggtcacctcccaccctgagtgcagcctcagcctctcaggtggtgcagggcaggcactggctggcttggttggtgaacacacatcagaaacatcaccagaaggccacgctgtcccagcagggcaggtttgcaggtggcttggaatgcttgagraatcccagataggcgctgcctctctgacaaccccaagtttgagcagaacagaccatgrgaatggtgtcatatccaagggagatgctcccatggggagggaagaggaacrtgcagaggttggaatgtctttacgcctgatacacaagctccaggcacagttgccttaagcaataccagccctttgactgtgctggctgaatcactttggcctcccaagatggggacactggatcgtgcacagacctgtacctctgagggctgtgagtctgccgagactgtcttgtgcaaggatcctggtgtgacgggaccacgtttctggctgttcaggtgtggtctctcccagtaaacaatccttcca

SEQ ID NO: 86138 - DNA, 600 bp, Chicken  19866894386084_4
ctctcctggctggttggacccttccccgtgggtcacactggtcacctcccaccctgagtgcagcctcagcctctcaggtggtgcagggcaggcactggctggcttggttggtgaacacacatcagaaacatcaccagaaggccacgctgtcccagcagggcaggtttgcaggtggcttggaatgcttgagraatcccagataggcgctgcctctctgacaaccccaagtttgagcagaacagaccatgrgaatggtgtcatatccaagggagatgctcccatggggagggaagaggaacrtgcagaggttggaatgtctttacgcctgatacacaagctccaggcacagttgccttaagcaataccagccctttgactgtgctggctgaatcactttggcctcccaagatggggacactggatcgtgcacagacctgtacctctgagggctgtgagtctgccgagactgtcttgtgcaaggatcctggtgtgacgggaccacgtttctggctgttcaggtgtggtctctcccagtaaacaatccttccatttctgaaattaaaacacggccctctggagcactgtgatttasgctgaccc

SEQ ID NO: 86139 - DNA, 600 bp, Chicken  19866894386084_5
gaggaacrtgcagaggttggaatgtctttacgcctgatacacaagctccaggcacagttgccttaagcaataccagccctttgactgtgctggctgaatcactttggcctcccaagatggggacactggatcgtgcacagacctgtacctctgagggctgtgagtctgccgagactgtcttgtgcaaggatcctggtgtgacgggaccacgtttctggctgttcaggtgtggtctctcccagtaaacaatccttccatttctgaaattaaaacacggccctctggagcactgtgatttasgctgaccccaatcagagtgacctcacctcctcctgtgggcgtgcagccatcctcccctcagcagcagctctcagtgtcagctccagggtggaccccccggaccctgagatgtccttcctttgrgagggaaccatttatctctgtatgacatccctgctgcctttttgtgctttatccaacttgtctcctctgctggtaagagcaggactgcatgccagcatccaatgtctattagaatagagctgaaggtgtggtagatgatgtctgtggctgtagaaggcatctggattgctttggcac

SEQ ID NO: 86140 - DNA, 600 bp, Chicken  19866894386084_6
cactggatcgtgcacagacctgtacctctgagggctgtgagtctgccgagactgtcttgtgcaaggatcctggtgtgacgggaccacgtttctggctgttcaggtgtggtctctcccagtaaacaatccttccatttctgaaattaaaacacggccctctggagcactgtgatttasgctgaccccaatcagagtgacctcacctcctcctgtgggcgtgcagccatcctcccctcagcagcagctctcagtgtcagctccagggtggaccccccggaccctgagatgtccttcctttgrgagggaaccatttatctctgtatgacatccctgctgcctttttgtgctttatccaacttgtctcctctgctggtaagagcaggactgcatgccagcatccaatgtctattagaatagagctgaaggtgtggtagatgatgtctgtggctgtagaaggcatctggattgctttggcacagcagttttgacaggccagcactgactgctgcatgcatcactgttctgctggtgcacacagaaagttcccgtcctcttctagagatgtaacagttgtgtggtctgtatttctctacagctccc

SEQ ID NO: 86141 - DNA, 600 bp, Chicken  19866894386089_1
cctttctcttttaaatgtatgatatttggaatttcacaagaatcttccaagagaactacttaggaaagttagttacactactcactcaaattctgctgaaacagctgcacctgtatcttcctccagattatgccacatcttgtccaatacaacataagctataataacagcactgagttttcagtatctctgttcctttgagaagttaatttacttgcacacaacccaagcaagttgcatacttataagtacgtggtacgataattgtgttcacaacaattctgtagcagtccccttttkaaaagactaagataaaaaaatgatggcacaatctctatcaataaagttcttttmcaaaccacttcagaaaatcagagccactacaccaggcagcagcgttaagaatgtaactcttgcagattttcatctctgacagcctaatttaatttctaatatattttagctagaacacacagctaccatggtcaacactgttcagacaagcgttatcttacataaatcactttaagagtgacacattacaagatttttgaagagtaatggagcaaaatgctcctgataagtagtgactccccttcc

SEQ ID NO: 86142 - DNA, 565 bp, Chicken  19866894386089_2
actacttaggaaagttagttacactactcactcaaattctgctgaaacagctgcacctgtatcttcctccagattatgccacatcttgtccaatacaacataagctataataacagcactgagttttcagtatctctgttcctttgagaagttaatttacttgcacacaacccaagcaagttgcatacttataagtacgtggtacgataattgtgttcacaacaattctgtagcagtccccttttkaaaagactaagataaaaaaatgatggcacaatctctatcaataaagttcttttmcaaaccacttcagaaaatcagagccactacaccaggcagcagcgttaagaatgtaactcttgcagattttcatctctgacagcctaatttaatttctaatatattttagctagaacacacagctaccatggtcaacactgttcagacaagcgttatcttacataaatcactttaagagtgacacattacaagatttttgaagagtaatggagcaaaatgctcctgataagtagtgactccccttcccttcccttcccttcccttc

SEQ ID NO: 86143 - DNA, 600 bp, Chicken  19866894386096_1
ctcctggataaaagtgataggacaagaaggaatggccttaagttacaccagggggaggttcaggttgggtattaggaagaatttcttctcaggagtggtgaggtattggaacaggctgctcagggaggtggtataatcactctccctgaaggtgtccaagaaccatgtagatgtggcactgacggatacgcttagtgggcatagtggtaatgtgttgacagttggatttgcttttagagatctattacaacattaatgattctatgtctcaagacagtgttggtagtctgacaggcctgrcttcactcgtcatgttaatttgctctgaccagttaacagtgaccctggaaattgccttatgcctgcgttttakataaggactgtaggagaactgcacacagtaatggttaacaaccctgatcagttgggatgcaggactgtgaagggccttcctttccctctctttatttcaagcttccagggtgaagggtagccatcactcgagagatgtcaacctatacatggactcctcctaagaagggcagagctgtgtatggcaggagcactgggggccttctgaaggacccctgctgctgctgc

SEQ ID NO: 86144 - DNA, 600 bp, Chicken  19866894386096_2
aggaagaatttcttctcaggagtggtgaggtattggaacaggctgctcagggaggtggtataatcactctccctgaaggtgtccaagaaccatgtagatgtggcactgacggatacgcttagtgggcatagtggtaatgtgttgacagttggatttgcttttagagatctattacaacattaatgattctatgtctcaagacagtgttggtagtctgacaggcctgrcttcactcgtcatgttaatttgctctgaccagttaacagtgaccctggaaattgccttatgcctgcgttttakataaggactgtaggagaactgcacacagtaatggttaacaaccctgatcagttgggatgcaggactgtgaagggccttcctttccctctctttatttcaagcttccagggtgaagggtagccatcactcgagagatgtcaacctatacatggactcctcctaagaagggcagagctgtgtatggcaggagcactgggggccttctgaaggacccctgctgctgctgctgctgcccacaccctcaacaaggcaaccttctggatgcctgtcccacctcactgcacatcagtccctgcagtt

SEQ ID NO: 86145 - DNA, 600 bp, Chicken  19866894386104_1
ggtgatgggtggatggttggactggggtgatcctgtggctcttttccaaccttggtgattctatgattctatataacaactttctgagatgttaaagtgacttttgatacatatttagctgttgatttaataaaagaaaaagacctattgagcctggtgatagactgagtatcagatattttttcagtttagaaaggttagaaacaggcaaactgatatagctaatgattgctccgaaagtaatgcctcctatttatttccatggaaaatacaacatctataaataccacagtaacactwcttgttagagctaattgtcagctagaaaacactattttttcaacacagccaccactattagctatgcatttttttttccagtgaagaacaagagcctacatgccacctccataaaagtctgcatcagtggaggtgaatcactgttgctgtcagcactgctgaaatacagtacctcactgtgttcacatccactctgttatctccataaatgctcagaaagcatcaatgaatgttaacggatgtacttttttttttctgcatacaggaattcaatgacacacctttgctccatttgcactt

SEQ ID NO: 86146 - DNA, 474 bp, Chicken  19866894386104_2
ctactgccgtaccaccaaaatccacctctgatgttgtggacaacataataaaacagaaggtgttactttcagagcaaaactcgtgtgaataattatatatatgcatatataaatttttacatgagagctctctgctatgattgtatttaacgatttaaagtattcccccagatgacattcccattctaacatcaaaataaagcaataatgcagttttaaaactggtttatgtacatttccatggaacacagcacctccagtcaaaggcaagagctccctctagataatagcttgggaaawttttctaagcctaggattggaagtgaattttgaagaaaacggggctgtcaatgacttagaaaccacaaaagcatagttgtcactattctgaggaaacttggaatttatctcctgattttatgtttataaagaataaatgatttgattaaaaaataaaataaaaaacatcagcac

SEQ ID NO: 86147 - DNA, 600 bp, Chicken  19866894386106_1
agcaagttacaggcacaccaccagcacagcctgtccatgcaggcacatgagagatgcctgaggaccaagcagtcgaatcatctcatgagcgaatagatgggagaaacctggtggtgaatgcggcagaaaaggaggcagatgagcttacaccgtgggaagtgaagctcttagatgggggaaaggcatgttaggaaacagactttgggctttgctacgatttatggttccacagggcacatttaagacacaggaggcttcctccctttcacctggtaaaacccaacctatcggctctctctyccaccaagaagcccattggtccttgactacgcaggagggtttattttgcttctcrgtcagctggggagtaagcattcaaaagggcttagctctacaacacaattcctctcaccagtattcttacaaccgcttctcctttttgttttatttattgatattttgcgggccttatttcacaaaakctttattggaaaagcagcgctgctaaccgaagggctgttttcacttttactggaaaggcttttctgagtattagctttggattggcaaattttcagtaatttgtactctcagcaatac

SEQ ID NO: 86148 - DNA, 564 bp, Chicken  19866894386106_2
gcctgaggaccaagcagtcgaatcatctcatgagcgaatagatgggagaaacctggtggtgaatgcggcagaaaaggaggcagatgagcttacaccgtgggaagtgaagctcttagatgggggaaaggcatgttaggaaacagactttgggctttgctacgatttatggttccacagggcacatttaagacacaggaggcttcctccctttcacctggtaaaacccaacctatcggctctctctyccaccaagaagcccattggtccttgactacgcaggagggtttattttgcttctcrgtcagctggggagtaagcattcaaaagggcttagctctacaacacaattcctctcaccagtattcttacaaccgcttctcctttttgttttatttattgatattttgcgggccttatttcacaaaakctttattggaaaagcagcgctgctaaccgaagggctgttttcacttttactggaaaggcttttctgagtattagctttggattggcaaattttcagtaatttgtactctcagcaatacatcggtagaaaattggatt

SEQ ID NO: 86149 - DNA, 437 bp, Chicken  19866894386106_3
gcatgttaggaaacagactttgggctttgctacgatttatggttccacagggcacatttaagacacaggaggcttcctccctttcacctggtaaaacccaacctatcggctctctctyccaccaagaagcccattggtccttgactacgcaggagggtttattttgcttctcrgtcagctggggagtaagcattcaaaagggcttagctctacaacacaattcctctcaccagtattcttacaaccgcttctcctttttgttttatttattgatattttgcgggccttatttcacaaaakctttattggaaaagcagcgctgctaaccgaagggctgttttcacttttactggaaaggcttttctgagtattagctttggattggcaaattttcagtaatttgtactctcagcaatacatcggtagaaaattggatt

SEQ ID NO: 86150 - DNA, 600 bp, Chicken  19866894386110_1
ctgagtcgtcaacagagaaataaaaactgggattataatttctgacatgttaagaatgtgtaaggaacatttttgctcaggaaagccttctcaaaccttatattttatttttattttctgaaaaatgttacctggtccaagtgcctgtctctcataagctcagactcattttgcagtgtgtgctggaagagggtccagatcaacggctccaggtcaggatgttcggagagaagccgaaagaacagggtatgcaatcgaagataggccagtcgaaacacttgaggaacaaaagaaaacagraggtatasaaaataagaggaacatgctaaagaacagactgcaattaagtgtttaccaagtcctaccacaagaactacaacccatgaaatgaagtagccaggttcaaaattaatggaaaagacccgatacaacaggtagtggacatctggaagtctacactgcatgtatactgtacatgcccatgctgcacatgtattgtctttattgattaaaagtctggacaaacatttrgaaaatgagtctattgagttattaagcagacatactgcagaaagctcaggaatactctgagctgaaaaa

SEQ ID NO: 86151 - DNA, 600 bp, Chicken  19866894386110_2
tcaacagagaaataaaaactgggattataatttctgacatgttaagaatgtgtaaggaacatttttgctcaggaaagccttctcaaaccttatattttatttttattttctgaaaaatgttacctggtccaagtgcctgtctctcataagctcagactcattttgcagtgtgtgctggaagagggtccagatcaacggctccaggtcaggatgttcggagagaagccgaaagaacagggtatgcaatcgaagataggccagtcgaaacacttgaggaacaaaagaaaacagraggtatasaaaataagaggaacatgctaaagaacagactgcaattaagtgtttaccaagtcctaccacaagaactacaacccatgaaatgaagtagccaggttcaaaattaatggaaaagacccgatacaacaggtagtggacatctggaagtctacactgcatgtatactgtacatgcccatgctgcacatgtattgtctttattgattaaaagtctggacaaacatttrgaaaatgagtctattgagttattaagcagacatactgcagaaagctcaggaatactctgagctgaaaaaagtcaagc

SEQ ID NO: 86152 - DNA, 543 bp, Chicken  19866894386110_3
agccgaaagaacagggtatgcaatcgaagataggccagtcgaaacacttgaggaacaaaagaaaacagraggtatasaaaataagaggaacatgctaaagaacagactgcaattaagtgtttaccaagtcctaccacaagaactacaacccatgaaatgaagtagccaggttcaaaattaatggaaaagacccgatacaacaggtagtggacatctggaagtctacactgcatgtatactgtacatgcccatgctgcacatgtattgtctttattgattaaaagtctggacaaacatttrgaaaatgagtctattgagttattaagcagacatactgcagaaagctcaggaatactctgagctgaaaaaagtcaagcttgggaaagcattcgagaagcatcacrtatgcytgcccagctcttaagctgcccaggatgtctatttgtgatcaacattggaaaaagatgatagaagaacccttcatcagagccaatatggtcattcttaaaaacagtagataaactttcagttgaaacttaatat

SEQ ID NO: 86153 - DNA, 439 bp, Chicken  19866894386110_4
gactgcaattaagtgtttaccaagtcctaccacaagaactacaacccatgaaatgaagtagccaggttcaaaattaatggaaaagacccgatacaacaggtagtggacatctggaagtctacactgcatgtatactgtacatgcccatgctgcacatgtattgtctttattgattaaaagtctggacaaacatttrgaaaatgagtctattgagttattaagcagacatactgcagaaagctcaggaatactctgagctgaaaaaagtcaagcttgggaaagcattcgagaagcatcacrtatgcytgcccagctcttaagctgcccaggatgtctatttgtgatcaacattggaaaaagatgatagaagaacccttcatcagagccaatatggtcattcttaaaaacagtagataaactttcagttgaaacttaatat

SEQ ID NO: 86154 - DNA, 433 bp, Chicken  19866894386110_5
aattaagtgtttaccaagtcctaccacaagaactacaacccatgaaatgaagtagccaggttcaaaattaatggaaaagacccgatacaacaggtagtggacatctggaagtctacactgcatgtatactgtacatgcccatgctgcacatgtattgtctttattgattaaaagtctggacaaacatttrgaaaatgagtctattgagttattaagcagacatactgcagaaagctcaggaatactctgagctgaaaaaagtcaagcttgggaaagcattcgagaagcatcacrtatgcytgcccagctcttaagctgcccaggatgtctatttgtgatcaacattggaaaaagatgatagaagaacccttcatcagagccaatatggtcattcttaaaaacagtagataaactttcagttgaaacttaatat

SEQ ID NO: 86155 - DNA, 600 bp, Chicken  19866894386111_1
tatggagtcaaatagaatgtgcagtgttactgcattcattctccggaaatctctttggcttgttattctgggagctgttgaggaaaggagaatgtaacctctcagagagttcttctttactggtagtttgaaagttgtgctcttgactcacagctgggaaactataacatagccttatattccttggaaatattttcaccagaaccagctgtttggaatgtcaacttaatggagaaattgctgctcttttgagacaggatatacaaagtggtaaagacatgttcctaatgaagagagaartttctattttgttgtaatcccatggggaggctgaaagagcaacaagaagatcctgaaaaatctcaggtgattttctctgcacctcccatgcatgatgacacttgtgcctgtcagctccctgcactgggtctggctgggatggagttccctctccccacagcagtccatacaacgctgtgctctgcttttgtaactggaacagcactgatactgcaccagtgttttgcctattgctgagcagtgctggcacagcatcaaggctctctccaacactcccagtgccaggatgctgtgggtggg

SEQ ID NO: 86156 - DNA, 600 bp, Chicken  19866894386115_1
agttctctttgatatatctaaaattgaatactctctggttactgttcaagctctgaaaagagctggagaaagaatttttgcacagggtattaagaacatcttatgaagaatatacacaatgtgatgatccagatttgaaagtcacctgtgacagcagaacctgagaactacaaagaaaataaatagagaatagaatgaagcttcaatggccataagcgagactgaagtatataaagaggtgaaagctcctctttgctgatctcatccacgaactcagcacaagtttgaagaaatctgggyacatgctactgaacggcttaaagttcattgggtgccacatgaaatctgaacatgcgggggcaaaggtctgctaaaaagaaatttaagcaatgctttgaaaaattgrtttggaatctatccccagtacagggcaccagaaagggaacattcaccgaaatgcacttgcattgtcaagtgatgactcacttagactgcaataagacaccgactggtgaaggaatatccagggttttactttcttatgtgactgctgttggaagaaagaagtacagcacaggtataaggtgaagtagatctgtt

SEQ ID NO: 86157 - DNA, 600 bp, Chicken  19866894386115_2
agaatatacacaatgtgatgatccagatttgaaagtcacctgtgacagcagaacctgagaactacaaagaaaataaatagagaatagaatgaagcttcaatggccataagcgagactgaagtatataaagaggtgaaagctcctctttgctgatctcatccacgaactcagcacaagtttgaagaaatctgggyacatgctactgaacggcttaaagttcattgggtgccacatgaaatctgaacatgcgggggcaaaggtctgctaaaaagaaatttaagcaatgctttgaaaaattgrtttggaatctatccccagtacagggcaccagaaagggaacattcaccgaaatgcacttgcattgtcaagtgatgactcacttagactgcaataagacaccgactggtgaaggaatatccagggttttactttcttatgtgactgctgttggaagaaagaagtacagcacaggtataaggtgaagtagatctgtttcttgacatgaaaattgctgagaataaatgagatctgcaaggcaggacaaaggacctcatcctggtatcctttgcttttgctactcccgcagctgacaaaggaaca

SEQ ID NO: 86158 - DNA, 600 bp, Chicken  19866894386124_1
taggccatttgggaacatcccacagctacatgcagagcaacacagaaaataaaattcagctttcttggaaactgtaattcaattatttttatttcaggtttcaatactttaataaatacatgcagactcatccatacaatctcaaaaattacgtgttgcctttcacggatgagagcactcttccattggcagcagatctcctccctgcagctctgaccctgctctcaccacccgacctgtgccaggctgaggggagcagggcatggtgatgccagcaccgttcccctggtgacagcaggwtgatctttgtgcagcagagaactgcatgcaggaggagtgagagcagagcaccgactgttctggggactcttgccctctgcgtgcccttcaggacacctgcttcaccttcacactcctccctgtccctgggaggtcttcctcccaggtaagctgtattttcacatggcagtgatcacgagtctgtgattctgtgtggttttcaaatcagcagagatctgtagcaagaggaaaggcagctggcccctgcaaagccagtgcacagaggaaagctggcagagaccccatcctctggaactcctc

SEQ ID NO: 86159 - DNA, 600 bp, Chicken  19866894386124_2
gttctggggactcttgccctctgcgtgcccttcaggacacctgcttcaccttcacactcctccctgtccctgggaggtcttcctcccaggtaagctgtattttcacatggcagtgatcacgagtctgtgattctgtgtggttttcaaatcagcagagatctgtagcaagaggaaaggcagctggcccctgcaaagccagtgcacagaggaaagctggcagagaccccatcctctggaactcctctgcctccacggcagggggctgcctgaagggagggggcaacacagcggctctctcartgtgccttttgttacttattttccctctatgatgaaagagcatctgaccgtaagtcataaaaatagctatttatagagctgtaattaaacaccactggaagtgcgaagacacaaaagcattgccatctgcctcgcgtttgtggcagcataaatatagatgaagtgctgctaccccttttgtcctctgcagaaaacttcttatttaaatgggcagcggctgcagcacagctcccatacagacccccagtcacagcactgtaatggttgaaaaggacctctggagatcccctatttcaatcc

SEQ ID NO: 86160 - DNA, 600 bp, Chicken  19866894386134_1
ctttaagaggaattgcagcttaaatgaggtgaataaacatgaaatatgaataagagcaaaataaagaaaatctaccatgctgacataataaatgaaatagatgtgaatcaatcatagccctaaataggctagaaaaaatactaagggaggtaggaaagaatattcttcagggagaagggaggaaaatatttaattcatttgagtataaagagtgatcattttatcagcaagattataaaatacagctgttttgataagatacagagtaacatctcaggatatacctttcagttgagtgcyctaaatggtacaaaagggacttgttatcctgtctttaacagaatgttcctaaygtttcttacacaygtgcagaaaagaaactgactcctactaggataagcacaaaaatcaagttagtggttagtagcaaagttgacttgaccagagatacaattggtctaagggagtacagtctttgagcagatgacatattctcttggatacaacaacttttttgtgccttctcccaggttatcattgtgcaatggggtaatacaccctccaaaacttggtcataagggtttttgtccttcataatat

SEQ ID NO: 86161 - DNA, 600 bp, Chicken  19866894386134_2
gagcaaaataaagaaaatctaccatgctgacataataaatgaaatagatgtgaatcaatcatagccctaaataggctagaaaaaatactaagggaggtaggaaagaatattcttcagggagaagggaggaaaatatttaattcatttgagtataaagagtgatcattttatcagcaagattataaaatacagctgttttgataagatacagagtaacatctcaggatatacctttcagttgagtgcyctaaatggtacaaaagggacttgttatcctgtctttaacagaatgttcctaaygtttcttacacaygtgcagaaaagaaactgactcctactaggataagcacaaaaatcaagttagtggttagtagcaaagttgacttgaccagagatacaattggtctaagggagtacagtctttgagcagatgacatattctcttggatacaacaacttttttgtgccttctcccaggttatcattgtgcaatggggtaatacaccctccaaaacttggtcataagggtttttgtccttcataatattgtgcagaagagcaagcaaaactgcatgttttttacatgcctcttccacatag

SEQ ID NO: 86162 - DNA, 600 bp, Chicken  19866894386134_3
aaaatctaccatgctgacataataaatgaaatagatgtgaatcaatcatagccctaaataggctagaaaaaatactaagggaggtaggaaagaatattcttcagggagaagggaggaaaatatttaattcatttgagtataaagagtgatcattttatcagcaagattataaaatacagctgttttgataagatacagagtaacatctcaggatatacctttcagttgagtgcyctaaatggtacaaaagggacttgttatcctgtctttaacagaatgttcctaaygtttcttacacaygtgcagaaaagaaactgactcctactaggataagcacaaaaatcaagttagtggttagtagcaaagttgacttgaccagagatacaattggtctaagggagtacagtctttgagcagatgacatattctcttggatacaacaacttttttgtgccttctcccaggttatcattgtgcaatggggtaatacaccctccaaaacttggtcataagggtttttgtccttcataatattgtgcagaagagcaagcaaaactgcatgttttttacatgcctcttccacataggaatcaaaagctt

SEQ ID NO: 86163 - DNA, 600 bp, Chicken  19866894386134_4
ataggaatcaaaagctttccacatcatagattatttattccttgcccagatgtgtatttctgcctttcgaagttcactgaatttgtcccatttgacatttctttcccaattctgcagtccaatcactcacccttttgtcagcaggctctaacagcagctgttgcttatttactgtgaaaatattgaacacagtaaggatcctgccatggccaaacaccacggtgccctcatgcaccatataagcacagatcacaagtgcctcaagaaattttaattttcaagaatcttgcaatttgtttyaaaagggctttaaaatccagtagctctgatgagaaaagcatttgaaatacttatttagttaattcagatggcagttctatcagaataaaaaaatcctgcatccaagtctgtaccaaaagcaaacagccatgaatgaaaatgaacagataagtaaaaaaacaaaaagtaacttctagtccattttaaacaatttaatagtatttcctgcaatgctacatacaactaatttaaataacattaatagaaactaagagaagtcagagaacttgaagttagaaagatttcgtctttcacataatt

SEQ ID NO: 86164 - DNA, 599 bp, Chicken  19866894386140_1
  misc_feature (1)..(36): n is any nucleotide
nnnnnnnnnnnnnnnnnnnnnnnnnnnnnnnnnnnnctgagagatatttctgatttttctaaaagttattccatgttgcaagttaacctgcagtatctttttttttttttttttttatttcagcaacagaacttaaatttcacttctcatttaagtgtagtattctttgggtgaaagtagagcagttttttataaaactgagacaatgtcctcattatagtgttattcaaaccactctatacctcatttaccttctattaaagtgtctttgaacacatgtaaatatagatattgtgtttmaaaactgaagatgaactgaacaactgcagtgccagcagtgtccacgtttcttgctctgcaagaaattctgaggcatcacagtgatctgtgcttaaaaggattactaaaaaaaaagttttatctactccagtattttgatgaaaattcagtggatgttcttagctctatttttacaaagctacataaaaacaattaattaaataatggaaatggaaactttagaacacataatgaaagtattctgtttccaaaatagcattccaaggcatttttatcaatgttatgttccatatttttac

SEQ ID NO: 86165 - DNA, 600 bp, Chicken  19866894386140_2
aaagtattctgtttccaaaatagcattccaaggcatttttatcaatgttatgttccatatttttacaaacaaatatgactccaagcagtttatttctgtaaactatctttattttccaagagctggaaaagtgtaaatgtgtttgtgaactagtttaacttaaaaccaccaagcaaatgaacctctgattcatgtaaaatagaatttgaaagaaccagctgagaccttgtgttcagactttaatgactccaggttttttttcaatccagcaattaatgaagtctgctacatgtagaactyatgtatgtgcatatagacatcacttatcacttctcttgatcttctggcaaaatgcaaaataaamaaaaaaaaaaaaaaacagaggatgacagattgttaggttggtaatattacttcacttcatgaaatgcaagaaaaagatggttaacttgacatacgatatatacatttacataccccactgaagatgattgtcaaagtatcggtttattccaaaaccttgatttgtttgtgtccatttgctgtatttcatttgattggataggtcaagatagagcaataataagtaggaaaaaagga

SEQ ID NO: 86166 - DNA, 595 bp, Chicken  19866894386140_3
acaaacaaatatgactccaagcagtttatttctgtaaactatctttattttccaagagctggaaaagtgtaaatgtgtttgtgaactagtttaacttaaaaccaccaagcaaatgaacctctgattcatgtaaaatagaatttgaaagaaccagctgagaccttgtgttcagactttaatgactccaggttttttttcaatccagcaattaatgaagtctgctacatgtagaactyatgtatgtgcatatagacatcacttatcacttctcttgatcttctggcaaaatgcaaaataaamaaaaaaaaaaaaaaacagaggatgacagattgttaggttggtaatattacttcacttcatgaaatgcaagaaaaagatggttaacttgacatacgatatatacatttacataccccactgaagatgattgtcaaagtatcggtttattccaaaaccttgatttgtttgtgtccatttgctgtatttcatttgattggataggtcaagatagagcaataataagtaggaaaaaaggaaaacaaaagtatatacagagaatctgatgtacagctagtctctcagtaacataagatca

SEQ ID NO: 86167 - DNA, 599 bp, Chicken  19866894386143_1
  misc_feature (1)..(112): n is any nucleotide
nnnnnnnnnnnnnnnnnnnnnnnnnnnnnnnnnnnnnnnnnnnnnnnnnnnnnnnnnnnnnnnnnnnnnnnnnnnnnnnnnnnnnnnnnnnnnnnnnnnnnnnnnnnnnnnngtaaataacagggtaataggttttattagctgcatctacagtctctgtagacaaatttaattcttttgtgcataaaacttcaagagtgatcttgctggttattgtatctttgaagcacagaatagcctgaataccaaactcaaaaggcaagtaccaactggaagcagatggaattagagctgcttcaytgcatggagatgtgaagtgaggctgggttcagacaaggaccttcttgtttacgctgttctgtggtactcctttttgagccagccaatccattgtagtcgagtcatgtgagcacctgtttatagcagtagtcaaaagcagaattgagaggcttcaaacagtaaacaagggcaccagtatctcttgaccacttctagaaaggttgtttctgaggaacacgtggatggagcgttataatgaggtcccatcttacattcccagttcaaagcaatttttgtttatcttaagccaggtcctagaa

SEQ ID NO: 86168 - DNA, 599 bp, Chicken  19866894386146_1
  misc_feature (1)..(145): n is any nucleotide
nnnnnnnnnnnnnnnnnnnnnnnnnnnnnnnnnnnnnnnnnnnnnnnnnnnnnnnnnnnnnnnnnnnnnnnnnnnnnnnnnnnnnnnnnnnnnnnnnnnnnnnnnnnnnnnnnnnnnnnnnnnnnnnnnnnnnnnnnnnnnnnnntctctttgaaaggctacatcacacctagaatatttcccacaaagtgaatgactgcagggctgtttgatttgggctggatccatggctgaggtggaaaagcaaagcatagggaagagacttgctggtgcttgggccgacatgtgaggggtgctggygcttgtgccaggaccatggcaggatggacagatgctctgctggatgccttccttgccagctgcttcctgggtgacatcacagcctggctatgcagagctaccagtgcctgcagaactgtagccctcatttctggaaacagtgctgggaggtttcagtcaacaaggtcacgtatctctgtaagaaatgcacttttcccttaaaaatgtggcagcctatttatggaaggtaattaagtgtacaactgaaaataggacgttgtgtcatattcccggagcattatcaataatgggactcattt

SEQ ID NO: 86169 - DNA, 396 bp, Chicken  19866894386146_2
aattaagtgtacaactgaaaataggacgttgtgtcatattcccggagcattatcaataatgggactcattttgtgaacagttgcgtttcttcagagcagcatgtgatagtctctaattgcaaaattaatagcagataatgatactatagaatgatggcctcttaaattgagacatacttcaaaagcttttattctatgtggtaacttagcatattaaaaatctttgacaattttgacgaagagcaattatagagcaagcacagtagctgcttctctaagttaactaattccccaagtccygtgaatatgcattagattaatggcctataaaatttcatttgaaaataagactttcactgaggaataaaaatttccaatttcattgaaaatctttcc

SEQ ID NO: 86170 - DNA, 599 bp, Chicken  19866894386150_1
  misc_feature (1)..(60): n is any nucleotide
nnnnnnnnnnnnnnnnnnnnnnnnnnnnnnnnnnnnnnnnnnnnnnnnnnnnnnnnnnnnttgtatttcttgcagaaaacctttacaatgattgctgctaatttgcctagacaacattatgcaagagaatatatacttacaagatgacaaatcacggatcattgtcacctactgcaaataactgtttctgaaattcctgcttcactatgtacactgaggccatatctcctgcactgcctcctctcaacccctcagaagtccaagtgtgatgcagctttactgctgcacctcctgtttaaytcttgcattgatactaggaatatgttttaggaaagcacctctaagccagatgcctcttgcagcagcactctgccaatttgcataacaccactagaaaatgcaaataatgagatttttaattccctacctccaatcctcattgctttgcttaacatcaaaatgtcttccatacactgtgtagctgcccagagatgtggtggatgccccatccctggagatgtgcaaggtcaggctggatggggagctgagcatcctgctcaagctgtaggtgtccctgttcattgcaggggagttggact

SEQ ID NO: 86171 - DNA, 595 bp, Chicken  19866894386151_1
gcagaacaaactgctgagagcttaccttgcattccaccacgctctgatccgattcacatgtgacgtagatttcatcaactgcccgtctcaggttgtcaaaaaggaacgcccagtaccgagctcgcagatcaacttttcgaggctgccgtgctttggttgggcttttgtcaaaggttttatctcctgctgctgctgctgttaatttacaatctagggaagcgttctaaagaagagacgtaaaggaaaacaacaaagagaagcacagtaagggggttgtgcttctgtgcaatacattttttyccccaatacatttaaacatttgtaagcaaggagtttctcattgaagacttaaggcattccactaatttgcagtttttaaagcgtgctttcttaccttaaacaaatgcaaccaatacgcagaaccaatttctgattctttgacaattataactcaacatttactttgcacagygcatgataaaagaatctcttctacttcagaagaccatttccactcaccatttggttaacactacaagctcagttcaacccagcataagtgctgagccgttgaatcaagttgctcctcctgatg

SEQ ID NO: 86172 - DNA, 423 bp, Chicken  19866894386151_2
ggttttatctcctgctgctgctgctgttaatttacaatctagggaagcgttctaaagaagagacgtaaaggaaaacaacaaagagaagcacagtaagggggttgtgcttctgtgcaatacattttttcccccaatacatttaaacatttgtaagcaaggagtttctcattgaagacttaaggcattccactaatttgcagtttttaaagcgtgctttcttaccttaaacaaatgcaaccaatacgcagaaccaatttctgattctttgacaattataactcaacatttactttgcacagygcatgataaaagaatctcttctacttcagaagaccatttccactcaccatttggttaacactacaagctcagttcaacccagcataagtgctgagccgttgaatcaagttgctcctcctgatg

SEQ ID NO: 86173 - DNA, 599 bp, Chicken  19866894386153_1
  misc_feature (1)..(112): n is any nucleotide
nnnnnnnnnnnnnnnnnnnnnnnnnnnnnnnnnnnnnnnnnnnnnnnnnnnnnnnnnnnnnnnnnnnnnnnnnnnnnnnnnnnnnnnnnnnnnnnnnnnnnnnnnnnnnnnnaaacctttggtaaagtttcagcatccttcctctttcagatgcatgctgacggttaacacccaaatttactctgggaggaaaagaggttaagatgatttgaaatgcatgtgaagaaattcaaggagaggcagaacactgcaggccatggcatccagagagcacagctggagggaagctccctgcgcagkgcagacctgagctggggcagctccagcttgcagaagattaatcacggtgacccaaacagagacggaaacaatgtgatcagctcagcacttctaggataattttggtctccattaggtcaccccctctaaataccaattgtttctgtctggttctgttgcctatcagccctattattacaagctgccatttgccgtttgctctttcctgtcctctcaggaatagcttcctcctgttgcattgcttttacctcagagccggacatctgtcttcctcctcattacacagccgtgctcagagc

SEQ ID NO: 86174 - DNA, 505 bp, Chicken  19866894386153_2
cggaaacaatgtgatcagctcagcacttctaggataattttggtctccattaggtcaccccctctaaataccaattgtttctgtctggttctgttgcctatcagccctattattacaagctgccatttgccgtttgctctttcctgtcctctcaggaatagcttcctcctgttgcattgcttttacctcagagccggacatctgtcttcctcctcattacacagccgtgctcagagctcttctgccccgattccgcctcagctgcagccctgggcaggcattgcacagaggggctgaggrggcactcgctggatttagaatcacaggatcacagaatggcctgggttgaaaaggaccccaatgctcatcagttccaaccccctgctatgtgcagggtcgccaaccagcagcccaggctgcccagagccacatccagcctggccttgaatgcctgcagggatggggcatccacagcctattagatgctaataggaaaaccttcctt

SEQ ID NO: 86175 - DNA, 600 bp, Chicken  19866894386167_1
gagtcttccttgcatcccaatgatctacatttgagtgttccctctctgccattctactgaaatgtgaactccccctgagacagtaaaatagctcttctgcacacccaccctcattctatacacttccaaatttgatgtcacaaaatctctggcattggccaaacaaatatctcaaactggttttcacacagtgtgaaaccacagttgataggaattacatagataagctgactgccttttattacagagcaggcttcccctaagggaaattttctggagagcaggctgggcacaaggccyaaaatgagcactcactgtcatagtctatatatgactgtccttaggactggttgacttcagtcatttacaaatgcaataaaatgccatggttttgttttgttttgttttttttattcctatttttggggacatctggaaaatattttggtgacaatatctccagtgcagcgctgaaatttgatcagacacaaaaaccagtagtgcatgcattccttgaagcatctggtgatgatgactcacagtaattagtacaaatctatactgaagcaaaatctttccatgcctaattgctacagtctt

SEQ ID NO: 86176 - DNA, 600 bp, Chicken  19866894386173_1
gcttttcccttccattgccctggagctgtgccccaaccacccgctgggtgctctatttggtcccactgaaccccatacttgctctgatggtgtttaaacccactgaagaatatataaaaccatcgatgcttaaagccccttcccactgcatgctgtcacaagctgtgcccagcactctgcctgcttccccatccctgttagcacccaagctcctggttgggatgtgcagagcagaacacttgtgaggaaaaaaaaaaaaaacaaaaccaaaacatggtcctgagaacccttgtcattgcytccctgcaggacaccattgggcagctggaggctgacctgcgtagcactaaaaccgagatggctcggcacctgagggagtaccaggacctgctgaatgtcaagatggccctggatattgagattgctgcctacaggtaggctgctctggccctgtccgagcccagtccaacaccctgccccatactgccaagtctggcaccaaagtctgacctgggtctattttcatctgcatcagctgcatcctgatgctttgaaggtgtcttgtgaggtgacccccacctaaaacccctttgcttgtgc

SEQ ID NO: 86177 - DNA, 600 bp, Chicken  19866894386178_1
tttacatttagaaaagtctgaatattcttgtagcatgctaactttaaagtagatgggcaaaaaaaaaaaatctgttagacctacccaatttttgctggcatgtacaacatcagaggcacaacaggggaatcttcattgccatagatgataaagcccatctctttgagtcgtctcctgaaataccttgtgttctctgctagctgctgcacacactctctccctaggaaagaaatcaaggtaagacaatagacacaacagtcataaaccacacgtgtaactgcagcacaagatctcttctcrcttcggtacacactacaagtgcacaacttgtgcttaaagaagtgttaaaatgaaacaaactagaattcagtttcttctttctcttttaatcaagataaattgctcactttgataaggccgttgctggatggagaaggacaagtgtaattgccaaattcaccccccctaatttttccatatctgagttgtatcaagagatacaaagctggcaaaacagtacagtgagctgcttttaaacaagctgcaaaatttgctcaaaatccactgatacctgcatgttaaagaatggtttgcttacag

SEQ ID NO: 86178 - DNA, 600 bp, Chicken  19866894386182_1
aataattaaaaccaaaacaggcaaaagtcttcctaaagaatagatgaagataacccagctattcattttcacctatagaaaaatcaaaacaactgtgaactcacctcaacaagttgctctttctgctctgatagcttgcaagtatattctgctacagcttccagatttccttctactcctgtgatttttaatgctttgagaatcatatgatctgtgtggtatttcagcagatctgctgccagagacgttgctgcactatggaccttgaaaagcattaaaagaaggagagagacactttaraaagaaagaaacacagccagtaccaaaccaaactcctttgaagatagagcygttacccaagaagcaaaaaaaaaaaaatatactgctataccagcatacagacagcctacagctttaattcttcaactattatttaaaataaaaagataaaatccactgcacttaaaaagtagcccacccaaaggtaaagataaacaaaagagcagctgggtagaatcagaatgtgtgattataacacagctgctttctgatgatattgcagatggaaaaaacaggtgcatgaattcgtggagcaccaag

SEQ ID NO: 86179 - DNA, 600 bp, Chicken  19866894386182_2
aacccagctattcattttcacctatagaaaaatcaaaacaactgtgaactcacctcaacaagttgctctttctgctctgatagcttgcaagtatattctgctacagcttccagatttccttctactcctgtgatttttaatgctttgagaatcatatgatctgtgtggtatttcagcagatctgctgccagagacgttgctgcactatggaccttgaaaagcattaaaagaaggagagagacactttaraaagaaagaaacacagccagtaccaaaccaaactcctttgaagatagagcygttacccaagaagcaaaaaaaaaaaaatatactgctataccagcatacagacagcctacagctttaattcttcaactattatttaaaataaaaagataaaatccactgcacttaaaaagtagcccacccaaaggtaaagataaacaaaagagcagctgggtagaatcagaatgtgtgattataacacagctgctttctgatgatattgcagatggaaaaaacaggtgcatgaattcgtggagcaccaagttcagcataagcacagcacaataaccactctacttctcataaagaatgtac

SEQ ID NO: 86180 - DNA, 599 bp, Chicken  19866894386183_1
  misc_feature (1)..(32): n is any nucleotide
nnnnnnnnnnnnnnnnnnnnnnnnnnnnnnnncatgtgccacataatgactcatcaagagcacctgtagggcttctgcagtcctggtaggtctctgctcgggccacgaggggctggacacggccctgctcaccccttctttatgattctctgtacagcgtaagtaaaatccatttcaaaggtctgaaaccgatgaattctccccgtggatctttatgaagttatttagttcaagtgcctttgtaattgtgatagattgagacaatttgtactggctggagagtgggcagcaggagaaagmaggcataatgtggacgttggctgaagcccctgtaatggatgttctttgctccaggtgcattcagcacrgcaaggcagccctgtmcctcctgggctgggggtggcacagccstgggatcgagctggtgcagtgtgrgttggggatgccatctcctctgcagggcttggcacggctcagaggyggagtccagcctcccatatccaagatggaaaactagcagcaccaagaaaaagaagcacttaaaacaccccagctccggagagccggccagctggagcagcaaggggcttgctaaggca

SEQ ID NO: 86181 - DNA, 600 bp, Chicken  19866894386183_2
gggcttctgcagtcctggtaggtctctgctcgggccacgaggggctggacacggccctgctcaccccttctttatgattctctgtacagcgtaagtaaaatccatttcaaaggtctgaaaccgatgaattctccccgtggatctttatgaagttatttagttcaagtgcctttgtaattgtgatagattgagacaatttgtactggctggagagtgggcagcaggagaaagmaggcataatgtggacgttggctgaagcccctgtaatggatgttctttgctccaggtgcattcagcacrgcaaggcagccctgtmcctcctgggctgggggtggcacagccstgggatcgagctggtgcagtgtgrgttggggatgccatctcctctgcagggcttggcacggctcagaggyggagtccagcctcccatatccaagatggaaaactagcagcaccaagaaaaagaagcacttaaaacaccccagctccggagagccggccagctggagcagcaaggggcttgctaaggcacgagctacagtaagctctgatgctaaaagggaaaagaattaaatgtataagtttatacagcactttaaa

SEQ ID NO: 86182 - DNA, 600 bp, Chicken  19866894386183_3
ggtaggtctctgctcgggccacgaggggctggacacggccctgctcaccccttctttatgattctctgtacagcgtaagtaaaatccatttcaaaggtctgaaaccgatgaattctccccgtggatctttatgaagttatttagttcaagtgcctttgtaattgtgatagattgagacaatttgtactggctggagagtgggcagcaggagaaagmaggcataatgtggacgttggctgaagcccctgtaatggatgttctttgctccaggtgcattcagcacrgcaaggcagccctgtmcctcctgggctgggggtggcacagccstgggatcgagctggtgcagtgtgrgttggggatgccatctcctctgcagggcttggcacggctcagaggyggagtccagcctcccatatccaagatggaaaactagcagcaccaagaaaaagaagcacttaaaacaccccagctccggagagccggccagctggagcagcaaggggcttgctaaggcacgagctacagtaagctctgatgctaaaagggaaaagaattaaatgtataagtttatacagcactttaaaaaaaatctattttcat

SEQ ID NO: 86183 - DNA, 600 bp, Chicken  19866894386183_4
gctggacacggccctgctcaccccttctttatgattctctgtacagcgtaagtaaaatccatttcaaaggtctgaaaccgatgaattctccccgtggatctttatgaagttatttagttcaagtgcctttgtaattgtgatagattgagacaatttgtactggctggagagtgggcagcaggagaaagmaggcataatgtggacgttggctgaagcccctgtaatggatgttctttgctccaggtgcattcagcacrgcaaggcagccctgtmcctcctgggctgggggtggcacagccstgggatcgagctggtgcagtgtgrgttggggatgccatctcctctgcagggcttggcacggctcagaggyggagtccagcctcccatatccaagatggaaaactagcagcaccaagaaaaagaagcacttaaaacaccccagctccggagagccggccagctggagcagcaaggggcttgctaaggcacgagctacagtaagctctgatgctaaaagggaaaagaattaaatgtataagtttatacagcactttaaaaaaaatctattttcattttcaaagattggatttcctccttgtc

SEQ ID NO: 86184 - DNA, 600 bp, Chicken  19866894386183_5
ttctttatgattctctgtacagcgtaagtaaaatccatttcaaaggtctgaaaccgatgaattctccccgtggatctttatgaagttatttagttcaagtgcctttgtaattgtgatagattgagacaatttgtactggctggagagtgggcagcaggagaaagmaggcataatgtggacgttggctgaagcccctgtaatggatgttctttgctccaggtgcattcagcacrgcaaggcagccctgtmcctcctgggctgggggtggcacagccstgggatcgagctggtgcagtgtgrgttggggatgccatctcctctgcagggcttggcacggctcagaggyggagtccagcctcccatatccaagatggaaaactagcagcaccaagaaaaagaagcacttaaaacaccccagctccggagagccggccagctggagcagcaaggggcttgctaaggcacgagctacagtaagctctgatgctaaaagggaaaagaattaaatgtataagtttatacagcactttaaaaaaaatctattttcattttcaaagattggatttcctccttgtccttctcccaggtcgttttctttgc

SEQ ID NO: 86185 - DNA, 600 bp, Chicken  19866894386183_6
tctgaaaccgatgaattctccccgtggatctttatgaagttatttagttcaagtgcctttgtaattgtgatagattgagacaatttgtactggctggagagtgggcagcaggagaaagmaggcataatgtggacgttggctgaagcccctgtaatggatgttctttgctccaggtgcattcagcacrgcaaggcagccctgtmcctcctgggctgggggtggcacagccstgggatcgagctggtgcagtgtgrgttggggatgccatctcctctgcagggcttggcacggctcagaggyggagtccagcctcccatatccaagatggaaaactagcagcaccaagaaaaagaagcacttaaaacaccccagctccggagagccggccagctggagcagcaaggggcttgctaaggcacgagctacagtaagctctgatgctaaaagggaaaagaattaaatgtataagtttatacagcactttaaaaaaaatctattttcattttcaaagattggatttcctccttgtccttctcccaggtcgttttctttgcactcggccttaccctggtgatttctcatctcacttccagcaagtgt

SEQ ID NO: 86186 - DNA, 600 bp, Chicken  19866894386190_1
ccctctggatagctttccttccttccaacgtatcaactgcacccgctcagcttggtgtcatccacaaacttgctgagggtgcactcaatgccactgtctgtgtcactgatgaagatgttgaagagcaccggtcccaagaccggcccctgagggacactgcttgtgaccagcctccaccctgacatagaaccattaatcacaaccctttggctgtgtccagccaatcaacccctaatccatcgaacagtcagattgtctcctgctactgcatttttcagaattttccagcccaatggaaaktttgtgattctcagtatacctgttggttacttacatttaccattactaaaaaaggaatgtagttaaatgaaatgcaagggtggataactgcacttaaattgtagacactacaagtggatctcaactacgaagatgaatttctttccagcaggtcaggctgayggaaaaaaaaaggaaaagaataagcagtggaagtggggatgagtggcttgggaagaacataaggatgatgcttagatgtgtaaggctgggatcaggaaagccaaggtgcaggtggaattggcttgggaagaaaataag

SEQ ID NO: 86187 - DNA, 600 bp, Chicken  19866894386190_2
gtgaccagcctccaccctgacatagaaccattaatcacaaccctttggctgtgtccagccaatcaacccctaatccatcgaacagtcagattgtctcctgctactgcatttttcagaattttccagcccaatggaaaktttgtgattctcagtatacctgttggttacttacatttaccattactaaaaaaggaatgtagttaaatgaaatgcaagggtggataactgcacttaaattgtagacactacaagtggatctcaactacgaagatgaatttctttccagcaggtcaggctgayggaaaaaaaaaggaaaagaataagcagtggaagtggggatgagtggcttgggaagaacataaggatgatgcttagatgtgtaaggctgggatcaggaaagccaaggtgcaggtggaattggcttgggaagaaaataaggatgctgtctaggtgtgcaaggatgggatcaggaaagccaaggtgcagatggaactgaacttggagaacaatgtaaaaaacaacaagaagggatttttaagatacattatgtagaacagacatgcaaatgagtgtgttccccctctgataaatggaagggga

SEQ ID NO: 86188 - DNA, 600 bp, Chicken  19866894386213_1
cttaatgattgtgctgcagatttcagctgggagaagtgtgcttttagagacgtctggaggcatgacttacattcctcagcaaatttttgtccaatttttgtgtaatggaaaacaaaacaaaacaaaacagctccatcctgataaaacagatcagctatgtggttttgagagtaggctatctattctgacaaattgaattgcagtaaaattaaattagaagtatttaggcactcatgaactctatgtctatgctcggttgatgttttgatccaataccatgtctaaatttcccactacttrttttctgcagatactaataaggttttaaatcacattgtcgtgattaaggaggtgggcaagcttcttttactaccttcttatccttacttctacactcctgtgctggagctgaaagttacatcataggtgtattcttgtgatctcttatgtaactgccagaaagcaacccaataataatgttttgcactcttattgaagaacttggattaagtggaaggtgcttgtcttccttccttaagcataaatatatgatgtaaataatagagttcacttctttgctatcttttccatcagctattt

SEQ ID NO: 86189 - DNA, 600 bp, Chicken  19866894386216_1
atgaggaaaggttgagggaactgggattgttttgcttggagaagagaaggctctggggagacctcactgcggccttccattatttgaaaggagcacataaacaggaggaagaacaaatgtttacaagggtgaatagtaatagaataaggcggaatggtttttaactgagacagggaaagtttaggttaaatattaggaggaagttttacacacagagggtgataacacactggaacaggttgcccagagagactggggatgccccatccctggaggcattcaaggccaggctggatgtgrctctgggcagcctggtctrgtggttggtgatcctgcacatagcagggggttgaaaccagatggtcatatagtccttttcaacctaggccattctatgattctatgatacgattctatgtgcctcacacttaaatgccaagtaacaagataccatgcagtgtaatstttatgaattttctcttacatactcatgaaagctactttaattgaataagttagatgatgtaaaacatttatgttggcattaatagaagatactagtgtgaagaatgtgattacagcagaggcaatacatcaaga

SEQ ID NO: 86190 - DNA, 600 bp, Chicken  19866894386216_2
actgggattgttttgcttggagaagagaaggctctggggagacctcactgcggccttccattatttgaaaggagcacataaacaggaggaagaacaaatgtttacaagggtgaatagtaatagaataaggcggaatggtttttaactgagacagggaaagtttaggttaaatattaggaggaagttttacacacagagggtgataacacactggaacaggttgcccagagagactggggatgccccatccctggaggcattcaaggccaggctggatgtgrctctgggcagcctggtctrgtggttggtgatcctgcacatagcagggggttgaaaccagatggtcatatagtccttttcaacctaggccattctatgattctatgatacgattctatgtgcctcacacttaaatgccaagtaacaagataccatgcagtgtaatstttatgaattttctcttacatactcatgaaagctactttaattgaataagttagatgatgtaaaacatttatgttggcattaatagaagatactagtgtgaagaatgtgattacagcagaggcaatacatcaagaaaaatgataatttcatcat

SEQ ID NO: 86191 - DNA, 600 bp, Chicken  19866894386216_3
tgagacagggaaagtttaggttaaatattaggaggaagttttacacacagagggtgataacacactggaacaggttgcccagagagactggggatgccccatccctggaggcattcaaggccaggctggatgtgrctctgggcagcctggtctrgtggttggtgatcctgcacatagcagggggttgaaaccagatggtcatatagtccttttcaacctaggccattctatgattctatgatacgattctatgtgcctcacacttaaatgccaagtaacaagataccatgcagtgtaatstttatgaattttctcttacatactcatgaaagctactttaattgaataagttagatgatgtaaaacatttatgttggcattaatagaagatactagtgtgaagaatgtgattacagcagaggcaatacatcaagaaaaatgataatttcatcattttttttgccaatcactgtgctgtccttggccaagaaaatccagatagaggaggtgatgcgctatggagcagcaaggtaatgtgagtggtagcacagcaagctctatattttttcattgtggagaacattataatataggcactgg

SEQ ID NO: 86192 - DNA, 600 bp, Chicken  19866894386218_1
tcatatgctcaatgcacagcatgacagtatccctcccatctctgctctttgcatttctctctcctgtgctactctgtgccgtgtgtcagtggtctacaagttgagaacagccccataaaaattcataaattgctgagaaagcgtgcaaagttgagaaggtaccttagtgaggggaagaagaaaaacttctaagaactgccagtccaatgattatgaaatgccttgtcttttctcagcctctgcttagtagctttgtatacatggctcatcatttatatacatggctcattatctgtagcrgaaatgaccaaatgtttgctaagtgctatgtaggccataggaagagaaccatggctcttcagaggaattcatcatttttgaagttcccatcctacaagtctgcagatgtcattgcacatgacttacagtcttacagactccatcaagtaacrttacacacgacaatcccaggaaactcactacatccatttgggcataaatatctacaaaatcaagatacaattgttctggaaactcatataatttgtatatttataatttgttctgtctgagccattttctcatatctgctgtgataac

SEQ ID NO: 86193 - DNA, 600 bp, Chicken  19866894386218_2
gagaaggtaccttagtgaggggaagaagaaaaacttctaagaactgccagtccaatgattatgaaatgccttgtcttttctcagcctctgcttagtagctttgtatacatggctcatcatttatatacatggctcattatctgtagcrgaaatgaccaaatgtttgctaagtgctatgtaggccataggaagagaaccatggctcttcagaggaattcatcatttttgaagttcccatcctacaagtctgcagatgtcattgcacatgacttacagtcttacagactccatcaagtaacrttacacacgacaatcccaggaaactcactacatccatttgggcataaatatctacaaaatcaagatacaattgttctggaaactcatataatttgtatatttataatttgttctgtctgagccattttctcatatctgctgtgataacattctcaattattttagagtgaaaacaggctctcttaggttttgcttctaaatgcttccaaatactttgcttccaaatgcttctctttgcttgtttgtctttttaggcatcatcctgacatctgtcctctggaaagtacaatattctcagcc

SEQ ID NO: 86194 - DNA, 600 bp, Chicken  19866894386223_1
tgtggaagaagttcagacttactcaataggtgttataaataattctgacaagtcttgcagaattttctccgttcgtacctgacacttggcttgaggtagtggaagaaggatttttagagtcaaacaggaaataaatacaggctgataatccagtgaggacagctgttccgttccttgtaaacacagctcttcatttgtgcaaagtgagaagaaaataagtcaaatataatgtagatggaaatgacaaaattaaggaaaaaaagcatttgaaagccaaaaaacctgaaaatttaaacttaytatggaaagcgtttttaagttgctctgtatagagtcagatttttttcttcctattaaaagttttatttttacactttttwatgtgctttaatattttagaaaatagacttgatttcaggaagatatttatctgtgttgtttcaattccatacgtagatatgagtttgttttagactgttatatactcctctaaaagactttaacctttagaaaacttttgacttagatgagctcacgtttcagtaatatatgaatgagatgtattctatatagctagcaattgctttgagcatctttgtt

SEQ ID NO: 86195 - DNA, 600 bp, Chicken  19866894386223_2
gacacttggcttgaggtagtggaagaaggatttttagagtcaaacaggaaataaatacaggctgataatccagtgaggacagctgttccgttccttgtaaacacagctcttcatttgtgcaaagtgagaagaaaataagtcaaatataatgtagatggaaatgacaaaattaaggaaaaaaagcatttgaaagccaaaaaacctgaaaatttaaacttaytatggaaagcgtttttaagttgctctgtatagagtcagatttttttcttcctattaaaagttttatttttacactttttwatgtgctttaatattttagaaaatagacttgatttcaggaagatatttatctgtgttgtttcaattccatacgtagatatgagtttgttttagactgttatatactcctctaaaagactttaacctttagaaaacttttgacttagatgagctcacgtttcagtaatatatgaatgagatgtattctatatagctagcaattgctttgagcatctttgtttgattcatcaagaaaaaataacaaatgcaagtcattgccacattcttgaggcagaaaggaaatctcatttagggtaggtg

SEQ ID NO: 86196 - DNA, 599 bp, Chicken  19866894386228_1
  misc_feature (1)..(34): n is any nucleotide
nnnnnnnnnnnnnnnnnnnnnnnnnnnnnnnnnnaataaaaattctgtattatatttctttgattctaaatggcaaatatttctcctcttgcagttcaaaattacagtagtatttgccctgattccttcaaattttaatcttccccaggagcatgtaaaaagatcactaactcagcacaactgttttctgattttatccttggtacaattttgtcccacaactcttttcacaatgtcccaaacttcacgaattcattgactacatgagtgaacttgtatagtaattatgcaccctcatgragtcttttatttactacatattaatgcagctaatgcaggcagctaatggagacattttctcttactttctggagaaaagacatatcattagaaggaaaagacttgatcataaatgggctgaatcatcatctggacaaatacctccctttccttttctttgtcctgtggtgagaagaacatatccagatttggtaggatgaaactgaacatttgcactatacaaacttaccagattgacaaagcataaatttcactgaagctatactttaccattcttttggacaatcagattgatgtca

SEQ ID NO: 86197 - DNA, 599 bp, Chicken  19866894386236_1
  misc_feature (1)..(75): n is any nucleotide
nnnnnnnnnnnnnnnnnnnnnnnnnnnnnnnnnnnnnnnnnnnnnnnnnnnnnnnnnnnnnnnnnnnnnnnnnnnatctgctccaaaccgcactgtaagcaaatggtcagaaagtgaggacagatctatgcaaatacactcagaaaataccaccacgaaataccaccaaacacctcaatctacatgcagattcagctggatctcaggtcttcatactctttcctcattcccatttgacatgagctattccaccataaatgtacaccacgttaatttctacgctaaccaattcatctatcwaaacaaaccaaaaagacaactaaacatataayaccctttaaataaacacactgcagaacaaaatggaagggaggtgggggtagactccaacaaggaaagcacctatgtccygagggctggtagacttcttccaacaaattggaagaagagccaaaggctccactaattcaaagaaaactggaatgcatcagactacttttttggaggaatgactgggatactaagagcaggtacaaaacctgagggacatctgcccagctaggagaagatattctgaaaagacagttttggaagcatgg

SEQ ID NO: 86198 - DNA, 599 bp, Chicken  19866894386236_2
  misc_feature (1)..(43): n is any nucleotide
nnnnnnnnnnnnnnnnnnnnnnnnnnnnnnnnnnnnnnnnnnnatctgctccaaaccgcactgtaagcaaatggtcagaaagtgaggacagatctatgcaaatacactcagaaaataccaccacgaaataccaccaaacacctcaatctacatgcagattcagctggatctcaggtcttcatactctttcctcattcccatttgacatgagctattccaccataaatgtacaccacgttaatttctacgctaaccaattcatctatcwaaacaaaccaaaaagacaactaaacatataayaccctttaaataaacacactgcagaacaaaatggaagggaggtgggggtagactccaacaaggaaagcacctatgtccygagggctggtagacttcttccaacaaattggaagaagagccaaaggctccactaattcaaagaaaactggaatgcatcagactacttttttggaggaatgactgggatactaagagcaggtacaaaacctgagggacatctgcccagctaggagaagatattctgaaaagacagttttggaagcatggtttatttcttccactcccacaacaggaggaag

SEQ ID NO: 86199 - DNA, 600 bp, Chicken  19866894386236_3
aagtgaggacagatctatgcaaatacactcagaaaataccaccacgaaataccaccaaacacctcaatctacatgcagattcagctggatctcaggtcttcatactctttcctcattcccatttgacatgagctattccaccataaatgtacaccacgttaatttctacgctaaccaattcatctatcwaaacaaaccaaaaagacaactaaacatataayaccctttaaataaacacactgcagaacaaaatggaagggaggtgggggtagactccaacaaggaaagcacctatgtccygagggctggtagacttcttccaacaaattggaagaagagccaaaggctccactaattcaaagaaaactggaatgcatcagactacttttttggaggaatgactgggatactaagagcaggtacaaaacctgagggacatctgcccagctaggagaagatattctgaaaagacagttttggaagcatggtttatttcttccactcccacaacaggaggaagcattcaacacgaatgctagcttttggatattttgcttcagcctttgcttttcttttggtttggctctgaccccgtgcagt

SEQ ID NO: 86200 - DNA, 599 bp, Chicken  19866894386237_1
  misc_feature (1)..(123): n is any nucleotide
nnnnnnnnnnnnnnnnnnnnnnnnnnnnnnnnnnnnnnnnnnnnnnnnnnnnnnnnnnnnnnnnnnnnnnnnnnnnnnnnnnnnnnnnnnnnnnnnnnnnnnnnnnnnnnnnnnnnnnnnnnncgtttgtatgctgttgaggagcaatagaagctctcgccgtcttgaaactctctaggccaaatgagcttttcttgcttcaaatatttcttaatcgtagtttcttataggattataaagaggctggtggagaatttaagaaaaaaaaatacagttttttcagccttgcaagtattcctygggtggttggtaagacttggagccggagtagctaaaaagggaggctcagcttccaacagattccgctcctcgttatgcacttaaggaaaagctgccatttcctgctaaaaacccatttgtcttgcaaatttctataatgagcagattttggaataaataccatgtaatctgcagtgacagttctctcatttcttttttattagttcaatcttttcagcatctgaaacacgtagcagtggagtctcagaagaggacgaggcggctctgggggagcttttttaacaccttggcacacaact

SEQ ID NO: 86201 - DNA, 600 bp, Chicken  19866894386237_2
agcttccaacagattccgctcctcgttatgcacttaaggaaaagctgccatttcctgctaaaaacccatttgtcttgcaaatttctataatgagcagattttggaataaataccatgtaatctgcagtgacagttctctcatttcttttttattagttcaatcttttcagcatctgaaacacgtagcagtggagtctcagaagaggacgaggcggctctgggggagcttttttaacaccttggcacacaactctgccaatcgccctccctttgcattcctccccttctctctttgttacmttccatttatttattcaattgcgtgtttgagcagcatctgtccgtagccccaggcatcctttaagtactttagggtacacacagttgcacattaacgagacgtgccccagtcgcatcatcctgaatgcctacaacagcccacagagcaacagctggatgggcaccgccgccttgcttgccttcctatgtttccagatgtctggggaaaaaacaggatggaaggccatcctgcatgtctagaaggacatctacgccttgatgtctccaggcagattctgtgctggggaagggcagtggtgg

SEQ ID NO: 86202 - DNA, 600 bp, Chicken  19866894386238_1
gatggccttcagaggtcctttccaactctaaggattctatgattctattctatgatgctgtactccctatcctccatctcttgcctgcattcatgttgctgtctactggcatgatgaaacttcatttgaatgagagtctaaaatattttatgaaatatattacgatattttatattttctttatataactgtacactaggtttggctttgatttgtgtgcatatgtgttatttcataatgataaaccagaattgcatgcccttatcttgctgttaatccaaactacatcttgaaatcaasctatatgcttgaatttgatctcactctcttctgaggagccatgctggtgcttcattcttgcatatattaccattgtctgatcagaaggtgatgctattatggatggtttatgggaataacatagaaggaagggctgatgcttatacratagtgtgataattttctatgacatatttcacctctaagcatctcaaagagctttacaaattgatttatattctgcacacaaggataattccatccatccatttttattagctgtgcagcaacacttcagtttaggacaggaattaaaggaca

SEQ ID NO: 86203 - DNA, 600 bp, Chicken  19866894386238_2
ttatgaaatatattacgatattttatattttctttatataactgtacactaggtttggctttgatttgtgtgcatatgtgttatttcataatgataaaccagaattgcatgcccttatcttgctgttaatccaaactacatcttgaaatcaasctatatgcttgaatttgatctcactctcttctgaggagccatgctggtgcttcattcttgcatatattaccattgtctgatcagaaggtgatgctattatggatggtttatgggaataacatagaaggaagggctgatgcttatacratagtgtgataattttctatgacatatttcacctctaagcatctcaaagagctttacaaattgatttatattctgcacacaaggataattccatccatccatttttattagctgtgcagcaacacttcagtttaggacaggaattaaaggacatgtccaacctaaaatgcaatgtgaatgtactcataaagcataactttatcagcacttcaaaacgctccctttcagtgctgcatctctagcaaagcatcattcctaaaatattaggcaactgaaagatatactgtccagatgcaaaat

SEQ ID NO: 86204 - DNA, 600 bp, Chicken  19866894386239_1
gaaaaaggattcaaatttctatatatttacaaaaccgactaaagaatggaattgcaaaagtaaaataagccctgaggttacagcattgtctgtacatctctgtagaaagtgcaagctgtgtatgagtttctgagaaatcataaaaaggtcttctttcaggttagaaaacaaaacttttcagacactaaaattaattagtcagaattttcttcagaggagaagtatcgcaggaaaaaaaatataaagggcaggtagcaacagggcgaggggatgcctctttaaactggaagagggtaggtwattatttactgtaagtaattctttactgtaagggtgctgagacactggaacaggttgcccagtgaggttgtgaaygctccctccctgaaagcattcaaagccaggctggagcaaccctggtctagagggagatgtccctgcctattgcaggggggggttgtccatttccaatccaaaccattctatagttctctgaatattaaatctactaaatgataaagttattatcaacacagcacatttaacaaccagttatatgttgtcactgctttctttaagcagaatagctaaccatctctt

SEQ ID NO: 86205 - DNA, 542 bp, Chicken  19866894386239_2
ggttacagcattgtctgtacatctctgtagaaagtgcaagctgtgtatgagtttctgagaaatcataaaaaggtcttctttcaggttagaaaacaaaacttttcagacactaaaattaattagtcagaattttcttcagaggagaagtatcgcaggaaaaaaaatataaagggcaggtagcaacagggcgaggggatgcctctttaaactggaagagggtaggtwattatttactgtaagtaattctttactgtaagggtgctgagacactggaacaggttgcccagtgaggttgtgaaygctccctccctgaaagcattcaaagccaggctggagcaaccctggtctagagggagatgtccctgcctattgcaggggggggttgtccatttccaatccaaaccattctatagttctctgaatattaaatctactaaatgataaagttattatcaacacagcacatttaacaaccagttatatgttgtcactgctttctttaagcagaatagctaaccatctctttcattactacccaacag

SEQ ID NO: 86206 - DNA, 551 bp, Chicken  19866894386241_1
  misc_feature (1)..(33): n is any nucleotide
nnnnnnnnnnnnnnnnnnnnnnnnnnnnnnnnnggggcttatgggggatttatggggttctatgggatcttatgggggatttatgggggcttatagcggcttatgggggctgtgtgggggatttatagggtcctatggggtcttatggggtcctattggggctttatggggtcttatggggttctatgggggcttatgggggatctatggggtcttatggggtctttatggggtcctatggggtcttatggggatttatgggggcgtatagcggcttatggggtcctataatgttgtatrgggtcttatggggtctttatggggtcttatggggtccttatggggtcctacgggagtctgtggaatctttatggggtcctatggggtcttatgggggatttatggggtcgtatggggtcttatgggattctattggggtccaatgggggctttatggggtcctataatgtcctatggggtcttatggggtcttatgggatcctatggggtcagatagggtcctattcggttttatgggcgtcttataggcg

SEQ ID NO: 86207 - DNA, 599 bp, Chicken  19866894386242_1
  misc_feature (1)..(24): n is any nucleotide
nnnnnnnnnnnnnnnnnnnnnnnncgatccagaccgctgctgttgcgtcctgtttctggcccagcaaaggtatctgtctgcaagtgacctcatattactcattttgtttatgtaattccttgggtgaagttgtaatgagtagtgactttgaagtatgtaggttaggtacaagaaaaaaaaaatcaaaactattttataagtaataatctgcaagaaaagcaattttcaacattctaaaatgtatatggtagcatgttgtatactgagcaccgagcccttaggtgcagagtattggtcccyaaaagggcgaattcattgcttctgcaaakgaacctttctttggaattcttcctgaagtgatccccttctccttagccaggggtcatttgctagggattgctggggaggacttgacatagcaatgctaggttgctgtttggaaaatacatcagtctttgcagagagctkttctatgtcagcaaagtggagtttgatagcatttgaatgacaacatgttatgtataattgtttcttcttttaacagaagaaaatgaaactgagaggcaccaaagatctgtcagtagcaacagtgggaaaat

SEQ ID NO: 86208 - DNA, 600 bp, Chicken  19866894386242_2
cagaccgctgctgttgcgtcctgtttctggcccagcaaaggtatctgtctgcaagtgacctcatattactcattttgtttatgtaattccttgggtgaagttgtaatgagtagtgactttgaagtatgtaggttaggtacaagaaaaaaaaaatcaaaactattttataagtaataatctgcaagaaaagcaattttcaacattctaaaatgtatatggtagcatgttgtatactgagcaccgagcccttaggtgcagagtattggtcccyaaaagggcgaattcattgcttctgcaaakgaacctttctttggaattcttcctgaagtgatccccttctccttagccaggggtcatttgctagggattgctggggaggacttgacatagcaatgctaggttgctgtttggaaaatacatcagtctttgcagagagctkttctatgtcagcaaagtggagtttgatagcatttgaatgacaacatgttatgtataattgtttcttcttttaacagaagaaaatgaaactgagaggcaccaaagatctgtcagtagcaacagtgggaaaatatggaacactgcaggagttctcgttctttg

SEQ ID NO: 86209 - DNA, 600 bp, Chicken  19866894386242_3
caagaaaaaaaaaatcaaaactattttataagtaataatctgcaagaaaagcaattttcaacattctaaaatgtatatggtagcatgttgtatactgagcaccgagcccttaggtgcagagtattggtcccyaaaagggcgaattcattgcttctgcaaakgaacctttctttggaattcttcctgaagtgatccccttctccttagccaggggtcatttgctagggattgctggggaggacttgacatagcaatgctaggttgctgtttggaaaatacatcagtctttgcagagagctkttctatgtcagcaaagtggagtttgatagcatttgaatgacaacatgttatgtataattgtttcttcttttaacagaagaaaatgaaactgagaggcaccaaagatctgtcagtagcaacagtgggaaaatatggaacactgcaggagttctcgttctttgacaaggtcagwgcttggcctgttctcmcactgggcttactttaaaccaccagtctggttattatttggtgcattttttayttaatccgtgcatcagcacttagcaattgcctgacttcaagtggcagagggagggcaga

SEQ ID NO: 86210 - DNA, 600 bp, Chicken  19866894386242_4
tggaattcttcctgaagtgatccccttctccttagccaggggtcatttgctagggattgctggggaggacttgacatagcaatgctaggttgctgtttggaaaatacatcagtctttgcagagagctkttctatgtcagcaaagtggagtttgatagcatttgaatgacaacatgttatgtataattgtttcttcttttaacagaagaaaatgaaactgagaggcaccaaagatctgtcagtagcaacagtgggaaaatatggaacactgcaggagttctcgttctttgacaaggtcagwgcttggcctgttctcmcactgggcttactttaaaccaccagtctggttattatttggtgcattttttayttaatccgtgcatcagcacttagcaattgcctgacttcaagtggcagagggagggcagaccaagaaagaagaaaatagatggrtttggaagaatggaaactgatcattaaccttttcctgaatgcttgtctctgacacgtatgcttttctgtacttttcagcagtatttcctcatagtaactgtatgtagctactaaattattatgtttgaaactgagacttttggggaat

SEQ ID NO: 86211 - DNA, 600 bp, Chicken  19866894386242_5
gtgatccccttctccttagccaggggtcatttgctagggattgctggggaggacttgacatagcaatgctaggttgctgtttggaaaatacatcagtctttgcagagagctkttctatgtcagcaaagtggagtttgatagcatttgaatgacaacatgttatgtataattgtttcttcttttaacagaagaaaatgaaactgagaggcaccaaagatctgtcagtagcaacagtgggaaaatatggaacactgcaggagttctcgttctttgacaaggtcagwgcttggcctgttctcmcactgggcttactttaaaccaccagtctggttattatttggtgcattttttayttaatccgtgcatcagcacttagcaattgcctgacttcaagtggcagagggagggcagaccaagaaagaagaaaatagatggrtttggaagaatggaaactgatcattaaccttttcctgaatgcttgtctctgacacgtatgcttttctgtacttttcagcagtatttcctcatagtaactgtatgtagctactaaattattatgtttgaaactgagacttttggggaatgttttctttttatgtt

SEQ ID NO: 86212 - DNA, 600 bp, Chicken  19866894386242_6
cttgacatagcaatgctaggttgctgtttggaaaatacatcagtctttgcagagagctkttctatgtcagcaaagtggagtttgatagcatttgaatgacaacatgttatgtataattgtttcttcttttaacagaagaaaatgaaactgagaggcaccaaagatctgtcagtagcaacagtgggaaaatatggaacactgcaggagttctcgttctttgacaaggtcagwgcttggcctgttctcmcactgggcttactttaaaccaccagtctggttattatttggtgcattttttayttaatccgtgcatcagcacttagcaattgcctgacttcaagtggcagagggagggcagaccaagaaagaagaaaatagatggrtttggaagaatggaaactgatcattaaccttttcctgaatgcttgtctctgacacgtatgcttttctgtacttttcagcagtatttcctcatagtaactgtatgtagctactaaattattatgtttgaaactgagacttttggggaatgttttctttttatgttgcaatgcaaatagaggttggtctccatacttgtggttcagactccttaggata

SEQ ID NO: 86213 - DNA, 600 bp, Chicken  19866894386242_7
gatagcatttgaatgacaacatgttatgtataattgtttcttcttttaacagaagaaaatgaaactgagaggcaccaaagatctgtcagtagcaacagtgggaaaatatggaacactgcaggagttctcgttctttgacaaggtcagwgcttggcctgttctcmcactgggcttactttaaaccaccagtctggttattatttggtgcattttttayttaatccgtgcatcagcacttagcaattgcctgacttcaagtggcagagggagggcagaccaagaaagaagaaaatagatggrtttggaagaatggaaactgatcattaaccttttcctgaatgcttgtctctgacacgtatgcttttctgtacttttcagcagtatttcctcatagtaactgtatgtagctactaaattattatgtttgaaactgagacttttggggaatgttttctttttatgttgcaatgcaaatagaggttggtctccatacttgtggttcagactccttaggatatgaacactaattaaaagtggcatccaagtggtttgatgatttctttccaaattgtctgtaggtgcgcagagtgctcaaaagtc

SEQ ID NO: 86214 - DNA, 600 bp, Chicken  19866894386244_1
cttctttgatggtaaaacatattccattcacttagtgaaacaattagagtggcagctgctgcttttacctccaagaaatattagaaatgccaccacaatcattaagaaaagttcaggaacaaatgacatatcgctttataggaccatctgtttggaggaggaggtgaggagagtgacagaagggcaaaatcaagagagttacatctcatatacaaaataaaattttgcttgcaaaagcaatttatacagaaattgagcaagctgttgtagtaattaataccacagtgtcaaaaaccactyaaagttgacactgtgatttgcaaattcatagtcttcagaactttgtgttggacagccaaaatcttytacaacaaattcttgaaaattttaattttgagaagatgtcttctctaggtcagtccactttgccaggtatttggaaaaatcagttcccatccatccctctccaaacaaaaccagtgacatttaccatcatccttattggcagatttcccaaaagaacaatgatgagattctcagagacatctaccaatgtggtacatgttctctagatctttcatatatagtcagagagataca

SEQ ID NO: 86215 - DNA, 600 bp, Chicken  19866894386244_2
acctccaagaaatattagaaatgccaccacaatcattaagaaaagttcaggaacaaatgacatatcgctttataggaccatctgtttggaggaggaggtgaggagagtgacagaagggcaaaatcaagagagttacatctcatatacaaaataaaattttgcttgcaaaagcaatttatacagaaattgagcaagctgttgtagtaattaataccacagtgtcaaaaaccactyaaagttgacactgtgatttgcaaattcatagtcttcagaactttgtgttggacagccaaaatcttytacaacaaattcttgaaaattttaattttgagaagatgtcttctctaggtcagtccactttgccaggtatttggaaaaatcagttcccatccatccctctccaaacaaaaccagtgacatttaccatcatccttattggcagatttcccaaaagaacaatgatgagattctcagagacatctaccaatgtggtacatgttctctagatctttcatatatagtcagagagatacaacttctcatactatcaatttacaggttaaacagaagtttatctctgtgtactaatcctgatatatt

SEQ ID NO: 86216 - DNA, 504 bp, Chicken  19866894386244_3
aaaccagtgacatttaccatcatccttattggcagatttcccaaaagaacaatgatgagattctcagagacatctaccaatgtggtacatgttctctagatctttcatatatagtcagagagatacaacttctcatactatcaatttacaggttaaacagaagtttatctctgtgtactaatcctgatatattcttatcttctaaaaacacactgatacatccctgaagacaattcaatcagcttagaaaacatggacatgctaacattgtggctaaggaaaattcattggcaaagccarcttttcctacctgtacaagttcaatcttctggagattttccaaatggaataagttctagtagcctgtaaaataaaaaaagaaatactatttttaatgtttttaagcaattaattttactaaccacactttctgtgctatggtgcattgccagtattcagggctactactaccatagttagctcaagtattcgagtaagggctga

SEQ ID NO: 86217 - DNA, 600 bp, Chicken  19866894386248_1
attgctttaattcctgtgccctttttttcacgaatcaggttattgaaagaaatgggatggcaggaatatcctgaaaatgatgagaattaccttcccctcacagaggatgagctcaaagagttccaaattaaatcagagcaggtatgttcataactcttgccattcatgcgtaagtcttctgtattgcgatggctaggatgttctagaagactaagagcagaaatgaaactggattgcagttgatgactttacattatctctagagagcacatgtatatacatactagtgaacatagagcyggtgtccacaggtgacagctactctccatacttgtgtttattttaaaacttactttcattcccacagcgaagaagaaacggatttggaaagaatggatttcttcagggccgcagctccagcctgttccactggagaagcacttttaagacaaagattgaggactcggaaacagaaactagtagcagcgagacttcagatgacgatgcctgagggtgggcacaagaaaattaaaataaataaaaccaacccaataaactcagttcatagttcaacatgtgtttggggttgtataaactaaa

SEQ ID NO: 86218 - DNA, 599 bp, Chicken  19866894386250_1
  misc_feature (1)..(10): n is any nucleotide
nnnnnnnnnntgacatgcacttgtgtctgaagcaggctatgaaagcttttgattttacctcaagaaatctcaaaatagactgcttattgtgattctgtcaacttacttctctggaagcaagcaagcaagttcattggagaaaatttttaataggaaattccagcagcaacaaaagtttatatttgtctccattatgctttcaagttgtcatgttacacacatctgttgtaagatggtttgaggtacccaataaacgatagacaaaagtataaagctgtgtggaaagtaagcaattgggtrggacagtctataaagagcatattcctctaggatcaagagtacgtataagttgtcaycaaccatataatgcatgctggcagtccagtaatggtccttcaacaggtcagaaaaaacattcatcaactatgttttcaaatcagatcacattgcatttaaagagctgaatgaacaaatgaagccggcaacaactgtacatacacaaaactaattttatgacacctatccccaccccaattggactctaatcctcctaagtgttaacacgcaactactgcatgaaaggcactgcaactgctctg

SEQ ID NO: 86219 - DNA, 600 bp, Chicken  19866894386250_2
acctcaagaaatctcaaaatagactgcttattgtgattctgtcaacttacttctctggaagcaagcaagcaagttcattggagaaaatttttaataggaaattccagcagcaacaaaagtttatatttgtctccattatgctttcaagttgtcatgttacacacatctgttgtaagatggtttgaggtacccaataaacgatagacaaaagtataaagctgtgtggaaagtaagcaattgggtrggacagtctataaagagcatattcctctaggatcaagagtacgtataagttgtcaycaaccatataatgcatgctggcagtccagtaatggtccttcaacaggtcagaaaaaacattcatcaactatgttttcaaatcagatcacattgcatttaaagagctgaatgaacaaatgaagccggcaacaactgtacatacacaaaactaattttatgacacctatccccaccccaattggactctaatcctcctaagtgttaacacgcaactactgcatgaaaggcactgcaactgctctgagttcttttttcatgaaaaacttagccttagtatattatactttaacacagaaatct

SEQ ID NO: 86220 - DNA, 599 bp, Chicken  19866894386259_1
  misc_feature (1)..(123): n is any nucleotide
nnnnnnnnnnnnnnnnnnnnnnnnnnnnnnnnnnnnnnnnnnnnnnnnnnnnnnnnnnnnnnnnnnnnnnnnnnnnnnnnnnnnnnnnnnnnnnnnnnnnnnnnnnnnnnnnnnnnnnnnnnnctgatacagcacaccacagaggttgggatgaaggataagccaagtagtgttgcaaggctaccaactactggccagtgtgcatacctcatggttggaaacagcccattgtttataggtctgatgtattgccaacataacttcatctcaataaatggcttaaaaggggctccctgagasctatacattaatgtatctgccttctgtccacagtgaaatggcaaagtctataaggtgatggaatacatggttaatcacagtctgaagggaaggagtcagtgtgggttctgtgaatggaattgctgcctcgctaaatctctggtattctgtgagaaagttgatatgcacatgaattaaagacagtcctgtggatacagtactataaaaataatagtaaaagcctttgacagagtgatgcatagtttatkgaagaaataaggctgcatggaattggaagaaaagttctgttaggaactgaa

SEQ ID NO: 86221 - DNA, 600 bp, Chicken  19866894386259_2
ttgccaacataacttcatctcaataaatggcttaaaaggggctccctgagasctatacattaatgtatctgccttctgtccacagtgaaatggcaaagtctataaggtgatggaatacatggttaatcacagtctgaagggaaggagtcagtgtgggttctgtgaatggaattgctgcctcgctaaatctctggtattctgtgagaaagttgatatgcacatgaattaaagacagtcctgtggatacagtactataaaaataatagtaaaagcctttgacagagtgatgcatagtttatkgaagaaataaggctgcatggaattggaagaaaagttctgttaggaactgaaagctggctcgcatgtaggaartgaagagccttaatagagaaggcattaatggtatcaggcattaatgataaatrygcttttattcaatcagtatagtcagtatttttattcaggaagacttagtaatctgggagcaggaagcaaacagtastcttcatatctayggatgataccaagcagttaaaagccgtgttaattatagcaccagttagacctcataaaattgagcagccaaaaagaaggcaggta

SEQ ID NO: 86222 - DNA, 600 bp, Chicken  19866894386259_3
cttctgtccacagtgaaatggcaaagtctataaggtgatggaatacatggttaatcacagtctgaagggaaggagtcagtgtgggttctgtgaatggaattgctgcctcgctaaatctctggtattctgtgagaaagttgatatgcacatgaattaaagacagtcctgtggatacagtactataaaaataatagtaaaagcctttgacagagtgatgcatagtttatkgaagaaataaggctgcatggaattggaagaaaagttctgttaggaactgaaagctggctcgcatgtaggaartgaagagccttaatagagaaggcattaatggtatcaggcattaatgataaatrygcttttattcaatcagtatagtcagtatttttattcaggaagacttagtaatctgggagcaggaagcaaacagtastcttcatatctayggatgataccaagcagttaaaagccgtgttaattatagcaccagttagacctcataaaattgagcagccaaaaagaaggcaggtataaaaatatgtagtaatacacacaggggggaagtaatctatgaaataagtaaatggtgctagatgtacaaga

SEQ ID NO: 86223 - DNA, 596 bp, Chicken  19866894386259_4
atcacagtctgaagggaaggagtcagtgtgggttctgtgaatggaattgctgcctcgctaaatctctggtattctgtgagaaagttgatatgcacatgaattaaagacagtcctgtggatacagtactataaaaataatagtaaaagcctttgacagagtgatgcatagtttatkgaagaaataaggctgcatggaattggaagaaaagttctgttaggaactgaaagctggctcgcatgtaggaartgaagagccttaatagagaaggcattaatggtatcaggcattaatgataaatrygcttttattcaatcagtatagtcagtatttttattcaggaagacttagtaatctgggagcaggaagcaaacagtastcttcatatctayggatgataccaagcagttaaaagccgtgttaattatagcaccagttagacctcataaaattgagcagccaaaaagaaggcaggtataaaaatatgtagtaatacacacaggggggaagtaatctatgaaataagtaaatggtgctagatgtacaagatgctaaatggactacaaaagggagatgtcctctaatatccctaatagtt

SEQ ID NO: 86224 - DNA, 595 bp, Chicken  19866894386259_5
tcacagtctgaagggaaggagtcagtgtgggttctgtgaatggaattgctgcctcgctaaatctctggtattctgtgagaaagttgatatgcacatgaattaaagacagtcctgtggatacagtactataaaaataatagtaaaagcctttgacagagtgatgcatagtttatkgaagaaataaggctgcatggaattggaagaaaagttctgttaggaactgaaagctggctcgcatgtaggaartgaagagccttaatagagaaggcattaatggtatcaggcattaatgataaatrygcttttattcaatcagtatagtcagtatttttattcaggaagacttagtaatctgggagcaggaagcaaacagtastcttcatatctayggatgataccaagcagttaaaagccgtgttaattatagcaccagttagacctcataaaattgagcagccaaaaagaaggcaggtataaaaatatgtagtaatacacacaggggggaagtaatctatgaaataagtaaatggtgctagatgtacaagatgctaaatggactacaaaagggagatgtcctctaatatccctaatagtt

SEQ ID NO: 86225 - DNA, 519 bp, Chicken  19866894386259_6
gagaaagttgatatgcacatgaattaaagacagtcctgtggatacagtactataaaaataatagtaaaagcctttgacagagtgatgcatagtttatkgaagaaataaggctgcatggaattggaagaaaagttctgttaggaactgaaagctggctcgcatgtaggaartgaagagccttaatagagaaggcattaatggtatcaggcattaatgataaatrygcttttattcaatcagtatagtcagtatttttattcaggaagacttagtaatctgggagcaggaagcaaacagtastcttcatatctayggatgataccaagcagttaaaagccgtgttaattatagcaccagttagacctcataaaattgagcagccaaaaagaaggcaggtataaaaatatgtagtaatacacacaggggggaagtaatctatgaaataagtaaatggtgctagatgtacaagatgctaaatggactacaaaagggagatgtcctctaatatccctaatagtt

SEQ ID NO: 86226 - DNA, 506 bp, Chicken  19866894386259_7
tgcacatgaattaaagacagtcctgtggatacagtactataaaaataatagtaaaagcctttgacagagtgatgcatagtttatkgaagaaataaggctgcatggaattggaagaaaagttctgttaggaactgaaagctggctcgcatgtaggaartgaagagccttaatagagaaggcattaatggtatcaggcattaatgataaatrygcttttattcaatcagtatagtcagtatttttattcaggaagacttagtaatctgggagcaggaagcaaacagtastcttcatatctayggatgataccaagcagttaaaagccgtgttaattatagcaccagttagacctcataaaattgagcagccaaaaagaaggcaggtataaaaatatgtagtaatacacacaggggggaagtaatctatgaaataagtaaatggtgctagatgtacaagatgctaaatggactacaaaagggagatgtcctctaatatccctaatagtt

SEQ ID NO: 86227 - DNA, 600 bp, Chicken  19866894386264_1
ggtctttatggctgagaccctttctgtgtgtggaatgtatgagtcacccattggggctcccagtatgcaggtactcctctgcccgaagcaggacagctgccctggggcagtgcccatagagcagctgcagggggggacagggcagggcagcgggaccacagagctttctgtgggatcataaaagcacgcactgtaaaggtggaaggaaataggtgagttacggtgttttggttagacaaggagatgggcaagacattgctttgatatctaccacgtgcactgctaaatacaggctttagraatgacatatgggtgttgcctccctcagaaggaaaacgccgtggcccacatagtgaatgatcccactcacagagccaagtgctcgaggtccttctcctcaggcttttgaaacgttaaaagcagagatggtctttagggggttttgcrtgatagccttctttgtgtgctcatttttgggtggaagaacagttgtctttgtgatggcttccatgtcccatgagtatctttttattctgcgctcatttttggtgatggtttctgggtgttctgataaacatctctcagtaaaggattgatctg

SEQ ID NO: 86228 - DNA, 600 bp, Chicken  19866894386264_2
cagcgggaccacagagctttctgtgggatcataaaagcacgcactgtaaaggtggaaggaaataggtgagttacggtgttttggttagacaaggagatgggcaagacattgctttgatatctaccacgtgcactgctaaatacaggctttagraatgacatatgggtgttgcctccctcagaaggaaaacgccgtggcccacatagtgaatgatcccactcacagagccaagtgctcgaggtccttctcctcaggcttttgaaacgttaaaagcagagatggtctttagggggttttgcrtgatagccttctttgtgtgctcatttttgggtggaagaacagttgtctttgtgatggcttccatgtcccatgagtatctttttattctgcgctcatttttggtgatggtttctgggtgttctgataaacatctctcagtaaaggattgatctgtcctcccaagccagctttacaagagctctactaagccrgccttggctggtttgtggttttctaccctgcatgtgtagcttcacatgtttctgggcatgctggttcaggtgctttgcctggaagaggatacaatccgatggatccctt

SEQ ID NO: 86229 - DNA, 600 bp, Chicken  19866894386264_3
ccgtggcccacatagtgaatgatcccactcacagagccaagtgctcgaggtccttctcctcaggcttttgaaacgttaaaagcagagatggtctttagggggttttgcrtgatagccttctttgtgtgctcatttttgggtggaagaacagttgtctttgtgatggcttccatgtcccatgagtatctttttattctgcgctcatttttggtgatggtttctgggtgttctgataaacatctctcagtaaaggattgatctgtcctcccaagccagctttacaagagctctactaagccrgccttggctggtttgtggttttctaccctgcatgtgtagcttcacatgtttctgggcatgctggttcaggtgctttgcctggaagaggatacaatccgatggatcccttacagatgtaacttgaagactgctgtgagtctccatgaggctgtccacaccattgtctcaaaggaatctgtaaggaaaagctctttattttgcacagtatggcttgcactatagcacaggctcttgttttattttaattataagcatgattttttttttaattactataggagtatgagatactgtactgtg

SEQ ID NO: 86230 - DNA, 600 bp, Chicken  19866894386264_4
ttcatctgagtagtatgtcctttatttgtgctggccttatagagaaggtagtgaaaaacactgggaaatcaatctgaggtaactgagtgtagagggtttttggtctatgtcagagtttctattttctgccatctgtttacgcaaaagcccaagagcttagcagcagaacaacaggaaaaaatagccctcaactttcccattaatccagttttctttctgcttctacttctgcaacgtcacgtatcactaactctctaccatttgtaatcgtcggggggaaataagatacaactttttctyctctcccttcccccttattggtgtgtgaacttctgtaggtgttaaatcgtcccatctgccttttatcctcaccctccaggagaatctgaaccctcagcttttcacggtggttgctgaggttggagggaagcatcacgtgcgagctgcagttgcctttgcaggtcacctttccgcagcgtactgaaattaatctgctgcactttgtggttcggtgtttcaatcactgctattgctagctggtctttgtgcaggaagcttcaagagccgaggagtgataggcagcgttcactggtgtgtgct

SEQ ID NO: 86231 - DNA, 600 bp, Chicken  19866894386267_1
ctatctctggtacaatcctacgtacacgcggaggtatcttttccttcggaaacatcacatctatgacctaaccaggtgggaatattttcttctcctgaaatgggttggtaagaagcagtgctcacgcacatttcctttgtccctacgccctccttgaagttcgttttcaaagttttggactgacaggtctggtacaaccgcattctccacgttagaaactgtatgttgttacgcacgacgagttttacaccatccagcagcaggagttgccgggttacaccgtgtaatctcatcccacarcacagcccttctgacattgctctgccgccacgctgttcctatgaatagctccgcatagggtcagtaaaggagagagacaccgaacaaacgaggttttagcagggtaacaggagctcaacgygcacagaaagcaacagatagctcccaccagccttgcttccaactgcggatcaggaagagttcctgctcctctctayggaattttaagttgaggaagagcagcagggctgagcacacggctcgtagcagctacaatagaaacaccgacctcactgctamataatagcctaacaacccgga

SEQ ID NO: 86232 - DNA, 600 bp, Chicken  19866894386267_2
tcacgcacatttcctttgtccctacgccctccttgaagttcgttttcaaagttttggactgacaggtctggtacaaccgcattctccacgttagaaactgtatgttgttacgcacgacgagttttacaccatccagcagcaggagttgccgggttacaccgtgtaatctcatcccacarcacagcccttctgacattgctctgccgccacgctgttcctatgaatagctccgcatagggtcagtaaaggagagagacaccgaacaaacgaggttttagcagggtaacaggagctcaacgygcacagaaagcaacagatagctcccaccagccttgcttccaactgcggatcaggaagagttcctgctcctctctayggaattttaagttgaggaagagcagcagggctgagcacacggctcgtagcagctacaatagaaacaccgacctcactgctamataatagcctaacaacccggagactctgaaaagcagacagcacgaagcttccagggctcgttccctccacctcaagcacacaccgctctaaccaagggcttcacacagctcacggcagaggcacctatgcagccattgtttc

SEQ ID NO: 86233 - DNA, 600 bp, Chicken  19866894386267_3
ccgcattctccacgttagaaactgtatgttgttacgcacgacgagttttacaccatccagcagcaggagttgccgggttacaccgtgtaatctcatcccacarcacagcccttctgacattgctctgccgccacgctgttcctatgaatagctccgcatagggtcagtaaaggagagagacaccgaacaaacgaggttttagcagggtaacaggagctcaacgygcacagaaagcaacagatagctcccaccagccttgcttccaactgcggatcaggaagagttcctgctcctctctayggaattttaagttgaggaagagcagcagggctgagcacacggctcgtagcagctacaatagaaacaccgacctcactgctamataatagcctaacaacccggagactctgaaaagcagacagcacgaagcttccagggctcgttccctccacctcaagcacacaccgctctaaccaagggcttcacacagctcacggcagaggcacctatgcagccattgtttctcccccccgccgggcctccggycgctcgcacggccgccgcctccctcccggcgccccgcgacagccccgctcacgg

SEQ ID NO: 86234 - DNA, 600 bp, Chicken  19866894386267_4
ccgtgtaatctcatcccacarcacagcccttctgacattgctctgccgccacgctgttcctatgaatagctccgcatagggtcagtaaaggagagagacaccgaacaaacgaggttttagcagggtaacaggagctcaacgygcacagaaagcaacagatagctcccaccagccttgcttccaactgcggatcaggaagagttcctgctcctctctayggaattttaagttgaggaagagcagcagggctgagcacacggctcgtagcagctacaatagaaacaccgacctcactgctamataatagcctaacaacccggagactctgaaaagcagacagcacgaagcttccagggctcgttccctccacctcaagcacacaccgctctaaccaagggcttcacacagctcacggcagaggcacctatgcagccattgtttctcccccccgccgggcctccggycgctcgcacggccgccgcctccctcccggcgccccgcgacagccccgctcacggcggcattaccggcgcaagcggcttagcggcggatctccctcctcggctccgaacggagcccgccgtcgccggccgccgcacc

SEQ ID NO: 86235 - DNA, 465 bp, Chicken  19866894386267_5
cccaccagccttgcttccaactgcggatcaggaagagttcctgctcctctctayggaattttaagttgaggaagagcagcagggctgagcacacggctcgtagcagctacaatagaaacaccgacctcactgctamataatagcctaacaacccggagactctgaaaagcagacagcacgaagcttccagggctcgttccctccacctcaagcacacaccgctctaaccaagggcttcacacagctcacggcagaggcacctatgcagccattgtttctcccccccgccgggcctccggycgctcgcacggccgccgcctccctcccggcgccccgcgacagccccgctcacggcggcattaccggcgcaagcggcttagcggcggatctccctcctcggctccgaacggagcccgccgtcgccggccgccgcacccggcccgttacccgcccgccgcgggcact

SEQ ID NO: 86236 - DNA, 600 bp, Chicken  19866894386270_1
ctattactttcccagtaaggcactaaatattgtgttcgatgtgaaaatttactataggttgctctatggttctggcacatataatgggtggagtgttagctgagaaactgggtagatcaagctcaaaatttggtgcttaatagctcgtagaatcatagaatggtttgggttggaagggaccttcaagatcatcaagttccaacccctctgctataggcagggatactttccactagaccaggttgctcaaagcccccctgctcaatatgtggaagcttttagcttaggagtttatctgtstctatctatgaccagaagagtcaccatcatcacctgcagaaacatcatcaagtgtataggcaactcaggagtgcagaggaagggcatgtctgctgtacacacagctctagataaagcagtggagcagtcccacaggattcctattacattctagaagggaaaatcctaatttttctatgtgcaggctgtgttctgagcagctggggaaaagctctgctgaggccaggctcttcatarggatgcacggtaggaggatwtgaaatgggaaataatggccctaaagtggactgaatgatgcca

SEQ ID NO: 86237 - DNA, 600 bp, Chicken  19866894386270_2
ccaggttgctcaaagcccccctgctcaatatgtggaagcttttagcttaggagtttatctgtstctatctatgaccagaagagtcaccatcatcacctgcagaaacatcatcaagtgtataggcaactcaggagtgcagaggaagggcatgtctgctgtacacacagctctagataaagcagtggagcagtcccacaggattcctattacattctagaagggaaaatcctaatttttctatgtgcaggctgtgttctgagcagctggggaaaagctctgctgaggccaggctcttcatarggatgcacggtaggaggatwtgaaatgggaaataatggccctaaagtggactgaatgatgccatgagagctgtctcacccagtttttgagacagagtttatttatttattattttaaattttaattctttgtttagttttattttgttttactgcaggaatttaaaatgttatgtgtgtacacaggaaataatagttgcaaggtgcaactgtgatacctgtttatctactccacatgtatacacacctgtattattgcatttaatgtaatttatgtcttatcagccccactggatcacga

SEQ ID NO: 86238 - DNA, 600 bp, Chicken  19866894386270_3
ctgctcaatatgtggaagcttttagcttaggagtttatctgtstctatctatgaccagaagagtcaccatcatcacctgcagaaacatcatcaagtgtataggcaactcaggagtgcagaggaagggcatgtctgctgtacacacagctctagataaagcagtggagcagtcccacaggattcctattacattctagaagggaaaatcctaatttttctatgtgcaggctgtgttctgagcagctggggaaaagctctgctgaggccaggctcttcatarggatgcacggtaggaggatwtgaaatgggaaataatggccctaaagtggactgaatgatgccatgagagctgtctcacccagtttttgagacagagtttatttatttattattttaaattttaattctttgtttagttttattttgttttactgcaggaatttaaaatgttatgtgtgtacacaggaaataatagttgcaaggtgcaactgtgatacctgtttatctactccacatgtatacacacctgtattattgcatttaatgtaatttatgtcttatcagccccactggatcacgaaattcctggaatgacatgtg

SEQ ID NO: 86239 - DNA, 600 bp, Chicken  19866894386272_1
aaaactgcagaatgcagtcaagattcttatttcattggatatataggaaatatatctaattgtagcattgcttactgctctttccaggtacacagagcctgaaaaaaaggtaagctgtaaaaagcctgagctttggaaggcaaggagactggataacaacacagaactaaatccaaattccaaatgcgtaacttaatcttagaaattcattttaggaaaatgtggtgtagactaatcctgaattcagtcataggtcgtgtgggactgttctgacatttagaatggtcctcagcacagcargctttcagggtgacatttagatggaactccttagaaatatatcatgttctctggaaagtgctgcagagtagaacagatttatggagctgggagcctattatgcacaactgtagatcactgctgtctaccaccaatactagatttttgctaatattcaccaagtgtcctttgtctttctcctctccgtgttggaagtaacagttcaatttgatagtgttcttttaaaatatttttttgtctgggaatgaaagaagttctatctttgatctaatcacctgctcagtctaccagctgcttttc

SEQ ID NO: 86240 - DNA, 600 bp, Chicken  19866894386283_1
aacttacagaacagctgctgtgtaatcagttcttctacaattgcctcttgattccaagttgctgtgcctcaggaatgctgggctgcagttacagtataactttgtgcgcattgcctctgtacctttcaagtgtgtggggaaagtctagtttcaatctagaaagaatggctggaatgtgggatggctggttagcacttgtaaactatttttctttgggtctaattcaagtgtcgcttggtgacaacagatccagctcttgctcccagcctgatgagacttgtaaagaagagatgtggtcaygtgggagaagtagccagtgtcaggacctgaaaaaactactggcaagtaagaaagcttcctcagagagtgcaaggacctgtccccctgtgctgtggattccatacttccagttctagccctagaagttcaggaaaattaggacaagttattatttgaagaagaaaagtgtagttaatgcatgagaaataggatagccttcaagctgaggtatagcatggaacaaatctggaagattaagacatccagtttgggaaaatgcaacagaacaaagagaaagctttattagaggtagaaaaggaa

SEQ ID NO: 86241 - DNA, 600 bp, Chicken  19866894386283_2
gacctgtccccctgtgctgtggattccatacttccagttctagccctagaagttcaggaaaattaggacaagttattatttgaagaagaaaagtgtagttaatgcatgagaaataggatagccttcaagctgaggtatagcatggaacaaatctggaagattaagacatccagtttgggaaaatgcaacagaacaaagagaaagctttattagaggtagaaaaggaagaatggtgagagaaaatagttggtggaggtgagaagagtatagagttaaaaggcaggacagaagagtattttsactgtagcatcatagtgcactggtatggggtgcagctgacttaagccccagcaagaaactggggagacctgtggtagccagtgatacctggatgatatagaggtctgaacygtagcaggtactacccaggaaatgaggagtaattaactgatctttggacatttttttgtttgttttggttttgttttgactttatttttttttcagagtacaaattcagtgccaggtggaccaaagtcatgggcacagctgaatggaaagccagcaggactagaaggtggtgagtatgatcaacagaaa

SEQ ID NO: 86242 - DNA, 600 bp, Chicken  19866894386283_3
aataggatagccttcaagctgaggtatagcatggaacaaatctggaagattaagacatccagtttgggaaaatgcaacagaacaaagagaaagctttattagaggtagaaaaggaagaatggtgagagaaaatagttggtggaggtgagaagagtatagagttaaaaggcaggacagaagagtattttsactgtagcatcatagtgcactggtatggggtgcagctgacttaagccccagcaagaaactggggagacctgtggtagccagtgatacctggatgatatagaggtctgaacygtagcaggtactacccaggaaatgaggagtaattaactgatctttggacatttttttgtttgttttggttttgttttgactttatttttttttcagagtacaaattcagtgccaggtggaccaaagtcatgggcacagctgaatggaaagccagcaggactagaaggtggtgagtatgatcaacagaaagggagctggatacatgcttccctcaggcatgagttggggtggactccatttctttctgccctccctgtctagactggtgcctaatrgcacacagctgtgttggttacagtg

SEQ ID NO: 86243 - DNA, 600 bp, Chicken  19866894386283_4
cctggatgatatagaggtctgaacygtagcaggtactacccaggaaatgaggagtaattaactgatctttggacatttttttgtttgttttggttttgttttgactttatttttttttcagagtacaaattcagtgccaggtggaccaaagtcatgggcacagctgaatggaaagccagcaggactagaaggtggtgagtatgatcaacagaaagggagctggatacatgcttccctcaggcatgagttggggtggactccatttctttctgccctccctgtctagactggtgcctaatrgcacacagctgtgttggttacagtgcagtgaggccacatgagtcctgttttgaatctgcatagtctgttggctggaatgatgcaactgcgtcaattcgtgtctgtcaagcgcaagacacagcttgagcagagcatgtcctattgctgctctgaaccagagtgccagtgccatcttcctcagcccagagcagtttttaaaaagaagcagaaaagagagtgtaggaggaaagggtttggattaggagaaaacacgcacatcagagactggaaattatggtgtttccatggctgggtagcatg

SEQ ID NO: 86244 - DNA, 600 bp, Chicken  19866894386284_1
cactggtgctttttttttggagaatcagaagtaaaatcaaaagcctctttgaggattactggaaaggaattccacatgtgtcggtgtgtgtgcacaggccatttattttagagcacaatctcactaaaatcaaatgaacataatctgaacatgcttttaaaagattaaaaccctaaaagatgaaactggaaagccttttgaatttttataggagacaagcaatttatgtggtccatcatgtgcattttcagaccagcctcgttggagcgtattttcagcagaataggagactttcagttwtgtactgtagaccaccacaggctattacagtccaaacattttatgaaacagtatgttctggttgctgtccttctgcaaggaaaagaatctcttcttctgagcatcatctgtcatcaggcttttaaccttttagcctctttctgaggaggtgcatggcatctcagctccactgctgactgcactccacaggcttcatttcaccatcctgtcctcaaaagaggtgttttggcctcaaaattccataggaactccagaagtgaactcgtagacacaaattctgcccagctctcctgcacaata

SEQ ID NO: 86245 - DNA, 600 bp, Chicken  19866894386294_1
gacagctgcagactcctccgtgtgagtctgccagttcagctggcgctctggtacctcaagaagaccaggtctttggatcctttgtcataccctgaaaggatgccgaacagaccatagaatcattaaggttggaaagaccactgaatcatctagtccaaccactgacccatgccaatgaccacactagaccatgtccctcagtgccacatctacactgttcttgaacacctccacggacagtgactccaccacctccctgggcagcctgtgccactgcctcaccataggaaacatcacctygctgtactggatatgtttcaccctgaatagccttcaagacccacatcttaaaaggcagatcaagcacttcagagaaccttactgtatgtatttaaattgcatcctgttcacatcataaataatgcttaccctacccgttttatactgctgtaagcccttcacggccacacctcactgtgcatgtttcctcttgctgatgctttttatcttaccgcacctgcaacactaaaaaccccctaggtaagggcctgctattgtagttagttacatacatttattgtgccctataagcagttgcag

SEQ ID NO: 86246 - DNA, 589 bp, Chicken  19866894386297_1
agtgtcatgaggcacaggcacagcttgcccaaagaggtggtggaagcctcatcctggagacactcagagtcaggctgggcagggctctgtgcgccctgatgtagctgtaggtgtccctgttcattgcaggggagttggaccagatggcctttaggggtctcttccaactccgatgattctatgattctaaatatgtggaaggtcctacagcatctgcttgtctttacctaagaggatgcgttttggataaaataggacctggtctttgcaggccagaggaaagtcacccaacaaaaacgstctaagggatccaggaggggcatcgcaccactccgtgatgttacccagatccttcatttgcattttgtcctgtcctctgcttcctgttatctgttttttctcctgagtgtgcagacagatttatcccagcaatttacaaaacatcttctgctccattttttttgtgaaatcacttacattgtttctccatttcccaacttcctctgcacaaaaaccacctttgcttttacttcagcaagtttctccctgtgccacccaagtttcaaaccatccttttccaaacaaccac

SEQ ID NO: 86247 - DNA, 599 bp, Chicken  19866894386303_1
  misc_feature (1)..(59): n is any nucleotide
nnnnnnnnnnnnnnnnnnnnnnnnnnnnnnnnnnnnnnnnnnnnnnnnnnnnnnnnnnnatccttgataaatcataaaatgatatatatatatttcataatcactatatatatatatatatataatcagagtcattcagagaaaaaagggcaaccaccttcatttgttttctaaatcagtctgcactcttttccaagtaatgaaacagtaatttgattgtaataaatagctcaggcttagaaatgcaaagatgttcagtgaaattgacagatcactacagatccttctctcatttgcatkcccacaaacacagctggagtgttcataactgaatgttggaaaacatgaaaccctatcaacagtaattggtacagctccttccttgcatgccttcctgaaakgtacactatgtgtacacacctgcacatatttgcatgtgtacatatcaacaccctatcaccttacgtgatggttctttgtccctctgccagtgcatataaagatggaaagcaaagtttcaacattaacctggatagctatttataccaaaatacacatmttttcaaaatgcatattttcttgagtaacactttgttttc

SEQ ID NO: 86248 - DNA, 600 bp, Chicken  19866894386303_2
cactatatatatatatatatataatcagagtcattcagagaaaaaagggcaaccaccttcatttgttttctaaatcagtctgcactcttttccaagtaatgaaacagtaatttgattgtaataaatagctcaggcttagaaatgcaaagatgttcagtgaaattgacagatcactacagatccttctctcatttgcatkcccacaaacacagctggagtgttcataactgaatgttggaaaacatgaaaccctatcaacagtaattggtacagctccttccttgcatgccttcctgaaakgtacactatgtgtacacacctgcacatatttgcatgtgtacatatcaacaccctatcaccttacgtgatggttctttgtccctctgccagtgcatataaagatggaaagcaaagtttcaacattaacctggatagctatttataccaaaatacacatmttttcaaaatgcatattttcttgagtaacactttgttttctttcattttcatgtggcttaatttgtggaaccttgttttactgtatatctaggtaaattcacaagttctctttgaattaatctcttggctttttacttatgg

SEQ ID NO: 86249 - DNA, 600 bp, Chicken  19866894386303_3
gaaattgacagatcactacagatccttctctcatttgcatkcccacaaacacagctggagtgttcataactgaatgttggaaaacatgaaaccctatcaacagtaattggtacagctccttccttgcatgccttcctgaaakgtacactatgtgtacacacctgcacatatttgcatgtgtacatatcaacaccctatcaccttacgtgatggttctttgtccctctgccagtgcatataaagatggaaagcaaagtttcaacattaacctggatagctatttataccaaaatacacatmttttcaaaatgcatattttcttgagtaacactttgttttctttcattttcatgtggcttaatttgtggaaccttgttttactgtatatctaggtaaattcacaagttctctttgaattaatctcttggctttttacttatggaggaaaacatctaaaaatagtatttttcttgcatgaagaggaattaaaatgatgacatgcttagttttttaattattttcctccatcctatgaagtagagatcctttcttttttgacttctggaatgctatactaagcttagagaggaaaaatttgat

SEQ ID NO: 86250 - DNA, 600 bp, Chicken  19866894386313_1
catccaaagttaatggtgttaatgaattgtttgtttgctttagatgagcagttacagtttatattcagacatattgaccacaaagatcccgacaagccatatatgtttaccctttccataaatgaacagggagattatgaaggtatgtgaattttaagttttaaatatgaggacagaatctgatgtgcatatttgaaaaaaagggagagacagctataaaggttacagctaaactgtacttatcttctaacttaagagtgaaaaaaaaatgcagcattaatatgttcttaataaagttaytcttgcttataatgaaaacacatctgcttacctgcactgtccttcatttgtgaagttgctgtttactttgtaccaggcaaagcaggagagagaggagagakgcagggacagatggatgctccaatccctctgtgcctctgggtatggacagagtagacttcatttttcattaatttaaatccaaactgtgttgaagtgaaatgtttatcacatgctgggctacatcagttttcaatatgcccacctgcagagcaacaaaaatatttaggaatgcatttcagtctttgaggcaggatgcaa

SEQ ID NO: 86251 - DNA, 600 bp, Chicken  19866894386313_2
tatgtttaccctttccataaatgaacagggagattatgaaggtatgtgaattttaagttttaaatatgaggacagaatctgatgtgcatatttgaaaaaaagggagagacagctataaaggttacagctaaactgtacttatcttctaacttaagagtgaaaaaaaaatgcagcattaatatgttcttaataaagttaytcttgcttataatgaaaacacatctgcttacctgcactgtccttcatttgtgaagttgctgtttactttgtaccaggcaaagcaggagagagaggagagakgcagggacagatggatgctccaatccctctgtgcctctgggtatggacagagtagacttcatttttcattaatttaaatccaaactgtgttgaagtgaaatgtttatcacatgctgggctacatcagttttcaatatgcccacctgcagagcaacaaaaatatttaggaatgcatttcagtctttgaggcaggatgcaaattgttacaattgaagcaggagcacagcaccacgcaggaggtctggaaatttaaaaaaaaaaaaaaggtgtttgttggaagctttgtcttcactgaaagaa

SEQ ID NO: 86252 - DNA, 600 bp, Chicken  19866894386323_1
aggctcagagagctggggctcttcagcctggagaagagaaggctccagggggaccttgtagcagccttccagtacctgaagggggcctacaggaaagctgaggagggactgtttataaaggcacgtagcaacaggataaaacagttttaaactggaaaagggcagatttagagtagatatcaggaataaattctttactgtgagggtggtgagacactggaacaggttgcccagagaggctgtggatgccccctccctggaagcattcaaggccaggctggatggggctttgagcaaccyrgtctagagggaggtgtccctgcctatagcagggggttggaactggatgatcttaaagttcccttccaacccaaaccattctatgattctatgattccatgattctatgatcatagataaaaaaaaataaataaggggatatctttggcgaagtgagtaactgggatgagtagttcagcctgtggattcttttaattatttttttaccactacctctacaacatttgcaattcagaccgaatgtgaaaggagatgactatttttataaaacaaaatggttgtttcattctattaagaaaa

SEQ ID NO: 86253 - DNA, 600 bp, Chicken  19866894386323_2
ggctcagagagctggggctcttcagcctggagaagagaaggctccagggggaccttgtagcagccttccagtacctgaagggggcctacaggaaagctgaggagggactgtttataaaggcacgtagcaacaggataaaacagttttaaactggaaaagggcagatttagagtagatatcaggaataaattctttactgtgagggtggtgagacactggaacaggttgcccagagaggctgtggatgccccctccctggaagcattcaaggccaggctggatggggctttgagcaaccyrgtctagagggaggtgtccctgcctatagcagggggttggaactggatgatcttaaagttcccttccaacccaaaccattctatgattctatgattccatgattctatgatcatagataaaaaaaaataaataaggggatatctttggcgaagtgagtaactgggatgagtagttcagcctgtggattcttttaattatttttttaccactacctctacaacatttgcaattcagaccgaatgtgaaaggagatgactatttttataaaacaaaatggttgtttcattctattaagaaaaa

SEQ ID NO: 86254 - DNA, 599 bp, Chicken  19866894386326_1
  misc_feature (1)..(95): n is any nucleotide
nnnnnnnnnnnnnnnnnnnnnnnnnnnnnnnnnnnnnnnnnnnnnnnnnnnnnnnnnnnnnnnnnnnnnnnnnnnnnnnnnnnnnnnnnnnnnnntcatcctagaaattgatcatcatgcaagtattaataagccaccatagaaaaagaatgtaaattgttttataccagtaaggttctgatacactccctcagtagcttcagacattaaagagtgcagttaaaacagagcccagatagaatcattagtgccattgcacagtctctacaaaagaggtttgttgagccaaaagagggaggygtacatggttagaataaaagcctgtttgtgccaacctgaatcttcaccagtaacagtaaaataagtctacatctacagagagggacagaggaaaggaaacttctgatggagtagggtaataaaaccctatcagcttccctttatcatctgagttctcttgaagaggagcctttccaaagaaaaagacatattacaggtactgaccaacagtcatggttttgtaatgccatcagacaggttttaaacattagtaggggctgtaatttcctttgtaatacccacataaatgtgtatcttca

SEQ ID NO: 86255 - DNA, 600 bp, Chicken  19866894386327_1
ggaccccccactccccatccagggaccaggcttgcagatggaaagggtttgacgttgatccagttcttctcgggattagtcctataaacctggagagcctaagtgagatggatggcacatgaattttgctgggaagccctcagactcaatgagccacacatgcgagcagccgtataaatttaccgctcgcttcctggaaaggtttaatttatggaatccatatggcagcaccgcgcaaccacgagcgctcggcgcatcccgtgagccctcgagtggctccaactggcggagtgccacccyggccaccaccacacggctgtggggtgctccttcccaccccgtagaagcagatggcggtgccaatgctgggagcacagccccagggtgcagccccagcaatcccctacctgtgggcaagggaaagggtcggggcgcgcgttgatacctaacagcaactcgtcattaattagcattaatcagccctgctcacgcgtcacagcagcactgagcaacgcgcaacgggggagcaacagatatggggtcagctgggcagccccaatcccttcttttcctgcagggggtgttcagacgctaagagat

SEQ ID NO: 86256 - DNA, 600 bp, Chicken  19866894386330_1
gcagccattcccagttggtgcatgcaggcagagcttgggttttgacagctgcctcgtgattaggtttatcattgtggcaagaacagtaaaactgcccttgttgtctcattgtttcttttcactgctttcttcttttttttccctattccacagccaaacaagcttccagaaataaactttccctttgttctcacagggatgagtgtctggcacaggcggccttgcactcattagtcgttgggactcctcctcattctggactgcctgatgcccaaaatgtacctttgataattttatccrgagttaacyacaagttttggctctgaaagaatagatctgggcaaactcagaagtctgraccaaagtattacyaagcagaaactgcctttgattttattttattggatactcagtgagtcgttttcttcctccaagtaaagtaacacctgaggagaggagaaagtcatttcaccgtgcaccaggtgctactcgattggcttatgactgcagttgaacttctgggtgtagccttaatccaagcaataattaaaaacaaaacaaaacaaaacaaaacaatcagcctcgagcaaaattggtcac

SEQ ID NO: 86257 - DNA, 600 bp, Chicken  19866894386330_2
cccagttggtgcatgcaggcagagcttgggttttgacagctgcctcgtgattaggtttatcattgtggcaagaacagtaaaactgcccttgttgtctcattgtttcttttcactgctttcttcttttttttccctattccacagccaaacaagcttccagaaataaactttccctttgttctcacagggatgagtgtctggcacaggcggccttgcactcattagtcgttgggactcctcctcattctggactgcctgatgcccaaaatgtacctttgataattttatccrgagttaacyacaagttttggctctgaaagaatagatctgggcaaactcagaagtctgraccaaagtattacyaagcagaaactgcctttgattttattttattggatactcagtgagtcgttttcttcctccaagtaaagtaacacctgaggagaggagaaagtcatttcaccgtgcaccaggtgctactcgattggcttatgactgcagttgaacttctgggtgtagccttaatccaagcaataattaaaaacaaaacaaaacaaaacaaaacaatcagcctcgagcaaaattggtcacaagtgaagt

SEQ ID NO: 86258 - DNA, 600 bp, Chicken  19866894386330_3
attaggtttatcattgtggcaagaacagtaaaactgcccttgttgtctcattgtttcttttcactgctttcttcttttttttccctattccacagccaaacaagcttccagaaataaactttccctttgttctcacagggatgagtgtctggcacaggcggccttgcactcattagtcgttgggactcctcctcattctggactgcctgatgcccaaaatgtacctttgataattttatccrgagttaacyacaagttttggctctgaaagaatagatctgggcaaactcagaagtctgraccaaagtattacyaagcagaaactgcctttgattttattttattggatactcagtgagtcgttttcttcctccaagtaaagtaacacctgaggagaggagaaagtcatttcaccgtgcaccaggtgctactcgattggcttatgactgcagttgaacttctgggtgtagccttaatccaagcaataattaaaaacaaaacaaaacaaaacaaaacaatcagcctcgagcaaaattggtcacaagtgaagtcccacggataggtgtcagcaaggtggaaacacagcgctcatcacaaggg

SEQ ID NO: 86259 - DNA, 600 bp, Chicken  19866894386330_4
tgtggcaagaacagtaaaactgcccttgttgtctcattgtttcttttcactgctttcttcttttttttccctattccacagccaaacaagcttccagaaataaactttccctttgttctcacagggatgagtgtctggcacaggcggccttgcactcattagtcgttgggactcctcctcattctggactgcctgatgcccaaaatgtacctttgataattttatccrgagttaacyacaagttttggctctgaaagaatagatctgggcaaactcagaagtctgraccaaagtattacyaagcagaaactgcctttgattttattttattggatactcagtgagtcgttttcttcctccaagtaaagtaacacctgaggagaggagaaagtcatttcaccgtgcaccaggtgctactcgattggcttatgactgcagttgaacttctgggtgtagccttaatccaagcaataattaaaaacaaaacaaaacaaaacaaaacaatcagcctcgagcaaaattggtcacaagtgaagtcccacggataggtgtcagcaaggtggaaacacagcgctcatcacaagggcagggcrctggttg

SEQ ID NO: 86260 - DNA, 600 bp, Chicken  19866894386330_5
tattacyaagcagaaactgcctttgattttattttattggatactcagtgagtcgttttcttcctccaagtaaagtaacacctgaggagaggagaaagtcatttcaccgtgcaccaggtgctactcgattggcttatgactgcagttgaacttctgggtgtagccttaatccaagcaataattaaaaacaaaacaaaacaaaacaaaacaatcagcctcgagcaaaattggtcacaagtgaagtcccacggataggtgtcagcaaggtggaaacacagcgctcatcacaagggcagggcrctggttgctacaccagtgacactgtgtgtggcagagcggttaatggcaacagcagagaccacagcttttactttcaacagaaactgttaacctgaatggtaaattttcttcctcctcctattttcattgaattactgcagctgctctgacggaattacagaactgatcagctcagcaagcaaaacttatttttccctaaacttgctgactttatcttaaaggacagattaatggagagcaaggatctgagaataccctttgatgataygatcccctacattttctctaccacccagcaaa

SEQ ID NO: 86261 - DNA, 537 bp, Chicken  19866894386330_6
ggaaacacagcgctcatcacaagggcagggcrctggttgctacaccagtgacactgtgtgtggcagagcggttaatggcaacagcagagaccacagcttttactttcaacagaaactgttaacctgaatggtaaattttcttcctcctcctattttcattgaattactgcagctgctctgacggaattacagaactgatcagctcagcaagcaaaacttatttttccctaaacttgctgactttatcttaaaggacagattaatggagagcaaggatctgagaataccctttgatgataygatcccctacattttctctaccacccagcaaactggcaaccttctttggaaaaaaaaaaaaaagaacaagggaaaaagtccaactactcaaacagggaaaaaacatttgtttgagattggttttttcttaggcagcgcctgaagcataggcattaaggaatgttgcaatagaacacttatgtcatgtggacaaagaaagtatcttatgaacctcttaccaaagacaacgcttctttt

SEQ ID NO: 86262 - DNA, 599 bp, Chicken  19866894386331_1
  misc_feature (1)..(119): n is any nucleotide
nnnnnnnnnnnnnnnnnnnnnnnnnnnnnnnnnnnnnnnnnnnnnnnnnnnnnnnnnnnnnnnnnnnnnnnnnnnnnnnnnnnnnnnnnnnnnnnnnnnnnnnnnnnnnnnnnnnnnnncctcctctcttttgcagaggagagcggtggagctgagatgcttgaagtgacttctgccttctgcgtgcatgtgcctcccccaggcgagctgggaagcaggctgcatcttttgggctgcttgcagcatcctagcatctcctgcaggtgttctggcctgaacctgacctgctgtcgaagttgkccctgaggacctggactgggaggggaggctcatcccaagcaaagcctgtatatatcttacttttctgtcttgtgcaaactggggtagtgcagggggggcttatttaaaatgaggtggggagggggtgcccagctgggacttcgattgtgcagagcaacactttgcctggcgtgaccgatgcctgctggtgacacgagccttgaattgtctccagctgcagaagtcaccgggctgggaagtacagctgggctgctccgtcctcctgrtggatggggcagggtgagcgagggggacggagc

SEQ ID NO: 86263 - DNA, 600 bp, Chicken  19866894386331_2
ttctggcctgaacctgacctgctgtcgaagttgkccctgaggacctggactgggaggggaggctcatcccaagcaaagcctgtatatatcttacttttctgtcttgtgcaaactggggtagtgcagggggggcttatttaaaatgaggtggggagggggtgcccagctgggacttcgattgtgcagagcaacactttgcctggcgtgaccgatgcctgctggtgacacgagccttgaattgtctccagctgcagaagtcaccgggctgggaagtacagctgggctgctccgtcctcctgrtggatggggcagggtgagcgagggggacggagcgatattgccatattatgatcttggtgcctgctccttcatttaatgttgtcttctgcaaatgcattgatttggatttatttaaaagtttgttttgaaatgaactgactttgcacaacttggattttttttttcaatactcaatgtgcttgtatctgcattcgacactgcagcgttggaaacgttcttactcagtaacctcatctgggccttgttgtaaattgtgacttcagcacgagtaattcaaatcactgtatctctttttgcctt

SEQ ID NO: 86264 - DNA, 599 bp, Chicken  19866894386332_1
  misc_feature (1)..(58): n is any nucleotide
nnnnnnnnnnnnnnnnnnnnnnnnnnnnnnnnnnnnnnnnnnnnnnnnnnnnnnnnnncaggtctagaagtggttctgcaacttcctgccatgggaaaagaaacaagaaagtaaaggctgcagttgtctgcagtatggtttcttctagttttttaatactgttactttttaatagtttagattattaactgcagcaaattcctgaactgcaatcttgcagagtgtaaactggccatgtgtgatggctttcttccacgttccagttaatcaatcacagcaaagaaatacataaaatacttkcccaatgttgcttgcttatgtatgcaattaacttatttgtactcaggattgcactatgactgttctccaaataggagaggcagtatcagtaaaggggtggtgcacttaaattagaggcatgaatactgtcctatcacaaatgataaaagatccttttataactcttctctgtaatcttcaagcagacaaataaacaacagaagaagtgttaaaaccctggctgaattgacgttcatagcctgatcctaaagctttcttcagacagtggccacctctgagttttagacagcactttatgc

SEQ ID NO: 86265 - DNA, 599 bp, Chicken  19866894386333_1
  misc_feature (1)..(119): n is any nucleotide
nnnnnnnnnnnnnnnnnnnnnnnnnnnnnnnnnnnnnnnnnnnnnnnnnnnnnnnnnnnnnnnnnnnnnnnnnnnnnnnnnnnnnnnnnnnnnnnnnnnnnnnnnnnnnnnnnnnnnnngtatggatgtgatgggtggactattcagtggatgaagaactggctgcaggaccaagtccacagactggtggtcaatggctcagtgtctggatgaagatcagtgacaagtggtgtctcccaggcattagtactggggacaacactctttaatatcctcatcagtgacatcaacagtgggccyaagtacaccctcagcaatttcgtggatgacaccaagctgtgggttgcagtcaacacaccagtgggacagaatactatccagagggatctggacatgctaagcagtgggctcaggtgacactcgtgagattcaacaaacctaagtgcaaggtcttgcacctgggttgaggcaacctycattaccaatacaaactgggggatggaaggattgagtgtagccctgctgaaaaagacctggawgtactggtggatgtcaggctggacatgagccagcagcrtgtccttgcagcacagaaagcc

SEQ ID NO: 86266 - DNA, 600 bp, Chicken  19866894386333_2
ccacagactggtggtcaatggctcagtgtctggatgaagatcagtgacaagtggtgtctcccaggcattagtactggggacaacactctttaatatcctcatcagtgacatcaacagtgggccyaagtacaccctcagcaatttcgtggatgacaccaagctgtgggttgcagtcaacacaccagtgggacagaatactatccagagggatctggacatgctaagcagtgggctcaggtgacactcgtgagattcaacaaacctaagtgcaaggtcttgcacctgggttgaggcaacctycattaccaatacaaactgggggatggaaggattgagtgtagccctgctgaaaaagacctggawgtactggtggatgtcaggctggacatgagccagcagcrtgtccttgcagcacagaaagccaactgtattattttgggctgaatcaagagatgcacgaccaccagtttgagggaggtgatcctgcccctctactctgctgatgaggccttatccagagtactgcatccagatgtggagtcttcagtacaagagagacacatgagacatgtgcctgttggagcgcatccagagaagggc

SEQ ID NO: 86267 - DNA, 583 bp, Chicken  19866894386333_3
ggcattagtactggggacaacactctttaatatcctcatcagtgacatcaacagtgggccyaagtacaccctcagcaatttcgtggatgacaccaagctgtgggttgcagtcaacacaccagtgggacagaatactatccagagggatctggacatgctaagcagtgggctcaggtgacactcgtgagattcaacaaacctaagtgcaaggtcttgcacctgggttgaggcaacctycattaccaatacaaactgggggatggaaggattgagtgtagccctgctgaaaaagacctggawgtactggtggatgtcaggctggacatgagccagcagcrtgtccttgcagcacagaaagccaactgtattattttgggctgaatcaagagatgcacgaccaccagtttgagggaggtgatcctgcccctctactctgctgatgaggccttatccagagtactgcatccagatgtggagtcttcagtacaagagagacacatgagacatgtgcctgttggagcgcatccagagaagggccacaaaaatgatccatggaatggaacacctcttctatgaggacagg

SEQ ID NO: 86268 - DNA, 545 bp, Chicken  19866894386333_4
tcagtgacatcaacagtgggccyaagtacaccctcagcaatttcgtggatgacaccaagctgtgggttgcagtcaacacaccagtgggacagaatactatccagagggatctggacatgctaagcagtgggctcaggtgacactcgtgagattcaacaaacctaagtgcaaggtcttgcacctgggttgaggcaacctycattaccaatacaaactgggggatggaaggattgagtgtagccctgctgaaaaagacctggawgtactggtggatgtcaggctggacatgagccagcagcrtgtccttgcagcacagaaagccaactgtattattttgggctgaatcaagagatgcacgaccaccagtttgagggaggtgatcctgcccctctactctgctgatgaggccttatccagagtactgcatccagatgtggagtcttcagtacaagagagacacatgagacatgtgcctgttggagcgcatccagagaagggccacaaaaatgatccatggaatggaacacctcttctatgaggacagg

SEQ ID NO: 86269 - DNA, 600 bp, Chicken  19866894386336_1
ctctctcaaaatgttttccctgcttgcaggttcatcgtttggtggtagtgaatgaagcagatagcattgtgggtatcatctccctttctgacattctacaggctttggtactcacaccagcaggtatggatgttgcattctgatgtttgccgtaagtcattcagtagtgcatacagcttgctggtcttagctggtatgataacgataatacactgctgatattaaagttttctaagtttgattatactcttcaaataagcatttcacttctctgcaggtaaaagccaacaaagtgcttawctgtcagacttttgtcagtctttttgctgtgtcagagacgtcaccccagggtgaattatyccagtagaactctctgacgtatcactaatcttgatcaggttccttttaaccacagtacctaacagtacgtttaattatttctgctactttgacacggattgtcctgttggtttttagttttcctcaagttactgatctgctctgccttcttaactggaacttcactttggttgtgtaaatgacctcagtgtcacaacaactaaagcaaagtcctcctctggctttgtgagaaagacagaa

SEQ ID NO: 86270 - DNA, 600 bp, Chicken  19866894386336_2
atagcattgtgggtatcatctccctttctgacattctacaggctttggtactcacaccagcaggtatggatgttgcattctgatgtttgccgtaagtcattcagtagtgcatacagcttgctggtcttagctggtatgataacgataatacactgctgatattaaagttttctaagtttgattatactcttcaaataagcatttcacttctctgcaggtaaaagccaacaaagtgcttawctgtcagacttttgtcagtctttttgctgtgtcagagacgtcaccccagggtgaattatyccagtagaactctctgacgtatcactaatcttgatcaggttccttttaaccacagtacctaacagtacgtttaattatttctgctactttgacacggattgtcctgttggtttttagttttcctcaagttactgatctgctctgccttcttaactggaacttcactttggttgtgtaaatgacctcagtgtcacaacaactaaagcaaagtcctcctctggctttgtgagaaagacagaaagtgtcttaagatcacagttctgccttcaaaataccaggttgaggaggcagagctgaaca

SEQ ID NO: 86271 - DNA, 599 bp, Chicken  19866894386338_1
  misc_feature (1)..(113): n is any nucleotide
nnnnnnnnnnnnnnnnnnnnnnnnnnnnnnnnnnnnnnnnnnnnnnnnnnnnnnnnnnnnnnnnnnnnnnnnnnnnnnnnnnnnnnnnnnnnnnnnnnnnnnnnnnnnnnnnntgagcttcctagatgtctgaggaaagaatgtccaaaggagaaggaaaaaagagtgtttcataggaggttcaattatctattcacgccatctactacgcaagaagtctgaaatctaaattaattatttctaataacaattttgaagggaaaatgaaatataaattcacactctttccaagttgtaaaratctttgagatastagacgcatctttttccatttttcttttaacaacacaatgaagaagaaagtgctgattaccacagcctgtgaattatttttgcaatagtttatttgaaaaaaaaaaaaagaaagaaaaagaaagaagctgtttacagtgatttttattcctagcccctaaaaaatattactgctattataccatagaagtgtttactttattccaccagcatttgcaactaaagcacctgtatttgcaaatttgatatcatcaagccactttttgagttccactcttgtagataag

SEQ ID NO: 86272 - DNA, 599 bp, Chicken  19866894386338_2
  misc_feature (1)..(100): n is any nucleotide
nnnnnnnnnnnnnnnnnnnnnnnnnnnnnnnnnnnnnnnnnnnnnnnnnnnnnnnnnnnnnnnnnnnnnnnnnnnnnnnnnnnnnnnnnnnnnnnnnnnntgagcttcctagatgtctgaggaaagaatgtccaaaggagaaggaaaaaagagtgtttcataggaggttcaattatctattcacgccatctactacgcaagaagtctgaaatctaaattaattatttctaataacaattttgaagggaaaatgaaatataaattcacactctttccaagttgtaaaratctttgagatastagacgcatctttttccatttttcttttaacaacacaatgaagaagaaagtgctgattaccacagcctgtgaattatttttgcaatagtttatttgaaaaaaaaaaaaagaaagaaaaagaaagaagctgtttacagtgatttttattcctagcccctaaaaaatattactgctattataccatagaagtgtttactttattccaccagcatttgcaactaaagcacctgtatttgcaaatttgatatcatcaagccactttttgagttccactcttgtagataagcacccatcatttt

SEQ ID NO: 86273 - DNA, 600 bp, Chicken  19866894386338_3
tttttccatttttcttttaacaacacaatgaagaagaaagtgctgattaccacagcctgtgaattatttttgcaatagtttatttgaaaaaaaaaaaaagaaagaaaaagaaagaagctgtttacagtgatttttattcctagcccctaaaaaatattactgctattataccatagaagtgtttactttattccaccagcatttgcaactaaagcacctgtatttgcaaatttgatatcatcaagccactttttgagttccactcttgtagataagcacccatcatttttctcacccagsatctttgtaacacttgcttggaagaaagtgccagcagggcaatacacagacttacaaaaaarcaaacaaccgcacaccataacatacaaggccatagcagaacatcatctcttccaacttatctctttgtttaatgaagtaatgcaagttacttatatagaataactacaggtgttttgctatcagtttaaaagaagtgatgaagtacctgataaggaaacatatgattactgaaatagttttatacagtaagggcaaatgttttcagttagacattacataaaataactgaattaagac

SEQ ID NO: 86274 - DNA, 600 bp, Chicken  19866894386338_4
attatttttgcaatagtttatttgaaaaaaaaaaaaagaaagaaaaagaaagaagctgtttacagtgatttttattcctagcccctaaaaaatattactgctattataccatagaagtgtttactttattccaccagcatttgcaactaaagcacctgtatttgcaaatttgatatcatcaagccactttttgagttccactcttgtagataagcacccatcatttttctcacccagsatctttgtaacacttgcttggaagaaagtgccagcagggcaatacacagacttacaaaaaarcaaacaaccgcacaccataacatacaaggccatagcagaacatcatctcttccaacttatctctttgtttaatgaagtaatgcaagttacttatatagaataactacaggtgttttgctatcagtttaaaagaagtgatgaagtacctgataaggaaacatatgattactgaaatagttttatacagtaagggcaaatgttttcagttagacattacataaaataactgaattaagactccttacaaggaatccttgtagcaaaagaagttttacaggggcaaaacacaacaacaatgtg

SEQ ID NO: 86275 - DNA, 599 bp, Chicken  19866894386339_1
  misc_feature (1)..(116): n is any nucleotide
nnnnnnnnnnnnnnnnnnnnnnnnnnnnnnnnnnnnnnnnnnnnnnnnnnnnnnnnnnnnnnnnnnnnnnnnnnnnnnnnnnnnnnnnnnnnnnnnnnnnnnnnnnnnnnnnnnnnatgaagagttacaggagaaaagtgtctggctacctatcatattaaatcttaactatcttaatagattttcatattaccaatattctccccactcccatttagttataaggagaggagttagtgtcaacttgaaaatcactcatgccagtaaaaaaagaagtcccacagcaatacacacacacaraaaaaaacctggatcattggatttctttcacttcaaggagaatcgtccaatacggaaattataaaacttaacagattaagaaggttagagtaacatacaatccctactataacaggctgctcaaactatgcatgaataagacttgttggtctgttgaattcattatttttccacaagcatcacacatgtacagaaatgagtgctattaagcatgtttttagataacsaatttcatttgtactttattacatttttaagagggttgcttaaatgcaacacaatgatacctctctgaagta

SEQ ID NO: 86276 - DNA, 600 bp, Chicken  19866894386339_2
gaggagttagtgtcaacttgaaaatcactcatgccagtaaaaaaagaagtcccacagcaatacacacacacacaaaaaaacctggatcattggatttctttcacttcaaggagaatcgtccaatacggaaattataaaacttaacagattaagaaggttagagtaacatacaatccctactataacaggctgctcaaactatgcatgaataagacttgttggtctgttgaattcattatttttccacaagcatcacacatgtacagaaatgagtgctattaagcatgtttttagataacsaatttcatttgtactttattacatttttaagagggttgcttaaatgcaacacaatgatacctctctgaagtaccaccacgtaaggtgatgttccccatataactgtttctctctacctttrcctgagagcatctttaaattacagccacgttcttagagtgtgcagaccaagtgacaactgcaaaatgaagattccaaatacaaagttgctcttaaaaaacattaatctagattttgaattattaatttatctgatcggtgtctctggtatcaaatcagcatttaatctttaaagaaaag

SEQ ID NO: 86277 - DNA, 600 bp, Chicken  19866894386339_3
aatacggaaattataaaacttaacagattaagaaggttagagtaacatacaatccctactataacaggctgctcaaactatgcatgaataagacttgttggtctgttgaattcattatttttccacaagcatcacacatgtacagaaatgagtgctattaagcatgtttttagataacsaatttcatttgtactttattacatttttaagagggttgcttaaatgcaacacaatgatacctctctgaagtaccaccacgtaaggtgatgttccccatataactgtttctctctacctttrcctgagagcatctttaaattacagccacgttcttagagtgtgcagaccaagtgacaactgcaaaatgaagattccaaatacaaagttgctcttaaaaaacattaatctagattttgaattattaatttatctgatcggtgtctctggtatcaaatcagcatttaatctttaaagaaaagtggatttcacattacataaattgacatttcaatttttttttattattattattatttttttttttttaactgccaacagaacttaccagtacactgtcctccatttgtgggatctccataa

SEQ ID NO: 86278 - DNA, 363 bp, Chicken  19866894386343_1
tgtctgaacagcttaactgatagaagactaataattctttatgaagcaggttttaataatgctttcttgtttctggtttattatgccattaaagtcatcttttgtcatattagtaatagagatatcctcaaaataacccaagtagcaatttagcatagcttttaatgtcagcataaattcctgtatgactaaaattatttcaaatgttaacagtgttgtttgcattttcaaatatatgtttcatgttattatggaatgcaaattccttgagttaatgaaaatgttcattgtctgaagtcragagaaattcagtaatatttcaggcctacgattctggtatgcaagtcactgaatgggaaaata

SEQ ID NO: 86279 - DNA, 599 bp, Chicken  19866894386345_1
  misc_feature (1)..(118): n is any nucleotide
nnnnnnnnnnnnnnnnnnnnnnnnnnnnnnnnnnnnnnnnnnnnnnnnnnnnnnnnnnnnnnnnnnnnnnnnnnnnnnnnnnnnnnnnnnnnnnnnnnnnnnnnnnnnnnnnnnnnnnccgttggagacactactaatggagtattattaatgtcttgaagataatcatgcagatgctggatgattctgctttaaactgtagttaaaagcaatttggaaagcattttggtacttccatgattttagttaaaagcaaaaaacatgcatattttaaaagtctttgttttctcaactgaaaawatatatatatatatatttttaccataataagcatcatattagctataatctgttgtaattaccacttgagctctgtgagtgatggcaagaactggtaagcaagttttggatgacctttgagcagttccctggaaactttttcaaacactcccatactgctgccctcccagcagcttgagctgggctgtagctggcagcactgcagccagggtgaaaacctctccagaaagagctccatctccaaagtctgcctaaaaccgcacttagaaccacatttcaaagccttacctttgcagtaa

SEQ ID NO: 86280 - DNA, 600 bp, Chicken  19866894386346_1
catatgcacaggagcattcactaattttcacttcctaaccagacagacatctcctgattttcggagattcaaaaaatgcttttctgaattcatctcgattcaggagccctaagcacttccaaaagtcagttcaaagcggggtggacagaattagtgggcgctttataatatgagaagctaaaagcctggagaggaacggaatctctctgatttatctgtctgcaaatacttcaattcaccggctatttcccactggaagatgtttaaccgagcttggctctcgattagcaatgattcttmctttttttttttttttaaattcacacaaagaatctcattcataagtaatatattctgtctcacacttgtctcacatggttatggagttgctttaattcagtaaaatctgctttagacattgttttacatgaagttaacaggaattaggcaagatggaaggttgaatcattcaactcacatcactggcaatttctctggaggccctcgcagtctggaaagggagtgcttccattgtcagcttgtagccttgagcacatagattatgccaagattccctgtatttcacctaaagtaggagag

SEQ ID NO: 86281 - DNA, 600 bp, Chicken  19866894386347_1
actcccactctggggttcagtagtgaatcttcttttcttcactatctcaagagcatgcctaatttacacaatctatctccttctgaataacttccactgcggtcaatgggagctgtgtgcctgaagccaagggcaaaatttggctcaggcagagcataaaagctccagcgctttcccaaatgaaatacatttagagtttgacatgcacagttggatgcagtaagtaaaaaatcagttttgctgggcacagcaaacacaagttttcagtgactaatgctgcttcctgcttccgtctcatcrttgttaaaagatgtgctttataagaaagactgagctagatcaaaccagagacttacttatcttacctactgatcttaaagggatattttatgtagtttttttgtttccagtgctttgcagcttaggwcttcctgtatcaggagtagcaatttatgtttagctctgcgcagattgtaataaaagtagcgcccagcttaattgctttcagtgtcgcagctccttcaaacacagctcttttaactccatccaaattatttccccaaactcgggagcagtagcagcacrgttgactgatatgat

SEQ ID NO: 86282 - DNA, 600 bp, Chicken  19866894386347_2
caagggcaaaatttggctcaggcagagcataaaagctccagcgctttcccaaatgaaatacatttagagtttgacatgcacagttggatgcagtaagtaaaaaatcagttttgctgggcacagcaaacacaagttttcagtgactaatgctgcttcctgcttccgtctcatcrttgttaaaagatgtgctttataagaaagactgagctagatcaaaccagagacttacttatcttacctactgatcttaaagggatattttatgtagtttttttgtttccagtgctttgcagcttaggwcttcctgtatcaggagtagcaatttatgtttagctctgcgcagattgtaataaaagtagcgcccagcttaattgctttcagtgtcgcagctccttcaaacacagctcttttaactccatccaaattatttccccaaactcgggagcagtagcagcacrgttgactgatatgatctgttcatcatttagaacagccattcagcttgtcttttcactgctgaacaacaagtattttaytgctaagtcacagtatctcacagttcagcagtgtcaggaacacagactattacatggctttctc

SEQ ID NO: 86283 - DNA, 600 bp, Chicken  19866894386347_3
gcttccgtctcatcrttgttaaaagatgtgctttataagaaagactgagctagatcaaaccagagacttacttatcttacctactgatcttaaagggatattttatgtagtttttttgtttccagtgctttgcagcttaggwcttcctgtatcaggagtagcaatttatgtttagctctgcgcagattgtaataaaagtagcgcccagcttaattgctttcagtgtcgcagctccttcaaacacagctcttttaactccatccaaattatttccccaaactcgggagcagtagcagcacrgttgactgatatgatctgttcatcatttagaacagccattcagcttgtcttttcactgctgaacaacaagtattttaytgctaagtcacagtatctcacagttcagcagtgtcaggaacacagactattacatggctttctctcatgatagtctcatgaaaagctattctgaacagtaggcaaatgactacctagccaaagtagccttttcatctttctttgtcactgtcataatgtcaatcttggtcttaatctttcaattatcccatgccttgaatgtataggtaattcttagggggt

SEQ ID NO: 86284 - DNA, 600 bp, Chicken  19866894386347_4
acctactgatcttaaagggatattttatgtagtttttttgtttccagtgctttgcagcttaggwcttcctgtatcaggagtagcaatttatgtttagctctgcgcagattgtaataaaagtagcgcccagcttaattgctttcagtgtcgcagctccttcaaacacagctcttttaactccatccaaattatttccccaaactcgggagcagtagcagcacrgttgactgatatgatctgttcatcatttagaacagccattcagcttgtcttttcactgctgaacaacaagtattttaytgctaagtcacagtatctcacagttcagcagtgtcaggaacacagactattacatggctttctctcatgatagtctcatgaaaagctattctgaacagtaggcaaatgactacctagccaaagtagccttttcatctttctttgtcactgtcataatgtcaatcttggtcttaatctttcaattatcccatgccttgaatgtataggtaattcttagggggtcatctcttctcataattayaagaattaattgaacaaaattgcacatatggacaagaactcagctattcacagactttt

SEQ ID NO: 86285 - DNA, 600 bp, Chicken  19866894386347_5
tcatcatttagaacagccattcagcttgtcttttcactgctgaacaacaagtattttaytgctaagtcacagtatctcacagttcagcagtgtcaggaacacagactattacatggctttctctcatgatagtctcatgaaaagctattctgaacagtaggcaaatgactacctagccaaagtagccttttcatctttctttgtcactgtcataatgtcaatcttggtcttaatctttcaattatcccatgccttgaatgtataggtaattcttagggggtcatctcttctcataattayaagaattaattgaacaaaattgcacatatggacaagaactcagctattcacagacttttacagcctacaggagtcctccatgggaaccattagttgcggctgtttgctcttccctgaaaaacccagtgccttactgttatttccccaaacaaacaagtgtcgaaaaaacagtgcttttaagtgttaattgcatgatcccaagagtgatctggttttgtttctgggttgtttttattttgaggctttttgttcttgtcattgttttgttttgtttctcctcaatgagatcgcttcttctct

SEQ ID NO: 86286 - DNA, 599 bp, Chicken  19866894386348_1
  misc_feature (1)..(134): n is any nucleotide
nnnnnnnnnnnnnnnnnnnnnnnnnnnnnnnnnnnnnnnnnnnnnnnnnnnnnnnnnnnnnnnnnnnnnnnnnnnnnnnnnnnnnnnnnnnnnnnnnnnnnnnnnnnnnnnnnnnnnnnnnnnnnnnnnnnnnnccctcccctccttccttgcctgttcctgctgaacagcttgtagccatcaatagccacacgccagtcatgggaatcatcccaccaggtttcggtgatggcaactatattgtggttttctagtagcacagtagcttccatctcctcttgtttcccaagctgcatgtaytggtgtagagacacatcagctgtgcaactggtcttgtcacttccttaaaggataactccttaattccttttaagtatttcccctgattctccccattgccttctcctgttgccccagcagtcactgcctcatcaccatagagttttgtatgtgctgcagtgttgctagcacttctcaaggcagtgggtctttcaaggcccctgctagcaccctgtccctctaatatagctattccatcccacaccttaccatgggaaggctcattacccccctcgtcccccttcagacctagtttaaag

SEQ ID NO: 86287 - DNA, 600 bp, Chicken  19866894386353_1
cttgggtatctgtgcagttagtaggaaataacacaatgaacatttttctctctagtcatttccaagttttcaatactttgcatgctgatgactagcaaagcaatagctataagattccagcaatgtgtcagagtaggtgttttaccaatatgtatgctttccttctgctgctgacagtctgtttttgcctgagtcttgtcaacagatattaaaaataccccatgcacagaagtaaaaatatttctaaacaataaatgtgcagtaagatctaaatttaagatagtatgggaggaagtgcaraaytgtacagccactgctgcagaaggcttctcaggtttaaaaaaaaaaaactcytttatgttcatctggcttatttagggctggaatggtaatgatagcttaatctcagccccatggaatactgtgcatatttttatggctatttataacatgctgttttttccttcatgtcacagacccatctattacacagctcactaaaataattgaaggagaacctgagttcaaaatagtcagggagggggagacaataactaaagtgattcatggaggttggtatgctttcagcaacttgatttg

SEQ ID NO: 86288 - DNA, 600 bp, Chicken  19866894386353_2
gggtatctgtgcagttagtaggaaataacacaatgaacatttttctctctagtcatttccaagttttcaatactttgcatgctgatgactagcaaagcaatagctataagattccagcaatgtgtcagagtaggtgttttaccaatatgtatgctttccttctgctgctgacagtctgtttttgcctgagtcttgtcaacagatattaaaaataccccatgcacagaagtaaaaatatttctaaacaataaatgtgcagtaagatctaaatttaagatagtatgggaggaagtgcaraaytgtacagccactgctgcagaaggcttctcaggtttaaaaaaaaaaaactcytttatgttcatctggcttatttagggctggaatggtaatgatagcttaatctcagccccatggaatactgtgcatatttttatggctatttataacatgctgttttttccttcatgtcacagacccatctattacacagctcactaaaataattgaaggagaacctgagttcaaaatagtcagggagggggagacaataactaaagtgattcatggaggttggtatgctttcagcaacttgatttgtat

SEQ ID NO: 86289 - DNA, 600 bp, Chicken  19866894386353_3
gtcatttccaagttttcaatactttgcatgctgatgactagcaaagcaatagctataagattccagcaatgtgtcagagtaggtgttttaccaatatgtatgctttccttctgctgctgacagtctgtttttgcctgagtcttgtcaacagatattaaaaataccccatgcacagaagtaaaaatatttctaaacaataaatgtgcagtaagatctaaatttaagatagtatgggaggaagtgcaraaytgtacagccactgctgcagaaggcttctcaggtttaaaaaaaaaaaactcytttatgttcatctggcttatttagggctggaatggtaatgatagcttaatctcagccccatggaatactgtgcatatttttatggctatttataacatgctgttttttccttcatgtcacagacccatctattacacagctcactaaaataattgaaggagaacctgagttcaaaatagtcagggagggggagacaataactaaagtgattcatggaggttggtatgctttcagcaacttgatttgtattagataaaatttgaaacattacctgttccccatcaatttttctttgcataa

SEQ ID NO: 86290 - DNA, 599 bp, Chicken  19866894386360_1
  misc_feature (1)..(30): n is any nucleotide
nnnnnnnnnnnnnnnnnnnnnnnnnnnnnntgttatgtggagtggtgcaggccaggacgtctcatcatctttccctagcagacctaatttctttatttgctcagcatgacagcaagcaaaatcttacacaggagttcggagcttaaaagcacgtgcttgggattttggtggggaaaattgtgttttgttttattgtttttccatatacatcaaaaaatcctttccctcacctttctaaaatatctagtgacacattgatacttaggtcaatcctactaaaaggagttaattggacaaatmaactgctttggtctgcttgaagcttctggtatcagtcctgtctgtctaatatacgtaaggcttggattgactccttaaaagtagtttttttataagttaaatacaatcaaatgagcttctgggcttaccaggtttgccagagtcattcgtagttgcacactgcacacagaaaaatatgcgaaggtaaattagtaagttaacagttgtcaggattcttactacaagataaacatcaggtaaggtggcttgtaatcagagggtggtttcagtgactccttgtcattgagcctggttgtcat

SEQ ID NO: 86291 - DNA, 599 bp, Chicken  19866894386373_1
  misc_feature (1)..(136): n is any nucleotide
nnnnnnnnnnnnnnnnnnnnnnnnnnnnnnnnnnnnnnnnnnnnnnnnnnnnnnnnnnnnnnnnnnnnnnnnnnnnnnnnnnnnnnnnnnnnnnnnnnnnnnnnnnnnnnnnnnnnnnnnnnnnnnnnnnnnnnnncttttaaagtaagacttgaagatctccaagtttacataaacctgtaaaataggtaaagctctcagactctaagttgttacacaaatattcctagagaaatgcctttgaaagaatataatatttaacttaaatggtcttcgggttctatttacaaattgtatatsgataacttaggaaatgacagtagtcagcaaacttcagagaagctttaattgcattttaaaaataagtgccaacacttgaaagcaaaatagtcacagtagttttgaaaacagtgctaacgagaagacaaaacaaagcctcgagtttggatttctaatggaaacatcaggaagccttatttgcaaggcctctgccttcattatgtttggagttgcatgtggcaggtatcagtccaccttgattctatgttctgagtaaatatttgtcgttctgaagttgtagaatatgcttctcgttggga

SEQ ID NO: 86292 - DNA, 600 bp, Chicken  19866894386378_1
aggctgaccactaagtatgcacttagatggctggatgtgacattggtgaggttttacatacatttctgcaaaactgttaagatggttgcaattacagtggtgtgatttcatatttgatagctttacttgaatattttagtgttttttatgaactgtatatgttcatttactgaagattcctttgaatgtaagcctcaattgccttgttgtatgagtattttttaagggctcagtagtgttcaccaactaaagtatttcatctgattaaactgaggcctaaatataccatgaatttcatcrctactgaaaaaatcaaccaaaatataaactaatatatgtgggacttagtcttccagttttcatagaaaagcatataatcttgtaaaaaaaactgattggtatctccagttactttaaaataatttatgcatcattttattctatgttaagttgttgactaagtctttaaaaataggtatatttctgtattgggttatcactagaaaataaggtgtaaattttattcttcacycttcatctacaaagagagtctggaagccttcagccttagaagttaaaaatacaacatctctgtatttt

SEQ ID NO: 86293 - DNA, 508 bp, Chicken  19866894386378_2
gtagtgttcaccaactaaagtatttcatctgattaaactgaggcctaaatataccatgaatttcatcrctactgaaaaaatcaaccaaaatataaactaatatatgtgggacttagtcttccagttttcatagaaaagcatataatcttgtaaaaaaaactgattggtatctccagttactttaaaataatttatgcatcattttattctatgttaagttgttgactaagtctttaaaaataggtatatttctgtattgggttatcactagaaaataaggtgtaaattttattcttcacycttcatctacaaagagagtctggaagccttcagccttagaagttaaaaatacaacatctctgtatttttcttaattgatttctggaaaaactgtgatctctaagaatgaattgagagacaggagtgataaaggcagaactagttttacattttgaacaattccaacagcgggctgaatattcaacaactgataggccgaataacaagt

SEQ ID NO: 86294 - DNA, 467 bp, Chicken  19866894386396_1
ctctccccccgcaaatcgatggggatttgccttcctgccccatgttggcacagcggtcggtcggacgcgacacgaacagcagagtgacctttccagcagccccatggcacgggttgaatatggagaggctgtgatgctcgctgctccccatgccacctcccaaataatgaagcttccagacagtgctgcatggccacgatgaggacgggagcgggagcagctgcttctaattttgcttcgtggggagggaggtgatgctgagagcaccccgcattctctgcacatatttttcatcattayaggcagaaatgccagagtggtgacagatattaatgcagttcacgccgggagaaaatcttctttccatcagactcaatgttcagcaagagggcagtgccatttgcagccctcgggaggatgtgtttgaaaggtgatgtgttttttccccgggaagttttattctgaga

SEQ ID NO: 86295 - DNA, 599 bp, Chicken  19866894386399_1
  misc_feature (1)..(166): n is any nucleotide
nnnnnnnnnnnnnnnnnnnnnnnnnnnnnnnnnnnnnnnnnnnnnnnnnnnnnnnnnnnnnnnnnnnnnnnnnnnnnnnnnnnnnnnnnnnnnnnnnnnnnnnnnnnnnnnnnnnnnnnnnnnnnnnnnnnnnnnnnnnnnnnnnnnnnnnnnnnnnnnnnnnnnnaaaaaaaaaaaaaaaaaaaaaaaaaaaaaaaaagattccgttaatgacccagtgcctggggaatccttttttccttttttctttatagtacagaaaaagtaaggacatttgtagatcttgtgggagataatagraagtgcctgatttgcactagaagtcaacaggcgccctctttggacctttaaaaagcttacactttgtcaagtaatgggagtgcacatggcttatgtcatagagttaagtgaaaagataaagccatttgggagaggaaaaaaagaagctatactgcaatcttaataggcaaatttggacttagctgaaccattttctgcatgtataatctggcccatcatagaatcatagaattgctcaggttagaaaagaccttaaatatcatcaagtccaaccacaacctatccatactaccctacta

SEQ ID NO: 86296 - DNA, 589 bp, Chicken  19866894386402_1
tttagatatctttttccctacttattctcatttataatgacatcagtactgataattgtcaggaaggccttaaaatccaaacagaactttcagtcatctcttctggatcatctgagttaatatttcatatataagattttgattgctaagaaatctcgcaggaatttcttagtccaagaattcccctgacaagcagatacttctgaaatcaggtctgaagctactgtcagctttcctgataaatcaaatttctaaagatgagaggttgcagatagttcataagatatatctctacagcaygtaacccttggagaaggatatagctgagatgaaaaaaaggtgcagtcatttttaaaactaaattattagcaaacgcataaaatcagcaaaatcctagccaatgagcagctcaagtaaaaacgcttccagagcttttgttcaatagcatgtcttatttatgcaaatgatgctgtgaaaccaaattgctgaatggttttgcttgtcattttttatacagtcggttcaatgtaactgatgaagtgacaagcttctaaaaatgatttatagcccagacaaatcatatttgaaa

SEQ ID NO: 86297 - DNA, 600 bp, Chicken  19866894386403_1
cacttgattccactgtgagagtggaaggacagcagtgtgaagttgttggtgttttacagttttaacgatattttcttttgctaagaaacagatgtgattctccagattgcctggaactgatcatcagtaagtgttatattagaaatgaatgtataagttgatcagttcacagtggacataaaaatcaatgtcggtgtcataaatgcaaggacatatacacttggaaggacagctgtaaattcaaagcccaagtttgggtacttggaagaccagggtcccaggtcctccagcaactccaamgtcaccagggaagttgccaacagcttgtctccactagtcctccttttctagtacattttcgctttctctctgttgaacattttcctcctgtgtagtgtttcttttttccctggggtaaatcaggagtaaatgggaatgagtaagggctaaggccccacttgctctcagcagtttctgggacttctccaagcccagagcaatgcggcctgtcgctgggtggtaatggggattaggtaactccccgccacttggcctatgctttcttctgaaaaaaagcagcatttgttttctcaaaatgac

SEQ ID NO: 86298 - DNA, 600 bp, Chicken  19866894386405_1
aagaatccccttggggattcttccttttagagaggaattcctgaggtctcctcctcagctctaccaatatttgtggtcttcccaatatgcatttgcttctctggtatctatgttaattgcctgtgtttggcccttagcaatgtgatgttcatcagctcctcactctacaggagcccgcaccctttcctcagcatatcttttcttttcaatgtgattacagagctcaggagagaaaagctctaccaccagggtcagcaagctgctctggatatatggcacatccaatttttaaatcagacyaagcaggtgtggtgaagcctgagtggtacccacagctgcagagttatggctttcagtgagtcatttctctgccccaccatcccacatctccatctgtaacagaaaagaggttacatttttttagcttggagaagagaaggctccggggagacctcattgcagccttccagtacatgaagggagcgtataaacaggagggggaacagctgtttatgagggtggatcgtgataggacaagggggaatggtggaagtttttcagtcagagggtggtgacgcactgaacaggttgcccaaggag

SEQ ID NO: 86299 - DNA, 600 bp, Chicken  19866894386419_1
tgttttggacacaacgtactaggtaaagtagatggctgcagccagcctacactgttaccacgtgatgacattcattcttgtacctcaggagaactaagctgaaaagctggtgcagaatattgtgccttttattaaaggtatgtccatgctgcgctcagaagccaacttggactccgaaaacagtcttatctcctgtagaatgaagcttaaagcatatcggaatatgttcaaaggcttagagagatgagatgagcaaaagtttacacagcttaatttaactgactgcagccatttttacaragcagtacgttccttgaatgtaaacatacgcagtcacacatatgtacttgggcctgagcagccagctttaatatttttttctgttattttattcttcctcctccaatgctgtccttgaataataaaagtcacatgctgctctgaaagtctagattaagagctatttgtttcccactccgtccctgtcaagaacgacagtgatgatagtccccagttgggaatctcagttttctcgtttaccccagtaatagctattttagggtggcttaggggataataacatttttcatgcttgaggag

SEQ ID NO: 86300 - DNA, 599 bp, Chicken  19866894386425_1
  misc_feature (1)..(6): n is any nucleotide
nnnnnngatgagatacatactgtgcctctcagtatatatgagaggatggttttaattgatatttcttggaacaaagctttgctttaagaaaaaatatgaacggattagtcagagtaccagtggattgtcttcatgaggtgcttcaaggtaagcaggatcacagaatcccttcctagttcatctaataatttcaatgaaataacactaatcatccactttcattagtggtttaaaaggaaatgtgtattttatttcagaaatcaactaattataagctgaacacaacataagtcatcttgktatgtgtgttaagagctttgggatcaaatactccatactataccttaataygttttaaactcctggtaagtaatatttcattataaacaacctactttatttatggtttttgtytcaacaaaatattactgacaaattccctcagaaattggttaaagctactaggagagcaggcagtgagacataaaagcaaagagctgcatattctattcccttatctactcctgaggaaaactagataggatcattaaacagttacaggcaraacacactctagaattggagtacaacagcttctg

SEQ ID NO: 86301 - DNA, 600 bp, Chicken  19866894386425_2
ttaattgatatttcttggaacaaagctttgctttaagaaaaaatatgaacggattagtcagagtaccagtggattgtcttcatgaggtgcttcaaggtaagcaggatcacagaatcccttcctagttcatctaataatttcaatgaaataacactaatcatccactttcattagtggtttaaaaggaaatgtgtattttatttcagaaatcaactaattataagctgaacacaacataagtcatcttgktatgtgtgttaagagctttgggatcaaatactccatactataccttaataygttttaaactcctggtaagtaatatttcattataaacaacctactttatttatggtttttgtytcaacaaaatattactgacaaattccctcagaaattggttaaagctactaggagagcaggcagtgagacataaaagcaaagagctgcatattctattcccttatctactcctgaggaaaactagataggatcattaaacagttacaggcaraacacactctagaattggagtacaacagcttctgtattatacaaactcttatatttcatcattgtcttaagttattgtgctcctca

SEQ ID NO: 86302 - DNA, 600 bp, Chicken  19866894386425_3
taccagtggattgtcttcatgaggtgcttcaaggtaagcaggatcacagaatcccttcctagttcatctaataatttcaatgaaataacactaatcatccactttcattagtggtttaaaaggaaatgtgtattttatttcagaaatcaactaattataagctgaacacaacataagtcatcttgktatgtgtgttaagagctttgggatcaaatactccatactataccttaataygttttaaactcctggtaagtaatatttcattataaacaacctactttatttatggtttttgtytcaacaaaatattactgacaaattccctcagaaattggttaaagctactaggagagcaggcagtgagacataaaagcaaagagctgcatattctattcccttatctactcctgaggaaaactagataggatcattaaacagttacaggcaraacacactctagaattggagtacaacagcttctgtattatacaaactcttatatttcatcattgtcttaagttattgtgctcctcattatagagtcraaaagtagttaataattaaggcaggtgctgaatacattgccataaattctgt

SEQ ID NO: 86303 - DNA, 600 bp, Chicken  19866894386425_4
taattataagctgaacacaacataagtcatcttgktatgtgtgttaagagctttgggatcaaatactccatactataccttaataygttttaaactcctggtaagtaatatttcattataaacaacctactttatttatggtttttgtytcaacaaaatattactgacaaattccctcagaaattggttaaagctactaggagagcaggcagtgagacataaaagcaaagagctgcatattctattcccttatctactcctgaggaaaactagataggatcattaaacagttacaggcaraacacactctagaattggagtacaacagcttctgtattatacaaactcttatatttcatcattgtcttaagttattgtgctcctcattatagagtcraaaagtagttaataattaaggcaggtgctgaatacattgccataaattctgttcggaggcaaaactaacacttagyatgtctataaagatccttttagctgtctaaagagaagaaattggtctactatgtctctcacaagtatttttcttacatgctccatgcttattctttaaccttttcagattgattttataattttatt

SEQ ID NO: 86304 - DNA, 600 bp, Chicken  19866894386425_5
ctggtaagtaatatttcattataaacaacctactttatttatggtttttgtytcaacaaaatattactgacaaattccctcagaaattggttaaagctactaggagagcaggcagtgagacataaaagcaaagagctgcatattctattcccttatctactcctgaggaaaactagataggatcattaaacagttacaggcaraacacactctagaattggagtacaacagcttctgtattatacaaactcttatatttcatcattgtcttaagttattgtgctcctcattatagagtcraaaagtagttaataattaaggcaggtgctgaatacattgccataaattctgttcggaggcaaaactaacacttagyatgtctataaagatccttttagctgtctaaagagaagaaattggtctactatgtctctcacaagtatttttcttacatgctccatgcttattctttaaccttttcagattgattttataattttatttacttttatttagtattcacccttagacaggttgcagtaacaactaccaggcacaatatggtcataaaatatttctcaacatttctttaattaggtt

SEQ ID NO: 86305 - DNA, 600 bp, Chicken  19866894386425_6
ccctcagaaattggttaaagctactaggagagcaggcagtgagacataaaagcaaagagctgcatattctattcccttatctactcctgaggaaaactagataggatcattaaacagttacaggcaraacacactctagaattggagtacaacagcttctgtattatacaaactcttatatttcatcattgtcttaagttattgtgctcctcattatagagtcraaaagtagttaataattaaggcaggtgctgaatacattgccataaattctgttcggaggcaaaactaacacttagyatgtctataaagatccttttagctgtctaaagagaagaaattggtctactatgtctctcacaagtatttttcttacatgctccatgcttattctttaaccttttcagattgattttataattttatttacttttatttagtattcacccttagacaggttgcagtaacaactaccaggcacaatatggtcataaaatatttctcaacatttctttaattaggttatgaattaagatcaatatatgttctatttatcataaacagaagagggatggcaaaccccataacacactagcatat

SEQ ID NO: 86306 - DNA, 600 bp, Chicken  19866894386428_1
ccccagcttgctgaaaagaggttggccatgtccttttgactcccacacttaagatatttattaacattaataagatcacctctgagtcatcttttctcaagtctgaacagacccagttcgctcagcctttcctcacaggggaggtgctccaggccccttatcatctttgtggccctctactggactctctctatgagatccctgtcttttttataccagggagccctgaactgggatacagtacttcaggtgaggcttgaccaggacagagtagagggggaggatcccctcccttggcckgctggccatgctccttttaatgcaccccaggattcaattgaccttcttggccaccggggcacactgctggctcattgccaacctgtctaccaggagaccattatgtgctaatatttaagaatatctcataaagtaaattggtttagttagttatctattcttgtttcttacaactgagctgagtagtagatgttggaggakacagtctgagagaagaatactgaaatcttggaaatgctgctgctagctacttccgtttggagttgcaatacakcaggaacagcaaagtcactcgttttc

SEQ ID NO: 86307 - DNA, 600 bp, Chicken  19866894386428_2
ctgtcttttttataccagggagccctgaactgggatacagtacttcaggtgaggcttgaccaggacagagtagagggggaggatcccctcccttggcckgctggccatgctccttttaatgcaccccaggattcaattgaccttcttggccaccggggcacactgctggctcattgccaacctgtctaccaggagaccattatgtgctaatatttaagaatatctcataaagtaaattggtttagttagttatctattcttgtttcttacaactgagctgagtagtagatgttggaggakacagtctgagagaagaatactgaaatcttggaaatgctgctgctagctacttccgtttggagttgcaatacakcaggaacagcaaagtcactcgttttccaaagtagataaaataaaatctgtttatctaccctattaaatctaggtgccaactttcaagcagatgcagttataagctctgtagatgctaaatcctgaaacatttggtctataaacaataagctgacatcaaatatagcattgcaactagacacagtaatggtgtgtatatgctatattcacagaaaacagggagatgat

SEQ ID NO: 86308 - DNA, 600 bp, Chicken  19866894386428_3
agggggaggatcccctcccttggcckgctggccatgctccttttaatgcaccccaggattcaattgaccttcttggccaccggggcacactgctggctcattgccaacctgtctaccaggagaccattatgtgctaatatttaagaatatctcataaagtaaattggtttagttagttatctattcttgtttcttacaactgagctgagtagtagatgttggaggakacagtctgagagaagaatactgaaatcttggaaatgctgctgctagctacttccgtttggagttgcaatacakcaggaacagcaaagtcactcgttttccaaagtagataaaataaaatctgtttatctaccctattaaatctaggtgccaactttcaagcagatgcagttataagctctgtagatgctaaatcctgaaacatttggtctataaacaataagctgacatcaaatatagcattgcaactagacacagtaatggtgtgtatatgctatattcacagaaaacagggagatgattgctcttttgtatgttgcttagggtttttttcttatgttagagtattaaaacagatattaaattttatcatta

SEQ ID NO: 86309 - DNA, 600 bp, Chicken  19866894386435_1
cggtctccttatttttctggttggtaaatgcagttgcacgcaaatagctagctttctttagaaagaatctgtgccaagagctgtgaagaactttgggaatttgtcagctgtggatgtgtgaggagtttctttcctgatagaaagatatttttcagcgagacagttcagtcccgttcactggtttgctgtttctaaggtcagaagagctgatctgtcctcacccaagaacttattgctgcttgttatgccattaatgccagttctgcaagtgctggtggttaaagcagcatgcattttcaygggaatcaagtatttcattactgtcccttacctcataaacacttcaaacttttccccctgtgccttttggaaacwctttctgctctgttaacctttcccttggattaccaggcagggtttttaatccagtgtrtaygctgggtcacgtgtctgcctgaagtactggaggcacgtgcagcttcctgggtgaagggaggagttctctgctctgtttcctctaccaacgagcatctttttattagcaggacaaaatgatgcatgtcctcgtttcttagctttttatctgtatttaatttgctt

SEQ ID NO: 86310 - DNA, 600 bp, Chicken  19866894386435_2
aagagctgtgaagaactttgggaatttgtcagctgtggatgtgtgaggagtttctttcctgatagaaagatatttttcagcgagacagttcagtcccgttcactggtttgctgtttctaaggtcagaagagctgatctgtcctcacccaagaacttattgctgcttgttatgccattaatgccagttctgcaagtgctggtggttaaagcagcatgcattttcaygggaatcaagtatttcattactgtcccttacctcataaacacttcaaacttttccccctgtgccttttggaaacwctttctgctctgttaacctttcccttggattaccaggcagggtttttaatccagtgtrtaygctgggtcacgtgtctgcctgaagtactggaggcacgtgcagcttcctgggtgaagggaggagttctctgctctgtttcctctaccaacgagcatctttttattagcaggacaaaatgatgcatgtcctcgtttcttagctttttatctgtatttaatttgcttctaatgtgcttatagtcagtgtcgttacttccaaatgagtagctgcaggttactgagctgttctacagttgaaaa

SEQ ID NO: 86311 - DNA, 600 bp, Chicken  19866894386435_3
ctgatagaaagatatttttcagcgagacagttcagtcccgttcactggtttgctgtttctaaggtcagaagagctgatctgtcctcacccaagaacttattgctgcttgttatgccattaatgccagttctgcaagtgctggtggttaaagcagcatgcattttcaygggaatcaagtatttcattactgtcccttacctcataaacacttcaaacttttccccctgtgccttttggaaacwctttctgctctgttaacctttcccttggattaccaggcagggtttttaatccagtgtrtaygctgggtcacgtgtctgcctgaagtactggaggcacgtgcagcttcctgggtgaagggaggagttctctgctctgtttcctctaccaacgagcatctttttattagcaggacaaaatgatgcatgtcctcgtttcttagctttttatctgtatttaatttgcttctaatgtgcttatagtcagtgtcgttacttccaaatgagtagctgcaggttactgagctgttctacagttgaaaaattactcagaagaaagcgagccagcaagtcaagagacacatttttcagtttaaatttg

SEQ ID NO: 86312 - DNA, 600 bp, Chicken  19866894386435_4
atagaaagatatttttcagcgagacagttcagtcccgttcactggtttgctgtttctaaggtcagaagagctgatctgtcctcacccaagaacttattgctgcttgttatgccattaatgccagttctgcaagtgctggtggttaaagcagcatgcattttcaygggaatcaagtatttcattactgtcccttacctcataaacacttcaaacttttccccctgtgccttttggaaacwctttctgctctgttaacctttcccttggattaccaggcagggtttttaatccagtgtrtaygctgggtcacgtgtctgcctgaagtactggaggcacgtgcagcttcctgggtgaagggaggagttctctgctctgtttcctctaccaacgagcatctttttattagcaggacaaaatgatgcatgtcctcgtttcttagctttttatctgtatttaatttgcttctaatgtgcttatagtcagtgtcgttacttccaaatgagtagctgcaggttactgagctgttctacagttgaaaaattactcagaagaaagcgagccagcaagtcaagagacacatttttcagtttaaatttgtgg

SEQ ID NO: 86313 - DNA, 599 bp, Chicken  19866894386442_1
  misc_feature (1)..(10): n is any nucleotide
nnnnnnnnnncctctcctccagtccctacccacctcccgtcagcctggagcacttgaataaagtatgagattccccagctaggattcacaaatagcaataggaaatgcacaaacaccagcccttctgcatctttccctcactctgtgggatagctcagccataggcagtacacagggcctcttgcagcatgagcagtatccactggcagcagcaagggagcctaaaagctgaaagcaacactgggaaaaatgaggagaaaaaattttttcagcatattgtaaggctgatcccatggaaasagcagagccaccagcagaacaagctgcatgagatgcaactcaccacatccagcatgcaggtttccagatgaaaacttccagggctcatgatacatgtgtgcaaacaccatagagattttgatggagaaaacagaatcacagaattgtttgagttggaagggatccttaaaggccatcaggtccaacccccatgcagtgaacacccactgctccatcaggtgctcagagcccatccagcctgaccttgagtgtctccagggatgggacatctaccacccctctaggaaacattgcaaatt

SEQ ID NO: 86314 - DNA, 545 bp, Chicken  19866894386444_1
cagcagctgtcacaggagggaagaagcacttgcattgctgggtcacgttcaggaggctgtgggtacaagagcatgactgcactgggcagtggcagaccttggcacctggcaggcaccgttccgagctttgggaaggcctgaagatacagggcagaagggaagtgggctcccctggggccatgcaggggatggggattggggcctccctgctgttgtagggctgctgcttggtgtggagagcggggctgagctgtgtgacttccaggaagaaggaaacgaagctgcccatggccctgcttrtgagccaggtgttccagcttcccctgatacatgggcacagggaagggaaacctctggagcaaggtataggctggccagagggcaagtgctgccctgtgatatgcccttgtcatgctgcgtgctgcaagaagggcagcgccgagcaagctgtgaaagcctctcaggaaaggatagagaaaggagagctgttgcgtgtgaagggcacagtgggtccttcccataggcccattgggcatggtgggggg

SEQ ID NO: 86315 - DNA, 599 bp, Chicken  19866894386455_1
  misc_feature (1)..(117): n is any nucleotide
nnnnnnnnnnnnnnnnnnnnnnnnnnnnnnnnnnnnnnnnnnnnnnnnnnnnnnnnnnnnnnnnnnnnnnnnnnnnnnnnnnnnnnnnnnnnnnnnnnnnnnnnnnnnnnnnnnnnngcttgcaatagcctttcagccctggagatggagggtgactcgctctgcagccctgctccctccagctccaaaagaaaaacagcaaactcaaagttctgcagcaattccagcatggttctgggatgccccaggtctgcccttcctatacctctgcccctctaaaagcaacgagtgcaatttccycatcggtcccatcctccaccaggcagaccacattagccaagttccgtggacgccgttttccatcaggaaaaagacaaccagcacagcagtgcttagcttgaggccctattaatagcagtcctaattatatggctgcaaatttaattcgtagcaatgattagtgtcaaaatcaaaggcatcacacatcaatattgatggaattgtatgaagcccgtaaacagaacaagcaagccgacgcatctccccccagcactcagttcctgttaactgttatattaatgtctcctctcattttcctc

SEQ ID NO: 86316 - DNA, 570 bp, Chicken  19866894386455_2
accattcgccccagtcaggatgctgggaccttgcaggagaagcagacctccaggctgcagagaacaggaccccacgtgcccaccttatccgaaggtcacagcattagcagtacattggcttttcaccacttagagataactgctgcagtaatttgctgcagtgcccaaagccagagggctgccatggagcagggctgccctgtcacatcccgtgtactgtggggacaccatatatgcaggtgcagcccctgacagcaccaagcatcccctacccaaggcagtcaggatggctgagccagkgctgcgtgagaacatccctcctccagcacaggstttccatgcagaacggatccatcgactcgccctctccccttaggcagcagcaaagggcagaggggtgcatgcaccattcctcatggtgtgagctgctgacagtctacagctcgggtatagccctgctggggttggttgggcagagagggactgcagagggacaacgggacacaggggaagggacagagctgggaatgaaggggccctgggtggcagggaccttcagcatccagctcc

SEQ ID NO: 86317 - DNA, 537 bp, Chicken  19866894386455_3
caggagaagcagacctccaggctgcagagaacaggaccccacgtgcccaccttatccgaaggtcacagcattagcagtacattggcttttcaccacttagagataactgctgcagtaatttgctgcagtgcccaaagccagagggctgccatggagcagggctgccctgtcacatcccgtgtactgtggggacaccatatatgcaggtgcagcccctgacagcaccaagcatcccctacccaaggcagtcaggatggctgagccagkgctgcgtgagaacatccctcctccagcacaggstttccatgcagaacggatccatcgactcgccctctccccttaggcagcagcaaagggcagaggggtgcatgcaccattcctcatggtgtgagctgctgacagtctacagctcgggtatagccctgctggggttggttgggcagagagggactgcagagggacaacgggacacaggggaagggacagagctgggaatgaaggggccctgggtggcagggaccttcagcatccagctcc

SEQ ID NO: 86318 - DNA, 600 bp, Chicken  19866894386459_1
cttaagaaactgagtcattttagccgtgcaagtaatcccattctttgctaagagtgatcaggtttctattcttggttccatcgtagactttcctgagtgacttaaggcaagttacttaagactgaatgattttaatgagatgtggatcaaagctgccaggcagacaggagaaatgtagtcaccctgaagaaaatgttacctagatatttttatcagtagaagtaagaatgacatagggaacacacagttatgcattctgattttggtgttataccatcagctgccagtacgcaataattktgaggacctctaggtgatttggaacacaaagattatctcaaattaataaaaggcaaaaaatattttttttggcctggatcagtgtcctcatgtggttattcaggtatcaccgtaggccactgcactggtagcaggaaatgtataagagatgcactggtaactgtgacctatctagagcttttagctggagtgtagtaatagctattagttgcttttctctgattggttgtgatagtttgtattggcaaatgcatgtgtacatgcatatatgtacacacacactttctttaactgggctgc

SEQ ID NO: 86319 - DNA, 600 bp, Chicken  19866894386462_1
gcaagacgcagggatcttcacagaccagcattttaacaatacagacaacagagctgaccccagtgacatgacaggtcccagagatgttagctagttagcatccccagtgattctacatgcacaaagaacttgtaccacctgctggggaaatggagaatgaacttcccccagcagtgaaaatatctgacacagactgatatgtgaaaatgactgacgtaaaaccgactgcctagaaatcacttgagggaagggtcactcatggagaaatcagagttgaaaatcaaaagattaagacaaggygtgaagaacaaatgagcaagatgcrctgcaggtaaagcttaatgttctgatatgcaacagaggaaaatgacacagctaggagtaaatcttgccgtaacgccacatgaagaatcttagcagattataaaaggaatcacaagactggcacagataaaacagctattcctcttcttgacttcagctcattgaacttgctgagaagcaccttcaagaagacatcacgtctcaccttctcagggcaaactacatcacaggtgtactcttaacaactgcagaggacaaagaacttgcagctaggct

SEQ ID NO: 86320 - DNA, 576 bp, Chicken  19866894386462_2
cagcattttaacaatacagacaacagagctgaccccagtgacatgacaggtcccagagatgttagctagttagcatccccagtgattctacatgcacaaagaacttgtaccacctgctggggaaatggagaatgaacttcccccagcagtgaaaatatctgacacagactgatatgtgaaaatgactgacgtaaaaccgactgcctagaaatcacttgagggaagggtcactcatggagaaatcagagttgaaaatcaaaagattaagacaaggygtgaagaacaaatgagcaagatgcrctgcaggtaaagcttaatgttctgatatgcaacagaggaaaatgacacagctaggagtaaatcttgccgtaacgccacatgaagaatcttagcagattataaaaggaatcacaagactggcacagataaaacagctattcctcttcttgacttcagctcattgaacttgctgagaagcaccttcaagaagacatcacgtctcaccttctcagggcaaactacatcacaggtgtactcttaacaactgcagaggacaaagaacttgcagctaggctg

SEQ ID NO: 86321 - DNA, 600 bp, Chicken  19866894386463_1
caacagcctgcaggcacagcactttctgcagctgaagcaagaaggcctcagctgcgggtcgccccgctcaggtggcctttggtagacctggctgccagctgtcccgtgttggtccagtcccagattttcacccacaacctgattgtggaagtttctgagaagtggctcttcgcactccatctgccccttaacatagagggcaactcttctgcccctcctgccctgcctatctcttctgaaaagcctgtggccaattggtccctccacacgttcagtgcctgcataaacactatggccttrcataaacactgacccttgtaaacacactgtcatcagagaaagctctcagatccaacttacaaatttcagcctgcctttttccagtgkaactcagagcagcccctgctgcacagctgtgaaggaacgcagcacgcttctctgctatctcagctctcccagagcagctttgtcctcctgcagggtgtcccccctgattccacaatccattgcacgcatgtgggttgaaattttcctctgtaaagggataaaaatagaatctcagcttggatcgggcatatcaggcaggacaacctgagaaag

SEQ ID NO: 86322 - DNA, 600 bp, Chicken  19866894386463_2
ctggctgccagctgtcccgtgttggtccagtcccagattttcacccacaacctgattgtggaagtttctgagaagtggctcttcgcactccatctgccccttaacatagagggcaactcttctgcccctcctgccctgcctatctcttctgaaaagcctgtggccaattggtccctccacacgttcagtgcctgcataaacactatggccttrcataaacactgacccttgtaaacacactgtcatcagagaaagctctcagatccaacttacaaatttcagcctgcctttttccagtgkaactcagagcagcccctgctgcacagctgtgaaggaacgcagcacgcttctctgctatctcagctctcccagagcagctttgtcctcctgcagggtgtcccccctgattccacaatccattgcacgcatgtgggttgaaattttcctctgtaaagggataaaaatagaatctcagcttggatcgggcatatcaggcaggacaacctgagaaagcaggatgcaggtaagtatgggacgaacaaaacacaaacatgtgggtgaaatgggaaaaacatcatcagaaagctccagaacccctga

SEQ ID NO: 86323 - DNA, 600 bp, Chicken  19866894386469_1
acaggcccttgttcattgctggcaaaaatgttggtggctatgtttcaaaataatgttttgtagctaagaatctgctctatcgaatagtgttattgtgctctttgtatatattgtagtttctgtggaaataaataggagtgacctatgtattatctctgacacatttgccatcagtcaagaatttggtttgtgatctgtctttagtggagacttggaaggggaagtttctatcttcttaatcttgcaacctacactgtaaaaaggcataggagtaaaatggcttgaaaaacctggaatgcmtaagtattttttctctaactttatttttattgcactaatgggaaaattgcatatttcttaaccagcagaagggaagatacatttatgtgttcaaaagtacttactgatgtatacatagcatagattttatttcacttaatgcagcataagcagtacactgaaagcaaatccaaatactttatagcagtttaaaaaatattttttccaaagatgaaatgttttgtgacagaagaagtttatgcgtttggatataagtgatgtggtcattttaaactaaccttgtaagttcagtaaaactaa

SEQ ID NO: 86324 - DNA, 600 bp, Chicken  19866894386471_1
agaaggaacgatcaacacatcatgtagatatggttaacaaccaaagttaaataggtaagtatgctattacagttgagaactgtaatctaaatgtatagctctggccaataggaagattctagtgaatgcaacagtccgaactgctaactgaacaagctgatgcataaatatattcttaaatatttgtttttacctactacatctgataatacaagatctggtttgcagtaaacatctcccagactctctgtgtactaactggaaaatattttgatacattaattttgctgaagcaagatraattaaagttctcacaagcttggaggagaraaaataataaccatctccaaggattacaatgcttttactttttaagcactaaatccttggagtttcaagtataaagatcatctagaataacaatctacccaaatccttgaaaaatggctagctctataacccatccagtatcaataaaccataatgatagggttcttgctctgraaaactaacatttgtttacataaattaccacccatttagtaattatactgtatgcctggaataaggtcaagtaaactgtaaccgtggcagaagcaa

SEQ ID NO: 86325 - DNA, 600 bp, Chicken  19866894386471_2
tggttaacaaccaaagttaaataggtaagtatgctattacagttgagaactgtaatctaaatgtatagctctggccaataggaagattctagtgaatgcaacagtccgaactgctaactgaacaagctgatgcataaatatattcttaaatatttgtttttacctactacatctgataatacaagatctggtttgcagtaaacatctcccagactctctgtgtactaactggaaaatattttgatacattaattttgctgaagcaagatraattaaagttctcacaagcttggaggagaraaaataataaccatctccaaggattacaatgcttttactttttaagcactaaatccttggagtttcaagtataaagatcatctagaataacaatctacccaaatccttgaaaaatggctagctctataacccatccagtatcaataaaccataatgatagggttcttgctctgraaaactaacatttgtttacataaattaccacccatttagtaattatactgtatgcctggaataaggtcaagtaaactgtaaccgtggcagaagcaatacagcatacattatatagtctagacagaa

SEQ ID NO: 86326 - DNA, 600 bp, Chicken  19866894386471_3
gataatacaagatctggtttgcagtaaacatctcccagactctctgtgtactaactggaaaatattttgatacattaattttgctgaagcaagatraattaaagttctcacaagcttggaggagaraaaataataaccatctccaaggattacaatgcttttactttttaagcactaaatccttggagtttcaagtataaagatcatctagaataacaatctacccaaatccttgaaaaatggctagctctataacccatccagtatcaataaaccataatgatagggttcttgctctgraaaactaacatttgtttacataaattaccacccatttagtaattatactgtatgcctggaataaggtcaagtaaactgtaaccgtggcagaagcaatacagcatacattatatagtctagacagaactatgatggagaattatggaggataataaatcagttaatgctttgcatgtgtttcaggataggcagagccacaacaccagagtaaaaaagtttctgctagttaagtctctttccactctcttaaagaaatactaacaactgctgctactcaatccaacgatggtatcaagaagt

SEQ ID NO: 86327 - DNA, 599 bp, Chicken  19866894386476_1
  misc_feature (1)..(110): n is any nucleotide
nnnnnnnnnnnnnnnnnnnnnnnnnnnnnnnnnnnnnnnnnnnnnnnnnnnnnnnnnnnnnnnnnnnnnnnnnnnnnnnnnnnnnnnnnnnnnnnnnnnnnnnnnnnnnnccatataaaacacaaaagtacttaaatccactgtgattttagagccactatatccatagctgtttgctgcaaaaaatgcccactttctttgtcaaagactgacattaaggaagaggtgctaagatcctcctccagtgctatgaaggaagtttataatacgaaagtgctccacaaaggtagctttctaaamcacttttactctctgtactcaaaattccaaatttagtattttaaacagaataatgctgtaacttgaaaaaaaaaatctctaatattaaatatataaatataaataaatatatattttttcaccccttcttcttcacaaaaaagacctctggaaatatcagaaagtaaatactgtgctcatttcaaactgcaaaccagacaaaccctttgctttttattttggttagcagcttggactccctttctccacaactaacctgaacaaatattatgccttagatgacttcaggggaacaaatt

SEQ ID NO: 86328 - DNA, 365 bp, Chicken  19866894386477_1
ttctttctgcagagcttacagcaaccctgggctgcccaaggaagtttccagcttgatgaggagtctgtgcttcaggttagcagattggctgggatggcttcaataagataacttacaggttgcatggcttcctgatggcgttgcctggcatggcctatgcctgttgccacccagatgtgagtgacatcctcctgccacagcacatcccagtcctcatcacttctaggtttctaccccttgtagctcaactagcagtatgagctccggctcaagaaaaacaatttatgaactattttattwgagatattgcctaaagttacttttgaaatggctggtagtcacctctgtcactttgatgcttttca

SEQ ID NO: 86329 - DNA, 600 bp, Chicken  19866894386478_1
tcagttgtggaaaaaaaggagcaaacaaaatctttctgtaattttggtttccatggttgccaaggttggtgctcatctgatcaaatgcacatgttcacatctgcacagtcctggatgcttctagtgcataatctcttctaccctgtacgatatgaattatatagagtgtctattacttcagagtgcccttggtgagatgtactttgctgaactgcagatattttatatttgaatcttattcaagttgtccaatccaaaaatcagactgtttaactggccagtcagtaagtccagcatacycataaactggcatgcttaacaagttatctaaagatacttcaagcagagtactggcagaaatataaaataggtgggggttttatgtaaatgtttcagatgatcagatgctggaggtcttatgtgttaaggaaggaagcacataatttcagtacataagtgaggagattttagcaaacttttggtctgtctacaaaggtagtcaactcagagacacaacgagaaactacaacacagcaatgaactggttcagcttgatcaagagattttgagaaacgagcaaccaaaaacataacagtgcaa

SEQ ID NO: 86330 - DNA, 600 bp, Chicken  19866894386481_1
ttacacagattaatgtgttctgtagaaaaaataattcatttcatgaaggcatttagaaagcatttagatggaattaccatttatgtttatgagaagattgaatacttttcctgctgttatttttatttatgggatagtacacattgaagtaaaagccttgtatttgttacagtgtgtatgtctgtgaatcaataaatactttgttcacatagaaaattagctagatacattagtttaatagcaaataatatatattttgattctgtttcagaaagtgtagatgtaagtaaaatccccagmttggatttcttgctaagaagagctgctgcttctgtgtggaaaattctcactggaaaaattgctggggcacttcatctttccaaatatctgtactttgccttaatatactctgccacgtttaaacacagtgatatagttcacctgtatgtgtagacaacaatagagaatcaattctttttcagtatacatctatagctcagcacttcttgtgcaacttgtgcagacatctttaaattgtgagtatcatttgttttcttattcataagttgaagggtaaaaatcccaagcacttacaccacc

SEQ ID NO: 86331 - DNA, 489 bp, Chicken  19866894386485_1
cactcaacgtgctgaagcactgctgctttgcagcctgccctgacctcagccaagtgctgggcatgccttggctgcatcaaattacacccagcacagtggggaggtgcgtgccaatgcattaatgtgcgctgcaaagctgaaatgcaagggcagtttatgagttcagggtttaaacagagtgctgttaatgaaatcttttaactgcagaacagtttgcatacgttcttgggattgacctaatcttcctctgaagactgtctgcattctggttacttttaggctaaattaatgaactctggytaatttttggctaaattaagactcttaagttgtgaatgctttgattaggaaacagtgcagaattacattaatagttactgtattgtagccagaaaacatatgatgacgacagtcaagtggtaggaatgaagtagtggtaaaggatcactttataaatgagtttagtaaaaaagacaaaacacaaagcag

SEQ ID NO: 86332 - DNA, 574 bp, Chicken  19866894386490_1
acagaccgatcctatgcttacagaaatgacactgctgtatgcatgggcaatggcagccccttgtggcctttgccagatgggcacaaggagagttactgtagccattggccttgggttatgcataaggagatggtagatcactgctgtggatcaacagtacccaggtggctgataaccatctcctgaagtcattgcatgcaggcagagagagaacagagtaaaggtgaggaagaatcagagatctgatgctgccaccaccagcaacgtgactgcaggcagccaaattttccattcagttcygtacagaagaatcagtatgaagagcgagtgggggatgtgggaaaagtcatcataccagggaagtgagtaagtgcttaggagcttattttaaaaaagaaaaagaaacaacagcacagtttgcgaggaaggcaagggcagaaatttgctatgactcagccaaaaaattctgtgggaactgagagggagaggcgtgccactcctttcataaacacatcagtgtggacagcaagggcagaagcagccagggtgaagagtaacttagccagtatagcat

SEQ ID NO: 86333 - DNA, 599 bp, Chicken  19866894386492_1
  misc_feature (1)..(124): n is any nucleotide
nnnnnnnnnnnnnnnnnnnnnnnnnnnnnnnnnnnnnnnnnnnnnnnnnnnnnnnnnnnnnnnnnnnnnnnnnnnnnnnnnnnnnnnnnnnnnnnnnnnnnnnnnnnnnnnnnnnnnnnnnnnnaacttgcttgagctcccagcaccagcacaacccctggaaactgtagcaagtggaaagtcttagagcaaatacacaacatggacttttgtaaccatgactcttttgtacacgaggctacatttagcgctgtgctagctctttaagacggcctcatcgtgataatcaatgtagcccgwctagtgcagtgccactttcctgctgtgagaaagcacaactcttcctgctgccacagccccctgctgacttgttttacaacatttaagcaggaaactgttaaaccttacttctcttttttccctccgtgcagacagaaatcttctttcctgctgctttgtcacttgtagcaaggaccgttaagaagtgccctggcttttaccctgagcattgccctaattttaaccttctgcaacggttatcttcattttactcagatttttaaaggtgactcattcagtaagacaaactgtgatagtgk

SEQ ID NO: 86334 - DNA, 600 bp, Chicken  19866894386492_2
wctagtgcagtgccactttcctgctgtgagaaagcacaactcttcctgctgccacagccccctgctgacttgttttacaacatttaagcaggaaactgttaaaccttacttctcttttttccctccgtgcagacagaaatcttctttcctgctgctttgtcacttgtagcaaggaccgttaagaagtgccctggcttttaccctgagcattgccctaattttaaccttctgcaacggttatcttcattttactcagatttttaaaggtgactcattcagtaagacaaactgtgatagtgkcttgtagaagaacgtatttccaaaaagcacggtgaaaaggtcaccgacatcaaggcttcttcagaggcaggaggtgggcggctttggtttgtccagaaatgagcaagctccagccagccttgtcaccacagaaaggtgaaaacccaagtggctgggctcggaaatcttcctaggcaatggtaggcacatatgtgtgggctgcggagccccttccattggggatgtttgaagggggaagggaaaagatgatgttacaggacgggctcagctacactcagtaagcacctttaataacaacgt

SEQ ID NO: 86335 - DNA, 600 bp, Chicken  19866894386495_1
ttacaactcttctttctgttttgttaaagttcaaactggtgttagggaaagtatttcatatttaacaaaggcacaacctcgtacaactttgttttgacataaaatgtcatgtaattttttatcagaaatatagaacatatacatctttcctctgattgacaaagcaaaaatacagtaagaacttacattttttctaaaacataattccttgcattttttattttcctcacaattgtacttgtaagcccatttgagttcatggtgcatgtgtacataagggcagaggcatcaccaacataytcatgaagtgcatacactaatggttaaacaatggacagaaggcaagaaagcacacctattacaaaatttaattgacagaagtctgccagagcagaaaagtagtacacaagacaagattttagagttcatttgcagctgtttcagttaaaaaatgtttttgtacactgtgggctatattcttcaaatagtggtggaatcaaaataaaagaaacattctggttgttaacattcagcttctgttgaatactatttaatccacaactgatggtagaaaaaattctacaaacatactatcattct

SEQ ID NO: 86336 - DNA, 599 bp, Chicken  19866894386506_1
  misc_feature (1)..(101): n is any nucleotide
nnnnnnnnnnnnnnnnnnnnnnnnnnnnnnnnnnnnnnnnnnnnnnnnnnnnnnnnnnnnnnnnnnnnnnnnnnnnnnnnnnnnnnnnnnnnnnnnnnnnntttgggaggaagtgagcatctcaccagacagcatttggcaagcatgcctggagtcagctgcagcacggggccatacacagccatcacactcagtgtgagaaaagtgccatcttcattttatctgcagttttcagagtcagacaagtttcaggcaggtacatgcatttgtctgcatttgagatgccccctcagcaacatycaatagagatcttatcagggtaagcacttccctggactccacaattatctcttcccaaagcagatgtcaacaacaggtcagacaaatcacattctgcaattgctaatctctcacctgcaaagaagcctgcagagcctcagacatccactgctagaattctgcaagacaagtgtcgtgctaagaatcactcactcagagtttgccacrgatggtaggaaaagttaaactgcaaattaacaacagcctaaagttacagaaaactccacccaaggaacttctgaacaatcattgcatgcatc

SEQ ID NO: 86337 - DNA, 600 bp, Chicken  19866894386506_2
ccatcttcattttatctgcagttttcagagtcagacaagtttcaggcaggtacatgcatttgtctgcatttgagatgccccctcagcaacatycaatagagatcttatcagggtaagcacttccctggactccacaattatctcttcccaaagcagatgtcaacaacaggtcagacaaatcacattctgcaattgctaatctctcacctgcaaagaagcctgcagagcctcagacatccactgctagaattctgcaagacaagtgtcgtgctaagaatcactcactcagagtttgccacrgatggtaggaaaagttaaactgcaaattaacaacagcctaaagttacagaaaactccacccaaggaacttctgaacaatcattgcatgcatcagttatgaaacagcgcagctgaacagattgaaaagcactgagatatgcgtggtttacatacaggaacagaacaatcccacaaggcctaacagaaagcctgttgcactgcactgtgccacaggagacagtaacatctgaagagttcatcaggaactttccacgccgtgtgtaagttggcatacaaggatctgtttccagcctgttttcc

SEQ ID NO: 86338 - DNA, 600 bp, Chicken  19866894386506_3
acaaggcctaacagaaagcctgttgcactgcactgtgccacaggagacagtaacatctgaagagttcatcaggaactttccacgccgtgtgtaagttggcatacaaggatctgtttccagcctgttttcctccctcacacaacagctttgtatatcctaatttgaactatactgttattcagaattgttttaggatatttaagtgacagctgatagcaccaagtgcaaggtaactacaacaccagccagtctggcatactgggcattgtgatgaccacatgggaagaggtttcccttcasagggcatcatatatgggcagactgcagatgaaagcctttacaaaatacttctatcagtcttcactataattctaagccagcacaagcactgctaaygttcaccccaggagtgaagttatttgtatggaatcctatttcattaggttgctatacttagttttcttacagggtctggatatctgatctctgttccagctgatatgccttggacctgacggtaggaaggagaagagaagcaagtatgcccatttacacttgcagggtggcctagagctcagtcctaccagatttctgcagtga

SEQ ID NO: 86339 - DNA, 600 bp, Chicken  19866894386506_4
tggcatacaaggatctgtttccagcctgttttcctccctcacacaacagctttgtatatcctaatttgaactatactgttattcagaattgttttaggatatttaagtgacagctgatagcaccaagtgcaaggtaactacaacaccagccagtctggcatactgggcattgtgatgaccacatgggaagaggtttcccttcasagggcatcatatatgggcagactgcagatgaaagcctttacaaaatacttctatcagtcttcactataattctaagccagcacaagcactgctaaygttcaccccaggagtgaagttatttgtatggaatcctatttcattaggttgctatacttagttttcttacagggtctggatatctgatctctgttccagctgatatgccttggacctgacggtaggaaggagaagagaagcaagtatgcccatttacacttgcagggtggcctagagctcagtcctaccagatttctgcagtgacagaccttgccaagaccagtccactgacagccacacgctgctgaaaactgaagcacagagcaggtgcagcatggtgacagcacaggcctgcagcac

SEQ ID NO: 86340 - DNA, 600 bp, Chicken  19866894386510_1
acaacattcagtacaatatccaatctgtcatttagatagtatacttacacatttgacagtgagtatattctcttctagaggttaatagtgtcacaacttttgtattggcaaagttgaactgatctgtataggaaagggccaggaaattggaaaatactaaaataactcctcactataacgagaaggtaaattaggcagaactaggattttgagaattgtaatttcttcctgatattgctcataatgtacttacttaggtccgcatcaaccctgagagcctgaaacagcagtcatctatcragactgaggtatagagaaaattatatatcaatggaaagctataatccaaacactgttaatrcacatttatatgaaccaaaaaacatatcacygatggctgaatttgtttatcccacatactgtgttgtattgaagacctctgaagttaagttgcttgaaagaggccaaattggtccagtaccaagacattgtatatagcctaaataaaccatctttatttaaacctattaatctttttatagtttagcaatatccaatactaacataaaacacttacaaagascaaatacagttctgaca

SEQ ID NO: 86341 - DNA, 600 bp, Chicken  19866894386510_2
agtatattctcttctagaggttaatagtgtcacaacttttgtattggcaaagttgaactgatctgtataggaaagggccaggaaattggaaaatactaaaataactcctcactataacgagaaggtaaattaggcagaactaggattttgagaattgtaatttcttcctgatattgctcataatgtacttacttaggtccgcatcaaccctgagagcctgaaacagcagtcatctatcragactgaggtatagagaaaattatatatcaatggaaagctataatccaaacactgttaatrcacatttatatgaaccaaaaaacatatcacygatggctgaatttgtttatcccacatactgtgttgtattgaagacctctgaagttaagttgcttgaaagaggccaaattggtccagtaccaagacattgtatatagcctaaataaaccatctttatttaaacctattaatctttttatagtttagcaatatccaatactaacataaaacacttacaaagascaaatacagttctgacaaaatttatatcacaaaacatattattagaagaagaattattattctttacaaaggaaaaca

SEQ ID NO: 86342 - DNA, 600 bp, Chicken  19866894386510_3
acaacttttgtattggcaaagttgaactgatctgtataggaaagggccaggaaattggaaaatactaaaataactcctcactataacgagaaggtaaattaggcagaactaggattttgagaattgtaatttcttcctgatattgctcataatgtacttacttaggtccgcatcaaccctgagagcctgaaacagcagtcatctatcragactgaggtatagagaaaattatatatcaatggaaagctataatccaaacactgttaatrcacatttatatgaaccaaaaaacatatcacygatggctgaatttgtttatcccacatactgtgttgtattgaagacctctgaagttaagttgcttgaaagaggccaaattggtccagtaccaagacattgtatatagcctaaataaaccatctttatttaaacctattaatctttttatagtttagcaatatccaatactaacataaaacacttacaaagascaaatacagttctgacaaaatttatatcacaaaacatattattagaagaagaattattattctttacaaaggaaaacaactgaaccataattgacttttttttctttct

SEQ ID NO: 86343 - DNA, 600 bp, Chicken  19866894386510_4
acagcagtcatctatcragactgaggtatagagaaaattatatatcaatggaaagctataatccaaacactgttaatrcacatttatatgaaccaaaaaacatatcacygatggctgaatttgtttatcccacatactgtgttgtattgaagacctctgaagttaagttgcttgaaagaggccaaattggtccagtaccaagacattgtatatagcctaaataaaccatctttatttaaacctattaatctttttatagtttagcaatatccaatactaacataaaacacttacaaagascaaatacagttctgacaaaatttatatcacaaaacatattattagaagaagaattattattctttacaaaggaaaacaactgaaccataattgacttttttttctttctaaaatcattagaattacatccataaatgtgtgctgtagaatccagaaattcaaatctaaatcttctcagagatttgttacaaatcaaaagcaaaaattctacaatggactcaaataaaaatagaaagaattatactgtaaatctgaatattaattcttataattcttattttcaaattacaatttgtgagc

SEQ ID NO: 86344 - DNA, 600 bp, Chicken  19866894386519_1
ggaacttcaaaattgcaactgaacagaagaaggtggttacacacagtacacttttacaatttcgtttcatttttaataaatgaatgttttcatttacatatcaccctctctttatcatctgcacaaggctgcaatgaaattagaacaacattcacatagctttagagctgcaataaaaggttgacaagagaaattaaagactgtgtcttcattataggattaattagaagggaaagtagatgaggaaaaagaatttatgcagaaactgtcataattaagacaacacaaaaataagagagycaatgcatttgtgaaagctaatccttttcactgcaaaacatcataaactaattaattctcatcctgaagatagttttaagctgaactgggtctctcccactgccactctcaggatagagctccgcaagctgtagacttgaagtatttcaggaataatggctaagaataaaagatggagtaaaagaatctcagccaatctgccaatttcaattccagttttccagccactagacttgtatttgttggcaaaatgacactcattaagtaatattatgaagagaaacacaatattgctataac

SEQ ID NO: 86345 - DNA, 600 bp, Chicken  19866894386527_1
cttagcttttgtttgaaaaaacttgacggatatctgcaagtcatggcttcacagaggtgacacagggaagaacgatttctgttgtaaagcaccactagaagttaacacgccttgctgttagctcttaaccataagtttaagtgacgttagctaacaggctgtgtatatgaaagcaccagttttctcctactctagttagcacctcatcaagatctggtgactgttttgtttccttccatcctagaaaatctgaactcagcatgtgaaatccacacaaaatcagatacatggtctggaacrctgccattacatttagttaactgagggagctcacgtttgacttgaacacaaaactgaacctaatgtttgagcatgtcattctgtgcacacccggcttaaaasaacagggttacgatttcttactactgtcaattaccagaaaattactttgacaaacaaattcagttgtgatttttttttaacatctggcctgtgagttgtctcatatcttacttcaacccrtccagcaattctgtctgcactttttctggtcgtcctaaagtggcctaaagtctttgcagctccacatcatccattgct

SEQ ID NO: 86346 - DNA, 600 bp, Chicken  19866894386527_2
taacacgccttgctgttagctcttaaccataagtttaagtgacgttagctaacaggctgtgtatatgaaagcaccagttttctcctactctagttagcacctcatcaagatctggtgactgttttgtttccttccatcctagaaaatctgaactcagcatgtgaaatccacacaaaatcagatacatggtctggaacrctgccattacatttagttaactgagggagctcacgtttgacttgaacacaaaactgaacctaatgtttgagcatgtcattctgtgcacacccggcttaaaasaacagggttacgatttcttactactgtcaattaccagaaaattactttgacaaacaaattcagttgtgatttttttttaacatctggcctgtgagttgtctcatatcttacttcaacccrtccagcaattctgtctgcactttttctggtcgtcctaaagtggcctaaagtctttgcagctccacatcatccattgctattagctcctgcagctcctcccactttaatctttttctgtgtatttactttactgatctttgattttagaaattaaaccaatcattttgttgagtttctatt

SEQ ID NO: 86347 - DNA, 600 bp, Chicken  19866894386527_3
gttttgtttccttccatcctagaaaatctgaactcagcatgtgaaatccacacaaaatcagatacatggtctggaacrctgccattacatttagttaactgagggagctcacgtttgacttgaacacaaaactgaacctaatgtttgagcatgtcattctgtgcacacccggcttaaaasaacagggttacgatttcttactactgtcaattaccagaaaattactttgacaaacaaattcagttgtgatttttttttaacatctggcctgtgagttgtctcatatcttacttcaacccrtccagcaattctgtctgcactttttctggtcgtcctaaagtggcctaaagtctttgcagctccacatcatccattgctattagctcctgcagctcctcccactttaatctttttctgtgtatttactttactgatctttgattttagaaattaaaccaatcattttgttgagtttctattctttatactcctcctcaatctccttgtttttttttttaatattctgtttcaaattttgcaaagcactttagaaaacactagtgaaagagtccacgccaaataagttgaccgagttatttt

SEQ ID NO: 86348 - DNA, 599 bp, Chicken  19866894386528_1
  misc_feature (1)..(156): n is any nucleotide
nnnnnnnnnnnnnnnnnnnnnnnnnnnnnnnnnnnnnnnnnnnnnnnnnnnnnnnnnnnnnnnnnnnnnnnnnnnnnnnnnnnnnnnnnnnnnnnnnnnnnnnnnnnnnnnnnnnnnnnnnnnnnnnnnnnnnnnnnnnnnnnnnnnnnnnnnnnnaaaataaaacacatggaaacccaactaccaaagcatgcacaactgtaatcttactagaattcagtagaaacattttgtattgaagcacctgaacacaaaatatcactctggcaaaacaaaaggcacatacataatcttcataayttgtccatcaggcattccaccaattctcacagtgtcagtcaaaatggcatgagagtatgatcagattacttgttaaaattattaaccacattaagtttccgaggattaaacttgctgacaacaattgactatgtaaaagtcaatattcaggaagaactaaagggacaacacaagagaagaatgaagcagtataggacatggagaaaatgagcagcttgtctaaacagaaacttcagaggtaattagcaaaaaaaaaaaaaccagcatacatatttgtttccttgcaccaataaaaggta

SEQ ID NO: 86349 - DNA, 600 bp, Chicken  19866894386528_2
catgagagtatgatcagattacttgttaaaattattaaccacattaagtttccgaggattaaacttgctgacaacaattgactatgtaaaagtcaatattcaggaagaactaaagggacaacacaagagaagaatgaagcagtataggacatggagaaaatgagcagcttgtctaaacagaaacttcagaggtaattagcaaaaaaaaaaaaaccagcatacatatttgtttccttgcaccaataaaaggtaaacgaactgatctttaaatgggacttgctttaaagattacaatctggmcaaaatctcagttatagtattaattacagtaacctgtaataaattacagtcatgtatctgtaattaattacagtaatttttaagaggaaaagcttcactctasttcagagaacgaagatgggagaagagaaagttggacagtatttcagggacatcacacttgtggcacacgctacccgacttccaaggccatggtttcatatttgattcacaggtcttgaaagtacakataaaagattcagtatgccatgtagaaaggatagacttacttaaatttaaggcaaatgtgacatgctaaga

SEQ ID NO: 86350 - DNA, 600 bp, Chicken  19866894386528_3
gaagaactaaagggacaacacaagagaagaatgaagcagtataggacatggagaaaatgagcagcttgtctaaacagaaacttcagaggtaattagcaaaaaaaaaaaaaccagcatacatatttgtttccttgcaccaataaaaggtaaacgaactgatctttaaatgggacttgctttaaagattacaatctggmcaaaatctcagttatagtattaattacagtaacctgtaataaattacagtcatgtatctgtaattaattacagtaatttttaagaggaaaagcttcactctasttcagagaacgaagatgggagaagagaaagttggacagtatttcagggacatcacacttgtggcacacgctacccgacttccaaggccatggtttcatatttgattcacaggtcttgaaagtacakataaaagattcagtatgccatgtagaaaggatagacttacttaaatttaaggcaaatgtgacatgctaagacagttacatactagtagattttaacatcttagaagaacattggagctacaaacctgggcatttcagagagatcagagggcattttagtactgcctgattgaga

SEQ ID NO: 86351 - DNA, 600 bp, Chicken  19866894386528_4
tttccttgcaccaataaaaggtaaacgaactgatctttaaatgggacttgctttaaagattacaatctggmcaaaatctcagttatagtattaattacagtaacctgtaataaattacagtcatgtatctgtaattaattacagtaatttttaagaggaaaagcttcactctasttcagagaacgaagatgggagaagagaaagttggacagtatttcagggacatcacacttgtggcacacgctacccgacttccaaggccatggtttcatatttgattcacaggtcttgaaagtacakataaaagattcagtatgccatgtagaaaggatagacttacttaaatttaaggcaaatgtgacatgctaagacagttacatactagtagattttaacatcttagaagaacattggagctacaaacctgggcatttcagagagatcagagggcattttagtactgcctgattgagaagccaaggtatcaatgacctacgttcagagtttttaaagaccgtttttttacgcacaaaatggaaactttgagctcaattcctcaggcaaagctactcatcagtaaccaatctttaaacatatcca

SEQ ID NO: 86352 - DNA, 600 bp, Chicken  19866894386533_1
aagctcctctctccatcaggattagtagctgcagcaacggtgcactgtcctgtgggtggtggtaatgctacgttaatgatagctgttgctgaatacaatctttctgacatggctgactgacagtgtgcctactttttaatgtaaaaatagtttccaagaacctaagttagataaatagaacaggcggtttctttagccgtgaacaaaatgaatgtgttttttcctagtgcacatactcatcatttgaaatatagtcagtatacatttttttcttgaagacaattttctgtagtgatttgrgtacattgtaaatgtgcacttatccttggatcattaggaaaactctgttgtgttttaggtgcataattttgaaagaggacattaaaacaatagtagaaaatttgaatgaacttctgcatatttttgcgtaattttttgtcacctattttacaagaagagcatcttgaaattacctcagaaaagataatcagattagggtaataaatagcaatgtgttaacatgtagcataaaaatccatatmaggaaagaattaacagctatttatgctgatgtgcataaatatgcaaaattatttagag

SEQ ID NO: 86353 - DNA, 600 bp, Chicken  19866894386533_2
tttgaaatatagtcagtatacatttttttcttgaagacaattttctgtagtgatttgrgtacattgtaaatgtgcacttatccttggatcattaggaaaactctgttgtgttttaggtgcataattttgaaagaggacattaaaacaatagtagaaaatttgaatgaacttctgcatatttttgcgtaattttttgtcacctattttacaagaagagcatcttgaaattacctcagaaaagataatcagattagggtaataaatagcaatgtgttaacatgtagcataaaaatccatatmaggaaagaattaacagctatttatgctgatgtgcataaatatgcaaaattatttagagcagtatggaataatttaattcaatttaaaccttagtacaattaatattattaggaatgaaaaagcttccaaaggacttgcaggtaataaactgaattggatcactcttcttaccacttttcaggaatgcctgatggtacatgggttttctactgttctcttctcacagaaaaagtctttggaaatctgaaaatctactcatttgaaagtttttactgtttattttggttattttaattccct

SEQ ID NO: 86354 - DNA, 600 bp, Chicken  19866894386543_1
ttatccttaataatggacatttggcaggaataggtctattttttgttttcacaaaccaaggtttgatcagagatgtctcaaagcattcacacacaaatatgatctttgctatttagccttattacatggcaagggggtactgaacaaaagcaaaacatgaaggaagtaaacagaagaaacaagattactaatctgcttacttctattcatctgaaaacaaagcacatgattaatactctttgcttaaaattcattatgaagcttttctttattttcacataccttgatgggtattttaaygagtaagcagcagccaggaatccaccyagattgtgtccaagcaaaatcattttttctagccccatctcctttctccactcttctatggattccacaaactgattttctgcttcccgagcatcagtrtcaaagtgtggtctactgcttcgtccaaatcccaagaggtcgaaagcatgaacggtcctgttttcacagagctcttcaaaattgagagcccacattccaacacctcctccaaatccatgaagtagaacaagtggagttttacgtgaaaggtctggagagaacgtcagtgtccat

SEQ ID NO: 86355 - DNA, 600 bp, Chicken  19866894386543_2
gaataggtctattttttgttttcacaaaccaaggtttgatcagagatgtctcaaagcattcacacacaaatatgatctttgctatttagccttattacatggcaagggggtactgaacaaaagcaaaacatgaaggaagtaaacagaagaaacaagattactaatctgcttacttctattcatctgaaaacaaagcacatgattaatactctttgcttaaaattcattatgaagcttttctttattttcacataccttgatgggtattttaaygagtaagcagcagccaggaatccaccyagattgtgtccaagcaaaatcattttttctagccccatctcctttctccactcttctatggattccacaaactgattttctgcttcccgagcatcagtrtcaaagtgtggtctactgcttcgtccaaatcccaagaggtcgaaagcatgaacggtcctgttttcacagagctcttcaaaattgagagcccacattccaacacctcctccaaatccatgaagtagaacaagtggagttttacgtgaaaggtctggagagaacgtcagtgtccatatcttgtttccattagctagatacaca

SEQ ID NO: 86356 - DNA, 600 bp, Chicken  19866894386543_3
tggcaagggggtactgaacaaaagcaaaacatgaaggaagtaaacagaagaaacaagattactaatctgcttacttctattcatctgaaaacaaagcacatgattaatactctttgcttaaaattcattatgaagcttttctttattttcacataccttgatgggtattttaaygagtaagcagcagccaggaatccaccyagattgtgtccaagcaaaatcattttttctagccccatctcctttctccactcttctatggattccacaaactgattttctgcttcccgagcatcagtrtcaaagtgtggtctactgcttcgtccaaatcccaagaggtcgaaagcatgaacggtcctgttttcacagagctcttcaaaattgagagcccacattccaacacctcctccaaatccatgaagtagaacaagtggagttttacgtgaaaggtctggagagaacgtcagtgtccatatcttgtttccattagctagatacacataccgcttattgtatgtgcttgtaatacctgggaaaagagtggggaaaacaaatggtattgttagacatgactggtaaacttcgaagaatgttctatgg

SEQ ID NO: 86357 - DNA, 600 bp, Chicken  19866894386557_1
catcttagtggccctcctctggaccctctccaacagctctctgtctttcttgtactgggggctccatacctgggcacagtactccagatggggattcacaagggcagagtagagagggacaatcacctccctgtccctgctggccacccctctcatgatggagcccaggataccatttgctttctgagctgcaagagcacactgctggctcatgttaagtttgtcatccatcaggacccctaggtccttctctgcagagctgctctcaaggactgctccttccagtctgtatagatgccyggggttcctctggcccaagtgcaaaaccctgcactttgccgtgttgaacctcactaggttcacccaggcccacctttcaagtctgtcaaggtccctctgaatggcatcccttccttcctccgtgtcaaccrcaccactcagcttggtgtcgtcagcaaatttgctgagggtgcactcgattccatcgtcgatgtcattgataaagatgttaaagagcaccggtcccaagacagaaccctgggggactccgcttattaccagcctccacctggacatagaaccattgatcaccaccttctg

SEQ ID NO: 86358 - DNA, 600 bp, Chicken  19866894386557_2
tgtccctgctggccacccctctcatgatggagcccaggataccatttgctttctgagctgcaagagcacactgctggctcatgttaagtttgtcatccatcaggacccctaggtccttctctgcagagctgctctcaaggactgctccttccagtctgtatagatgccyggggttcctctggcccaagtgcaaaaccctgcactttgccgtgttgaacctcactaggttcacccaggcccacctttcaagtctgtcaaggtccctctgaatggcatcccttccttcctccgtgtcaaccrcaccactcagcttggtgtcgtcagcaaatttgctgagggtgcactcgattccatcgtcgatgtcattgataaagatgttaaagagcaccggtcccaagacagaaccctgggggactccgcttattaccagcctccacctggacatagaaccattgatcaccaccttctgtctgcggccttttgatcaatttcttatccaacaagtggtccacccatcaaatccacatccctccaatttggagataagggtgtggtgggggaccatgtcaaaggccttggtcaagtccaggtaaatgacat

SEQ ID NO: 86359 - DNA, 600 bp, Chicken  19866894386559_1
tgtcattacgtgtctcagctgctgtttcacagtcttcatcttaaacacaggaaacaagtatgagttctcagggatcttccaaagacagagaagtctaaatttgttaagctcttcagactcacaagcctggttgagcacacaagacttgtgcacgtattttaagaacctgacacatcagcaagtaagctttccttccattcctagttgcatactggtataaaataaaacaagtgctgttctcgtcatttaccagtcagagcaaggcctgcacacacacactaccagttcaatcccaaaaaygcactttcagcacttaaccctgacatttttaacaatgccgcttccaaatcccaaaatcctacaggcaattctcttcctcactacacagcaacactgaatcctgcacagggcacgtctgtatttctatgagcaaataactacaacttcatattcactccagttgaaagtctacagtttgaagatccacagacgtgcattacaactgacagaaactccaaagtattaagacagacgaagcaatacaatgaccagcattaataaacgactgactcatgaaatgcatgcttgaataaattacta

SEQ ID NO: 86360 - DNA, 600 bp, Chicken  19866894386561_1
gcaggcacaaaaaagctttttaagaaaccgggccctgtggataaggcgagttcacacttgtgtaattacggcctgtgttgtaacacacacacgtgcttagggacaaagatgatgtcaaggcacagctgcttctgccacacagctggcttcctgcctccccgatacaaaccctgctcttgctaggctgcaaagaagcgggtgtccctgcaaaatagtgcagcccttccctcgcactgtctgtccagctgaacaacctgggggaaaggccctcctgctcgcaaaggagctgtttgcttacaragctccctgctgggacttatttacagagcactgctgagagtcaccaaatctgcttgtacagctctggagatggttcaaatcctcagttcccagaccagtgattaatgccgtgcagggagaagttagggctgaggataaaactccgctttcaaaacaaggaccgccggtctcaaactgggtaaacattttcccttgcctgtgtcagctaatttgattgccaataaaagggcaggctgtgggaaatggcagccacgccgctggactgcctccttatccacggcactgagggacatgygttag

SEQ ID NO: 86361 - DNA, 600 bp, Chicken  19866894386561_2
tacaragctccctgctgggacttatttacagagcactgctgagagtcaccaaatctgcttgtacagctctggagatggttcaaatcctcagttcccagaccagtgattaatgccgtgcagggagaagttagggctgaggataaaactccgctttcaaaacaaggaccgccggtctcaaactgggtaaacattttcccttgcctgtgtcagctaatttgattgccaataaaagggcaggctgtgggaaatggcagccacgccgctggactgcctccttatccacggcactgagggacatgygttagcaggcatggtggggatgggttgatggttggactaggtgatcttagtggtcttttctaaccttaatgattctgtgattctatcactctgtcccccagccctctgcctgctccctycataggggcacaaacagagcccccgtggtacaatgcgagctcggaggtaaatctctgtctctgaccctggaagggatgatgggttactctccagagcctcatccccccgttaacccttgcttacaaacagccacggggccgatgcatgctcagaggatgtgcctcgtcctgctggatccca

SEQ ID NO: 86362 - DNA, 600 bp, Chicken  19866894386561_3
gggagaagttagggctgaggataaaactccgctttcaaaacaaggaccgccggtctcaaactgggtaaacattttcccttgcctgtgtcagctaatttgattgccaataaaagggcaggctgtgggaaatggcagccacgccgctggactgcctccttatccacggcactgagggacatgygttagcaggcatggtggggatgggttgatggttggactaggtgatcttagtggtcttttctaaccttaatgattctgtgattctatcactctgtcccccagccctctgcctgctccctycataggggcacaaacagagcccccgtggtacaatgcgagctcggaggtaaatctctgtctctgaccctggaagggatgatgggttactctccagagcctcatccccccgttaacccttgcttacaaacagccacggggccgatgcatgctcagaggatgtgcctcgtcctgctggatcccagcacaaacgtactgacgcaacagataaacccgccctttgaaagggtaactgaagccagaacgggattttctcacactttgaaagcatctctggacaggaaggcttaactgcgttggcaa

SEQ ID NO: 86363 - DNA, 600 bp, Chicken  19866894386563_1
tcccacgcctgcagagtcacttggaccacagcacacaccgacagctgatgcaccaacacagcagcgtgcattcatgcaccaaccatgcactgctgcaccagtgctcaaatgcaccattgcaccaacgcattgctgtgttgatgctcctgcacaccttcccttgggcaccacctgccttcccgcagccacaagaaccccaacaggaggttgagatacagcttctcttctccagccctccaccctggttttgtggttggctcagccaacctggggtaaagctcgagctgcgtccctggggcrgggtggtggcatggggacacagctgctgtgccaccagcatcccgctgctctgagccacgcagggctggagctgcagcagcctgaccccctgagcagcccacaggctgagcaaacaagctgaggcagctcttactctcctgtttacaccacggggcctttcctggctcggtgctcrccatgccagttgcctgataaccccatgtttgcacaggcagggccgggcaggcgctggcactggcactggcgtggcagccttggtgctcctggtcctgccatcagcccccccatccctcttctttc

SEQ ID NO: 86364 - DNA, 600 bp, Chicken  19866894386563_2
cttcccgcagccacaagaaccccaacaggaggttgagatacagcttctcttctccagccctccaccctggttttgtggttggctcagccaacctggggtaaagctcgagctgcgtccctggggcrgggtggtggcatggggacacagctgctgtgccaccagcatcccgctgctctgagccacgcagggctggagctgcagcagcctgaccccctgagcagcccacaggctgagcaaacaagctgaggcagctcttactctcctgtttacaccacggggcctttcctggctcggtgctcrccatgccagttgcctgataaccccatgtttgcacaggcagggccgggcaggcgctggcactggcactggcgtggcagccttggtgctcctggtcctgccatcagcccccccatccctcttctttcctgggggccacgtgccctgccagctgggagccgccccgtgtgagtacaggaacatggggccatcacatccaaaggccgaggacaggattgcagtgcagtggctgtgatgatctcagcgtgctggggcccagcagaggcagcagcatcacctgcagctcagtcctgagcccaacac

SEQ ID NO: 86365 - DNA, 600 bp, Chicken  19866894386563_3
caggcagggccgggcaggcgctggcactggcactggcgtggcagccttggtgctcctggtcctgccatcagcccccccatccctcttctttcctgggggccacgtgccctgccagctgggagccgccccgtgtgagtacaggaacatggggccatcacatccaaaggccgaggacaggattgcagtgcagtggctgtgatgatctcagcgtgctggggcccagcagaggcagcagcatcacctgcagctcagtcctgagcccaacaccagaaccagcacccagcttcgcaccaagcatcrtggctgaccccragtagcrcccactccgtgccctgctcttctctttggggcaggacatccccatcctcatcctgactgccccagccctgttctcaccaaacagatcccaccggtcccacacagcccatcctgtccttcctgctgccctgggcccaagaggggcagcggtgccataccccactggccytggctgtggagcactgggaaatcccatttagcccatccagccccgtaccgccccacagctcccatgggagcagcccagcacccccttaccacgcagacggtgtcggtggcacg

SEQ ID NO: 86366 - DNA, 600 bp, Chicken  19866894386563_4
ggcaggcgctggcactggcactggcgtggcagccttggtgctcctggtcctgccatcagcccccccatccctcttctttcctgggggccacgtgccctgccagctgggagccgccccgtgtgagtacaggaacatggggccatcacatccaaaggccgaggacaggattgcagtgcagtggctgtgatgatctcagcgtgctggggcccagcagaggcagcagcatcacctgcagctcagtcctgagcccaacaccagaaccagcacccagcttcgcaccaagcatcrtggctgaccccragtagcrcccactccgtgccctgctcttctctttggggcaggacatccccatcctcatcctgactgccccagccctgttctcaccaaacagatcccaccggtcccacacagcccatcctgtccttcctgctgccctgggcccaagaggggcagcggtgccataccccactggccytggctgtggagcactgggaaatcccatttagcccatccagccccgtaccgccccacagctcccatgggagcagcccagcacccccttaccacgcagacggtgtcggtggcacggctacctgcagc

SEQ ID NO: 86367 - DNA, 600 bp, Chicken  19866894386563_5
gctggcactggcactggcgtggcagccttggtgctcctggtcctgccatcagcccccccatccctcttctttcctgggggccacgtgccctgccagctgggagccgccccgtgtgagtacaggaacatggggccatcacatccaaaggccgaggacaggattgcagtgcagtggctgtgatgatctcagcgtgctggggcccagcagaggcagcagcatcacctgcagctcagtcctgagcccaacaccagaaccagcacccagcttcgcaccaagcatcrtggctgaccccragtagcrcccactccgtgccctgctcttctctttggggcaggacatccccatcctcatcctgactgccccagccctgttctcaccaaacagatcccaccggtcccacacagcccatcctgtccttcctgctgccctgggcccaagaggggcagcggtgccataccccactggccytggctgtggagcactgggaaatcccatttagcccatccagccccgtaccgccccacagctcccatgggagcagcccagcacccccttaccacgcagacggtgtcggtggcacggctacctgcagctctgtgc

SEQ ID NO: 86368 - DNA, 600 bp, Chicken  19866894386563_6
cagtggctgtgatgatctcagcgtgctggggcccagcagaggcagcagcatcacctgcagctcagtcctgagcccaacaccagaaccagcacccagcttcgcaccaagcatcrtggctgaccccragtagcrcccactccgtgccctgctcttctctttggggcaggacatccccatcctcatcctgactgccccagccctgttctcaccaaacagatcccaccggtcccacacagcccatcctgtccttcctgctgccctgggcccaagaggggcagcggtgccataccccactggccytggctgtggagcactgggaaatcccatttagcccatccagccccgtaccgccccacagctcccatgggagcagcccagcacccccttaccacgcagacggtgtcggtggcacggctacctgcagctctgtgcttccgggagagaaagcagtgcctgttttactgtggggctgagacaaagtccacgccagcggctgcggagcaccacaccctgcagtgggcacagccgtgtgtgcacagccctggggcagctctgccagctgggcacaggtcccaggtatgccccgggatcccaggcatg

SEQ ID NO: 86369 - DNA, 600 bp, Chicken  19866894386563_7
agaaagcagtgcctgttttactgtggggctgagacaaagtccacgccagcggctgcggagcaccacaccctgcagtgggcacagccgtgtgtgcacagccctggggcagctctgccagctgggcacaggtcccaggtatgccccgggatcccaggcatgacctgatgccagtgctgccccctgtgtggagtgagatccacgggacccccaccagtgcagagatgggcacagacctgcagccacgcagtggtggtccccataggcccataccccagcactgcccccttgggataacagctytcccactgccacatccccatcagctgtgcacgcagcatcacaccagcatccctctcctcccagcatttcacagcccgtccatcctcctcttcctccccactccccctggcagctggctgggaacggagcgcccaccctcacctgcaccctgggctccagagtggcacagaggacctgccatggtgtggtgtacttaaacatctccactcctccgtgctgctgtggctctgggaacagccacctccgtggcagtggcgggggatgcagggagtgaaggcgccgtgcccagctggcaggatg

SEQ ID NO: 86370 - DNA, 600 bp, Chicken  19866894386565_1
ttaaaaataaattaatcaagtcaaagaacttagaaaagatgttacatcctgagctactgttatctctggggaacagagcaatacgtatccacaaaacctgtttatgcaaggcatgcatatatctctttgggcttccatttcaatcaagcagcagaaaggactcttctccatccaaaagaattagatgatgatatgcctagcttataaagggaccatttcacagagtgagaaagaggcaagctggctcttgctttcccaaagaccaaacttattccctttgcaattgatcccaatgaaaamcaatgaaatctgcttgtaatgattatttatgatatggaacatctgagaggaatcaatatattgtgagtacattaaaaaatagtgttatttaagttttacagaaatagactccaaaaaataaagtakttaattttgtttggcccagcaacagtttggcatttttgtccttactcattacaattagattaagttactgtgtcagtaatgaaagtatccacttgcacacgtaaccacttcatatygctctcagactcaaaaccccaaatcaaattgtctcsattacctgctacagaaggcatc

SEQ ID NO: 86371 - DNA, 600 bp, Chicken  19866894386565_2
ttgggcttccatttcaatcaagcagcagaaaggactcttctccatccaaaagaattagatgatgatatgcctagcttataaagggaccatttcacagagtgagaaagaggcaagctggctcttgctttcccaaagaccaaacttattccctttgcaattgatcccaatgaaaamcaatgaaatctgcttgtaatgattatttatgatatggaacatctgagaggaatcaatatattgtgagtacattaaaaaatagtgttatttaagttttacagaaatagactccaaaaaataaagtakttaattttgtttggcccagcaacagtttggcatttttgtccttactcattacaattagattaagttactgtgtcagtaatgaaagtatccacttgcacacgtaaccacttcatatygctctcagactcaaaaccccaaatcaaattgtctcsattacctgctacagaaggcatccatcttgtagcatattccactgaagactttatcatcttatcttacttgccactttgattaaggaaacaactaaaaagaatgcgaatgctacatgcaaatacagcagccactgtatggctgatagaa

SEQ ID NO: 86372 - DNA, 600 bp, Chicken  19866894386565_3
ggctcttgctttcccaaagaccaaacttattccctttgcaattgatcccaatgaaaamcaatgaaatctgcttgtaatgattatttatgatatggaacatctgagaggaatcaatatattgtgagtacattaaaaaatagtgttatttaagttttacagaaatagactccaaaaaataaagtakttaattttgtttggcccagcaacagtttggcatttttgtccttactcattacaattagattaagttactgtgtcagtaatgaaagtatccacttgcacacgtaaccacttcatatygctctcagactcaaaaccccaaatcaaattgtctcsattacctgctacagaaggcatccatcttgtagcatattccactgaagactttatcatcttatcttacttgccactttgattaaggaaacaactaaaaagaatgcgaatgctacatgcaaatacagcagccactgtatggctgatagaacatcccatctctacagcactcccaggccagcagaaataggctgtctccattcaaagtcttctttagcctaaaggtaaagtttcatcctgcaatttcttaccaattccaatgttctt

SEQ ID NO: 86373 - DNA, 587 bp, Chicken  19866894386565_4
tgcaattgatcccaatgaaaamcaatgaaatctgcttgtaatgattatttatgatatggaacatctgagaggaatcaatatattgtgagtacattaaaaaatagtgttatttaagttttacagaaatagactccaaaaaataaagtakttaattttgtttggcccagcaacagtttggcatttttgtccttactcattacaattagattaagttactgtgtcagtaatgaaagtatccacttgcacacgtaaccacttcatatygctctcagactcaaaaccccaaatcaaattgtctcsattacctgctacagaaggcatccatcttgtagcatattccactgaagactttatcatcttatcttacttgccactttgattaaggaaacaactaaaaagaatgcgaatgctacatgcaaatacagcagccactgtatggctgatagaacatcccatctctacagcactcccaggccagcagaaataggctgtctccattcaaagtcttctttagcctaaaggtaaagtttcatcctgcaatttcttaccaattccaatgttctttgtgcagatcttccaaactgcat

SEQ ID NO: 86374 - DNA, 599 bp, Chicken  19866894386582_1
  misc_feature (1)..(130): n is any nucleotide
nnnnnnnnnnnnnnnnnnnnnnnnnnnnnnnnnnnnnnnnnnnnnnnnnnnnnnnnnnnnnnnnnnnnnnnnnnnnnnnnnnnnnnnnnnnnnnnnnnnnnnnnnnnnnnnnnnnnnnnnnnnnnnnnnncagttccttcataactgaaattctgggatttagatttggtttgtaaagtgctgctgacccctcatttttccagctttgtgcacaattttatcttttcatatacttcagtttctgcagctgaatattacctgatctttatttactgaagatttaaaaatgttctttcctgsagccgagcttcatttccatctgagaagataagtttaaacttatcacaaaatagaaggttcaaagaaggttccttggcagttggagtctttttttagtgctrgttttgcaaggaggtatggggagaacaacatctagcacgctttgttcttttgttttccttcctgacatcgtgtgctggggaaaaaacaatgtctggagatttgagaatacggagtcatagaagggcacaygtttttctacctttttcttgatagtgtttgcatactgcctaaaagtgcacttagtcaacagcggagga

SEQ ID NO: 86375 - DNA, 599 bp, Chicken  19866894386582_2
  misc_feature (1)..(29): n is any nucleotide
nnnnnnnnnnnnnnnnnnnnnnnnnnnnncagttccttcataactgaaattctgggatttagatttggtttgtaaagtgctgctgacccctcatttttccagctttgtgcacaattttatcttttcatatacttcagtttctgcagctgaatattacctgatctttatttactgaagatttaaaaatgttctttcctgsagccgagcttcatttccatctgagaagataagtttaaacttatcacaaaatagaaggttcaaagaaggttccttggcagttggagtctttttttagtgctrgttttgcaaggaggtatggggagaacaacatctagcacgctttgttcttttgttttccttcctgacatcgtgtgctggggaaaaaacaatgtctggagatttgagaatacggagtcatagaagggcacaygtttttctacctttttcttgatagtgtttgcatactgcctaaaagtgcacttagtcaacagcggaggatgctttcacaaggacgatcctgtgccaagtgccaatcatccagccagtaggaggaagaaattgtaattgtcttcggatttaagttgctgggttttatccca

SEQ ID NO: 86376 - DNA, 600 bp, Chicken  19866894386582_3
acttcagtttctgcagctgaatattacctgatctttatttactgaagatttaaaaatgttctttcctgsagccgagcttcatttccatctgagaagataagtttaaacttatcacaaaatagaaggttcaaagaaggttccttggcagttggagtctttttttagtgctrgttttgcaaggaggtatggggagaacaacatctagcacgctttgttcttttgttttccttcctgacatcgtgtgctggggaaaaaacaatgtctggagatttgagaatacggagtcatagaagggcacaygtttttctacctttttcttgatagtgtttgcatactgcctaaaagtgcacttagtcaacagcggaggatgctttcacaaggacgatcctgtgccaagtgccaatcatccagccagtaggaggaagaaattgtaattgtcttcggatttaagttgctgggttttatcccaacttctctgaactctctcagccaatagaactgttggcttttttttttttccagtcaatgggtatttaattctgggaagttagcaaatgtgcccgtttaatcttaagtaaagcagtaaagtagaatccttct

SEQ ID NO: 86377 - DNA, 599 bp, Chicken  19866894386588_1
  misc_feature (1)..(75): n is any nucleotide
nnnnnnnnnnnnnnnnnnnnnnnnnnnnnnnnnnnnnnnnnnnnnnnnnnnnnnnnnnnnnnnnnnnnnnnnnnnaagatggcactgtgtagctgctgttattttgagaagatagggcctggccctatctttttctttaatttccccctttctaaaatgattctgctgacacttacataactcagtaaaaagcatgagactgacttaatagatggtttcagagggctttcacatcttggtcttaaagatgcctacacagatatcaagcatcatgagctctactgtcaaattccatctagrtagaagtatcctagccagctgtcatgtttcaagccattcccttgatggcggcctaaggcatgcaaaacatctctaaatcaagcagaacaatcattttaaaggatatcatcaggwgcacacctgcctggtgcatggaggtgcagccattyctcctgctctccacccttcagaagggctacggatatggtagcatttggaggcctgcagtacatcttgacttcagtcttacccctgragtctagatacatactgtgcaagactgtggctgcatttggggtagggagaagatctctgaatat

SEQ ID NO: 86378 - DNA, 600 bp, Chicken  19866894386588_2
gggcctggccctatctttttctttaatttccccctttctaaaatgattctgctgacacttacataactcagtaaaaagcatgagactgacttaatagatggtttcagagggctttcacatcttggtcttaaagatgcctacacagatatcaagcatcatgagctctactgtcaaattccatctagrtagaagtatcctagccagctgtcatgtttcaagccattcccttgatggcggcctaaggcatgcaaaacatctctaaatcaagcagaacaatcattttaaaggatatcatcaggwgcacacctgcctggtgcatggaggtgcagccattyctcctgctctccacccttcagaagggctacggatatggtagcatttggaggcctgcagtacatcttgacttcagtcttacccctgragtctagatacatactgtgcaagactgtggctgcatttggggtagggagaagatctctgaatattctgttcacccagtaatgcgttcacacaagagggactggattatatttaagatgagatgtgctggccttaagttgggccaggcgaggttcaaggttggacattaggaaaaaattc

SEQ ID NO: 86379 - DNA, 600 bp, Chicken  19866894386588_3
ttctaaaatgattctgctgacacttacataactcagtaaaaagcatgagactgacttaatagatggtttcagagggctttcacatcttggtcttaaagatgcctacacagatatcaagcatcatgagctctactgtcaaattccatctagrtagaagtatcctagccagctgtcatgtttcaagccattcccttgatggcggcctaaggcatgcaaaacatctctaaatcaagcagaacaatcattttaaaggatatcatcaggwgcacacctgcctggtgcatggaggtgcagccattyctcctgctctccacccttcagaagggctacggatatggtagcatttggaggcctgcagtacatcttgacttcagtcttacccctgragtctagatacatactgtgcaagactgtggctgcatttggggtagggagaagatctctgaatattctgttcacccagtaatgcgttcacacaagagggactggattatatttaagatgagatgtgctggccttaagttgggccaggcgaggttcaaggttggacattaggaaaaaattctccgcaaaaagagtggtgctgcattggcacaggct

SEQ ID NO: 86380 - DNA, 516 bp, Chicken  19866894386588_4
ttggtcttaaagatgcctacacagatatcaagcatcatgagctctactgtcaaattccatctagrtagaagtatcctagccagctgtcatgtttcaagccattcccttgatggcggcctaaggcatgcaaaacatctctaaatcaagcagaacaatcattttaaaggatatcatcaggwgcacacctgcctggtgcatggaggtgcagccattyctcctgctctccacccttcagaagggctacggatatggtagcatttggaggcctgcagtacatcttgacttcagtcttacccctgragtctagatacatactgtgcaagactgtggctgcatttggggtagggagaagatctctgaatattctgttcacccagtaatgcgttcacacaagagggactggattatatttaagatgagatgtgctggccttaagttgggccaggcgaggttcaaggttggacattaggaaaaaattctccgcaaaaagagtggtgctgcattggcacaggctgc

SEQ ID NO: 86381 - DNA, 599 bp, Chicken  19866894386590_1
  misc_feature (1)..(83): n is any nucleotide
nnnnnnnnnnnnnnnnnnnnnnnnnnnnnnnnnnnnnnnnnnnnnnnnnnnnnnnnnnnnnnnnnnnnnnnnnnnnnnnnnnnatagaaggaaatctgcatggccagctccagatatatacaagttaaataacttaatataaatttgtggtttttttcccagataaatagataacataccgtataaacaggtattttttatggggtctctctctgcaagaaagatgaaattctaccaaagccattagcatagaaaaattcagttcagctagattcagtgtgcatcatttcctgtattttwaagattaaacttcacttctgcactgagaactgcttagacgagccacccatgtactcagagctttgtcaatttcataggctcccaaggagcacagaccttgcttctagccagttttatcaagaacaaagattaaagaacattttatccttcttctaaaacagaatttatagcattgagagtttatagctacaagataagacagctcagcttgattatccaactgatatccaacacagacgtgtgaaatatgcatttaaatatataaaaatgttttaaattataaaaagttttcagtgaac

SEQ ID NO: 86382 - DNA, 600 bp, Chicken  19866894386594_1
gtacagtataaggtcgcccataaagaatctcaggtgggcttaatccttccttggttcggggtttagtgccccgaactttggcagaaatgccaaaagcagtaccggcggccagtgaatcccagcctcttggccaagttttactatctgaaatttgatcaggtgattcattttttccacctgtctgcttgactgtggtctataagatatgtgcaattgccaatcagttcccaataatgtgcttctgttttggaccaccttggcaaaaatgtgggcctcgatctgatgagattgctacaggarccccgaacctcggaattaacagcatgtaacagcatttttgttacttcccgagccttattagtcctacagggaaatacctctggccatcccaaaaaggtatcagttagtaccaacatacagcgataccccccttttcttgcgagttttgagaaatcaatttgtcactgttgccctggaaggttctctttcccaataggcccacttgaacccctttcctggtactaggatcgtacttggtaatgtctgtttgcccaatacattttcttatcctcccttagaaccaatttctataaaatacca

SEQ ID NO: 86383 - DNA, 599 bp, Chicken  19866894386614_1
  misc_feature (1)..(55): n is any nucleotide
nnnnnnnnnnnnnnnnnnnnnnnnnnnnnnnnnnnnnnnnnnnnnnnnnnnnnnntcctgtgctgatctcccccctacacaacaaggagcttgggatacccatggcaaagtttttgggttgcctatctgaaggcaggcaggctgactcagagccattctacatctcctctctaggtgctctgcagctggcttgaagggtgagagactcagatgctggcgacgcgttggctgcctctcaccacagtaggttaaatgaagctgagaagttgaaaattatgttaagcaattggagcatccccrgggtagtagaggaaagsaggaatcactgtccctggaggtgttcaaaaaacgtggagatgtgacccttagggacatggctcaatgggcatggtggggatgggttgggyttggactgggtgatctcagtggtctttccaaccttaacaatactatgattctacaaaacctgcacagctcttgagccccttracagcatgtgatgagagcaggaggctgtggctatgccctcctgccctgcagaccagacctggatgctgtgttcaatgtccacagggatgtttggtgtaaacaggatgcag

SEQ ID NO: 86384 - DNA, 599 bp, Chicken  19866894386614_2
  misc_feature (1)..(38): n is any nucleotide
nnnnnnnnnnnnnnnnnnnnnnnnnnnnnnnnnnnnnntcctgtgctgatctcccccctacacaacaaggagcttgggatacccatggcaaagtttttgggttgcctatctgaaggcaggcaggctgactcagagccattctacatctcctctctaggtgctctgcagctggcttgaagggtgagagactcagatgctggcgacgcgttggctgcctctcaccacagtaggttaaatgaagctgagaagttgaaaattatgttaagcaattggagcatccccrgggtagtagaggaaagsaggaatcactgtccctggaggtgttcaaaaaacgtggagatgtgacccttagggacatggctcaatgggcatggtggggatgggttgggyttggactgggtgatctcagtggtctttccaaccttaacaatactatgattctacaaaacctgcacagctcttgagccccttracagcatgtgatgagagcaggaggctgtggctatgccctcctgccctgcagaccagacctggatgctgtgttcaatgtccacagggatgtttggtgtaaacaggatgcagctcactctttatttccc

SEQ ID NO: 86385 - DNA, 600 bp, Chicken  19866894386614_3
aagtttttgggttgcctatctgaaggcaggcaggctgactcagagccattctacatctcctctctaggtgctctgcagctggcttgaagggtgagagactcagatgctggcgacgcgttggctgcctctcaccacagtaggttaaatgaagctgagaagttgaaaattatgttaagcaattggagcatccccrgggtagtagaggaaagsaggaatcactgtccctggaggtgttcaaaaaacgtggagatgtgacccttagggacatggctcaatgggcatggtggggatgggttgggyttggactgggtgatctcagtggtctttccaaccttaacaatactatgattctacaaaacctgcacagctcttgagccccttracagcatgtgatgagagcaggaggctgtggctatgccctcctgccctgcagaccagacctggatgctgtgttcaatgtccacagggatgtttggtgtaaacaggatgcagctcactctttatttcccctttcacttctccaacagccacacctatctttaaaggccctcagatgaggcccatttccagctgcaggagggggtgcaaatgagarggggg

SEQ ID NO: 86386 - DNA, 600 bp, Chicken  19866894386614_4
cttgaagggtgagagactcagatgctggcgacgcgttggctgcctctcaccacagtaggttaaatgaagctgagaagttgaaaattatgttaagcaattggagcatccccrgggtagtagaggaaagsaggaatcactgtccctggaggtgttcaaaaaacgtggagatgtgacccttagggacatggctcaatgggcatggtggggatgggttgggyttggactgggtgatctcagtggtctttccaaccttaacaatactatgattctacaaaacctgcacagctcttgagccccttracagcatgtgatgagagcaggaggctgtggctatgccctcctgccctgcagaccagacctggatgctgtgttcaatgtccacagggatgtttggtgtaaacaggatgcagctcactctttatttcccctttcacttctccaacagccacacctatctttaaaggccctcagatgaggcccatttccagctgcaggagggggtgcaaatgagargggggctcagagcaatctggagaaaaaaaccctgcagtattctatagaaaggcaaactaaggaatgagaaatcaaagctgaggatct

SEQ ID NO: 86387 - DNA, 600 bp, Chicken  19866894386614_5
tgggyttggactgggtgatctcagtggtctttccaaccttaacaatactatgattctacaaaacctgcacagctcttgagccccttracagcatgtgatgagagcaggaggctgtggctatgccctcctgccctgcagaccagacctggatgctgtgttcaatgtccacagggatgtttggtgtaaacaggatgcagctcactctttatttcccctttcacttctccaacagccacacctatctttaaaggccctcagatgaggcccatttccagctgcaggagggggtgcaaatgagargggggctcagagcaatctggagaaaaaaaccctgcagtattctatagaaaggcaaactaaggaatgagaaatcaaagctgaggatctgcttgatgaaatgcattgaaaagaacattatatttgttatgaataaagctataatttagcaagtgaagtggggaagccagtcagcagatactaatcacattcacccacctcgctgggtggaatttgcttgcaccctaatctgcatttttatctcctgcagtatcaatgtgctgcagaacagagacaaacacacctgaagggccagctgaggag

SEQ ID NO: 86388 - DNA, 600 bp, Chicken  19866894386615_1
atcccggtgtaaggctcatctgactataattccctgtgctgtgagcaggatcaagaacaatttctgcttttaataagctgaaccagctctgcctggttaccccaataacaaactgaagtgaagttgaaaatgctacaaatagtgttagacttaagctgaacgttcatcatcatcattatcatgtttggtcctgagaggatcacttcccccagcttattttgcacgatgttttgttgattaacaaaatcatctttaaaagatcttctctaaaagcctcaccagtcacagatgctctagaakttgattacaggggaactgatcagtgcacragagggcatttagcgcttcttgtgttctcacagctgccccacgtcacctaagaaaggtgagtgaagctgaagtgagctctgctcacctccctgccctcaagcttcagccaggcagtatttttactgtgagtgcagtgtgagtggcacactgtgtgcggctgttggggagggaggtgtgggtaaggcagtgcrttacctggttcttgggggccacaatgtgccaggagcacgtgacgcctgctgggtagtcccgctctggccagttgggtgt

SEQ ID NO: 86389 - DNA, 600 bp, Chicken  19866894386615_2
ttccctgtgctgtgagcaggatcaagaacaatttctgcttttaataagctgaaccagctctgcctggttaccccaataacaaactgaagtgaagttgaaaatgctacaaatagtgttagacttaagctgaacgttcatcatcatcattatcatgtttggtcctgagaggatcacttcccccagcttattttgcacgatgttttgttgattaacaaaatcatctttaaaagatcttctctaaaagcctcaccagtcacagatgctctagaakttgattacaggggaactgatcagtgcacragagggcatttagcgcttcttgtgttctcacagctgccccacgtcacctaagaaaggtgagtgaagctgaagtgagctctgctcacctccctgccctcaagcttcagccaggcagtatttttactgtgagtgcagtgtgagtggcacactgtgtgcggctgttggggagggaggtgtgggtaaggcagtgcrttacctggttcttgggggccacaatgtgccaggagcacgtgacgcctgctgggtagtcccgctctggccagttgggtgtttggaaggagccggaaggcttctccagtc

SEQ ID NO: 86390 - DNA, 600 bp, Chicken  19866894386615_3
cacgatgttttgttgattaacaaaatcatctttaaaagatcttctctaaaagcctcaccagtcacagatgctctagaakttgattacaggggaactgatcagtgcacragagggcatttagcgcttcttgtgttctcacagctgccccacgtcacctaagaaaggtgagtgaagctgaagtgagctctgctcacctccctgccctcaagcttcagccaggcagtatttttactgtgagtgcagtgtgagtggcacactgtgtgcggctgttggggagggaggtgtgggtaaggcagtgcrttacctggttcttgggggccacaatgtgccaggagcacgtgacgcctgctgggtagtcccgctctggccagttgggtgtttggaaggagccggaaggcttctccagtcgtcccccacagtactggtcacctggaaatacagcacaccgtgcatggtataacatgggtgaccagctgaggggctggccttgctgtgctgtgtgccggtgcccaggtgctgccggggcctctgggggctctgtgaggagaggccgagctgcgccatgctgggcagtgtgggctccagcagccccagtgctgc

SEQ ID NO: 86391 - DNA, 600 bp, Chicken  19866894386621_1
gactctgcagctgtatacaggtttgctttccttgcctggcagtctggaagcagttgctcttgcatcacacgacagctgctccgagatgagcatttccacagctgtttgcttcaccagaactgcccagcagaactgtccccggtgttgtttttacatccacggttgtgtgcaagtagatctcttccctgaggatgtgaccctgttctttagtgtcaggacaccagcactaacaacacggagcagaggaggaatgtttgtgcaagagctgcttttggcttggcaggattgggctggggagaraagaragcctttctggcagagggtggtttacagcagggccctcatttagtccccctagctgtcctgcctccaggaatgctggaaggagttgggcttgctttgggccaaaggttgggctgacgccaggcctgsaggagcattggccagccaggtggccagcttggcctattaaaggagagcctgtgagcgagcttgtgtgctcattgtgttttgtttctgtgccccacagcggagccttcgaaatcgcagacccgtaaacctaaatgtgggaaagggacgcactgctcccgcaacgcttac

SEQ ID NO: 86392 - DNA, 600 bp, Chicken  19866894386621_2
tgcagctgtatacaggtttgctttccttgcctggcagtctggaagcagttgctcttgcatcacacgacagctgctccgagatgagcatttccacagctgtttgcttcaccagaactgcccagcagaactgtccccggtgttgtttttacatccacggttgtgtgcaagtagatctcttccctgaggatgtgaccctgttctttagtgtcaggacaccagcactaacaacacggagcagaggaggaatgtttgtgcaagagctgcttttggcttggcaggattgggctggggagaraagaragcctttctggcagagggtggtttacagcagggccctcatttagtccccctagctgtcctgcctccaggaatgctggaaggagttgggcttgctttgggccaaaggttgggctgacgccaggcctgsaggagcattggccagccaggtggccagcttggcctattaaaggagagcctgtgagcgagcttgtgtgctcattgtgttttgtttctgtgccccacagcggagccttcgaaatcgcagacccgtaaacctaaatgtgggaaagggacgcactgctcccgcaacgcttacatgct

SEQ ID NO: 86393 - DNA, 600 bp, Chicken  19866894386621_3
ctgtccccggtgttgtttttacatccacggttgtgtgcaagtagatctcttccctgaggatgtgaccctgttctttagtgtcaggacaccagcactaacaacacggagcagaggaggaatgtttgtgcaagagctgcttttggcttggcaggattgggctggggagaraagaragcctttctggcagagggtggtttacagcagggccctcatttagtccccctagctgtcctgcctccaggaatgctggaaggagttgggcttgctttgggccaaaggttgggctgacgccaggcctgsaggagcattggccagccaggtggccagcttggcctattaaaggagagcctgtgagcgagcttgtgtgctcattgtgttttgtttctgtgccccacagcggagccttcgaaatcgcagacccgtaaacctaaatgtgggaaagggacgcactgctcccgcaacgcttacatgctggtgtacaggctgcagacccgggagaagtcactgacagtggaagtaccaggtaagggagagcactcctggcctctccacctcttctcctggagcacacccctgctcagagctgtgctcgaaagwcct

SEQ ID NO: 86394 - DNA, 600 bp, Chicken  19866894386621_4
tgsaggagcattggccagccaggtggccagcttggcctattaaaggagagcctgtgagcgagcttgtgtgctcattgtgttttgtttctgtgccccacagcggagccttcgaaatcgcagacccgtaaacctaaatgtgggaaagggacgcactgctcccgcaacgcttacatgctggtgtacaggctgcagacccgggagaagtcactgacagtggaagtaccaggtaagggagagcactcctggcctctccacctcttctcctggagcacacccctgctcagagctgtgctcgaaagwccttttgctatctggtgcygcatggtgacttgctgtcacaatgtgggtcagatgcagcaaaatctttggacttccccagcacttggattgtgtaaacctgataatgtcacctcttggcctgctgggggcatcttgtcctgtggggtcctctgggagggggtcaggaggaggtgatgtcccactcgggttgactgtcagcggagcacatgctgtgctagagggggaatagtgctggcatcttctgcaagtgcttaatctctgccagatagaggataggtggcataaaaacaagaggctgtg

SEQ ID NO: 86395 - DNA, 600 bp, Chicken  19866894386621_5
caggtggccagcttggcctattaaaggagagcctgtgagcgagcttgtgtgctcattgtgttttgtttctgtgccccacagcggagccttcgaaatcgcagacccgtaaacctaaatgtgggaaagggacgcactgctcccgcaacgcttacatgctggtgtacaggctgcagacccgggagaagtcactgacagtggaagtaccaggtaagggagagcactcctggcctctccacctcttctcctggagcacacccctgctcagagctgtgctcgaaagwccttttgctatctggtgcygcatggtgacttgctgtcacaatgtgggtcagatgcagcaaaatctttggacttccccagcacttggattgtgtaaacctgataatgtcacctcttggcctgctgggggcatcttgtcctgtggggtcctctgggagggggtcaggaggaggtgatgtcccactcgggttgactgtcagcggagcacatgctgtgctagagggggaatagtgctggcatcttctgcaagtgcttaatctctgccagatagaggataggtggcataaaaacaagaggctgtgagccttcagcaagagctct

SEQ ID NO: 86396 - DNA, 600 bp, Chicken  19866894386628_1
taaatatctttgagagaagtactcatctcttatattcagatttataataataatctttaagtttgatagttacgctgaacagagtgttcttggaagagtctgactaccattttttatattaaattaattatgtctctaaaatcacctttacgctgtcttgaaaatctccacaataaatgaatgcctcaaactatttatagacaagtctgttcaacaggttatggatgagaaccggcctggtcttgctaacaggagagtttgcagtggcttgttaaaactcagtgtaattttattgacttrctattcattttataaaaacaaattctctgattatactcccaagttctttaacgccaatgactttaactgttttgtcaatagcttcacttacaaaagcaagactataatattctgtaaataccagtcatattttaacaaagtgtgaaattaaattactcttactggcatacattagtaatggattgtagttatttagctattgatcaaaaattatttttataaaacacattgacatgcattgaaaatatctagacttaattatgacaaatattatttttgaatgtcaatcaagtgtttggt

SEQ ID NO: 86397 - DNA, 600 bp, Chicken  19866894386628_2
aaaagcaagactataatattctgtaaataccagtcatattttaacaaagtgtgaaattaaattactcttactggcatacattagtaatggattgtagttatttagctattgatcaaaaattatttttataaaacacattgacatgcattgaaaatatctagacttaattatgacaaatattatttttgaatgtcaatcaagtgtttggtgttattgtgagctccttaatggcttttcgcctgaagcattatgtcttgctataaatatccctacaccatgaaaacaactagaattatattmttttcttttttaatacagcctcattrtgcctgaggccaccaacatctgacagtgttgaaatttccccatttaagctacactacaacattggtgaaactgtgaagctaagctgtcgagctgggtttgtagtcactggtcaaacacaatatacttgtggaaaagatctgtcctggtttccttctattctgaggtctattacatgtgaaaaaggttagtatctctgcaggtgcattactattcctgtagtgctggtattctcaacatggtttattataactagatagagctagaaagcagatt

SEQ ID NO: 86398 - DNA, 575 bp, Chicken  19866894386628_3
ataccagtcatattttaacaaagtgtgaaattaaattactcttactggcatacattagtaatggattgtagttatttagctattgatcaaaaattatttttataaaacacattgacatgcattgaaaatatctagacttaattatgacaaatattatttttgaatgtcaatcaagtgtttggtgttattgtgagctccttaatggcttttcgcctgaagcattatgtcttgctataaatatccctacaccatgaaaacaactagaattatattmttttcttttttaatacagcctcattrtgcctgaggccaccaacatctgacagtgttgaaatttccccatttaagctacactacaacattggtgaaactgtgaagctaagctgtcgagctgggtttgtagtcactggtcaaacacaatatacttgtggaaaagatctgtcctggtttccttctattctgaggtctattacatgtgaaaaaggttagtatctctgcaggtgcattactattcctgtagtgctggtattctcaacatggtttattataactagatagagctagaaagcagatta

SEQ ID NO: 86399 - DNA, 600 bp, Chicken  19866894386633_1
attgcttcacctgtctttcaccaccttatcttgtagaggaagaattgaaaaagccatacgttccgcacctcaaaaataacccttaggttgactgaaacgatttttattgctgctgttatctgttcatctcctcccacggaaaaatgagggtcaaaccctctgtgggttcccccctccttccttggctgggtgcagtgagttgggacgcagcggccccggccgcccccggaggggtgcggagctctccgcggtgctgcagccccgggttcaagcgctgcgctgggcgctgactgaaccgckytgctcctttggaaggatccccgcgatgccagggctgtaaattcctgctgacaccggggtggagttgcgtttcgtgtctgcctaacagtgaggtggggtttctgagcagcatctgggcacgggtgttcctgtaggacggctaataaatgctaacaacctctgaacattgctcagcggttccatgtcatgttttgaggctgtgtattgtctgagcattttctgggtgattaagtaaaaagtaacatttgttcrgtatgttctgtcactgtgcgtatggaatcggacatgatttgcttataa

SEQ ID NO: 86400 - DNA, 600 bp, Chicken  19866894386633_2
ttgcttcacctgtctttcaccaccttatcttgtagaggaagaattgaaaaagccatacgttccgcacctcaaaaataacccttaggttgactgaaacgatttttattgctgctgttatctgttcatctcctcccacggaaaaatgagggtcaaaccctctgtgggttcccccctccttccttggctgggtgcagtgagttgggacgcagcggccccggccgcccccggaggggtgcggagctctccgcggtgctgcagccccgggttcaagcgctgcgctgggcgctgactgaaccgckytgctcctttggaaggatccccgcgatgccagggctgtaaattcctgctgacaccggggtggagttgcgtttcgtgtctgcctaacagtgaggtggggtttctgagcagcatctgggcacgggtgttcctgtaggacggctaataaatgctaacaacctctgaacattgctcagcggttccatgtcatgttttgaggctgtgtattgtctgagcattttctgggtgattaagtaaaaagtaacatttgttcrgtatgttctgtcactgtgcgtatggaatcggacatgatttgcttataat

SEQ ID NO: 86401 - DNA, 600 bp, Chicken  19866894386633_3
gctgcagccccgggttcaagcgctgcgctgggcgctgactgaaccgckytgctcctttggaaggatccccgcgatgccagggctgtaaattcctgctgacaccggggtggagttgcgtttcgtgtctgcctaacagtgaggtggggtttctgagcagcatctgggcacgggtgttcctgtaggacggctaataaatgctaacaacctctgaacattgctcagcggttccatgtcatgttttgaggctgtgtattgtctgagcattttctgggtgattaagtaaaaagtaacatttgttcrgtatgttctgtcactgtgcgtatggaatcggacatgatttgcttataattgtctctgtgatctccctcatcaaaggaacaagacccatctgctgggcagagcaaagctgctcracttgaatccagatatgttaccatttaaggggtgcaacctttgacagaacatagtacaagcctttgaacaaagcagttgtgcaactgtaactgttgtgcagcctaattgaatcacaaaccacacatgctttccttgggcaaaggctttccctgtgcaaacacaatcgtgtccatttgccacaaaatt

SEQ ID NO: 86402 - DNA, 600 bp, Chicken  19866894386633_4
tgcgtttcgtgtctgcctaacagtgaggtggggtttctgagcagcatctgggcacgggtgttcctgtaggacggctaataaatgctaacaacctctgaacattgctcagcggttccatgtcatgttttgaggctgtgtattgtctgagcattttctgggtgattaagtaaaaagtaacatttgttcrgtatgttctgtcactgtgcgtatggaatcggacatgatttgcttataattgtctctgtgatctccctcatcaaaggaacaagacccatctgctgggcagagcaaagctgctcracttgaatccagatatgttaccatttaaggggtgcaacctttgacagaacatagtacaagcctttgaacaaagcagttgtgcaactgtaactgttgtgcagcctaattgaatcacaaaccacacatgctttccttgggcaaaggctttccctgtgcaaacacaatcgtgtccatttgccacaaaatttattacctttccgattgtatgagctccatactaaacacagacttaaaagtgtaaatgccatggattcatctttagcacatccacgtgtttcgttaaggcgcctcataaattca

SEQ ID NO: 86403 - DNA, 504 bp, Chicken  19866894386634_1
gctcctatgtagattagacttctattaacccacattacacaacaattaattaatttgccttttaagcaagcaaattgggaaataaccaagactcccttggatcctagcccttcagaaatacctgtgtctcccattatgcagtgtgaggaacctttttgaccatcactacttcagtaccctgctagaacagacgtgccttgcaggtaactgcagaacggtgtgcataggcaaagccatgtgtctgcccagccctaaggctgtcccctcgtactctcttcacccaccctgagctccaagtcrgctctcactatcaccattttagctatctataagcatgcatccaggcctggtctgggcttcttccaagccaggacagtagaactatgttacgaggcaaagggagttggcaaacaaagagttgtaagagataacacactccttctcacattggccagatcttgcagatcatactgcagttcatgctatcaaaggtagcagtgcact

SEQ ID NO: 86404 - DNA, 600 bp, Chicken  19866894386636_1
aaaagcgttatgtttgcctggtggatgtaagaggaaacagagaaaaccacgaatagacatttagaatcccccctctcctgaacgatgctgtcctctgactccaaaacagccaccgacgcaaacacagcagctacaactctgcgttttgtagacgctgagcttcataaagcagagctggaactccggcacggtgcacaaaatacgcatccagaggagatgcttcctgtaaaccctttagcgcagtgattttaagagcagcatcgctgccaatacgctaaaagctttcattttcactttccrccccaagctggcctggttcacacgccattagaatgacatgtcgtcgcatatttctctaagtttcgagtagaaacatttcgatgtttacggctcaatgatggcagagctcggaagtcacgcagcagcgccgccgccccgcgcacagctgagtgcggcgcagaggcgatcccggagcacacgcttcgcttcgctcagaacgtcgaactgaaaaccctttctgccgaacttaccaacaacaaaaaccctcatccgatcgggaaacgcgggagaaaaatgtagattttttttttcttttttttt

SEQ ID NO: 86405 - DNA, 600 bp, Chicken  19866894386640_1
ctccaaatctcaaatgtaattacatattttccagggacctttgacattttcacactgtggcttggaatctgatcataccctgaagtaaactgtctggctggtcagagacttagaaataaggtctctagcgaggcagacttggcctttttcagactccagaaaagaaagaagagagctgtacaggtctgggtcagattttgttatcagagccttgaaaggaaccagaaagagatgaagagctgaactcttatctcatgtaattgctcttacaggaatcagaaaaggcaccagaataaagawaagtctttttcacatcagtcaaggctgctttgtgtaggaactaaagggatttttgaaccttgttcctaattaatctccctggattttgtgctcaggtttctggactctgtttttgagcacaaagccaagccaaggtgaacacacaaatgtgacacacagagacataacgttcatgctccagactcttccaagaaacatccaaaaggttggggctgctaggagtgagcaccaggggcttgatgccatcatactcattcaggacaggcmcatccatgctctaccagaagcaacagtgatttt

SEQ ID NO: 86406 - DNA, 600 bp, Chicken  19866894386640_2
tacaggaatcagaaaaggcaccagaataaagawaagtctttttcacatcagtcaaggctgctttgtgtaggaactaaagggatttttgaaccttgttcctaattaatctccctggattttgtgctcaggtttctggactctgtttttgagcacaaagccaagccaaggtgaacacacaaatgtgacacacagagacataacgttcatgctccagactcttccaagaaacatccaaaaggttggggctgctaggagtgagcaccaggggcttgatgccatcatactcattcaggacaggcmcatccatgctctaccagaagcaacagtgattttattaatgagctactctttactaatacgtaaaccataaatgaactcactgcttgagaatccactgattcacattagtgggtctggcccaccatttaggttattcaggagagtttgatgcacacacatatgcaaaaacatgatatacgtgtccatcacgtacatgttggcaaacagtttatttactgtctcgcaaactgtatgctaggcatcaatgcaatcaatctgcttcttctgcagatgcaaaattcacatgaaaatacaattttt

SEQ ID NO: 86407 - DNA, 600 bp, Chicken  19866894386666_1
gataataggtttttttcccccacttcaaactttattcctaaactactatattaaaaataattacaaaatataatattgcaaatcataacctatttttccatagtttcatattcaagacagacaaattagcagaagagatgttattactagcaatcaaagaacacaaccacatttaggatatgaagttacacataggaaagctctcaaattcattcttattttcaagaaaagtcttcttaactcaaggccaccaaagcagaggtctgacatagaatataaataccaattgggcacaccatraagttttgatttgtttgctttacaaattgttgaattccccagcaagccttagtccaacatgtattaaaaataagtcagctcgactgaaaacacaaatctgttgtacaaaccargttgtctactctcttttctttcattcttgaggcaaaactgtcaaagcttaaaacagaaaygtgatgacagtaccacaaacatctyagtaattcaggaaggtcacacaattttagcactgagcaaaaatgkttttttcttatagttatgaaagtgttctacgattctgaaatgcctctgacatctctc

SEQ ID NO: 86408 - DNA, 600 bp, Chicken  19866894386666_2
aagacagacaaattagcagaagagatgttattactagcaatcaaagaacacaaccacatttaggatatgaagttacacataggaaagctctcaaattcattcttattttcaagaaaagtcttcttaactcaaggccaccaaagcagaggtctgacatagaatataaataccaattgggcacaccatraagttttgatttgtttgctttacaaattgttgaattccccagcaagccttagtccaacatgtattaaaaataagtcagctcgactgaaaacacaaatctgttgtacaaaccargttgtctactctcttttctttcattcttgaggcaaaactgtcaaagcttaaaacagaaaygtgatgacagtaccacaaacatctyagtaattcaggaaggtcacacaattttagcactgagcaaaaatgkttttttcttatagttatgaaagtgttctacgattctgaaatgcctctgacatctctcattatgaaataccctcattcaattctkcatgctacgaacttgacagtagaatcggtagttttattctcaatgttatttgctagcacacaactcatggacaaagcatcatcaga

SEQ ID NO: 86409 - DNA, 600 bp, Chicken  19866894386666_3
taggatatgaagttacacataggaaagctctcaaattcattcttattttcaagaaaagtcttcttaactcaaggccaccaaagcagaggtctgacatagaatataaataccaattgggcacaccatraagttttgatttgtttgctttacaaattgttgaattccccagcaagccttagtccaacatgtattaaaaataagtcagctcgactgaaaacacaaatctgttgtacaaaccargttgtctactctcttttctttcattcttgaggcaaaactgtcaaagcttaaaacagaaaygtgatgacagtaccacaaacatctyagtaattcaggaaggtcacacaattttagcactgagcaaaaatgkttttttcttatagttatgaaagtgttctacgattctgaaatgcctctgacatctctcattatgaaataccctcattcaattctkcatgctacgaacttgacagtagaatcggtagttttattctcaatgttatttgctagcacacaactcatggacaaagcatcatcagacaactaaagtgctttttcaatctgattagttacccaaaagttctgagattcaaaagacct

SEQ ID NO: 86410 - DNA, 600 bp, Chicken  19866894386666_4
agctctcaaattcattcttattttcaagaaaagtcttcttaactcaaggccaccaaagcagaggtctgacatagaatataaataccaattgggcacaccatraagttttgatttgtttgctttacaaattgttgaattccccagcaagccttagtccaacatgtattaaaaataagtcagctcgactgaaaacacaaatctgttgtacaaaccargttgtctactctcttttctttcattcttgaggcaaaactgtcaaagcttaaaacagaaaygtgatgacagtaccacaaacatctyagtaattcaggaaggtcacacaattttagcactgagcaaaaatgkttttttcttatagttatgaaagtgttctacgattctgaaatgcctctgacatctctcattatgaaataccctcattcaattctkcatgctacgaacttgacagtagaatcggtagttttattctcaatgttatttgctagcacacaactcatggacaaagcatcatcagacaactaaagtgctttttcaatctgattagttacccaaaagttctgagattcaaaagaccttgtagctcatggtccttctctggac

SEQ ID NO: 86411 - DNA, 600 bp, Chicken  19866894386666_5
aaggccaccaaagcagaggtctgacatagaatataaataccaattgggcacaccatraagttttgatttgtttgctttacaaattgttgaattccccagcaagccttagtccaacatgtattaaaaataagtcagctcgactgaaaacacaaatctgttgtacaaaccargttgtctactctcttttctttcattcttgaggcaaaactgtcaaagcttaaaacagaaaygtgatgacagtaccacaaacatctyagtaattcaggaaggtcacacaattttagcactgagcaaaaatgkttttttcttatagttatgaaagtgttctacgattctgaaatgcctctgacatctctcattatgaaataccctcattcaattctkcatgctacgaacttgacagtagaatcggtagttttattctcaatgttatttgctagcacacaactcatggacaaagcatcatcagacaactaaagtgctttttcaatctgattagttacccaaaagttctgagattcaaaagaccttgtagctcatggtccttctctggactgtaatcttccccactggatttctttaaaaccccaattataagta

SEQ ID NO: 86412 - DNA, 600 bp, Chicken  19866894386666_6
tgttgaattccccagcaagccttagtccaacatgtattaaaaataagtcagctcgactgaaaacacaaatctgttgtacaaaccargttgtctactctcttttctttcattcttgaggcaaaactgtcaaagcttaaaacagaaaygtgatgacagtaccacaaacatctyagtaattcaggaaggtcacacaattttagcactgagcaaaaatgkttttttcttatagttatgaaagtgttctacgattctgaaatgcctctgacatctctcattatgaaataccctcattcaattctkcatgctacgaacttgacagtagaatcggtagttttattctcaatgttatttgctagcacacaactcatggacaaagcatcatcagacaactaaagtgctttttcaatctgattagttacccaaaagttctgagattcaaaagaccttgtagctcatggtccttctctggactgtaatcttccccactggatttctttaaaaccccaattataagtaacataagcaatgaagcatctgacacataccctggggaaagcttcccatagactaacgagaaaattgtttttcctgagtagaatt

SEQ ID NO: 86413 - DNA, 599 bp, Chicken  19866894386668_1
  misc_feature (1)..(253): n is any nucleotide
nnnnnnnnnnnnnnnnnnnnnnnnnnnnnnnnnnnnnnnnnnnnnnnnnnnnnnnnnnnnnnnnnnnnnnnnnnnnnnnnnnnnnnnnnnnnnnnnnnnnnnnnnnnnnnnnnnnnnnnnnnnnnnnnnnnnnnnnnnnnnnnnnnnnnnnnnnnnnnnnnnnnnnnnnnnnnnnnnnnnnnnnnnnnnnnnnnnnnnnnnnnnnnnnnnnnnnnnnnnnnnnnnnnnnnnnnnnnnnnnnnnnnnnnnnnnncatgctcaatgctttctagtaaaatcagcctcaatttggtttttgarttctgtctgatgggagctgcgctgtgctggtgtaccccttgggttcycctcactttgttctgtcacagttttgatgtctccagtaatatgggaaataaatatgggaattatttcacatctaatgggctttgtagtttacttaccattacttttttgtttgtttatttatttattttaaactaattagtctggttgttttttgagatgaggaattcttagaaagccaaagaatggatgggaagaagcagctgatgaggtgctttctygaaaacsttatcataaaccactagatgtatgta

SEQ ID NO: 86414 - DNA, 599 bp, Chicken  19866894386668_2
  misc_feature (1)..(206): n is any nucleotide
nnnnnnnnnnnnnnnnnnnnnnnnnnnnnnnnnnnnnnnnnnnnnnnnnnnnnnnnnnnnnnnnnnnnnnnnnnnnnnnnnnnnnnnnnnnnnnnnnnnnnnnnnnnnnnnnnnnnnnnnnnnnnnnnnnnnnnnnnnnnnnnnnnnnnnnnnnnnnnnnnnnnnnnnnnnnnnnnnnnnnnnnnnnnnnnnnnnnnnnnnnnnnncatgctcaatgctttctagtaaaatcagcctcaatttggtttttgarttctgtctgatgggagctgcgctgtgctggtgtaccccttgggttcycctcactttgttctgtcacagttttgatgtctccagtaatatgggaaataaatatgggaattatttcacatctaatgggctttgtagtttacttaccattacttttttgtttgtttatttatttattttaaactaattagtctggttgttttttgagatgaggaattcttagaaagccaaagaatggatgggaagaagcagctgatgaggtgctttctygaaaacsttatcataaaccactagatgtatgtagtcttctgtattctgtattyttttattttttaaaaatttatttagag

SEQ ID NO: 86415 - DNA, 600 bp, Chicken  19866894386668_3
ttctagtaaaatcagcctcaatttggtttttgarttctgtctgatgggagctgcgctgtgctggtgtaccccttgggttcycctcactttgttctgtcacagttttgatgtctccagtaatatgggaaataaatatgggaattatttcacatctaatgggctttgtagtttacttaccattacttttttgtttgtttatttatttattttaaactaattagtctggttgttttttgagatgaggaattcttagaaagccaaagaatggatgggaagaagcagctgatgaggtgctttctygaaaacsttatcataaaccactagatgtatgtagtcttctgtattctgtattyttttattttttaaaaatttatttagaggaagcacttattacaaaataatcactatggaaaagtatgcacaccttaaatcctttgattgtaataaataacaactagttttgaactagcctcttaagtatgctggttgtgttctatagcctatattcaaatcctcgtagtttgaaatgtatcttcttcatttagtcgccttttaggatacagaaaatgatttttgataacagaggctaatgttcttttc

SEQ ID NO: 86416 - DNA, 600 bp, Chicken  19866894386668_4
aaaatcagcctcaatttggtttttgarttctgtctgatgggagctgcgctgtgctggtgtaccccttgggttcycctcactttgttctgtcacagttttgatgtctccagtaatatgggaaataaatatgggaattatttcacatctaatgggctttgtagtttacttaccattacttttttgtttgtttatttatttattttaaactaattagtctggttgttttttgagatgaggaattcttagaaagccaaagaatggatgggaagaagcagctgatgaggtgctttctygaaaacsttatcataaaccactagatgtatgtagtcttctgtattctgtattyttttattttttaaaaatttatttagaggaagcacttattacaaaataatcactatggaaaagtatgcacaccttaaatcctttgattgtaataaataacaactagttttgaactagcctcttaagtatgctggttgtgttctatagcctatattcaaatcctcgtagtttgaaatgtatcttcttcatttagtcgccttttaggatacagaaaatgatttttgataacagaggctaatgttcttttcctaggag

SEQ ID NO: 86417 - DNA, 600 bp, Chicken  19866894386668_5
cgctgtgctggtgtaccccttgggttcycctcactttgttctgtcacagttttgatgtctccagtaatatgggaaataaatatgggaattatttcacatctaatgggctttgtagtttacttaccattacttttttgtttgtttatttatttattttaaactaattagtctggttgttttttgagatgaggaattcttagaaagccaaagaatggatgggaagaagcagctgatgaggtgctttctygaaaacsttatcataaaccactagatgtatgtagtcttctgtattctgtattyttttattttttaaaaatttatttagaggaagcacttattacaaaataatcactatggaaaagtatgcacaccttaaatcctttgattgtaataaataacaactagttttgaactagcctcttaagtatgctggttgtgttctatagcctatattcaaatcctcgtagtttgaaatgtatcttcttcatttagtcgccttttaggatacagaaaatgatttttgataacagaggctaatgttcttttcctaggaggtggagctctaagcaatgaggaggatagcataagacactcctattg

SEQ ID NO: 86418 - DNA, 600 bp, Chicken  19866894386673_1
caggggttggacttcatgacccttgtgggtccctcccaaattgggatattctgtgttctaactagtgagctccagtcacccttcaccatgacagaagtgtccctgcctgctcttctcatctgctatacaacagctgccagtcagagcaggacatcacaagggaaaccaaagagaagttatttgtaatgggagcaacagtgcacatcccagcagcctctggcatggccctgtaagtgcagcccggctcccctaaagaagcaacatatgggcagggcagtgacaaggccctcaccttgcaawggagatctcacatcactgctgattgcactggccttcaagacctcaccacctacctgctgtagaacagcaccacagctccactaacagagaaagcacatatgccacgctagcagagcaggaaactcctcaggctttcattgttactgcaacactgattgtaacacagtatttctagtcttgctgctcccaaccaactcttaactccccaggagttgaactgttgcccccagcatccacccgtgatgttagaaattcacagctgacagagcacaggctctgtcccagcactgcagcaaggaa

SEQ ID NO: 86419 - DNA, 600 bp, Chicken  19866894386688_1
ttctcttttactctaggcttccttatagagttttagccacgtaagagtagataagagaggtgtgaggaaggttcgctctgagctacggatgggtttaggagtgttctgcacaatgttcccttaaagcacaatgcatggcatgtctctttactttgataagacctctctcaccagagaaaaagagtccttgcttcacagtcatgttattcatgttatcacatacatttgtgaacaactgttttcaaggatgaagtacaggaggagtaaaatttcatctaacatctctgataagcaccttargagctcactaagaattgcagccactgcagttgaaccagactgatatggtagttacacagcaacagggtcacatatctcactatttccgtttctgtcactcttttttgttctaattaataaaatgttaaagattaaaataatttttgttacctatatacaggaactatagtatatattttatgagggctgctccaaaagcaatgcctgctgttttattttatcagcccacagtgttagaggcagatgttggtggtatggcagtacaggttgaaccttcccgtcaacagtccattacatgtt

SEQ ID NO: 86420 - DNA, 600 bp, Chicken  19866894386692_1
agttgtactgtaagtggttcatcatcaaatttcttttaaaaatagtaattctaataaaagtgggtgtattttacataaacttgctctatttcagaaaaatacgtgaagactttcacaaaaaaattatagtgaatgttttttatattattatggttgttttgcctttgcctatacatcacatactatgggatgttacctaccatctgtgtgggaacaattcacactgttactgaatagactcagcatcgttttacagacactggacataagttccagaatttcttctctgaccaaactgcrcataaggacagattctggatattattctcatttttaatgaagttgattgaaagcttgctacagtaaacaggaatagacctggagcagttttgatcagtaaggtggaacatacaggactttcactgttctcaaaagacctttagaactatcttcagctcctctccaaagagtttatagactacagccaagtagattttattctttaggtgctcttagtgctcctcagtttcatctctgtaaccagatagatagcaaaaatgacctgcaatgtccttccaggacaatggttgctgcaaatct

SEQ ID NO: 86421 - DNA, 600 bp, Chicken  19866894386699_1
aaaagaataggcactggaatgagatcagaagaggctcacggctgcgtctgtaaaacactggatttttgctataagaaatgcctgtttcccctaattccatattgactgcttggcacagcaaagtcttttacacccttcacaacagagcacacctctaatttgatcagaaaaatagcctgtattgcctttgtttcagcttattagacacaatccaaaaaccatttcttcaagaaggggggtcatgatcaggctacagatctaacaggctgggaacaagaaaccagcagcatgaaagcaccraaaagccgtagaaatcaatggaaacaattgcaatccttaaacaaataataatgcagaatctcatttcctcctgaacattttgtgactgagattgttacaagcaacctatttttttcccctccgtttgtttagcgtatttagcagcactgagcgtacaggccattgttttgctaagggtcagcaatgcttatctcctgatctcgcccaactggctggctgctctgtgagacctggatgagctcttgtctcagacccagcaagaggctgcaaaccagcagcagcagagctgcactcaacagg

SEQ ID NO: 86422 - DNA, 589 bp, Chicken  19866894386699_2
tgttacaagcaacctatttttttcccctccgtttgtttagcgtatttagcagcactgagcgtacaggccattgttttgctaagggtcagcaatgcttatctcctgatctcgcccaactggctggctgctctgtgagacctggatgagctcttgtctcagacccagcaagaggctgcaaaccagcagcagcagagctgcactcaacaggcagcaatgagcaagcacataaggacacagaaaggaaatgggtgagctcaggcaaggttagcgtgactggagcagcagtcactccaaacaacyctgagaaaagagcctacaagcataaaaaccctggtgggattaacaacgcctttctgtaaaggagtcgtttcaggacaactgacttaagggaagtgctacagttacttattttttaattagactggattcaagccatatctagctgatgatgccatctgagttcacagggaccttcccattgcctcatggcacaggagcaagaggacaacacaattaatgggaatgatggcacttttaaaagcaacagtagggaagttgttctaaatgaagcagtaattgcgcagactgg

SEQ ID NO: 86423 - DNA, 599 bp, Chicken  19866894386701_1
  misc_feature (1)..(170): n is any nucleotide
nnnnnnnnnnnnnnnnnnnnnnnnnnnnnnnnnnnnnnnnnnnnnnnnnnnnnnnnnnnnnnnnnnnnnnnnnnnnnnnnnnnnnnnnnnnnnnnnnnnnnnnnnnnnnnnnnnnnnnnnnnnnnnnnnnnnnnnnnnnnnnnnnnnnnnnnnnnnnnnnnnnnnnnnnnatttctaaaaaggcaaaatgtttgatttgctgaatattctacttgcaactactggattcacaatactgccttcctaagtagtataatctccttctcccagcaagaagggtcaaaataaagcatcagttcrtgcaaagatcaaattcatagcaagtttcagggaatgaatagttccctttggctcaaggtttctgtccaggaggaatgctgacatgcacaaacacagtgcaagtcaaaagcacagtcttgatttatgctcacgtatacataaataactgtacacccacagtcactttcatggtagtactgcagactcagttttgtcaatactacattacatcactaaaacaggyacacgtggagaatcgaatcagatgggacaacctctaagaaagaagcacaggagagctcagaaygagaaatcaagaa

SEQ ID NO: 86424 - DNA, 600 bp, Chicken  19866894386701_2
ggattcacaatactgccttcctaagtagtataatctccttctcccagcaagaagggtcaaaataaagcatcagttcrtgcaaagatcaaattcatagcaagtttcagggaatgaatagttccctttggctcaaggtttctgtccaggaggaatgctgacatgcacaaacacagtgcaagtcaaaagcacagtcttgatttatgctcacgtatacataaataactgtacacccacagtcactttcatggtagtactgcagactcagttttgtcaatactacattacatcactaaaacaggyacacgtggagaatcgaatcagatgggacaacctctaagaaagaagcacaggagagctcagaaygagaaatcaagaaaacaaatacagaagagcagctactaaccaamaagaggtcatgcttgagcagcctcaggcactctcgagcatgcatcaaggtccattatggaggggaaaagacttcaccaccctcacagcagctatcaataggtactctacgccttgactctgcaagctctctgktgtaagcttcagaataacagagaaatctgtgtcagcctaaactctgcagtctctgtaaaa

SEQ ID NO: 86425 - DNA, 600 bp, Chicken  19866894386701_3
aaagcatcagttcrtgcaaagatcaaattcatagcaagtttcagggaatgaatagttccctttggctcaaggtttctgtccaggaggaatgctgacatgcacaaacacagtgcaagtcaaaagcacagtcttgatttatgctcacgtatacataaataactgtacacccacagtcactttcatggtagtactgcagactcagttttgtcaatactacattacatcactaaaacaggyacacgtggagaatcgaatcagatgggacaacctctaagaaagaagcacaggagagctcagaaygagaaatcaagaaaacaaatacagaagagcagctactaaccaamaagaggtcatgcttgagcagcctcaggcactctcgagcatgcatcaaggtccattatggaggggaaaagacttcaccaccctcacagcagctatcaataggtactctacgccttgactctgcaagctctctgktgtaagcttcagaataacagagaaatctgtgtcagcctaaactctgcagtctctgtaaaacagtctacagaaatatgagcaacatttactgcaaataattaacatctgctacaacagcctaaa

SEQ ID NO: 86426 - DNA, 600 bp, Chicken  19866894386701_4
ggaatgaatagttccctttggctcaaggtttctgtccaggaggaatgctgacatgcacaaacacagtgcaagtcaaaagcacagtcttgatttatgctcacgtatacataaataactgtacacccacagtcactttcatggtagtactgcagactcagttttgtcaatactacattacatcactaaaacaggyacacgtggagaatcgaatcagatgggacaacctctaagaaagaagcacaggagagctcagaaygagaaatcaagaaaacaaatacagaagagcagctactaaccaamaagaggtcatgcttgagcagcctcaggcactctcgagcatgcatcaaggtccattatggaggggaaaagacttcaccaccctcacagcagctatcaataggtactctacgccttgactctgcaagctctctgktgtaagcttcagaataacagagaaatctgtgtcagcctaaactctgcagtctctgtaaaacagtctacagaaatatgagcaacatttactgcaaataattaacatctgctacaacagcctaaagaattatctgtcatgcccattcacttttcacttattttgctaaa

SEQ ID NO: 86427 - DNA, 600 bp, Chicken  19866894386701_5
tttcatggtagtactgcagactcagttttgtcaatactacattacatcactaaaacaggyacacgtggagaatcgaatcagatgggacaacctctaagaaagaagcacaggagagctcagaaygagaaatcaagaaaacaaatacagaagagcagctactaaccaamaagaggtcatgcttgagcagcctcaggcactctcgagcatgcatcaaggtccattatggaggggaaaagacttcaccaccctcacagcagctatcaataggtactctacgccttgactctgcaagctctctgktgtaagcttcagaataacagagaaatctgtgtcagcctaaactctgcagtctctgtaaaacagtctacagaaatatgagcaacatttactgcaaataattaacatctgctacaacagcctaaagaattatctgtcatgcccattcacttttcacttattttgctaaaacctcctcatccatctttccagagtagcactgggaggctagcatttgcaggtgaagcagggtcaaagttatttaacagattggaaaattaacactcctcttgatggaacatgctgcatccaagcctcaaacag

SEQ ID NO: 86428 - DNA, 432 bp, Chicken  19866894386708_1
gagcactccgtgggagcccgggtacaccagtgcactcaaggcaaaacaaacagatgcactctactggtacaaaagttggtcagtaagcttcaggagaggcagagtgtagcactgaagcttcctttattttagctccactatattccttcaggccttctagtcagccttgagatacgaggtattatttgttaaagcattaatctctctgaataagctagggctacggcaacaaaacattacgatccgtggctgcaagaaaaatcaggttcacaggatgcaaagcctggtgaggaataagargattttaaggctcataagttagtgtgcacactgcacttctgccagcccactgctccttaagactcagcaattacaacgtgactcactgaagcatttctttgtgaaaccatttttaaaagtccaccgaggctg

SEQ ID NO: 86429 - DNA, 501 bp, Chicken  19866894386712_1
gcatgggatgctccacgggggccgacgtcaggtaatcccaaattcctttggattcaggctacaatgccccgctttcattacagctatgactgggacccattatgggctgacgtcggtgatgtgcctgtgtgttttaatagaagacgtgaggacgactcttgaggaatttggcgtggtaggaagaagtgccccagtgctctgtgtcagctctgctctgaggaatggcaattcgatccccagggtgggctttaaaccaacggagaagggagcaaaaggcatttggaagtatcagaatgggcrcaaatacataccctgagcacgcggcacacgtcagggtggggattacctgagtgaagttgatgggtttgtctttggtaatgcagtcggcgtatttgcaggcaaacatcccgcagtcactgccgttcatctgctgtgggatctcctggaatgagaggacacagagctgagcatcacagccacgagtcggacccctcgcgtcag

SEQ ID NO: 86430 - DNA, 600 bp, Chicken  19866894386715_1
cggtacagtaaatgtttgggataacccaagtcaccagtaggtctttcctgccattggtgaactcctgacctcatttccttggagagctgttaaaatgaagtcagagggcacgcagagttatttgccggcaccattttgacttgtgtggtctagaaagttaacagattttccctctttccaagagatggacacagtaaccgggggaaagatgagatatcctcattagccttctgtgcaggctggccaggagggcagtgggtgggatggtgagcaccacgaggcagaatagaacatcactgyggacagggttctcatctgtgggataggactaaggctggcaatatctttgattatggaatcaaagaatgacttaggctggaagggctcgcaaagatcatctagttccaactcctctgctactggaagggttgccaatcaattgatagcttggcattaaatcttgctgtgagagtttacatgatagctggacaactggtctaaataaagcaaaactgggcaaataaggagctggaggacacgatgttgatgtcagagctcatctgaggacatccaaggtcctgtgggctggagctggcctgc

SEQ ID NO: 86431 - DNA, 599 bp, Chicken  19866894386725_1
  misc_feature (1)..(5): n is any nucleotide
nnnnntcgggtcatgaaaaactattagaagtgtttgtgctaccacatctgattttttgaagagtaattatgctgagggataagcacaaaaaaaaaaaaaaaaaaaaatgcagaaaatgttgttcactgacactgaaaaaaaaaaacccacaaaaatagggccagtgtgccagagaaggtctggggtgccccctgcttgtctcccatctgccagggtgcaggattcagtgcttgatgctctgttcccacgcgcaacaccggaggtagggcagtgaacaccaccagccatgtgagctggagycccagtgtgcctgccaagctcaggtcttctgccaaccacctgcttttccaacccgtgttttcacatagaaagcaatttggacctacacactgggaaatcgtacaagctcccaaaaccaaacaacccctttcccagcacgatgggccatttaacttttgtaaacttaatctgggaactttaaaagaaaaatgccccagcagcatgacatatgaacaaataacaaagcatcctttgataggtgatcgtaccatcctgccatagcacaggggaagtctttccctccaggcaacaataaacaa

SEQ ID NO: 86432 - DNA, 454 bp, Chicken  19866894386731_1
cacagattagcatatacctgttacctgctaattcatcatcagtggtcgatctgcaaatatttcagcagccaccactgaggaagataaagaacatgttgtatagattttccttctctaaacaggggcctgggagaagtccatgacagataatctgtgatccaggactgacactgcttactcctgaattaacagcatcttaaaagcccgataaagagagagccagtatctgcagagctatcggtctgacatcttcagcagatgctaagatcacttaaagggcgaggatggagagggaggcaraaagagaaaaaggatgaataaaaatgagctaaaggaaggttataaggctgataaacagtttactatcttttgaggtagccctccagacaagaggaaagaaagctgtttttttatacatgctaaattgcctcaagaaagacaggtttaaacccca

SEQ ID NO: 86433 - DNA, 599 bp, Chicken  19866894386732_1
  misc_feature (1)..(132): n is any nucleotide
nnnnnnnnnnnnnnnnnnnnnnnnnnnnnnnnnnnnnnnnnnnnnnnnnnnnnnnnnnnnnnnnnnnnnnnnnnnnnnnnnnnnnnnnnnnnnnnnnnnnnnnnnnnnnnnnnnnnnnnnnnnnnnnnnnnnaaaagatgctctgaagaagttctcgagcgcaaacgctaaaccacaacctggctgtcccttctcccctgatgtcccaagcccatgccacattatcaccttgcaccccacggagctcagtgggtgcagaggcatttcacggcccagctccagctcatgcctggcagctcytctagatgctcgtagagttgggttgtttttgttctcctcttggtgaatttttgctcattctcccctyggctgttttgtttgaggataaacaaaggtatttttcacgcttaaggacatttttcagatcctctcctctgtgctgtgataaatgaaatctctttcatttttagaaaaaaamcaaacttggcacttgtgttgatcctcagcaagaagcatgtaatttgccaagcccgaaagaatcctggctgagaaataaacacaccgggccatatgctctccttcccctacgcagaaggcaa

SEQ ID NO: 86434 - DNA, 599 bp, Chicken  19866894386732_2
  misc_feature (1)..(65): n is any nucleotide
nnnnnnnnnnnnnnnnnnnnnnnnnnnnnnnnnnnnnnnnnnnnnnnnnnnnnnnnnnnnnnnnnaaaagatgctctgaagaagttctcgagcgcaaacgctaaaccacaacctggctgtcccttctcccctgatgtcccaagcccatgccacattatcaccttgcaccccacggagctcagtgggtgcagaggcatttcacggcccagctccagctcatgcctggcagctcytctagatgctcgtagagttgggttgtttttgttctcctcttggtgaatttttgctcattctcccctyggctgttttgtttgaggataaacaaaggtatttttcacgcttaaggacatttttcagatcctctcctctgtgctgtgataaatgaaatctctttcatttttagaaaaaaamcaaacttggcacttgtgttgatcctcagcaagaagcatgtaatttgccaagcccgaaagaatcctggctgagaaataaacacaccgggccatatgctctccttcccctacgcagaaggcaacttacctcagaaactggtaagaggctgcagttgccccatgttgctgcttctgcgaaggcaaaaagaa

SEQ ID NO: 86435 - DNA, 568 bp, Chicken  19866894386732_3
cctggctgtcccttctcccctgatgtcccaagcccatgccacattatcaccttgcaccccacggagctcagtgggtgcagaggcatttcacggcccagctccagctcatgcctggcagctcytctagatgctcgtagagttgggttgtttttgttctcctcttggtgaatttttgctcattctcccctyggctgttttgtttgaggataaacaaaggtatttttcacgcttaaggacatttttcagatcctctcctctgtgctgtgataaatgaaatctctttcatttttagaaaaaaamcaaacttggcacttgtgttgatcctcagcaagaagcatgtaatttgccaagcccgaaagaatcctggctgagaaataaacacaccgggccatatgctctccttcccctacgcagaaggcaacttacctcagaaactggtaagaggctgcagttgccccatgttgctgcttctgcgaaggcaaaaagaaatcctcagaaaacttcagcacaaaggtttggggctctcacaaagtagatgtgcctgtggggacctctccagcaccttccc

SEQ ID NO: 86436 - DNA, 599 bp, Chicken  19866894386740_1
  misc_feature (1)..(36): n is any nucleotide
nnnnnnnnnnnnnnnnnnnnnnnnnnnnnnnnnnnnacttttctctctcctgatttcgttccagtcttcttatttcacttttaagaagctgcaggtgataattcagtgagttcagaagctaaataagcaacctgaatcagaggtttaacaacattatcatgcattaagaaatcatttataaaagaaatgttggcctgttttgagaatacgttaactttaaaaatgtttcaagagaaatcctggagatgtgctcgcaaaaccaaattttattagtagatatacatctaaacgtgcatcttmttttatattaggacaggtgaaagggattacagggagagagaccaatgtttccctcggaatttactgtttttagctaaatgcaaacagtaaaagcactttagcagatattaaacttccaaactctgccctttttgtgtaggagtagtagcttttacttcccctctccccctagacatgagaaactggggaaaaaaaaatcctcaagtcagcttcagaagcaataattactctcatgaataaaaaaaccactcaagttagtttcacattcccaaatttctatagactgccattttctgaaa

SEQ ID NO: 86437 - DNA, 599 bp, Chicken  19866894386741_1
  misc_feature (1)..(59): n is any nucleotide
nnnnnnnnnnnnnnnnnnnnnnnnnnnnnnnnnnnnnnnnnnnnnnnnnnnnnnnnnnngtttatacaagttcatgaggttcagtaaattcttctgccagctcttctaggctgggggcaaatagagatacctttggcttaaccccaactgcaagcaaaccttccccttctcaccctcaccctcaattagcaagcttaaatccagggagtctaaaaataaactatgaaatcacttcagttacagctctagtaatgcacttctccataaacttctccataccaccgaaatgctccaagcttmatttgttraagctctgatttgttaataaaacaaataaaagtatgggaggagtgaagaggcttagcttccagaaaacctctactcttctatcggtttttatacccccacaataagctaggtattcctgactgcattactgttatctggttctgcttttaagataagcaatgctaaaatagctagctgaagaacttttcaggtaagataggttccttgcactgcraaactaaggactaataggcttgtttcaaaatttcaggatcttttttctctccccgtcccccagctgtgagcattca

SEQ ID NO: 86438 - DNA, 599 bp, Chicken  19866894386741_2
  misc_feature (1)..(51): n is any nucleotide
nnnnnnnnnnnnnnnnnnnnnnnnnnnnnnnnnnnnnnnnnnnnnnnnnnngtttatacaagttcatgaggttcagtaaattcttctgccagctcttctaggctgggggcaaatagagatacctttggcttaaccccaactgcaagcaaaccttccccttctcaccctcaccctcaattagcaagcttaaatccagggagtctaaaaataaactatgaaatcacttcagttacagctctagtaatgcacttctccataaacttctccataccaccgaaatgctccaagcttmatttgttraagctctgatttgttaataaaacaaataaaagtatgggaggagtgaagaggcttagcttccagaaaacctctactcttctatcggtttttatacccccacaataagctaggtattcctgactgcattactgttatctggttctgcttttaagataagcaatgctaaaatagctagctgaagaacttttcaggtaagataggttccttgcactgcraaactaaggactaataggcttgtttcaaaatttcaggatcttttttctctccccgtcccccagctgtgagcattcatgctcaca

SEQ ID NO: 86439 - DNA, 600 bp, Chicken  19866894386741_3
tgaaatcacttcagttacagctctagtaatgcacttctccataaacttctccataccaccgaaatgctccaagcttmatttgttraagctctgatttgttaataaaacaaataaaagtatgggaggagtgaagaggcttagcttccagaaaacctctactcttctatcggtttttatacccccacaataagctaggtattcctgactgcattactgttatctggttctgcttttaagataagcaatgctaaaatagctagctgaagaacttttcaggtaagataggttccttgcactgcraaactaaggactaataggcttgtttcaaaatttcaggatcttttttctctccccgtcccccagctgtgagcattcatgctcacagcagtctgacatcaagaccacccagattcatcttcatctctcaaccatctgcctctactgtgcccagataagaatctagacagagtctttattattattttatccataacttgtctaaaccttcacctgcaaaacactgactcattccatcttcaagcacctaaagaatctaaagaaagagaaattagctaatggatgtggaagttaaacatgtaa

SEQ ID NO: 86440 - DNA, 600 bp, Chicken  19866894386754_1
gttgacacccttcctatttataagctccctttaggtactgaacggctgcaattaggtcaccccacagccttctcttctccaggctgaataagcccagctccttcagcttgtcttcgtaggaggggtgatccagccctcatctgggccctctccaacagctgtctttcttgtattggggtctccagatggggcctcacaggggtagaatagagagggacagtgacctccttgtccctgctggccacccttcttctgatggggtccaggattccatttgctttccgagctgcaagagcacamtgctggctcatgttaagcttttcatccactaggaaccccaggtccttctctgcagggctactctcaaggactgctctttccagtctgtatatatgcccagaaagagggtgtcctgtagctagctgaaatgtctgtgaacagcctctccatttgtctttctgtagggcccttcagcaactttggattaccgccaaagaggcttggattttataatgctgaaggtcatagttcctgatctgtaggcacctaatggcatttctaacatttaaatctgatccatgggtatgctggaaatttggc

SEQ ID NO: 86441 - DNA, 600 bp, Chicken  19866894386755_1
cttggcaatgcaactaggaaagcatcttgaaccacaatgaggctaggagttataaattttttctacttgtctctgcctttctctaaaaagctcttcactcaacacaaaagtacatgcaccatcagcaagttcagtgtctcagagaaaaaaatacattaaaacacagtctggaataattggttttatattccattacagtgtattttcagattgcgaaagatcttagagtagttaaggcaattttgcctttggttagagcaacccatgagattgcttgctggttcctccatgcaagaaacrgctgcttgtcctgcttcaaaacccaggaagctccagagatgttcctccaaacttccttcaaggctccatcaaacaaatccccaagaagggctgctccatcccctcccctaagtgcttctccatccatcaccrtattgtctccccatctactcaacagcctcaccttctcacgcacccgcttttgaaggagcaatgttttgctgtctctgggctcactatcagagagaaagagctatcactcctaaaaataatcaaacagactgtgaagtctatgtatgcaagcttcttagcctttacaaa

SEQ ID NO: 86442 - DNA, 600 bp, Chicken  19866894386755_2
agtgtctcagagaaaaaaatacattaaaacacagtctggaataattggttttatattccattacagtgtattttcagattgcgaaagatcttagagtagttaaggcaattttgcctttggttagagcaacccatgagattgcttgctggttcctccatgcaagaaacrgctgcttgtcctgcttcaaaacccaggaagctccagagatgttcctccaaacttccttcaaggctccatcaaacaaatccccaagaagggctgctccatcccctcccctaagtgcttctccatccatcaccrtattgtctccccatctactcaacagcctcaccttctcacgcacccgcttttgaaggagcaatgttttgctgtctctgggctcactatcagagagaaagagctatcactcctaaaaataatcaaacagactgtgaagtctatgtatgcaagcttcttagcctttacaaagtagagaaaatattctccccttaatttttctctctacttttacagaaaatcaacagtaagctctacacagtcatcccactgcactgctttattctgcttctaaagtctggcaaactttatacagacacacac

SEQ ID NO: 86443 - DNA, 600 bp, Chicken  19866894386760_1
acttggtattttgcgatcttcattaatgacgattagatctgtgaagtcccttgcaatacactgtgggataattcttttcaaagccaatcctctgcgatagtagacatgcgagttaggtataacggtagacaactgttcacagaatctcactgttctctgtaaagcagatgagttaaattgcaatgtaaatacagtgacaaatttaaatacaaggcgggacagagggttgctcaatctgactgctctccttgatgcaaacagagatactgggaataataagccatcaacaggctaccaaaytgtttcattcagttgttggaaaactgatttattggcagtaactgcagcacactggggacagcttttttggaatggattattttcttttcataggaaagtgggaaaattacaaaagcataacccctagactcattatttcttaaggaccttgttttacaagaagttgttagtatttcaatagaaatactgcctcatatagtatgcatacttctgagtttccagagaacctgttagaggtatacggtttcttatttttaaaaacactttctaatggttttcacaaagtatcagcaatcttct

SEQ ID NO: 86444 - DNA, 599 bp, Chicken  19866894386762_1
  misc_feature (1)..(18): n is any nucleotide
nnnnnnnnnnnnnnnnnnctgagctcttgcagagcacagatggcccggaggcactgagcatccttggcctgaggggtcacagccctccggcagtaattagctgtcagtggaggaggtgctctgagctaagcactctgctgtcccaggtgttaactgctgctgggctggggagggactcccagaagcgagatcatccctctaacaggaacggcagtgccctgcttcccaggctccataaagaatgaaagggtgagcctgagtgacacaccagacttaagaattaccgcactaaacctgccrgacatcgcttcctaaaactgcctcttcagttgctgaatcaccagaactgcactctccgcacctgctgcaacttgctgtccaacctcaggtgatcaggctgcgtgcagggctccacacacagtggtacagtctcagtacttcccttcttctgctccaaaaaaacccaaaggaaatcaaacaccctgatgtcttgaaataccgaatcgagactatcacaaggcacagccagagcaaactctgctgtaacacccactacccacgctcactctgtaggcgtttctgtacaggcaaggwgctga

SEQ ID NO: 86445 - DNA, 600 bp, Chicken  19866894386762_2
ctgccrgacatcgcttcctaaaactgcctcttcagttgctgaatcaccagaactgcactctccgcacctgctgcaacttgctgtccaacctcaggtgatcaggctgcgtgcagggctccacacacagtggtacagtctcagtacttcccttcttctgctccaaaaaaacccaaaggaaatcaaacaccctgatgtcttgaaataccgaatcgagactatcacaaggcacagccagagcaaactctgctgtaacacccactacccacgctcactctgtaggcgtttctgtacaggcaaggwgctgaccactcttcttccccttttcctcaacccactggttccattgtcattcctaccgtgcataaagcaacggtcctcactcctccacagttcagttacctccagcctacaatttttttcctcctaatattgacacaacctttccgagagcgccttaggcacacatttcctcagatctcatctctgctgcatcgcccagaagatagatgacaacggctgggcagaccacgctgttccaacactggtcactttcatatatatttgattttctttctcccgttatcctgtgttcctccggtc

SEQ ID NO: 86446 - DNA, 600 bp, Chicken  19866894386766_1
caggcaatagacacctgagataatctcacagctgttagagactggatttcttttttcttcaggaaagcacttgcagcttttgattttgaatcagagatgcatttggaagtcaaacagtttcgtgactggtgcacattcctgttttctagacaacactctcctcccccagagcaatgagaaccgcatgcagctcatacaaaacttgagccttcatttgtggctgtttcctgcaaaacattttcagagcaaatacattctgcagcatagatgtcgattacacttttattccaattgttagakgcattgtcaggaagataataaggatagtggggatggggaagatttatctgactaggaaaatcacattgcgttcagactccctgtagagcttttattgactctactgccagcagagattagtgcaatgcaaaatagttaaataagcagcccaggacttccagctgtttaagtggttccaataattagtagttctcagtctctccatttacatcttttccagctgatagacccattttcaaaaatctacatggatttgtgtgccttttcaatactttggaattcaaaggctactagtgggca

SEQ ID NO: 86447 - DNA, 600 bp, Chicken  19866894386769_1
atgaaagtgaaaaaaagctcctgtatatccactgttggtgatcagaaggaactgtacgttgggatcagagcctagggcattctgacagaggtttgcagaggcataactcacagacctgaagttggttgctcattgttctggaaatagtctcttctctgacccaggggaaacgtggaggagtcctcctccatgccagcattgtccttatctgcagtcatatatcctgttctagtgttagattgttggccctacacgattatgcagtcattgtttccccaggtttccctttgcatgtggaarcaatcgcctcacttaaacttcagtggtgagtttctgtcatggctggcttgcgtgattccagtacacacacagctggaacacgagcatcctttgggagggagttcaagtaattattttaatgtgcttcattttcttactgattagagcactgaatatatttaaatggattttataaatagtaattttgtgtttataccatcatcctaaacccagaggactacaaataactctatatatagtctgtgtaatgttacagctgtgcatgccagccagcagcattctggtgcagagcacaagtgt

SEQ ID NO: 86448 - DNA, 600 bp, Chicken  19866894386769_2
gcttgcgtgattccagtacacacacagctggaacacgagcatcctttgggagggagttcaagtaattattttaatgtgcttcattttcttactgattagagcactgaatatatttaaatggattttataaatagtaattttgtgtttataccatcatcctaaacccagaggactacaaataactctatatatagtctgtgtaatgttacagctgtgcatgccagccagcagcattctggtgcagagcacaagtgtaactacacctggggtaaaatgcagcgagggcttaatggctttgtrcaacttcaggcccyaagtggggaatacgtcattcagctcgaattcagcagggaggaattgtgctgatgtggatgtaaatatccagcttggaatttgaccgtctcacaaaattagatagatctgctttcaagaaagatgttgtgggatttgtagtggacctggttcgttgttttaaatgcattaaagggcaatgcatgtaacttgccatgcacttttctgtaaatataagtatttgggagccaagtaatgtcatggaagtggcatggaataacrttgccactagctggcaccagctttcac

SEQ ID NO: 86449 - DNA, 600 bp, Chicken  19866894386769_3
agtacacacacagctggaacacgagcatcctttgggagggagttcaagtaattattttaatgtgcttcattttcttactgattagagcactgaatatatttaaatggattttataaatagtaattttgtgtttataccatcatcctaaacccagaggactacaaataactctatatatagtctgtgtaatgttacagctgtgcatgccagccagcagcattctggtgcagagcacaagtgtaactacacctggggtaaaatgcagcgagggcttaatggctttgtrcaacttcaggcccyaagtggggaatacgtcattcagctcgaattcagcagggaggaattgtgctgatgtggatgtaaatatccagcttggaatttgaccgtctcacaaaattagatagatctgctttcaagaaagatgttgtgggatttgtagtggacctggttcgttgttttaaatgcattaaagggcaatgcatgtaacttgccatgcacttttctgtaaatataagtatttgggagccaagtaatgtcatggaagtggcatggaataacrttgccactagctggcaccagctttcacataattgccatagt

SEQ ID NO: 86450 - DNA, 600 bp, Chicken  19866894386769_4
atgcagcgagggcttaatggctttgtrcaacttcaggcccyaagtggggaatacgtcattcagctcgaattcagcagggaggaattgtgctgatgtggatgtaaatatccagcttggaatttgaccgtctcacaaaattagatagatctgctttcaagaaagatgttgtgggatttgtagtggacctggttcgttgttttaaatgcattaaagggcaatgcatgtaacttgccatgcacttttctgtaaatataagtatttgggagccaagtaatgtcatggaagtggcatggaataacrttgccactagctggcaccagctttcacataattgccatagtcctttcagtgaactctcagctttcgattttcccatcctctctaacagcagtgtgctgtcatttgcagcagtgccgagcttagcagtgatgaaggcgtgcagaagctgccacaagctattctgtaggcatgctaagcaagcccttagttaacttagacagatttcgtaggaggcaggagatcctttagaaggcgtccaggataaatttgcagctacacagaatcaaaagtgttggttgttggttttgtttttttttattt

SEQ ID NO: 86451 - DNA, 599 bp, Chicken  19866894386774_1
  misc_feature (1)..(220): n is any nucleotide
nnnnnnnnnnnnnnnnnnnnnnnnnnnnnnnnnnnnnnnnnnnnnnnnnnnnnnnnnnnnnnnnnnnnnnnnnnnnnnnnnnnnnnnnnnnnnnnnnnnnnnnnnnnnnnnnnnnnnnnnnnnnnnnnnnnnnnnnnnnnnnnnnnnnnnnnnnnnnnnnnnnnnnnnnnnnnnnnnnnnnnnnnnnnnnnnnnnnnnnnnnnnnnnnnnnnnnnnnnnnttaattttacagctggagtagaagtatgaattgcataagaaatctcttggaagcaaaccagacttttctgaagtgcccaygagtgccttcagcgcagccatgaaccatccaggaagcaaagaaactgcaaagcaggcaaggatttccccagcttcgtgctgactgcaccgatgactgaagctgcrgttttgattttcagttgtcctagctctctagcataaagatagctcgagtgcatccagatgtgctgcacatgcagaccccagctgcaatatcagcacggcttttaatagccctctgtggaagatggaagtgctgacgtgcaacttgctccatcatctgagctcctctaggtgagggtgactcgggcatcctgagc

SEQ ID NO: 86452 - DNA, 599 bp, Chicken  19866894386774_2
  misc_feature (1)..(115): n is any nucleotide
nnnnnnnnnnnnnnnnnnnnnnnnnnnnnnnnnnnnnnnnnnnnnnnnnnnnnnnnnnnnnnnnnnnnnnnnnnnnnnnnnnnnnnnnnnnnnnnnnnnnnnnnnnnnnnnnnnnttaattttacagctggagtagaagtatgaattgcataagaaatctcttggaagcaaaccagacttttctgaagtgcccaygagtgccttcagcgcagccatgaaccatccaggaagcaaagaaactgcaaagcaggcaaggatttccccagcttcgtgctgactgcaccgatgactgaagctgcrgttttgattttcagttgtcctagctctctagcataaagatagctcgagtgcatccagatgtgctgcacatgcagaccccagctgcaatatcagcacggcttttaatagccctctgtggaagatggaagtgctgacgtgcaacttgctccatcatctgagctcctctaggtgagggtgactcgggcatcctgagccccatgctggttcacacacccagcaaccagtgcagcccagatggtgccaccccatcatacaacacagggcccaaccgtgcactctcactttgctctacactggca

SEQ ID NO: 86453 - DNA, 600 bp, Chicken  19866894386777_1
cactctggcgaatacctatagattctcagagtttctccctcaagtgtgtatacaatatgcttgagcgtaatcgtgttgatgtcagcggaattattcttttgcatgtgatttttcttgagtttaaatatttttctggactagaagctagtgcataatcttagattttgtgaattagagatttggatagagtagggcctggtcttttttatttatcttctttattgtttatttgtttttgtcattaaaatggcgctggaatgggctgcccagggaggtggtggagtcactgttctcggaagygctcgagaaacgtttagatgtacygaagggcgtggtttagtgggaaatgttggtgataggtggacggttggactggataatcctaaaggttttttccaaacttggcgtttctatagttctatgaaaattccagcatgaagattaataggactacaggctctttcctcgtaatgcatattgaaacagttaaaccagtgttcatttacgttatggaaatgacttgacaagaaatgctctactagatcagactgtcatttgatcccattcagatctgtgtcctctcagaaacagtaaaaatgc

SEQ ID NO: 86454 - DNA, 600 bp, Chicken  19866894386777_2
ctcagagtttctccctcaagtgtgtatacaatatgcttgagcgtaatcgtgttgatgtcagcggaattattcttttgcatgtgatttttcttgagtttaaatatttttctggactagaagctagtgcataatcttagattttgtgaattagagatttggatagagtagggcctggtcttttttatttatcttctttattgtttatttgtttttgtcattaaaatggcgctggaatgggctgcccagggaggtggtggagtcactgttctcggaagygctcgagaaacgtttagatgtacygaagggcgtggtttagtgggaaatgttggtgataggtggacggttggactggataatcctaaaggttttttccaaacttggcgtttctatagttctatgaaaattccagcatgaagattaataggactacaggctctttcctcgtaatgcatattgaaacagttaaaccagtgttcatttacgttatggaaatgacttgacaagaaatgctctactagatcagactgtcatttgatcccattcagatctgtgtcctctcagaaacagtaaaaatgctgtttgtggagagtaacccgagct

SEQ ID NO: 86455 - DNA, 462 bp, Chicken  19866894386777_3
aaacagttaaaccagtgttcatttacgttatggaaatgacttgacaagaaatgctctactagatcagactgtcatttgatcccattcagatctgtgtcctctcagaaacagtaaaaatgctgtttgtggagagtaacccgagctgttactgagatcctccctcagcatcagcgttcactagattatgaatgttaaagcttatatccttgctcattctttttattatccttctgacctgccaagtgtcaacttgcctttttaaatctaccactgcctccacagcctcattttgcagcaagytctgggagtgcctactgcgggaaaacagaacctacctattctaaatcagtcatttttgtgttgcaggatttggatgaaaacagctttgctttcggtgtatctatctaaatgattctgtaaacctgctctaggcctctgtcttgtccgaagcacgcaattctt

SEQ ID NO: 86456 - DNA, 600 bp, Chicken  19866894386782_1
ttctattgcgtcttttgctttgtttttgacaattgagaatttcatccatcaaatcttatgcaatcttcaggttttggaagtccgtctgcacatcctcctgattttcattactttttgcagcataagtaatctgtcatttgaaaagcattgtcaaatatttcctgattgttgccaggatgattcagcagccctggccttgggagcatgccacactccctgttttgctgtactgagtaaaaagtcactgtagttttgggtgcctagctagttttctatgattgtggagcttgtcttgcttaygggagyctgaatatcttttaaatgagcttgttaaaaagatctttggacatccaggtagaaaattttctggttttatgtcacttatggtagtctcaacgttaaggagtgcaagaaataatggataatagagaagcttgcccttactccacaaaagcccagtcaatttatccctgttgtatgatattacaggccttaacagatctttaaactaacttaaaagctactgcttaagatttattagtccattaggataatctctattcagattcaagatagggtaagtatttggtgcacagcagc

SEQ ID NO: 86457 - DNA, 600 bp, Chicken  19866894386782_2
tgcgtcttttgctttgtttttgacaattgagaatttcatccatcaaatcttatgcaatcttcaggttttggaagtccgtctgcacatcctcctgattttcattactttttgcagcataagtaatctgtcatttgaaaagcattgtcaaatatttcctgattgttgccaggatgattcagcagccctggccttgggagcatgccacactccctgttttgctgtactgagtaaaaagtcactgtagttttgggtgcctagctagttttctatgattgtggagcttgtcttgcttaygggagyctgaatatcttttaaatgagcttgttaaaaagatctttggacatccaggtagaaaattttctggttttatgtcacttatggtagtctcaacgttaaggagtgcaagaaataatggataatagagaagcttgcccttactccacaaaagcccagtcaatttatccctgttgtatgatattacaggccttaacagatctttaaactaacttaaaagctactgcttaagatttattagtccattaggataatctctattcagattcaagatagggtaagtatttggtgcacagcagcacttag

SEQ ID NO: 86458 - DNA, 600 bp, Chicken  19866894386784_1
ctctggctgtgtgcaaataatcctgacaggaggaggagatgcagattccagtggagcagaaatagatctatggccaccctctggctgaaagtgtgggtgttacttccctcctctgcacatctttcagttgagataaaatggtgtaccaaaaattaacttaaaaaatccctgtctcctcagctaaatatttatgcaataatccctatggcctagaagggaagaatacactagggagcacaaggcttttacctctgcttgaaaccctgggctatcccaaattatctgaactttgcaggtggratggtggtttttaccctcccagggaaaccattttcacctgggcttgtgactgtgctctacctcttttaacatagcagaaagggcatctcagcctaaattttcttactgtgctttgagatgcytgtggaaatgcctgttgtgtttatgggtctgccaacagtaaaaggaagaaaagattctcatggtaagtctgaaggtttggctttcagacgaagaattagaagtaagaggcagcaggtaaaacagatctcacatggactcyrgcttaaatttaaagacaagttgatttacttatttgat

SEQ ID NO: 86459 - DNA, 600 bp, Chicken  19866894386784_2
ttcagttgagataaaatggtgtaccaaaaattaacttaaaaaatccctgtctcctcagctaaatatttatgcaataatccctatggcctagaagggaagaatacactagggagcacaaggcttttacctctgcttgaaaccctgggctatcccaaattatctgaactttgcaggtggratggtggtttttaccctcccagggaaaccattttcacctgggcttgtgactgtgctctacctcttttaacatagcagaaagggcatctcagcctaaattttcttactgtgctttgagatgcytgtggaaatgcctgttgtgtttatgggtctgccaacagtaaaaggaagaaaagattctcatggtaagtctgaaggtttggctttcagacgaagaattagaagtaagaggcagcaggtaaaacagatctcacatggactcyrgcttaaatttaaagacaagttgatttacttatttgattgggcttaaaatatctaacataattttgggaaaatgatcatggtctactaagtcagaagagcccagaaagctggtaaaataaaaatgtcatggtgtggtgaaggttggctttcctcaaatga

SEQ ID NO: 86460 - DNA, 600 bp, Chicken  19866894386784_3
cctgggctatcccaaattatctgaactttgcaggtggratggtggtttttaccctcccagggaaaccattttcacctgggcttgtgactgtgctctacctcttttaacatagcagaaagggcatctcagcctaaattttcttactgtgctttgagatgcytgtggaaatgcctgttgtgtttatgggtctgccaacagtaaaaggaagaaaagattctcatggtaagtctgaaggtttggctttcagacgaagaattagaagtaagaggcagcaggtaaaacagatctcacatggactcyrgcttaaatttaaagacaagttgatttacttatttgattgggcttaaaatatctaacataattttgggaaaatgatcatggtctactaagtcagaagagcccagaaagctggtaaaataaaaatgtcatggtgtggtgaaggttggctttcctcaaatgatttttttcttaaacctgggagagcctggacatatgctgaggtactcagcctgattaatgctactaggtattcaccagccttcaccacaaaatcccttctcagacagtaataccaaatattcttgcttttttaattactta

SEQ ID NO: 86461 - DNA, 600 bp, Chicken  19866894386784_4
ctgggctatcccaaattatctgaactttgcaggtggratggtggtttttaccctcccagggaaaccattttcacctgggcttgtgactgtgctctacctcttttaacatagcagaaagggcatctcagcctaaattttcttactgtgctttgagatgcytgtggaaatgcctgttgtgtttatgggtctgccaacagtaaaaggaagaaaagattctcatggtaagtctgaaggtttggctttcagacgaagaattagaagtaagaggcagcaggtaaaacagatctcacatggactcyrgcttaaatttaaagacaagttgatttacttatttgattgggcttaaaatatctaacataattttgggaaaatgatcatggtctactaagtcagaagagcccagaaagctggtaaaataaaaatgtcatggtgtggtgaaggttggctttcctcaaatgatttttttcttaaacctgggagagcctggacatatgctgaggtactcagcctgattaatgctactaggtattcaccagccttcaccacaaaatcccttctcagacagtaataccaaatattcttgcttttttaattacttaa

SEQ ID NO: 86462 - DNA, 599 bp, Chicken  19866894386789_1
  misc_feature (1)..(179): n is any nucleotide
nnnnnnnnnnnnnnnnnnnnnnnnnnnnnnnnnnnnnnnnnnnnnnnnnnnnnnnnnnnnnnnnnnnnnnnnnnnnnnnnnnnnnnnnnnnnnnnnnnnnnnnnnnnnnnnnnnnnnnnnnnnnnnnnnnnnnnnnnnnnnnnnnnnnnnnnnnnnnnnnnnnnnnnnnnnnnnnnnnncgcccggcggctcagctccgctcagctcagcgcgcctctacagcggggctccatccgcaccgcacagagcgtgaggttccacgcggccttccgagcgaacaaacgagggaagtgagcggtygcagggatattcccgaggccatcacccaagtgcgttacatacgagtcctcatgctgcaggacagcagccgagcagcagcagctctctaactccctgctacagaatttcttacgctccttctgaattgatactgctcactacagggatacttatttyaaagttacatttttaaagcagattctcattaggacctctgtggagacacactgaactgggtgagttgaggcactggccctgatcccaarttttccaaacccaacatttgcacagtgcaccaagcaggcagggtacctgcaggg

SEQ ID NO: 86463 - DNA, 599 bp, Chicken  19866894386789_2
  misc_feature (1)..(23): n is any nucleotide
nnnnnnnnnnnnnnnnnnnnnnncgcccggcggctcagctccgctcagctcagcgcgcctctacagcggggctccatccgcaccgcacagagcgtgaggttccacgcggccttccgagcgaacaaacgagggaagtgagcggtygcagggatattcccgaggccatcacccaagtgcgttacatacgagtcctcatgctgcaggacagcagccgagcagcagcagctctctaactccctgctacagaatttcttacgctccttctgaattgatactgctcactacagggatacttatttyaaagttacatttttaaagcagattctcattaggacctctgtggagacacactgaactgggtgagttgaggcactggccctgatcccaarttttccaaacccaacatttgcacagtgcaccaagcaggcagggtacctgcagggtaccagcactgtgatgcaggcatggttaagatacttcaccagcagtgacactcgtttggataaattgttcacaaacaaatttcataccacaatgcacaaacaatcaagtggggggaaaagataataagaaaggcacagtataaccatctaccagaa

SEQ ID NO: 86464 - DNA, 600 bp, Chicken  19866894386789_3
gagcgtgaggttccacgcggccttccgagcgaacaaacgagggaagtgagcggtygcagggatattcccgaggccatcacccaagtgcgttacatacgagtcctcatgctgcaggacagcagccgagcagcagcagctctctaactccctgctacagaatttcttacgctccttctgaattgatactgctcactacagggatacttatttyaaagttacatttttaaagcagattctcattaggacctctgtggagacacactgaactgggtgagttgaggcactggccctgatcccaarttttccaaacccaacatttgcacagtgcaccaagcaggcagggtacctgcagggtaccagcactgtgatgcaggcatggttaagatacttcaccagcagtgacactcgtttggataaattgttcacaaacaaatttcataccacaatgcacaaacaatcaagtggggggaaaagataataagaaaggcacagtataaccatctaccagaaagatccggagtgcaacaaccacggcaattctgctattggaaaacctaaattctttctgaattacagagcctgagcagctgaggtactttc

SEQ ID NO: 86465 - DNA, 600 bp, Chicken  19866894386791_1
tcatagtatgggttaaatagtaagcttacaggtgtgtatttgcccacgtgagcctggtgtgctcggtggagtttggtagtagttgtcctctttggaggaactgctgtgtgtctgcttgtctcctgctcttgctgttggaatggtacctgaatcctcctcatctgatacaaacaaaatcagacggcctccctgaccttcccagagctgtgctttggaatgtgtatgagagctgctcagtgccctcaccaaaagcaattgaggtgtggggatattccattttttcagctgtttgcagggtgwttctttacagtccatctggttaaaagttttgtaaacattgagttttgtctgtggggtggggaaaggcaaatacagccagaattgtacagctttcaagagggatcacacttaaaggcactgcgtgccgttgctggacttatcccttcagtgtgtagaaatgagttttgaagagcagagtaaattttgcaatagggggtacttctaaacccatagcctgcaaattggcagttcctgagctgctcacaaggagctcgagctgtggggctgaggaagtatcccgccgtgtcctcacagcacaga

SEQ ID NO: 86466 - DNA, 600 bp, Chicken  19866894386792_1
tgtgatgtgttaatagaagtgtggtttgttaaatatggttgttctgagtaaattttgttgaggtctcagctgaaatattactgtgtccaggcaacctgttttatctgcctttgtagtgtaactgtgtgtttgctatcttgtttgttttttcatttgtttgctttgctaaaggaaatgttgagaagtggttgttttggaaaatacctcaatttctgttgatgatgggtggccagctggcagtgtgctggccaggtagacctcagtcaaaaagtatggaagagtgaaaaagatatatatatwtwtttttctggatgcttcttagctgaatgtagggagcaaaggaaggctagaccaagagtccttttgtgaaagccttgtggtgcctttatgaggctgaacctatgcctggcaacatactagtccaaccacayagatgttctatgtgtgtctggtcatgcaatcagaaattgcttccaggatatgatgcagattgttagcctaataaggagcatgtatgtattttatgtgagagttcattgcatttaatgtaatggaagttaggagtttcactatcttatattgtcagattaaacttaaaaa

SEQ ID NO: 86467 - DNA, 600 bp, Chicken  19866894386792_2
tgatgtgttaatagaagtgtggtttgttaaatatggttgttctgagtaaattttgttgaggtctcagctgaaatattactgtgtccaggcaacctgttttatctgcctttgtagtgtaactgtgtgtttgctatcttgtttgttttttcatttgtttgctttgctaaaggaaatgttgagaagtggttgttttggaaaatacctcaatttctgttgatgatgggtggccagctggcagtgtgctggccaggtagacctcagtcaaaaagtatggaagagtgaaaaagatatatatatwtwtttttctggatgcttcttagctgaatgtagggagcaaaggaaggctagaccaagagtccttttgtgaaagccttgtggtgcctttatgaggctgaacctatgcctggcaacatactagtccaaccacayagatgttctatgtgtgtctggtcatgcaatcagaaattgcttccaggatatgatgcagattgttagcctaataaggagcatgtatgtattttatgtgagagttcattgcatttaatgtaatggaagttaggagtttcactatcttatattgtcagattaaacttaaaaacc

SEQ ID NO: 86468 - DNA, 600 bp, Chicken  19866894386792_3
gctatcttgtttgttttttcatttgtttgctttgctaaaggaaatgttgagaagtggttgttttggaaaatacctcaatttctgttgatgatgggtggccagctggcagtgtgctggccaggtagacctcagtcaaaaagtatggaagagtgaaaaagatatatatatwtwtttttctggatgcttcttagctgaatgtagggagcaaaggaaggctagaccaagagtccttttgtgaaagccttgtggtgcctttatgaggctgaacctatgcctggcaacatactagtccaaccacayagatgttctatgtgtgtctggtcatgcaatcagaaattgcttccaggatatgatgcagattgttagcctaataaggagcatgtatgtattttatgtgagagttcattgcatttaatgtaatggaagttaggagtttcactatcttatattgtcagattaaacttaaaaacctattttcacttgaaatctttatcttccccagtagggattgcctaggcatttaatatagaaaagccatacttatctcattctttcacctcaggaatttagtgtgatgttctaaattgatttataaaaaag

SEQ ID NO: 86469 - DNA, 599 bp, Chicken  19866894386795_1
  misc_feature (1)..(41): n is any nucleotide
nnnnnnnnnnnnnnnnnnnnnnnnnnnnnnnnnnnnnnnnncgctgcccctccgctccctgtgagaagctgcagccgccatgaggcctcccctcagcctgctctgctctgggctgagcacacccaggggcctcagccgctccttacaccccttgccgtccagacccttcaccatttttgtagccctttgttaaactattctgagagcagaaatgcgatattcagagggctctgttgtgtgatctgagccagggctttcatgtaattaaggagactgccaggatgtcaggagaggagcacrgagcccttctsggcaaaatcagtggcgttagaggagctgtctctgcaggagctgggctagcactgaaacatgagaacggtattgccatttaagtctagccttttgtatacaaactaaaaccccgagtcatggcaatttccgtatctgcttctgcttttgttacatgagtcaatgcaaataattgtctggagaatgacagtaattacgggaaacaaagctctaatgctagagggtcaagccctctgtgcagctgtgacacttaacaaaggtcttttttctgccctgtaccgttgctgtac

SEQ ID NO: 86470 - DNA, 599 bp, Chicken  19866894386795_2
  misc_feature (1)..(30): n is any nucleotide
nnnnnnnnnnnnnnnnnnnnnnnnnnnnnncgctgcccctccgctccctgtgagaagctgcagccgccatgaggcctcccctcagcctgctctgctctgggctgagcacacccaggggcctcagccgctccttacaccccttgccgtccagacccttcaccatttttgtagccctttgttaaactattctgagagcagaaatgcgatattcagagggctctgttgtgtgatctgagccagggctttcatgtaattaaggagactgccaggatgtcaggagaggagcacrgagcccttctsggcaaaatcagtggcgttagaggagctgtctctgcaggagctgggctagcactgaaacatgagaacggtattgccatttaagtctagccttttgtatacaaactaaaaccccgagtcatggcaatttccgtatctgcttctgcttttgttacatgagtcaatgcaaataattgtctggagaatgacagtaattacgggaaacaaagctctaatgctagagggtcaagccctctgtgcagctgtgacacttaacaaaggtcttttttctgccctgtaccgttgctgtacggatgtgacca

SEQ ID NO: 86471 - DNA, 600 bp, Chicken  19866894386795_3
agctgtctctgcaggagctgggctagcactgaaacatgagaacggtattgccatttaagtctagccttttgtatacaaactaaaaccccgagtcatggcaatttccgtatctgcttctgcttttgttacatgagtcaatgcaaataattgtctggagaatgacagtaattacgggaaacaaagctctaatgctagagggtcaagccctctgtgcagctgtgacacttaacaaaggtcttttttctgccctgtaccgttgctgtacggatgtgaccacttcctcttcaccaaacaattggraagcattctttggactgaaatcattagacatacacaatgtccaattttcagtttctttttcctcgagagaagagggtcattccgtatctcagatttctgctgcctgaatggcagcatcactcatgacgtgcaagatggagagctgtgatggattgcttcagcagcagagcccatgcagggagggacggctgggatgcatatctgcagtaaacttttgtcaagcacaaaaagaaactcgagagtcatcttatacacatattttgtgtgttgtttgatgtttcttaacatactcaccatgtc

SEQ ID NO: 86472 - DNA, 600 bp, Chicken  19866894386796_1
ttttattttttactggaatggtttggcatgtctgactctaagctctaaattattttgatcaaacgtaacatgagagcagctctctctacgcagacaaaaactcccacatcccgcctcttacaagaccataaaataggtggtgttagcacatgcactagagaaggacaatcaatatgaatatttccaaagtccctcgtcaccctcaaaaatatctctgatccagaaggttcatgaacccaatgtaactcaatttttgaggcatcctttacagtgtcacttttctctggctgtgaccaggtwcccttaaagcccctggaatcttccagcacgcacagcacccttggatgtggattttcaaggcaaactcatgccttggctctgaatctgctccatttggtttcattgatgcccctttctatcttatggtgtgtgagatggccatttgctttttccattccattcatactctcatagatctccatttcatcctctctcactttctcttctactctttatttatagattattgggctgttctttttttcataatacaaaagtggcactgaacacatttagtgccatccagcaatcactttcttt

SEQ ID NO: 86473 - DNA, 599 bp, Chicken  19866894386806_1
  misc_feature (1)..(22): n is any nucleotide
nnnnnnnnnnnnnnnnnnnnnntttacatttatagcactttctgttctcagaagggttctgctaagtctgcatggtagcattgtatacccttaaatactatgtcagctctggttttgtctttgtttcagggtcaaattttaactataaaactgattgattatctcataacctgcatccagaattatttctttttctatgccaaggcaaacagtactaaattagtacgtatgtttaggattttcagaattactcttgccttagtttggagtagaaaacaattaagaaataaagtgccttcygtgctatcaaattgttggcagtctttaaattcttactgaagttgattaaaagtgccacytaaatctactattttgtttacactcaaatgaattgattctttctttgcaggagttgtttctacaaagatacattagataaataaaagagaaaaaaatgttgccagtattttcttctatcttttgattacagtttttaagaaccccactattagattctttttgttgatgtcttatgaaaagacatagcaacrcttggatgctgattggccccatccctttaaacttaatgattgctgtac

SEQ ID NO: 86474 - DNA, 600 bp, Chicken  19866894386806_2
tgctaagtctgcatggtagcattgtatacccttaaatactatgtcagctctggttttgtctttgtttcagggtcaaattttaactataaaactgattgattatctcataacctgcatccagaattatttctttttctatgccaaggcaaacagtactaaattagtacgtatgtttaggattttcagaattactcttgccttagtttggagtagaaaacaattaagaaataaagtgccttcygtgctatcaaattgttggcagtctttaaattcttactgaagttgattaaaagtgccacytaaatctactattttgtttacactcaaatgaattgattctttctttgcaggagttgtttctacaaagatacattagataaataaaagagaaaaaaatgttgccagtattttcttctatcttttgattacagtttttaagaaccccactattagattctttttgttgatgtcttatgaaaagacatagcaacrcttggatgctgattggccccatccctttaaacttaatgattgctgtaccaatactgtgagttggaatattattagtcattgtttctcctaagcacacaactgaaaact

SEQ ID NO: 86475 - DNA, 600 bp, Chicken  19866894386806_3
tcttgccttagtttggagtagaaaacaattaagaaataaagtgccttcygtgctatcaaattgttggcagtctttaaattcttactgaagttgattaaaagtgccacytaaatctactattttgtttacactcaaatgaattgattctttctttgcaggagttgtttctacaaagatacattagataaataaaagagaaaaaaatgttgccagtattttcttctatcttttgattacagtttttaagaaccccactattagattctttttgttgatgtcttatgaaaagacatagcaacrcttggatgctgattggccccatccctttaaacttaatgattgctgtaccaatactgtgagttggaatattattagtcattgtttctcctaagcacacaactgaaaactgtggtccatagatatacagttcactaaaatgttagcattacgacagctgaatgaaaaccagaagtaaagaagctgaatgctggcaactgaaaaataccatcacttctgataataggatgctagcaatcacaatgatggattttaaaaaaggagtaatattctacatttctaatcacctgtcttcttgttttt

SEQ ID NO: 86476 - DNA, 600 bp, Chicken  19866894386811_1
aagcactacatgaaactttacaatgtccctgccagctattgctatcagaggctgctaaaaggaaggcaactttcccaaggtactactagatgggcaataaaccttagaaatctggtatttgtagaattgtagaatgatagaattcttggaagggacatctgtaggccacctagtccaaatcccctgcaatgaacaggaacatccacagctagatcaggttgcccactgcctggtcaagcctcaatttgaaagtctccagggacagggcatcaattacatatctgggcaatctgttctagwgcctcaccacactcactgtaaargactttttccttatatgtaacctaaatctaccctttttacccttttttttaccctctctcagcctatcctcataggagaggtgttccaccccttggatcatttttgtggccattttctggacgtgctccaacaggtctatgcctcttctgtactgtgtactccacatctggatgcagtactccaggtgaggcctcaccagcacagagtagaagaacaggatcacctcccttgayctgctggccatgcttctttttatgcagcccaggatagggttgg

SEQ ID NO: 86477 - DNA, 600 bp, Chicken  19866894386811_2
tgtccctgccagctattgctatcagaggctgctaaaaggaaggcaactttcccaaggtactactagatgggcaataaaccttagaaatctggtatttgtagaattgtagaatgatagaattcttggaagggacatctgtaggccacctagtccaaatcccctgcaatgaacaggaacatccacagctagatcaggttgcccactgcctggtcaagcctcaatttgaaagtctccagggacagggcatcaattacatatctgggcaatctgttctagwgcctcaccacactcactgtaaargactttttccttatatgtaacctaaatctaccctttttacccttttttttaccctctctcagcctatcctcataggagaggtgttccaccccttggatcatttttgtggccattttctggacgtgctccaacaggtctatgcctcttctgtactgtgtactccacatctggatgcagtactccaggtgaggcctcaccagcacagagtagaagaacaggatcacctcccttgayctgctggccatgcttctttttatgcagcccaggatagggttggctttctgggctgcaagggcacat

SEQ ID NO: 86478 - DNA, 600 bp, Chicken  19866894386811_3
agggacagggcatcaattacatatctgggcaatctgttctagwgcctcaccacactcactgtaaargactttttccttatatgtaacctaaatctaccctttttacccttttttttaccctctctcagcctatcctcataggagaggtgttccaccccttggatcatttttgtggccattttctggacgtgctccaacaggtctatgcctcttctgtactgtgtactccacatctggatgcagtactccaggtgaggcctcaccagcacagagtagaagaacaggatcacctcccttgayctgctggccatgcttctttttatgcagcccaggatagggttggctttctgggctgcaagggcacatggctggctcatgtccagcttgccatccaccagtacccccaggtcttttttggcagggctgcactcattccttacatcccccagcttgtatttgaaatgggagttgcctcgacccacatgcaagatcttgcaattggttttgttgaacctcatgtggttcacctgggcccactgctccagcctgtctgggtgcctctggatggcttcctgcccctttgttgtgttgaccacattc

SEQ ID NO: 86479 - DNA, 600 bp, Chicken  19866894386816_1
gagtgatcaaacactggaacaggttaccaagagaggtgatggagtctttctccttgcagatatccaaaacccaaaggacatacctgggcaacctactttagcacagactttttgagcagcagtgttggaatagaaaatttgaagaaatcttgcaatcctgtaattcagtgatcctgtaacaaagaactgataaaatgacaggcttatttcagtatttatagtagattctcacaatataaaaaatcatccataagaagtagtctttatcagatgtgtttatatttagacatcattagattwttgtaaatattctaaagtattataaaatttataaatttgatttcttagtctttgaaaatacacaagaattttctttatgggtgagatgaatcccacccctcacctttcttttaaggaagagtgtctgaagtgtttttcttcatcagtaattgttactgcaacaataataaaaattcattttttgtaagcacagttatttccatacaggtttgcagatactctgttgtctaagctagatggaacatagttgtttgatctcatctttagagagaataattttctctggcttgacttagggtt

SEQ ID NO: 86480 - DNA, 600 bp, Chicken  19866894386816_2
gcaacaataataaaaattcattttttgtaagcacagttatttccatacaggtttgcagatactctgttgtctaagctagatggaacatagttgtttgatctcatctttagagagaataattttctctggcttgacttagggttaagatttcaccttaggacttcttcctttggaaatgctatctaaaaaatacttgagccacttcaggtgcttttttaaagctcttgtattttctaaatattttcattatattccacttgtttctattcccccaagagttctgcaagagccagcacattycatttcattttgttttcaaacaaaggcaagctactattctatgtggattgtctttgaaggcagaagagattttttttaacaaggtcttcatcaccttctttctcaatcttgaaaatctgtgaaatgtatcaaataacacaggtaagagtgttttcttttcaatttaaagtgctgtaattccttaagtatgcaacttgctaactgacgtgacttataaatacaaggaatgttttttttctacgaagtccttctcccatatgttcaatacagtgtactttttgctgccggagctcagtcgag

SEQ ID NO: 86481 - DNA, 600 bp, Chicken  19866894386820_1
tgcatgagcagcccatacctttggatctatgcttatttaatggatctggtggctacagccatttccacaaacgctgggttagagggtttctggtgatcacctagttttcaagaagacctatgtatcaggggacctgcacctggctcataccagcatgagaataaacttgagaggaataacatgtgggggtggtggtagcactgtcacccgcaggcataggtttcaatgtcttcttccagaaataagataaccttgaagccaatggaaattctttgtccagggaaggcattcaatatgaartttttgtcttagttttgtttctgtggaagcttacagatgaatgggggaatcagaacggtgatgggaaggtatgccaactaagtgtagactggtgggaatactcactgctcagcctcatctgctgtttcctacatccttgttatcatacagctcatggtggtctacagcacgtttgcctgtaccctcagccactagaaaaagtgacttctatttactttaaaacttgtggtgttggtgtgccagcattgtcagcaactcagccagtgattaaatacagaagaatttttccttgcatttatg

SEQ ID NO: 86482 - DNA, 600 bp, Chicken  19866894386820_2
gatttcatcactgtcacctcattagacaccagggaagttagggtatacattgaatcagttttgcacttggttttgtttacttttcataaattaacatggtaattcactgtaataaaattctttgtttacacaaagatatctaaaaacatcgcccattattctccttaatgttacagctttagaaagtgcagcaaaaagctctgtttatattgcagctggacagagcacttaccacagggcgtcacatcccagatctgctctgctctgctctgagaagcagcagagaaatgccagaaaagraaaaaaaatgtccaccacttccattaaaacatctcccatcctaccaaattatgcatcctgaactcgatttaattctatttttcttggaacaccargaagcaatgggtatgctcctgtaggctggagcaggccgagccctgcgagctgcagtgtgcagaaggccatcaccagaacaagacttgaagtgaactcagtgcagcgtgtgaaccgatcctgtgctttttgtcactgacaaaaaacmgatcctttgtgtcgcatgtctccttgtgccttagcaggtctgagattctgggtgctgtg

SEQ ID NO: 86483 - DNA, 600 bp, Chicken  19866894386820_3
atggtaattcactgtaataaaattctttgtttacacaaagatatctaaaaacatcgcccattattctccttaatgttacagctttagaaagtgcagcaaaaagctctgtttatattgcagctggacagagcacttaccacagggcgtcacatcccagatctgctctgctctgctctgagaagcagcagagaaatgccagaaaagaaaaaaaaatgtccaccacttccattaaaacatctcccatcctaccaaattatgcatcctgaactcgatttaattctatttttcttggaacaccargaagcaatgggtatgctcctgtaggctggagcaggccgagccctgcgagctgcagtgtgcagaaggccatcaccagaacaagacttgaagtgaactcagtgcagcgtgtgaaccgatcctgtgctttttgtcactgacaaaaaacmgatcctttgtgtcgcatgtctccttgtgccttagcaggtctgagattctgggtgctgtgtcctcctactctaaatagcatgagttctctgaagagaaagtggtttgcactacctctaattcctgatactgcttggcatttgccattgctctgtt

SEQ ID NO: 86484 - DNA, 600 bp, Chicken  19866894386820_4
tcacatcccagatctgctctgctctgctctgagaagcagcagagaaatgccagaaaagaaaaaaaaatgtccaccacttccattaaaacatctcccatcctaccaaattatgcatcctgaactcgatttaattctatttttcttggaacaccargaagcaatgggtatgctcctgtaggctggagcaggccgagccctgcgagctgcagtgtgcagaaggccatcaccagaacaagacttgaagtgaactcagtgcagcgtgtgaaccgatcctgtgctttttgtcactgacaaaaaacmgatcctttgtgtcgcatgtctccttgtgccttagcaggtctgagattctgggtgctgtgtcctcctactctaaatagcatgagttctctgaagagaaagtggtttgcactacctctaattcctgatactgcttggcatttgccattgctctgttctgtaataaaattgctgctggccttctagactacagaaggaattatccagcttactcccttcccacacatggaaaacagagtaactgagagcaaaacaaagctttgctgaggattctgtctcttctctctcactgagagcagttta

SEQ ID NO: 86485 - DNA, 600 bp, Chicken  19866894386820_5
actagattggcataaaggtaaacaactggcaaattattcataactcaaaatctgcccgatgtctttttgttccaaaactttagaaattagagactgctcaccagatgttatagaagaaattactaatttaactgctaaactgctaaaaggctcactctggtaatattttcctgcagaaaatgtctgcgtcttgttaaatgtttatggaatactgtaattatattacatttgctgttaaacgatattgacatttttgaataaaaaggattttttgttgtttttttttaatttttttttttwaatccatatgcacatctggctggaacctaatgtgtggcactgaaacaacaacaacaaaaaacctccccgccctcaaagaaaaaagccttctgccaatgtttttctgtgtattattttttcaaagtagctccggcttttgtagcaccagctatgattaaataccaggactttctcactatcagcaaatgtttaaaggcaagtaaccagcaaagcgttagcaagctgatggctgctggaataaggatatatttagcaatgaaacagctgtttcttgagcaataacccagctgtttggcttgg

SEQ ID NO: 86486 - DNA, 599 bp, Chicken  19866894386825_1
  misc_feature (1)..(115): n is any nucleotide
nnnnnnnnnnnnnnnnnnnnnnnnnnnnnnnnnnnnnnnnnnnnnnnnnnnnnnnnnnnnnnnnnnnnnnnnnnnnnnnnnnnnnnnnnnnnnnnnnnnnnnnnnnnnnnnnnnncttgtttgcaacacagaaagacatgagacttcaaagttatagaagacatgtccacttcagaagtatacttgtgttagggatgtggtctcttgtttacaaagttggtgtttacttcagcttccagtggagaagactgtgtaggtgtaccagggaaatttaccttgtctaaacttaggagtttaaasttatgcctttgtttatgagacagcacttatatacttgttcattttgtatcacctattgcattagtgtactgagattcccatcattagctgcaggagctgtttgctcaagaaagacataggtaaagctgaaatcaagaagcaatggaacagtgttgagaatcagtaaaagaataagcagagagaagtaaaaaagcagtacaatgaaactttctttatgctctcgggaactgtcatgttttggaagaatccttgaaattaggcatgcaagttaaaacaatgtcggttaaaatgcttttagt

SEQ ID NO: 86487 - DNA, 600 bp, Chicken  19866894386825_2
ctcaagaaagacataggtaaagctgaaatcaagaagcaatggaacagtgttgagaatcagtaaaagaataagcagagagaagtaaaaaagcagtacaatgaaactttctttatgctctcgggaactgtcatgttttggaagaatccttgaaattaggcatgcaagttaaaacaatgtcggttaaaatgcttttagtgaacacagttatgcataacttaagaatgtgtgaaaactgcccatttcccatcatttccttgttttgtttaaatatttaaattaatctgtatttttatacttttmtatctgtgaggaataacacttgtttttgcagttggtgacttagtcattggtatgtgaattaaggtagaagtgtgttccttacagagctttagatactgtccattgaagtagtaactcacagaaagaaagtggaagaagacaactgaagttgtaaagtcctgagtgaagacattgccactaaggtaaactagtaaatgttcaaactgtataccatgtgagcatagcttgatattgaagtactgtcaaattagcatactcactttcactcttttttttttaatgggatggactgaatttaac

SEQ ID NO: 86488 - DNA, 600 bp, Chicken  19866894386829_1
tccagcacttgtcctgagacgtttgtgataagcataacccaggtagccaaaactttatatcagacagcagtcctccctcaatctgtctctaaaaagactgctaggctattgagcatctttcacccaaaaagatggaggatccctaaagaatgatagcaggagaatatgcaggagaaaaaacgttgtttaaaatatacagatctctatcatagtcagggaacagagtattagagaggaaggcaaacaaatttgttacaaaaagcaactctaaacctttgagattaagatgttttcttatamtgtaaagaaagtgatgagcactacctactatttccattccgttttagtttagagagatttgacacagcagaaaaataatgggtacagcagatagtaagaactagtacttgctgtagtgtaactaactaytgctgcacattaacaggagaccgaattatcccttttacctgttaggtatgtattcacaaacaagcccagactagccctctgtgttagaaacagtaatggaataagacagcctggtagttgccatctcaaaatggcatccactttaaaaatgttgttttaatagaatcctag

SEQ ID NO: 86489 - DNA, 600 bp, Chicken  19866894386829_2
agatggaggatccctaaagaatgatagcaggagaatatgcaggagaaaaaacgttgtttaaaatatacagatctctatcatagtcagggaacagagtattagagaggaaggcaaacaaatttgttacaaaaagcaactctaaacctttgagattaagatgttttcttatamtgtaaagaaagtgatgagcactacctactatttccattccgttttagtttagagagatttgacacagcagaaaaataatgggtacagcagatagtaagaactagtacttgctgtagtgtaactaactaytgctgcacattaacaggagaccgaattatcccttttacctgttaggtatgtattcacaaacaagcccagactagccctctgtgttagaaacagtaatggaataagacagcctggtagttgccatctcaaaatggcatccactttaaaaatgttgttttaatagaatcctagaatggtttaagatagaagggaccttaaacaccatctggttccaactccgtgccctgggcagggttgtrcagggtcccaacccaacctgaccttggacacatccaggaatggggcattcacagcttgtct

SEQ ID NO: 86490 - DNA, 600 bp, Chicken  19866894386829_3
agaaaaataatgggtacagcagatagtaagaactagtacttgctgtagtgtaactaactaytgctgcacattaacaggagaccgaattatcccttttacctgttaggtatgtattcacaaacaagcccagactagccctctgtgttagaaacagtaatggaataagacagcctggtagttgccatctcaaaatggcatccactttaaaaatgttgttttaatagaatcctagaatggtttaagatagaagggaccttaaacaccatctggttccaactccgtgccctgggcagggttgtrcagggtcccaacccaacctgaccttggacacatccaggaatggggcattcacagcttgtctaggcagcctgtgccagtgctcaccactatcttcctaatatcctcttttagttgaatgccattacccctgtcttatcactacatgcccttgtaaaaagccactcctcatcttttctgcaggccatctttaagtactggaatgccacaatgaggtcaccccagagtcatctcttcttcaaactaaacaagtccagctacctcagcttttcctcatagaggagatggtcaggcactctgagc

SEQ ID NO: 86491 - DNA, 600 bp, Chicken  19866894386830_1
cgaacaaaaaaaaaaaagcccaccaatactgaagagcagcagcattcaatgttcagttataaaggtccaagttatcttaaaccacttcacagaaccatagagttgttttctgtcacctgatagatggattataatctaaagtaagagggaaatgtaatcctgactacttgtttaagtatctacagagtataaaagtatgaaaactcgtcacttcatgaaagatgagagactcacctccactatttccaggacattggtcaggttcgctacttgattcagcatcacacgttttattgcgcytttttttattattcaggaagggttgttttgttttgattgtttgggttggtatttctttgtcttgaatttgccagatagtttgccattctgaaacccacgggattaacaggtggttaagaagtatcttttcagaaaaggagagaatttattcagaagatagtattaaaaattgcaccaaggagaagttacaaagtttttgtgtatccgctgggatgaaacatcctccctccccaagaccaaaatatccagaattcaattctgtccactacagattagcattatagtcaccacctctttagt

SEQ ID NO: 86492 - DNA, 600 bp, Chicken  19866894386832_1
tgtttccagtcagttaaataacaatctttgctaaaattagagaggcttgtaactcaagtgtcttgtcattacaatgaccaaagatttgtgtgtttgttttgttgttcttatagtttgtttgtttttcttacttccagtcaagtagatgtttaggtttgggatttctacctcagcctcaacaactatgatatcacgttattttaaatactgcagaaatgaacaaagtgaatagtgaaagggaaactacataaaagaaggctttctagttcagagatcatttgtggtagtttgccatgaaaractgccctgggagacaaaaaagactaacagatctggctgatcttcaagaatgaccttttcagaggtgaaaataaaaacagtgcatttttaatgcatataaggctccaaaatggatagagtggcaggccacaaagaaagaatagtaccttgtgtctgagttcaggtgaaaaaagtaatatacacaagaaggaagtaggaagaatatgtcttgcaaggaacataagggcaacaagaacttctacaaatatgtagtaagaggaaggctaaggaaaagataagggagtctgtccaataagtgat

SEQ ID NO: 86493 - DNA, 592 bp, Chicken  19866894386832_2
atgatatcacgttattttaaatactgcagaaatgaacaaagtgaatagtgaaagggaaactacataaaagaaggctttctagttcagagatcatttgtggtagtttgccatgaaaractgccctgggagacaaaaaagactaacagatctggctgatcttcaagaatgaccttttcagaggtgaaaataaaaacagtgcatttttaatgcatataaggctccaaaatggatagagtggcaggccacaaagaaagaatagtaccttgtgtctgagttcaggtgaaaaaagtaatatacacragaaggaagtaggaagaatatgtcttgcaaggaacataagggcaacaagaacttctacaaatatgtagtaagaggaaggctaaggaaaagataagggagtctgtccaataagtgatttagtgataaagtcttggtaaattctacaattttaaatgcatctttttactgttttaactgccaaggttttctttcaggccttccagttacaggaatctcagcacagagtgagactctagtttcagtagcagggaaactgatttaggtaacacataaaaaattggtccatgggatc

SEQ ID NO: 86494 - DNA, 599 bp, Chicken  19866894386841_1
  misc_feature (1)..(96): n is any nucleotide
nnnnnnnnnnnnnnnnnnnnnnnnnnnnnnnnnnnnnnnnnnnnnnnnnnnnnnnnnnnnnnnnnnnnnnnnnnnnnnnnnnnnnnnnnnnnnnnnagcccctttctgcagaggagcgataagccgtgcctggctcctgcttgcccacccctgctggctcctgtttgctatatctcatcagtaggcaccaaaaagcaccacttccatccctgctgggctgccctccctgccctgctctgaaatgctgcctgagtgtcatggaaacagcacatagagctgccatgcgcaggaagggagagsggaccaaggttagggagcctggtgtgtcccccaggaacccacagggcagctccagaatgatgctcacrtttggattgcgatgtggtttgtgaagatgttgcaatatgtacagttaagtcaacatgctcacatggcacagatctgtggctacgggcgcgtgcagcacatctggagctgcacaagggatgagtgagactgccttggatgtgctgggctcccatcccagtttggccatggatgggctggtggcygtgggcagagctctctgcattgcattgcctgggagtggggacagggaa

SEQ ID NO: 86495 - DNA, 599 bp, Chicken  19866894386841_2
  misc_feature (1)..(28): n is any nucleotide
nnnnnnnnnnnnnnnnnnnnnnnnnnnnagcccctttctgcagaggagcgataagccgtgcctggctcctgcttgcccacccctgctggctcctgtttgctatatctcatcagtaggcaccaaaaagcaccacttccatccctgctgggctgccctccctgccctgctctgaaatgctgcctgagtgtcatggaaacagcacatagagctgccatgcgcaggaagggagagsggaccaaggttagggagcctggtgtgtcccccaggaacccacagggcagctccagaatgatgctcacrtttggattgcgatgtggtttgtgaagatgttgcaatatgtacagttaagtcaacatgctcacatggcacagatctgtggctacgggcgcgtgcagcacatctggagctgcacaagggatgagtgagactgccttggatgtgctgggctcccatcccagtttggccatggatgggctggtggcygtgggcagagctctctgcattgcattgcctgggagtggggacagggaaggacacagctcmtcctcgagagctataatcaatattgggaagctgctggctgctctggcaatcccagt

SEQ ID NO: 86496 - DNA, 526 bp, Chicken  19866894386841_3
agtgtcatggaaacagcacatagagctgccatgcgcaggaagggagagsggaccaaggttagggagcctggtgtgtcccccaggaacccacagggcagctccagaatgatgctcacrtttggattgcgatgtggtttgtgaagatgttgcaatatgtacagttaagtcaacatgctcacatggcacagatctgtggctacgggcgcgtgcagcacatctggagctgcacaagggatgagtgagactgccttggatgtgctgggctcccatcccagtttggccatggatgggctggtggcygtgggcagagctctctgcattgcattgcctgggagtggggacagggaaggacacagctcmtcctcgagagctataatcaatattgggaagctgctggctgctctggcaatcccagttatccacgttgcctgtgccgttctcatatcccttcttagttgaggatactttattattatctttattaattacacacagcagtgtgcttaaaacaaggaggggggttggg

SEQ ID NO: 86497 - DNA, 466 bp, Chicken  19866894386841_4
agggagcctggtgtgtcccccaggaacccacagggcagctccagaatgatgctcacrtttggattgcgatgtggtttgtgaagatgttgcaatatgtacagttaagtcaacatgctcacatggcacagatctgtggctacgggcgcgtgcagcacatctggagctgcacaagggatgagtgagactgccttggatgtgctgggctcccatcccagtttggccatggatgggctggtggcygtgggcagagctctctgcattgcattgcctgggagtggggacagggaaggacacagctcmtcctcgagagctataatcaatattgggaagctgctggctgctctggcaatcccagttatccacgttgcctgtgccgttctcatatcccttcttagttgaggatactttattattatctttattaattacacacagcagtgtgcttaaaacaaggaggggggttggg

SEQ ID NO: 86498 - DNA, 599 bp, Chicken  19866894386845_1
  misc_feature (1)..(5): n is any nucleotide
nnnnntgtcctacagatcttaaaatttttttgttcttcccttgcttttttctttcacaatacccacaaatactcataaaactagaaagctcataatcactactttcactcttaaagtttcaaaacactttttatcagcagagaactgaatagcagctgaagcttttttttcaggaagtacagcaaactgtttactgccctaaatcgtaacagaatctgcacctgggtggctgttccagactaacagcttccaagctggagttgatctcagtggaggcccttctacttaagacatcatagrtttgatttgattttccaaaatgtccatagctcctagttcctattttgcaaaatgcctttggcatttggaaggcagaattataagttaaaaaaaaaaaaaaaaaaaagatatttcagtctgagtttccagcatagatgtgtctgccagtagcaaactgaaaagattcaagctgagtttccaaatgagttataccttcacagcatagagcagaccagtggcagctggagctctttctagttttcattccttggggtgaaaatttgactgatttgctaaggagatactaccaacattcatcc

SEQ ID NO: 86499 - DNA, 600 bp, Chicken  19866894386860_1
cagaacagtggtaaaatcctgctgaactctgtgctgggagtatttatattgtgatggtgcactgatagagagctggacccacccctgcagcccaaggcccggccggccacatatagtgaggggagctccgatgggatactgcattggtttgtgtggctgcagaggctgctggtgagctggaggcctgggctggaggccgcagggcagagtcattccctctggggacagcagaagggagccaggaggcccagcgcagagagtaccaaaaatggagatgcacttactgtttttgtttgtttstttctttgttttgttttgtttttaaattgctatttattatcattattttgtattgttcttttaaattgtatattgtccagttttgaaacaaaagtcctaatggagcaactggaatagttcatgctgaacttgagtcctttttaccatctaaaacaatcttctgcttctccaaaggaacagctaactgcctctgtaccttctttaacaccacctggaggcacagggagctcggggccattcactggattcctcccattgtctcagtgcagcagctcagagggcagcaatcccagtcccgca

SEQ ID NO: 86500 - DNA, 600 bp, Chicken  19866894386860_2
gtcctggcacagcagcttagaggacaccagccctagtcctgccctcttcctcaggatttgcctggaggctacaagggagctcagggagaccagggctggactgcagctggacagcagctcaggggacaccagtctcagtcctgtcccattccttgggactcacccagtggccacagggagattggggtcacccactggactcctgttgtcctgatgcagaagcttagagaacatcagtcccagtccttgtagataggcaccacattcacaagtctccagttgtctaggacatccctggtygacgaggagcgctgatatatgatggaaagcagtttaacaatcacttctgccaactccatctgcactcttggggtggatcacatgtagccccatgggcttgtgacagtccaagtggaatagctgttcactgttttctcctgaattgtggggggggctttttctggtcctcatccctgtcttccagctcaggggctgcgtaccctcaggatagctggattagtactgaagacagaagtaaagaaggcacggaaaacctcagccttttccttctcctcagggataacattcttgaccatgtcc

SEQ ID NO: 86501 - DNA, 600 bp, Chicken  19866894386867_1
accacttctgttggatgtggaaatgtataaactggattactgagcagaaaacatgaaaaaacctggtagataaattaaacctttaagccctaattactagcgtcattagcgacttgattatgatattctagagcttcagttcaattgcacaatagcgcaagtttcaacacagaacacaggcattttcataaccataatgagcaagctgacaccgcctgcataaccctcagatcaaaggctacgtgctctgctgaagcagcagcctgatgaggctttcatggagctccaagcagacactgygccttttccaggctgagcaacccagccaagcartgctcagctgcccctcaaccccccggtgacttagacacgctgcatttgagatactgaattattaattactgttttatcagctggggaaagtgggtttgggcttctgctcttccagatgaagtttctccrtcacagagaatcaagcacgtcctcaaccacaagactcggtgttgccacatttcagtagaactcgcattaaattaacctgtgacacttgctttcttgttacttgttctgacttcataagaagagatcctcagatgtgtg

SEQ ID NO: 86502 - DNA, 600 bp, Chicken  19866894386867_2
ggattactgagcagaaaacatgaaaaaacctggtagataaattaaacctttaagccctaattactagcgtcattagcgacttgattatgatattctagagcttcagttcaattgcacaatagcgcaagtttcaacacagaacacaggcattttcataaccataatgagcaagctgacaccgcctgcataaccctcagatcaaaggctacgtgctctgctgaagcagcagcctgatgaggctttcatggagctccaagcagacactgygccttttccaggctgagcaacccagccaagcartgctcagctgcccctcaaccccccggtgacttagacacgctgcatttgagatactgaattattaattactgttttatcagctggggaaagtgggtttgggcttctgctcttccagatgaagtttctccrtcacagagaatcaagcacgtcctcaaccacaagactcggtgttgccacatttcagtagaactcgcattaaattaacctgtgacacttgctttcttgttacttgttctgacttcataagaagagatcctcagatgtgtgaagcaataaccagtaatctatcaaaaacacccg

SEQ ID NO: 86503 - DNA, 600 bp, Chicken  19866894386867_3
ttcaacacagaacacaggcattttcataaccataatgagcaagctgacaccgcctgcataaccctcagatcaaaggctacgtgctctgctgaagcagcagcctgatgaggctttcatggagctccaagcagacactgygccttttccaggctgagcaacccagccaagcartgctcagctgcccctcaaccccccggtgacttagacacgctgcatttgagatactgaattattaattactgttttatcagctggggaaagtgggtttgggcttctgctcttccagatgaagtttctccrtcacagagaatcaagcacgtcctcaaccacaagactcggtgttgccacatttcagtagaactcgcattaaattaacctgtgacacttgctttcttgttacttgttctgacttcataagaagagatcctcagatgtgtgaagcaataaccagtaatctatcaaaaacacccgtgcagcacaaactcctttctgagctgagacttcactgactgyggcaccacaaagatatttcagctgcacgcctgcttttctcaggcataaatttccttgggaataaaggcagaacataaaagcatctct

SEQ ID NO: 86504 - DNA, 416 bp, Chicken  19866894386867_4
catttgagatactgaattattaattactgttttatcagctggggaaagtgggtttgggcttctgctcttccagatgaagtttctccrtcacagagaatcaagcacgtcctcaaccacaagactcggtgttgccacatttcagtagaactcgcattaaattaacctgtgacacttgctttcttgttacttgttctgacttcataagaagagatcctcagatgtgtgaagcaataaccagtaatctatcaaaaacacccgtgcagcacaaactcctttctgagctgagacttcactgactgyggcaccacaaagatatttcagctgcacgcctgcttttctcaggcataaatttccttgggaataaaggcagaacataaaagcatctctaaacctaatgctcattagcttgccagata

SEQ ID NO: 86505 - DNA, 600 bp, Chicken  19866894386871_1
gcatcatgctcagcagctctctgcagggcggaactcacttccactagttctgcaggcacaaccataccagctaaactttagcacaaatcggatgcctaaaattaggcagcagaaatacccatctgtgttactcagctgcagaggtatttgagaaatagagaagagcagataaaaatagagctctgtaatattccactagaaaaactaagctgtgcttccaattactaaactattggatgctaacaaatacgagacctaccatcaaatatcatttatatcatataagaaacattaaatccrcggaacatcttttcaaagacaaaatattacttcaatgatagtaacattacatgctgtgcatcattttaaccacagggcctaaatcaaggaataattgactaaaagactgatatgactgttaatacaatatccaccagtctctttccagactggggctaaagtttaagagctagtctgaaagcaagaaacaatggttatacatgaagtgctcaaaaaatcatgcgttctgtgatccagtttttattttgaaggagcagttcaaactgcatccaaaatgacacagtaggtcattttcacatc

SEQ ID NO: 86506 - DNA, 600 bp, Chicken  19866894386877_1
tataacgtgatggacaagcaattgtttaccacctgctgacatcagctagcccctcaaatagcagaagagaaagagagatgaactcccaggaccttcaaaactctccttccacatgatatagaattgtagaatagtttggattggaagggacctttaagattgtgcagttccaacccccccccgtgacgggcagggacaccttcatctaagccaggttgcttacagccccatcctgtctggtcttgaatgcctgtttggtcttgaatgtggagggggcatccacaacctcactgggcaacrtgttccagtgtctcaccattctcatggtaaagttttttttcttaatatctagtctttgaaatgttattccctggggaattcacatctcaccactctgtgaactgccatcttgattctggcgcacaatggcatcaccatatctcatcactggtaatggtgcagtccatgaaagtgtcaccttcatcctcacactgatttggtgttatttctgttcctgagggagcatctatgggacccacctggtgcaaactgtgatatttcagtgttgccaccatcatttccactgcactgaagccaata

SEQ ID NO: 86507 - DNA, 600 bp, Chicken  19866894386887_1
tgggtgtggaacagtgcggggtgacctcaagcagcgccgctcctcagctgagccccgggtgctcagatccacgggcagtcgtggagagcccgaatgttaaggagttactttgcagggtgagttagatgcatgggagggcaggaggccaggtgtgccgggcgggagctgctcgcagctcatctctgctggctccgagtgcttgaggaaatgcaacaccctctgctcatcctgcctctcccccagatgtcactgttggtccacacgagtgaggattggctctaccttctgtggtggaccagygcacatggcatggatacggactttagggcactctgtttattaatatattggtcaatatcaggtgaattctgcagaaacattaaggtctgttttgttatatgcttgaaataatgctctccttctaattgttaacatgttcctttccattygtaaatacgtccactgtccatctgtcccaattcccctcaggagcagctgagggctgtgctgacccctcagtgctggtgggcgtcccctgcttaaacttcgcctgcctccctaatggaataattacagaatggcaggctgttatccaattac

SEQ ID NO: 86508 - DNA, 600 bp, Chicken  19866894386887_2
gtgtgccgggcgggagctgctcgcagctcatctctgctggctccgagtgcttgaggaaatgcaacaccctctgctcatcctgcctctcccccagatgtcactgttggtccacacgagtgaggattggctctaccttctgtggtggaccagygcacatggcatggatacggactttagggcactctgtttattaatatattggtcaatatcaggtgaattctgcagaaacattaaggtctgttttgttatatgcttgaaataatgctctccttctaattgttaacatgttcctttccattygtaaatacgtccactgtccatctgtcccaattcccctcaggagcagctgagggctgtgctgacccctcagtgctggtgggcgtcccctgcttaaacttcgcctgcctccctaatggaataattacagaatggcaggctgttatccaattactctgacgttttaccgttctttgctgttaagtggattgagctcattgtaaagagattagccatggagcagggctgagcgcagcggagcgcggcgcctgtctgtgccggctggtggggatggtgggccctgcactggtggctccttgcatg

SEQ ID NO: 86509 - DNA, 600 bp, Chicken  19866894386890_1
ggactactgccttttaacatccgtggcttaactttttgtttcttagtttttaactgtcatgactactgttacttggtgaaatgtagctgttatatataaaccagtcatctcaactgccagtataataactgaaaagaaaggaagactgtaaatagcatataacttaggtagaaatactattaagttctgtgagatgaacctcacccaagaagttttaattaaggtaatgaacaagcaagataataaataaaataacaaaattaccagaaactcatgaggagctattcctaaggatgaaargggaagtacactggaagtatcttttgaaaaaagccatgargaatacaacattttgtggaaactaaaagtaaatatttttattttgagatggcagtgcaggagaaagaacctctttagtggctgaagcagacactgcattttacagactctgtggctgtatgacaaaaggtactgtcactagaatatccaggaagctggaaaaaaaaatctggatgcactagagatcaatgaaggatcgtttttgtaattcttctcctctaagcagaggagaagaacccacttttgctcttctagtaagac

SEQ ID NO: 86510 - DNA, 600 bp, Chicken  19866894386890_2
tcttagtttttaactgtcatgactactgttacttggtgaaatgtagctgttatatataaaccagtcatctcaactgccagtataataactgaaaagaaaggaagactgtaaatagcatataacttaggtagaaatactattaagttctgtgagatgaacctcacccaagaagttttaattaaggtaatgaacaagcaagataataaataaaataacaaaattaccagaaactcatgaggagctattcctaaggatgaaargggaagtacactggaagtatcttttgaaaaaagccatgargaatacaacattttgtggaaactaaaagtaaatatttttattttgagatggcagtgcaggagaaagaacctctttagtggctgaagcagacactgcattttacagactctgtggctgtatgacaaaaggtactgtcactagaatatccaggaagctggaaaaaaaaatctggatgcactagagatcaatgaaggatcgtttttgtaattcttctcctctaagcagaggagaagaacccacttttgctcttctagtaagacaaggaagggtaactgtgttatttcagtattttgtatcttt

SEQ ID NO: 86511 - DNA, 600 bp, Chicken  19866894386891_1
agaaaaggatttcactggttctatgggatggaggctgcgactgggaccaatcatgccaggggttaatgggttttaaggactgccaactctgaatggacacaatgaagaaccagcaaccagcactgacttctaattaccagcagccaatggtgggaggacatatggaggcagtgtggctcagctggatataaaccccagaggtgttggggcagagggataaggaattgtgctggcagcaggaaggtggaaaagatgaaattctggatgctggggaaacaaacaatgctgccagcctggacrtgcgtgtgagcctcgcgtctctgttccagcctaaggaccctaaaacactgcctgctcgttgactcacagctgctggcgtgttttgaaaaggctgtcccgtgttgctgcaaaacagctgctggctgcatggcccccaggaggggcgcagctccagcagggagccaggctctgaaccctgcttcaggagccagggtgagaagcagaggacaccagaaacccagaatttgactcccgggggcctacggcatcctttgggatcctgaaggaggagagagaccctgagggatgttctgggcagtg

SEQ ID NO: 86512 - DNA, 600 bp, Chicken  19866894386891_2
caggctctgaaccctgcttcaggagccagggtgagaagcagaggacaccagaaacccagaatttgactcccgggggcctacggcatcctttgggatcctgaaggaggagagagaccctgagggatgttctgggcagtgcaaatttcccagggaacatggtttataaaacacatcctgcaaggctgcatggtgtcctggccagacccacgctgcccctatggctgtgcctcctcctgtcccactggcaatagatgctttccccccacccccatatcctctgcaccaccgccttgtccccaycagctcctatggcacaggggacacacagcagccccacctctgagcaaattttggccacctgagcagcagcgggcacatataaaccatggtaaatgaagttgcaaatggttccattgagcatgggcagcggtgctcggatggaggagcaacggcgaagttcaaacatctggttctgtgaattcctatattgtaataaaataagtcttcccacagatttcacgtcatctttgtctgggcatcactgaactgtgaagggagaaacttttttttttcctttttttttttttgtgtggttttcag

SEQ ID NO: 86513 - DNA, 600 bp, Chicken  19866894386891_3
taaaccatggtaaatgaagttgcaaatggttccattgagcatgggcagcggtgctcggatggaggagcaacggcgaagttcaaacatctggttctgtgaattcctatattgtaataaaataagtcttcccacagatttcacgtcatctttgtctgggcatcactgaactgtgaagggagaaacttttttttttcctttttttttttttgtgtggttttcagaggaacaaagagacaagaagcatctggtgaggtgtcttggcagcctcctgcacccagccttgcatcttgcgctggcagmgcggccccacrtcatgggatggcaactgctgacccacagcaccraaacwgcagagcctggagggggaatggggtctgcaggggctgaggagggccgggctgcagcctatggatactgggagcagcagcacagtgcaatgtgtcaaggcaatgcctgcagcccgatttttgcctctgttcaaatgcaacggcaacaaagaacatgcaacagactggttaaaaactcacaggctttattcgggtccaggaagaaccattgcctcctgctctcccagtcccctgcctatgtctgcctggctgc

SEQ ID NO: 86514 - DNA, 600 bp, Chicken  19866894386891_4
aaatgaagttgcaaatggttccattgagcatgggcagcggtgctcggatggaggagcaacggcgaagttcaaacatctggttctgtgaattcctatattgtaataaaataagtcttcccacagatttcacgtcatctttgtctgggcatcactgaactgtgaagggagaaacttttttttttcctttttttttttttgtgtggttttcagaggaacaaagagacaagaagcatctggtgaggtgtcttggcagcctcctgcacccagccttgcatcttgcgctggcagmgcggccccacrtcatgggatggcaactgctgacccacagcaccraaacwgcagagcctggagggggaatggggtctgcaggggctgaggagggccgggctgcagcctatggatactgggagcagcagcacagtgcaatgtgtcaaggcaatgcctgcagcccgatttttgcctctgttcaaatgcaacggcaacaaagaacatgcaacagactggttaaaaactcacaggctttattcgggtccaggaagaaccattgcctcctgctctcccagtcccctgcctatgtctgcctggctgcgccctgtttgc

SEQ ID NO: 86515 - DNA, 600 bp, Chicken  19866894386891_5
gcagcggtgctcggatggaggagcaacggcgaagttcaaacatctggttctgtgaattcctatattgtaataaaataagtcttcccacagatttcacgtcatctttgtctgggcatcactgaactgtgaagggagaaacttttttttttcctttttttttttttgtgtggttttcagaggaacaaagagacaagaagcatctggtgaggtgtcttggcagcctcctgcacccagccttgcatcttgcgctggcagmgcggccccacrtcatgggatggcaactgctgacccacagcaccraaacwgcagagcctggagggggaatggggtctgcaggggctgaggagggccgggctgcagcctatggatactgggagcagcagcacagtgcaatgtgtcaaggcaatgcctgcagcccgatttttgcctctgttcaaatgcaacggcaacaaagaacatgcaacagactggttaaaaactcacaggctttattcgggtccaggaagaaccattgcctcctgctctcccagtcccctgcctatgtctgcctggctgcgccctgtttgcaggcaattctgccttatcagcattactgatttc

SEQ ID NO: 86516 - DNA, 600 bp, Chicken  19866894386891_6
ggtgctcggatggaggagcaacggcgaagttcaaacatctggttctgtgaattcctatattgtaataaaataagtcttcccacagatttcacgtcatctttgtctgggcatcactgaactgtgaagggagaaacttttttttttcctttttttttttttgtgtggttttcagaggaacaaagagacaagaagcatctggtgaggtgtcttggcagcctcctgcacccagccttgcatcttgcgctggcagmgcggccccacrtcatgggatggcaactgctgacccacagcaccraaacwgcagagcctggagggggaatggggtctgcaggggctgaggagggccgggctgcagcctatggatactgggagcagcagcacagtgcaatgtgtcaaggcaatgcctgcagcccgatttttgcctctgttcaaatgcaacggcaacaaagaacatgcaacagactggttaaaaactcacaggctttattcgggtccaggaagaaccattgcctcctgctctcccagtcccctgcctatgtctgcctggctgcgccctgtttgcaggcaattctgccttatcagcattactgatttctcacc

SEQ ID NO: 86517 - DNA, 449 bp, Chicken  19866894386895_1
atttttctacctatcaaaggtggtgttggccttttggcttgactgagtgaagaggaattgtcttgggctgaagaagttacatgtgaaagtaacaacaaaaaaagtctatttcttattaaaacataaaagcaaagtgcaacaaaacaaagctagcagggtgggcacatatgtcctaaggcttccagtgtcacagatgtatcacaaggccgcagttcctacagaagagcactgtcactatggaacagctgccaccatgagggcagctagctaggaagcaccacaactcaagcagggaacaakgtaggaagcatgtaaaccccttcctgatcctttttttattattggtactagccttctttctgtgaatacccacgtatatgtgaccaggattttcccatggtttgggagcctgtttgagtttggtcgcccaaccctctacactaaaagag

SEQ ID NO: 86518 - DNA, 600 bp, Chicken  19866894386900_1
ggtgaggaaaggggtgagatgatgcagagcacaatcagacccagaattcaggtagtggcagcatctgttccccttcaccggaccaaccttcaaagacttgggaagaagtcctgtttccaagtcagcagaactgagaacatggatgagatttagaagggttactcatacatcacaaccctatcctcatgacacttctcatagccaggttttctaaaaacaagaggaaaacagatcaccaaatcaaatccacgtccttccgaaccctgaacaaacactgatgctgtattttacactccttayagaacattattctgggaacttcagtaagaactgcccataaataaactcattacgttggaagttggccttttcttctacactgatctgaaaatagtaaaatctcttattgttgccatgtaacaaacaactggattttcacatgcttcaaagtcaaatttccacagacttctgcgcctctatttttagagtacttttcccactaagaagcaaccagagatgttccatagcagcccagtcacacaagtaactaacaaaaacacccaagctatttcagcaagatccagattaagtacatagagg

SEQ ID NO: 86519 - DNA, 600 bp, Chicken  19866894386906_1
gtggcaaatgtgggaagaggtctggatacagagggcaggattagtgtctctcaggggcctcctggaaagcaataggtcctcactcccccaaatgagccagaataatcaagttgcgagctgcactcaactgcagaatcacaatttcttttctgagctgttttgcccacgtgtggcacgagttgtgcccaggtatgccagccagcaggagagaactgaaatgctggccaagtgactgcaggtaagcacagggaggtgtcctccaccccacttctgagagcattacccagcttggcccactcytatcccctgcagagcagttattaagtccccttgtcatgttttggtctcagttgctcaggatattctgatggatacattaagcttcaaaaatccaaagatccccgaacaacaatttatgactgtagcatgactcaggatttcattgaattctttttgtcacacaagcgagagattcaaatattgcaggctatagtcagagaattagtaggaaaagggaacttcaaggcagctaaactcatatccgaagactctgtgtttctgcttctcctgcagctacccgatgtaaggacataagctttg

SEQ ID NO: 86520 - DNA, 600 bp, Chicken  19866894386910_1
gctcatgtaagttttagttgaaaatcccaaggatcgacataaggataggcaagaaagtctcccagcttattgccttctgcatcgtaatggagcattcggaaacaaacatcacagaagaaacaaggatcctctggcgccaggctgtccttgttggttacccacctggctgtatacattttgcacacaaagcattttctggtacacaaccagtgttttttgattaacagtggatagaggttcctgtccaggcagtcctcgtgatgaataagtcgtatgtccgtgacaataacgatgtgctcrcagtccccttggtggcagaagaggtacggatagccaattctgagggacaaatcattgaatgtgtagtcctccattttgacagactgaagatttccatagcctctgtcacgagattcggaccactcaataatggttctgctcagatctctgcactctgggtacctgctatcgttataaaagatrccttcgaagtaaaagaaggcagatttgtagatgtccttgctgatgtgctctggcgctcggtccggctcgctgctgaactccccgccgatctgcaggtcactgacacaggacaaggag

SEQ ID NO: 86521 - DNA, 600 bp, Chicken  19866894386910_2
acaaagcattttctggtacacaaccagtgttttttgattaacagtggatagaggttcctgtccaggcagtcctcgtgatgaataagtcgtatgtccgtgacaataacgatgtgctcrcagtccccttggtggcagaagaggtacggatagccaattctgagggacaaatcattgaatgtgtagtcctccattttgacagactgaagatttccatagcctctgtcacgagattcggaccactcaataatggttctgctcagatctctgcactctgggtacctgctatcgttataaaagatrccttcgaagtaaaagaaggcagatttgtagatgtccttgctgatgtgctctggcgctcggtccggctcgctgctgaactccccgccgatctgcaggtcactgacacaggacaaggagtccctgagttcagtgagcctctggctgcccagcaccaggaccgtctggtagggcttgtgctccttgtgcttctggaagatgacgggatagaagacgttcagagttagaagcagctctccctcctccaccaggtctgccgcatcgtcaggcctcttcccaatggcgtgcgactccatctcgtaa

SEQ ID NO: 86522 - DNA, 599 bp, Chicken  19866894386914_1
  misc_feature (1)..(10): n is any nucleotide
nnnnnnnnnnttccctttgaccgtgccctgatcctgtagtttgagtaacttaggaagacattggcagatatgagaaatgccactgaaatccagagagctctccttgggatacaagggggctgtgggactggggcctcgcctaatgacatcattcattggcgtacctttgtagcattctccaggatctctggtttctatgtgtatgaaaaaaaaaagtacaaacaattgtacaaacaatttggtgatgaattaatacgaacttctgcattcctagagataaagaattttatccacactcascaagaggtatgaaattatagagagaacttttgttcttaaaactatacgaactatttctgaggagcgtaggaataatcatttctgtgtgactgattgtgtgactaaggcctataaaaacttaaaggagacatttgttgtctttgttaagcttttaacacacttttgagaccattcaaaaattaaggagccttcgaaatccaggctggatcatgggatgtgtgtggaaaccgaaagaagggttctgtagagctctctggccaaaatgagcacattttctcctttactgggcagatctcaac

SEQ ID NO: 86523 - DNA, 600 bp, Chicken  19866894386914_2
aagggttctgtagagctctctggccaaaatgagcacattttctcctttactgggcagatctcaacttatggctccctggtcacatcttcacatcgtcattcttttcctgaactgtgagtcaagtgatctttacctctgctcccttttcacactcatgcagtcttacaagttaatttttaaagagagaaacaccattttaaaagcaagagctgttgagtttccaattggaaatggtaaaaagcaatgtgttgactttccccccaaccaaatgtttcttttcctatctggaacatttcaacrtaataaggatctctcttattatttctatcagccaaaacaatttttttccaagcatgactgaaactcattgataagtttatattctttccaaagtgaagtagtttgatacatatattatttgtaaaataaataaataaataaattgtgtgagtgacaccaggtttgctatataatgcattttcctcatcaggaataaggtgcacgaaggtgttttcctgtcagtaactcttgatttattttaaataatgttaagatatttttctccttttgattcttccagaatagaccatgctgaatgta

SEQ ID NO: 86524 - DNA, 600 bp, Chicken  19866894386914_3
ctcctttactgggcagatctcaacttatggctccctggtcacatcttcacatcgtcattcttttcctgaactgtgagtcaagtgatctttacctctgctcccttttcacactcatgcagtcttacaagttaatttttaaagagagaaacaccattttaaaagcaagagctgttgagtttccaattggaaatggtaaaaagcaatgtgttgactttccccccaaccaaatgtttcttttcctatctggaacatttcaacrtaataaggatctctcttattatttctatcagccaaaacaarttttttccaagcatgactgaaactcattgataagtttatattctttccaaagtgaagtagtttgatacatatattatttgtaaaataaataaataaataaattgtgtgagtgacaccaggtttgctatataatgcattttcctcatcaggaataaggtgcacgaaggtgttttcctgtcagtaactcttgatttattttaaataatgttaagatatttttctccttttgattcttccagaatagaccatgctgaatgtagattcaggtgtttgtttattaacacactgatgtagttcagt

SEQ ID NO: 86525 - DNA, 599 bp, Chicken  19866894386920_1
  misc_feature (1)..(124): n is any nucleotide
nnnnnnnnnnnnnnnnnnnnnnnnnnnnnnnnnnnnnnnnnnnnnnnnnnnnnnnnnnnnnnnnnnnnnnnnnnnnnnnnnnnnnnnnnnnnnnnnnnnnnnnnnnnnnnnnnnnnnnnnnnnnttttaatgtcactagctgcagccagctgttacactgaaagcgttaataaccattttcatcagtcacgggcttggattaaacagactgcaagactcaaggactctcaagggttagtgatggcagaaaaaaaaaccccagaagctaacacccaaaacaccaaagtaggagccacgcartgtgagcagggaggctcctctcggggcagataagyacagggctggaacacttcatagctatagcttgaagtactgatgggctgtacagacagaaaatcaagccttgaaaagaaatgggagaatgagaaaagttctggtggatattagactagaaagaagttcaaaaagatgaagcttcctaggtgctagtactgctaactgcagagatagttcagaagaaagcttttcactttctttgtcccatgttcataaaacccaggattttgtgcagtcaacaggaccattgcaatcactccctc

SEQ ID NO: 86526 - DNA, 599 bp, Chicken  19866894386920_2
  misc_feature (1)..(89): n is any nucleotide
nnnnnnnnnnnnnnnnnnnnnnnnnnnnnnnnnnnnnnnnnnnnnnnnnnnnnnnnnnnnnnnnnnnnnnnnnnnnnnnnnnnnnnnnnttttaatgtcactagctgcagccagctgttacactgaaagcgttaataaccattttcatcagtcacgggcttggattaaacagactgcaagactcaaggactctcaagggttagtgatggcagaaaaaaaaaccccagaagctaacacccaaaacaccaaagtaggagccacgcartgtgagcagggaggctcctctcggggcagataagyacagggctggaacacttcatagctatagcttgaagtactgatgggctgtacagacagaaaatcaagccttgaaaagaaatgggagaatgagaaaagttctggtggatattagactagaaagaagttcaaaaagatgaagcttcctaggtgctagtactgctaactgcagagatagttcagaagaaagcttttcactttctttgtcccatgttcataaaacccaggattttgtgcagtcaacaggaccattgcaatcactccctctgtactgcaaaaattccagctggtatcaggttttc

SEQ ID NO: 86527 - DNA, 359 bp, Chicken  19866894386920_3
aagaagttcaaaaagatgaagcttcctaggtgctagtactgctaactgcagagatagttcagaagaaagcttttcactttctttgtcccatgttcataaaacccaggattttgtgcagtcaacaggaccattgcaatcactccctctgtactgcaaaaattccagctggtatcaggttttccttgtaatggaaacaagctggcagaacttcaaaaacttgataacaacttaaatagagaaatgacagcagtagttatactttgctattaaaaatgttgttctgacttcccttaaaaaaawatatatatatatatgtagttggaattaaaaaaaaaaattaaaagagaacaagttagata

SEQ ID NO: 86528 - DNA, 599 bp, Chicken  19866894386925_1
  misc_feature (1)..(3): n is any nucleotide
nnngagatttgtagctggtttattttgatgtaagtcctttagaaaaacaaataccctcctgtgtctgtcaaggaagatgcatcaaagaaagtgctttgcacttagaagatagtgaggtttgctatagtttttagttcttttcagttttagtaccagaagttaaaatctgccttggagagaggaagttctaatgtgcagaaatgatttggctccatggtaggaaatgtcatctcacatggggaatgtatattttttgcatcaaaccagatgaaatgtacacagtttaaaaacaaaacagayaaacaaaagaaatcaggttgtattttaaatcctcagcttctttttctgtctacagaagttaataaataggtagaaataaaaaatcctaagtacagaatatacattctagaaagctgagaagacaggagtggtagaatgcaactttttttggaaaaaaaagaaacggaagtcaaaaatacaggaccctttgtaggaagctttatatgatctttcaggttgcacaaatcaatccttaaaagggagaattctataaagattcatgttaagtaagtaactgaacttaaattggttcatttgat

SEQ ID NO: 86529 - DNA, 600 bp, Chicken  19866894386931_1
caaaagcacatgttcaaatgacatttcttttaaactgttttcttaacttctttggattctcgctataaatgacatcagcaggtcagatgctttaaacttcattggctcataagcagagatattgagcaataccaagcaacagatacgttgcttccattttattattttatttctgtgagagcggtaaggtgctgcaacaggctgcccagagaggttgtggatgccccgtccctggaggtgtacaaggccaggttggatggggccctgggcagcctggtctagtattaaatggggcggttsgtggccctgcatgcggcaggaggattggaaactgatgatccttgaggtcccttccaaycygggccattctgtgattcttttgcctataagaaataaatgagtgtctrctgacttgaagggacatcattttcttccagtatcttccctcatcaacagtatatgtcctatgtgctagtgtatgatgtgagaatggtacagagtcataaactaagagtaaaataagaaaaatctcacgtgaagatttctaccactcctaccagaagctgaacaaagttgagttgaaagtcaattttcccttgt

SEQ ID NO: 86530 - DNA, 600 bp, Chicken  19866894386931_2
ctcgctataaatgacatcagcaggtcagatgctttaaacttcattggctcataagcagagatattgagcaataccaagcaacagatacgttgcttccattttattattttatttctgtgagagcggtaaggtgctgcaacaggctgcccagagaggttgtggatgccccgtccctggaggtgtacaaggccaggttggatggggccctgggcagcctggtctagtattaaatggggcggttsgtggccctgcatgcggcaggaggattggaaactgatgatccttgaggtcccttccaaycygggccattctgtgattcttttgcctataagaaataaatgagtgtctrctgacttgaagggacatcattttcttccagtatcttccctcatcaacagtatatgtcctatgtgctagtgtatgatgtgagaatggtacagagtcataaactaagagtaaaataagaaaaatctcacgtgaagatttctaccactcctaccagaagctgaacaaagttgagttgaaagtcaattttcccttgttagaggctgacattttgttctccagaatctcagttttattacttataaagtttccaat

SEQ ID NO: 86531 - DNA, 600 bp, Chicken  19866894386931_3
cgctataaatgacatcagcaggtcagatgctttaaacttcattggctcataagcagagatattgagcaataccaagcaacagatacgttgcttccattttattattttatttctgtgagagcggtaaggtgctgcaacaggctgcccagagaggttgtggatgccccgtccctggaggtgtacaaggccaggttggatggggccctgggcagcctggtctagtattaaatggggcggttsgtggccctgcatgcggcaggaggattggaaactgatgatccttgaggtcccttccaaycygggccattctgtgattcttttgcctataagaaataaatgagtgtctrctgacttgaagggacatcattttcttccagtatcttccctcatcaacagtatatgtcctatgtgctagtgtatgatgtgagaatggtacagagtcataaactaagagtaaaataagaaaaatctcacgtgaagatttctaccactcctaccagaagctgaacaaagttgagttgaaagtcaattttcccttgttagaggctgacattttgttctccagaatctcagttttattacttataaagtttccaattc

SEQ ID NO: 86532 - DNA, 600 bp, Chicken  19866894386931_4
cataagcagagatattgagcaataccaagcaacagatacgttgcttccattttattattttatttctgtgagagcggtaaggtgctgcaacaggctgcccagagaggttgtggatgccccgtccctggaggtgtacaaggccaggttggatggggccctgggcagcctggtctagtattaaatggggcggttsgtggccctgcatgcggcaggaggattggaaactgatgatccttgaggtcccttccaaycygggccattctgtgattcttttgcctataagaaataaatgagtgtctrctgacttgaagggacatcattttcttccagtatcttccctcatcaacagtatatgtcctatgtgctagtgtatgatgtgagaatggtacagagtcataaactaagagtaaaataagaaaaatctcacgtgaagatttctaccactcctaccagaagctgaacaaagttgagttgaaagtcaattttcccttgttagaggctgacattttgttctccagaatctcagttttattacttataaagtttccaattcctgtaattataatgtgaacttaaacagctccagatcaagaaagtact

SEQ ID NO: 86533 - DNA, 600 bp, Chicken  19866894386936_1
gctccaagattctgcctgagtgaagagcagaggaaagggctgaggagctgctggctgggcagaggtcttcttttcttggcaggtgccgatggagtggctgaactggccacgttgggtgctcctctctgttaactgctgcttcccaaggcagcaaaattgaaccatagatttctgtttctgtgtctcggtgatcccatcttgaagctcaagaaactataaatactaggatcttttcacttgttattgaaatgtagctatttctgtcaaggaaggaggaagttatttaacagagcactgcartgctgtgtaacatctgaagtagcagcatgatgcatccaaccacgtgtgataagaaaaatttaggaagcaaaatgaaattgctcaaattgaaatacaaattaatagcacaattctcaaatagggccatgcgttctttcagggccaggaaaggaatttcatttttataaacaaggtgtcttctggctacgccatgtgcctcctgcagccctgtctgtgggatcttgccccactgccctcacagcaccccctcctgcagcatctgctgcctcactgtcctccaagtaggtgtgacccatcaga

SEQ ID NO: 86534 - DNA, 600 bp, Chicken  19866894386937_1
acttactgtagatattttctttattgactgggaaagacctaagggcagagttcttaaagcagttgaaggtaactccagctgtacttgttaatatacggaactttggttaaattttgatactgatccaaaatatgaaatttcagagctttaatgtgtgtattctttttaggtgaaggtgatgtaaaaagtgctgctgcacctgtgagcatatggagaacatattttatagccaatgaatggaatgaaattcagacagtgaggaagataaaccctctctttcaagtgcttgcagttcttttytttctggaggtattactgctatagttataattttttttattattcacatccaaaatgtaacataatagtctgtattttaattcctgcagactctgtggatgcctttcaagatcacttgcatccacgttgctttgtgaataactgttctgctaccttcttttatacttacatacaggtgtacacaccactgtgctatttcattaaggaagacttcaaagaaaaaacaaaccctccaagtaccttaraaagctccattagttttatttgttcttaagctaatgagttaccctaaacagctaa

SEQ ID NO: 86535 - DNA, 600 bp, Chicken  19866894386937_2
aattcagacagtgaggaagataaaccctctctttcaagtgcttgcagttcttttytttctggaggtattactgctatagttataattttttttattattcacatccaaaatgtaacataatagtctgtattttaattcctgcagactctgtggatgcctttcaagatcacttgcatccacgttgctttgtgaataactgttctgctaccttcttttatacttacatacaggtgtacacaccactgtgctatttcattaaggaagacttcaaagaaaaaacaaaccctccaagtaccttaraaagctccattagttttatttgttcttaagctaatgagttaccctaaacagctaagaggctgatacatttgtgtatgtgctcagttctttatttgcttacttgttccctgctgccacagtctacagctttatgtctggctttatatctgtctcaactggagttttctccctgctaatttgttacggtgaccttttataaagcaggaaatgaaatgtgccagttctgttcctgatgtcataacgtaaggcagtgttacagcttcagttatagctcagggatgtgtgagaaactgtgcttta

SEQ ID NO: 86536 - DNA, 600 bp, Chicken  19866894386939_1
tttttcagagattaagggttttttccatcgctgtagttctcattagttcagcacatgtatttcaattatagacttctttgtttgtttgggttgttggttttttttccaagaagagaaagggattttctttcctgctttccaggactaaaaggaagaaatacacattgggaaaaacaaaacaaagcaacaggaatatgcatccatagcagactgagttcataacttttctgtagccaattccaattactctgtacaaaggcaatatttaatctctttgttagcattagtatgttatgtacrttaagattaaatgatacctttctctcttctgatcacgtgtaaggagtataaccctattcagtcttgcttttgctaagagctagcccttgttgggtacacagtgcatcctcttgaagcacttggttctgctgtcccaagtctgctcagtgacatgttctgctgaattttaatttagggtagcatctgtatccagctcatatttaagggcttctagatagcagagagctcataaaacactgtcctcaagctctccagaattactttctttaaaaaataaaacaaaagaaataaccctaaatg

SEQ ID NO: 86537 - DNA, 599 bp, Chicken  19866894386942_1
  misc_feature (1)..(108): n is any nucleotide
nnnnnnnnnnnnnnnnnnnnnnnnnnnnnnnnnnnnnnnnnnnnnnnnnnnnnnnnnnnnnnnnnnnnnnnnnnnnnnnnnnnnnnnnnnnnnnnnnnnnnnnnnnnncctgtttttttttttcctgccaaaccgagagggctctgcttgctggcacagggaccttcactaatcatttcagaacagattggctgttgcattcccaaattctttaggctgaaggagaaataccacccagctgagcattttaacagcctgcactcagctggttatgtccacagattcctgactaccagctcrctcctcttaccccatgtccagccacagctgcaaagggaggggctttggaaaccattctccttcaccagcrgtgccccaggttccygctgctgggtgcctcgtggcactcggacactgcttcctccccaggcagtcccagccttgtagaggaggggtccctctctgttttgctgagatgaatccatgccaaaatactctatgagtctggggaggtgagatccccgttctctgcaccaaaagctgccgggctgagcagacctgttcccaacaggagccacctatgataccacctcttgttc

SEQ ID NO: 86538 - DNA, 599 bp, Chicken  19866894386942_2
  misc_feature (1)..(38): n is any nucleotide
nnnnnnnnnnnnnnnnnnnnnnnnnnnnnnnnnnnnnncctgtttttttttttcctgccaaaccgagagggctctgcttgctggcacagggaccttcactaatcatttcagaacagattggctgttgcattcccaaattctttaggctgaaggagaaataccacccagctgagcattttaacagcctgcactcagctggttatgtccacagattcctgactaccagctcrctcctcttaccccatgtccagccacagctgcaaagggaggggctttggaaaccattctccttcaccagcrgtgccccaggttccygctgctgggtgcctcgtggcactcggacactgcttcctccccaggcagtcccagccttgtagaggaggggtccctctctgttttgctgagatgaatccatgccaaaatactctatgagtctggggaggtgagatccccgttctctgcaccaaaagctgccgggctgagcagacctgttcccaacaggagccacctatgataccacctcttgttcactcagagccattcctcccyctttgtccccgattttggtaaattaagacacagctgcaggtgccgagagg

SEQ ID NO: 86539 - DNA, 599 bp, Chicken  19866894386942_3
  misc_feature (1)..(23): n is any nucleotide
nnnnnnnnnnnnnnnnnnnnnnncctgtttttttttttcctgccaaaccgagagggctctgcttgctggcacagggaccttcactaatcatttcagaacagattggctgttgcattcccaaattctttaggctgaaggagaaataccacccagctgagcattttaacagcctgcactcagctggttatgtccacagattcctgactaccagctcrctcctcttaccccatgtccagccacagctgcaaagggaggggctttggaaaccattctccttcaccagcrgtgccccaggttccygctgctgggtgcctcgtggcactcggacactgcttcctccccaggcagtcccagccttgtagaggaggggtccctctctgttttgctgagatgaatccatgccaaaatactctatgagtctggggaggtgagatccccgttctctgcaccaaaagctgccgggctgagcagacctgttcccaacaggagccacctatgataccacctcttgttcactcagagccattcctcccyctttgtccccgattttggtaaattaagacacagctgcaggtgccgagaggtgttttggtgttctg

SEQ ID NO: 86540 - DNA, 544 bp, Chicken  19866894386942_4
agccacagctgcaaagggaggggctttggaaaccattctccttcaccagcrgtgccccaggttccygctgctgggtgcctcgtggcactcggacactgcttcctccccaggcagtcccagccttgtagaggaggggtccctctctgttttgctgagatgaatccatgccaaaatactctatgagtctggggaggtgagatccccgttctctgcaccaaaagctgccgggctgagcagacctgttcccaacaggagccacctatgataccacctcttgttcactcagagccattcctcccyctttgtccccgattttggtaaattaagacacagctgcaggtgccgagaggtgttttggtgttctggggaggtggagggtgagcagcaggtatctggcaggcagtgaacagggaggggagctgtcggtagaaagcaagatggaacaaatgaatgtagaaaagccagagagatgtatgagcttctactggagtacttccaggatgtaatactgaataaaggaaactgtcttccatttaattccaag

SEQ ID NO: 86541 - DNA, 599 bp, Chicken  19866894386944_1
  misc_feature (1)..(104): n is any nucleotide
nnnnnnnnnnnnnnnnnnnnnnnnnnnnnnnnnnnnnnnnnnnnnnnnnnnnnnnnnnnnnnnnnnnnnnnnnnnnnnnnnnnnnnnnnnnnnnnnnnnnnnnnccgcgccgtccactttttccctcccccttggaagcgcacttcctttgaacgcgctccgtctgcgaacaaaggcggcccggcccggcgcggcccctccgcaccgcccggcacggccgccccgcgggtcgcgctccgcgccgctcctaccgggagcgacttttccgggcacggcctcctcggcgctgccgcgaccgcsactccgtcttttttggatacgacgtttctgctgactcccgaaaattttccactcgaacgtgcgacgaagcggcggcggcggcggctctggagaaggagacgcggcggggagagcggcatcgctgcctccatcccctgaggggctgcgcgcggccgggggctgcacagcgcgagccgccaacttcccgcgggtaaataggtgcgaagcggcacggcgcggtgcgaggcggcggtgtgcgcgcgcgtgtgtgtgtgtgtgtgtgtgtgtgtgtgagtgcgagtgcgtgtgtgtgcgcgccg

SEQ ID NO: 86542 - DNA, 599 bp, Chicken  19866894386946_1
  misc_feature (1)..(31): n is any nucleotide
nnnnnnnnnnnnnnnnnnnnnnnnnnnnnnncctgcagaatcattatgaggttcacccaggaggcagagcagaggcaggacaggaggcgatgcaggctacatctcatatctacagcaagcctggacaggagacaccaaatacaacttgaacttagctcaggccaggagtgaaggcccaggcttgagactgaccactgacagggtccagctgaggaaaatcggggccatcaagacctcatagtgccctcaggctcctgaggtatagttgccctcaaagccattgtcggttttgagaactcyttgctccttattcattactacatgtaggacaagtggtgaacaattttaggtgcttgcagcaggcaaagggaacagcagcagcagcaggactaaacccagtgttcaaattctactgtaaagactaagatgaaaagttcattgtcacaagttcagctgaagagtactcaggactccgcctacttaagaagaaacaaaaggagctaaaaattagattattttggatcttgtatgtagctgcaatattgtcaaactcagagaagtgagaagatatatcacattagattactcccctctgaatt

SEQ ID NO: 86543 - DNA, 495 bp, Chicken  19866894386954_1
aaatagtacatacatacacttttgtgcgtctaaagcaaagatgcaagcccaaagcctgtacaaaaagtacttgctgatgttacctctacaataataataataataatcccatatttagtacaggcacattcactcaggaagggaaatccctacaagaaactgaaagtttctgagagtccatgcttcataaaaattcatgttctttctgacacattcaattgtgatagcaataggaggcaaaaatctaagcaaggtgtaaaaagcaatatagagagactgcttgtttcttaaaaaaaaaawggcttggacaatgtaaattacccaacagcattctcatgacatgactacttttgaggaaaaaaaacaaaacagaaacaactggttaaaaaatagtatttacagtttcattcaatgaaaattggcttacaaagagtaaacctccctaatataggcaatttatagtaaaattttattaatatatgattttcaaataaa

SEQ ID NO: 86544 - DNA, 599 bp, Chicken  19866894386960_1
  misc_feature (1)..(150): n is any nucleotide
nnnnnnnnnnnnnnnnnnnnnnnnnnnnnnnnnnnnnnnnnnnnnnnnnnnnnnnnnnnnnnnnnnnnnnnnnnnnnnnnnnnnnnnnnnnnnnnnnnnnnnnnnnnnnnnnnnnnnnnnnnnnnnnnnnnnnnnnnnnnnnnnnnnnnntccgccagctcccatccacactgacacaaagcagtgatggctgcgggcttgcagagggatgctctgggggggggttcattaagatggagagggccacgggagggttttcatccaatggctccaaggggacaaagtttgggccaatttcckatggcgatccccatgaacgctgcccaaattgccccacggagggggaatttccacattaagccgaaccaggaaagggggaaaagctgcttctgcgcaaggcaagatctatttatatgctgcagaaatcgacctccagcctgttaccatagataacagcattatttctctgctgttatccccaacagcttcttttttccccctttattttgccctgatccagcctatggtctcagaagctactctctggctttaaagcgaattacactgggggagctgggacgagggagctgctcccaaca

SEQ ID NO: 86545 - DNA, 600 bp, Chicken  19866894386971_1
ggcctgtttctggatgttcaagccttcagctttgtcagcaacacaatgtagtgatcagatttgatagtttgttcacattccagaaaatccagaagaattagccccttcttatcccaaaagacaatgcatatcactttacccagtgaggacaacgtcctgaactttatctttgatagggaattcacatgttgccactctatggactgctattttgactttgtctcatagtgatgacacgtctcatcaccaataacgatgtgatccaggaagccatcacttggctgtgtattgtttcaatargtcctgccaaacttacagtgctctttctgcttctgtatgaccattcatgggacctacctggtgcaatctttgtgatattccaatgtttctgtcatcgtttccaakgagttgaagcccatattcagctccatacacagttcactggtcataatccactgattcgtgcaaatgagatgtccaagacactcttcattttgggggtgtgacagctgcatacagctgtctggaaagcggcatgtttgtcatgtcattgttgccactgctgaaatgcatcatctaccacctcactatgcccacatc

SEQ ID NO: 86546 - DNA, 600 bp, Chicken  19866894386971_2
ttcttatcccaaaagacaatgcatatcactttacccagtgaggacaacgtcctgaactttatctttgatagggaattcacatgttgccactctatggactgctattttgactttgtctcatagtgatgacacgtctcatcaccaataacgatgtgatccaggaagccatcacttggctgtgtattgtttcaatargtcctgccaaacttacagtgctctttctgcttctgtatgaccattcatgggacctacctggtgcaatctttgtgatattccaatgtttctgtcatcgtttccaakgagttgaagcccatattcagctccatacacagttcactggtcataatccactgattcgtgcaaatgagatgtccaagacactcttcattttgggggtgtgacagctgcatacagctgtctggaaagcggcatgtttgtcatgtcattgttgccactgctgaaatgcatcatctaccacctcactatgcccacatctgctgtttgatctccattactgttcagcaaatattgatgaatgccaatgggtgcaattgtttctgcatggaggaaatttaggtccacccctttgtttcatacaca

SEQ ID NO: 86547 - DNA, 600 bp, Chicken  19866894386987_1
agttatagttcgtgctactgttgtttgctgagaccgcttcacttccagaacaagacagttaatgcatttgctgcttttcttaccttgcatgtggtggtgtttatcatcacatggttagggaaagagtaataatgacagatttcatttgtctaacatgtttggattatgtactgcaacaccactatacggagaaagtttcccaggtgcacattgtcaactatttgcaatgttcgttagagaaattgctgtgtcctgtgtagagcaatctgcttccacacttgttattgaattgctgttaawtgtatcaggtagtaagatggctttggtttagcatatgttctaaatcaaggtaacaacgtagtaaaacagaaacagcactcctaaatgctgtgtttttacagtaaacgtagtgcgaatacttgtagcaacccaaagtaccccgatatgctctttaagtagaatgacacttcctttcactatcatcttttccaccttactgagatgaaaaataaatgtaagaatgctctgtttatctttataataaaaactgacatttctragaaagttgtaagttagggtagcatcacgcatacaaatgta

SEQ ID NO: 86548 - DNA, 600 bp, Chicken  19866894386987_2
gagcaatctgcttccacacttgttattgaattgctgttaawtgtatcaggtagtaagatggctttggtttagcatatgttctaaatcaaggtaacaacgtagtaaaacagaaacagcactcctaaatgctgtgtttttacagtaaacgtagtgcgaatacttgtagcaacccaaagtaccccgatatgctctttaagtagaatgacacttcctttcactatcatcttttccaccttactgagatgaaaaataaatgtaagaatgctctgtttatctttataataaaaactgacatttctragaaagttgtaagttagggtagcatcacgcatacaaatgtatgaatacagagttaaaccctacagcatataaactggaagcagactttgtcatggcatcgtgtagaaatgaatgagctgcatgctgcgtgaacagtgagctgactttgtgttgaagtaaatataaaggtgacatgtctagcggtgtttcttttctagcagtgtgccatctcctaccttttttttttttcctgcaaagttgcactcaatgctgtgttctgtggcagatgttcagtctttaggcacatactagtttgcaagt

SEQ ID NO: 86549 - DNA, 600 bp, Chicken  19866894386987_3
tttgcaagtttaaaacaaataatcattccaaaatttgtctgctactatctgaaatggagtcataggcattgcttggcccggagctgcaagtcctcagcctctacgtgggtgtaatttaaacttgcagttttcttctgaagtcagtgtagcactaacattttcttctgccctgtatgtcatcctcagttcttgtctttgcaattacagaagctcagctatagctgtagacacagagggagaaaagagaaatgtagttgagtcacataaaatttccagtagaaaatgtcatgagctgaaagytcttactggtttaatagaaaaggttgtcatgctgttggactgcatggtagtcgtcctagcctgaggttttgtagtagttacatgaagatttgtaagctttgtctgtagcaattaaccctcatattcagagaagtgtggccagaagcttaggatgctgttggatgcaaaagtgaattagctaagtcatgattcacagtggctgatctgaccttgggaaaatacatcatcctcagatggcaaagaaactttgtttcagtggatgcctggcatgaaatattgtgttaacttggcagagctgag

SEQ ID NO: 86550 - DNA, 600 bp, Chicken  19866894386996_1
aattcaacagaccacttcagtaatagcaatgcatagctgaccaactgtgacttaatgctaacagtctaaaaacttactgggctctgatagtctcaaactctttgattttcattacagtaatctgcttttgtttctccaaatcagatgatgttttctttaatttaccaacaagtgaagcaagagaattgtcctgttctactacagtttgctccatttcagctaaacggaggaagtgtttgttgctattaagtgataaagaaggattttccattaaatcctgcaaaacagaacaaatgtgtstgataaacatcttacacttcaaatcacagattagtgatgcattttaaactcaattctaaccaaacattagtatttagcatgtttatttactgtgatacaattcctactactttgaaaagaactttgcacatggaaaaatctacagaataaccgattacatatgggtgtcaccttatcatcaattgccaaaggaaaatctgcattaaaatggacttaatgcaactgactgaaaagaataaagaaaaaataaacctaccttcttccctgtaagcctatagattagaatggaaagaatgatgt

SEQ ID NO: 86551 - DNA, 600 bp, Chicken  19866894387021_1
cgcctccgggaagggaaacaggggaccacaaaataattaaaaacagcggcaatgatctgaggagaaacaaactaatttactaaatatagtatcggaatgtaagataacacactataatacaataaaaatcaaaagtaattgagagaaagattgtccgagagccaaaggccttacgctagtactgaagccttgcatgcagtcaggagcagcagtagtgagccgatccgacagggaacacggcgagatgagaagagggccgagtcagatgacctgcgcccttatatctgttcccttgagcakaaatgataacagtattcaaaaaggctcttggggaacgtagttcttcttttcttccagacaggtacccagaactaaagcatttgctctttaactcccagtacactgcatgatgttgtgatgtggaatactgataaccaaaaatcataaaaccatgacaaaccttctctgggaccattaaagagctagcctccaaaaggagaatattttctggacaaagactattttctgagaaggagtgttttacagttagagagccttatcaccagatgagaaagtsaattttttcttatgcacgatcat

SEQ ID NO: 86552 - DNA, 600 bp, Chicken  19866894387021_2
cttatatctgttcccttgagcakaaatgataacagtattcaaaaaggctcttggggaacgtagttcttcttttcttccagacaggtacccagaactaaagcatttgctctttaactcccagtacactgcatgatgttgtgatgtggaatactgataaccaaaaatcataaaaccatgacaaaccttctctgggaccattaaagagctagcctccaaaaggagaatattttctggacaaagactattttctgagaaggagtgttttacagttagagagccttatcaccagatgagaaagtsaattttttcttatgcacgatcattggtattgcaaagaacttgtcagaaacagttatactgcttcctaggaccaacagaagggtaagacagggttttttgctatttagtctttcccttctgaagattttcatttccaagcagatgtaaaagtgctaaacctttctagagggcattagggatgatagttgctttggttcagatagtgagagaagagttttctctgaactgtgtactgttgttacacaaaaaatactctaggcaggatataatgctggggtaacttacagttggtctcctagg

SEQ ID NO: 86553 - DNA, 600 bp, Chicken  19866894387038_1
gaacacctcaaaatcccagctgcttcagggagtaaaatgctctgaaatccccaagagaggtaaagttcagcacaaaatgtgaatgctgtctttttttcactttaagagcaggcaagctgctgaccagtgatgctggcattgtccttattccctccagcgttttgttttttcctgtttatcttctaaaaatcattagtgctggcattgtctcctacctcaagacagtgtgaagtgttgtataaatgttgtataaagcattgctgagtgcctgcctaatattttcctgaaaagattctgggmtccctggcagacttgcyttggcagtctgagttggattgaagataaagaaatactcatgtagcgtccagttcaagcacttcttttctctgagttatcattgcattgtgcttagctgtgcactcagtactattttcacctggctacaggtagttacagatggatatgatgtttcccacgttgaaccaagycctgggcagtctggggaagactaggcagagtgagtcactgtggtgtttcagacaggattgaggctgttgttgaataatgttgtaacaggtgaagctcaccctgaaatgtaag

SEQ ID NO: 86554 - DNA, 600 bp, Chicken  19866894387038_2
agctgcttcagggagtaaaatgctctgaaatccccaagagaggtaaagttcagcacaaaatgtgaatgctgtctttttttcactttaagagcaggcaagctgctgaccagtgatgctggcattgtccttattccctccagcgttttgttttttcctgtttatcttctaaaaatcattagtgctggcattgtctcctacctcaagacagtgtgaagtgttgtataaatgttgtataaagcattgctgagtgcctgcctaatattttcctgaaaagattctgggmtccctggcagacttgcyttggcagtctgagttggattgaagataaagaaatactcatgtagcgtccagttcaagcacttcttttctctgagttatcattgcattgtgcttagctgtgcactcagtactattttcacctggctacaggtagttacagatggatatgatgtttcccacgttgaaccaagycctgggcagtctggggaagactaggcagagtgagtcactgtggtgtttcagacaggattgaggctgttgttgaataatgttgtaacaggtgaagctcaccctgaaatgtaagtgcctgatggatgcact

SEQ ID NO: 86555 - DNA, 587 bp, Chicken  19866894387038_3
atcattagtgctggcattgtctcctacctcaagacagtgtgaagtgttgtataaatgttgtataaagcattgctgagtgcctgcctaatattttcctgaaaagattctgggmtccctggcagacttgcyttggcagtctgagttggattgaagataaagaaatactcatgtagcgtccagttcaagcacttcttttctctgagttatcattgcattgtgcttagctgtgcactcagtactattttcacctggctacaggtagttacagatggatatgatgtttcccacgttgaaccaagycctgggcagtctggggaagactaggcagagtgagtcactgtggtgtttcagacaggattgaggctgttgttgaataatgttgtaacaggtgaagctcaccctgaaatgtaagtgcctgatggatgcactgtgtggtctgggcaggctttaacttatgtatgtggaagcagtctcttccaaatacttggaagtgaaaattggtttgccaaaatcatgtattagccattcaactccaccatttagctctttaaaattcctgctcagcccctgccaaactaggaaggctg

SEQ ID NO: 86556 - DNA, 600 bp, Chicken  19866894387042_1
ctgaataaaccaagctgcagagcatgcacagttccatgggagagagtcaaatggagctggtgtcagcaggaccaacagaaacagccttctgattctaggagatatctgcactttactgcagtgagtaatactgtttagtatgggttggagtatctcttatttgacttttacttcttttcagggatacaaatttcccccgacaagcccaagggatgtgtaactaaatcaactaatctggagaaatggacagtcatgcgttcagggctacacactgcttaggaaccatgggaggatcaatgragaagctcctaagggattatctctcttacctctcagtgatttttgtggtgattctgacagtcacttagagaggtggcatttaatctttaaactgctgacagaactgaggtctcaaggtgaaactcagccatatgctgagcagcaaataaccttgctggtgcattctacccactgctataactaaggatgatgaagacagcacaaaaacaccatgggaatggtcagtaatcaggagtctctacaatatctgattagtaaactattaatgctatgctttcccccaactcttcaaggcagagc

SEQ ID NO: 86557 - DNA, 600 bp, Chicken  19866894387046_1
tcctaattccagaacatttttgatttttggttgttgacgtttttagtaactatagaacagtacttcatatattgccaatatccttgttgacaaaacaaattacttagtatgggagttagaacatccaaatctggtccgaaacagtctcaagtaaaatatgtttgtgaaaaaggtagccttgttgatgtttggctgttgatttgggtaaaaagctgagtgtaagctcctcctagcacactggctcaagattcagcaaagatgacttaggaaaattcattttagtttttatttgagcagacraggtaattgcacatggtctgttatcctgtcagaactggcgagtgattattagttaagccttggtaacctggtttcctgttagggtctatctgcaagtgttccttatcctctcatagatagttggcagtaaatgaaagcactcargaggctccatttggaaagcagaacttgatggtgttgaataccatcttcctagaaaatttctggagaaagagacttttagcactgtgagatctttaatacctatcacattatatctggagagagaaattccactaaggttgtggcaattccattatt

SEQ ID NO: 86558 - DNA, 600 bp, Chicken  19866894387046_2
tctcaagtaaaatatgtttgtgaaaaaggtagccttgttgatgtttggctgttgatttgggtaaaaagctgagtgtaagctcctcctagcacactggctcaagattcagcaaagatgacttaggaaaattcattttagtttttatttgagcagacraggtaattgcacatggtctgttatcctgtcagaactggcgagtgattattagttaagccttggtaacctggtttcctgttagggtctatctgcaagtgttccttatcctctcatagatagttggcagtaaatgaaagcactcargaggctccatttggaaagcagaacttgatggtgttgaataccatcttcctagaaaatttctggagaaagagacttttagcactgtgagatctttaatacctatcacattatatctggagagagaaattccactaaggttgtggcaattccattattgtacagagagagatcttgcaaggttggccagatcttttccaagagtaaagtgtgaggggtggtaccagttgtgaatgcaaataatttagctgcaagagcttatttttatggttatgtctatcacatccagacaatcccaaagta

SEQ ID NO: 86559 - DNA, 600 bp, Chicken  19866894387054_1
gcaggaacccccaggacctcaaacctgcaggcacatgaggaaggtgctgcacaaatccagcagcacagagaggaaaggatcaaaatcactgcccagtgagtgctggagataggaaatattttgagagagctccaaagagagggcagcaccaggggcgatgcatgctgcatcctgcaactattcagcaccagatccccccaggcatcacagatcagagtcccccaacacccttcaacaggagacttttcaaattcaagatttaaggcaagcaacacacgagtctgcagtgcaggatccccytcagacatcaccattggggaattcaagagcatggaagggtctcacagtgctatgctctttkttgttgctgacagcacacagcccatcacctcttgtggggctgcatggggacaacggagcccatgacctcatagaatcatatcagcatagaattatttgagttggaagggacccttaaaggtcatctggtccaactcccttgcaatgaacagggacacctacagtgctcagagccccatccagcctgacattgaacatccccagggatggggcatccaccacctctcagggcaacccatg

SEQ ID NO: 86560 - DNA, 600 bp, Chicken  19866894387054_2
agcacagagaggaaaggatcaaaatcactgcccagtgagtgctggagataggaaatattttgagagagctccaaagagagggcagcaccaggggcgatgcatgctgcatcctgcaactattcagcaccagatccccccaggcatcacagatcagagtcccccaacacccttcaacaggagacttttcaaattcaagatttaaggcaagcaacacacgagtctgcagtgcaggatccccytcagacatcaccattggggaattcaagagcatggaagggtctcacagtgctatgctctttkttgttgctgacagcacacagcccatcacctcttgtggggctgcatggggacaacggagcccatgacctcatagaatcatatcagcatagaattatttgagttggaagggacccttaaaggtcatctggtccaactcccttgcaatgaacagggacacctacagtgctcagagccccatccagcctgacattgaacatccccagggatggggcatccaccacctctcagggcaacccatgccagtgcttcactactcttatcataaaaaaacttcttctttctatccgatttaaatatttt

SEQ ID NO: 86561 - DNA, 600 bp, Chicken  19866894387055_1
ctgatgtgtcatacgttgtctccaccggaattattctctgaagtttctttctactgcagctccgttagcctcaagtatgttaatgactgagtcatcaaaccttccttggaagagtctgtgcagcactgaataaatgccagtggtttcgctggaggaaacaagctagtggagaccaaccttgtgtccctcctgtgtttgcaggttgtgtactgctagtccaaacctggagcggctctgtggctatccagtaagtctgggatgcccattcaaacaaaagcctaaggagcagccacatgcacrgtgttgctgcggcagtggatttacagatctctgcagtctcagctctrttaggaagaagagccatcagccccctctgctcatctctgttctcccccctccccgcgttgctgtgcctggccctcagcactcacatcccctctggttctctcatctccagaaatgatgttaaccaacttctcaggccttcatagagtcacagaatggcttgggttgaaaggtacctcaaagaccatctagtcccagcccccctgcctcagactgctgtgcagcgcgactgaatgagacactcaatcaggttgc

SEQ ID NO: 86562 - DNA, 600 bp, Chicken  19866894387055_2
tttctactgcagctccgttagcctcaagtatgttaatgactgagtcatcaaaccttccttggaagagtctgtgcagcactgaataaatgccagtggtttcgctggaggaaacaagctagtggagaccaaccttgtgtccctcctgtgtttgcaggttgtgtactgctagtccaaacctggagcggctctgtggctatccagtaagtctgggatgcccattcaaacaaaagcctaaggagcagccacatgcacrgtgttgctgcggcagtggatttacagatctctgcagtctcagctctrttaggaagaagagccatcagccccctctgctcatctctgttctcccccctccccgcgttgctgtgcctggccctcagcactcacatcccctctggttctctcatctccagaaatgatgttaaccaacttctcaggccttcatagagtcacagaatggcttgggttgaaaggtacctcaaagaccatctagtcccagcccccctgcctcagactgctgtgcagcgcgactgaatgagacactcaatcaggttgcccagaacctcatccaacctggcctcgagcatggatgggtcccagtgt

SEQ ID NO: 86563 - DNA, 600 bp, Chicken  19866894387057_1
ccctttgtgctcatttggagcagctgctttctcactgttctcccagtgtgtgaggtttccctcccaggaatgtgcaaattccctaaataaatgctgcatgtggagtctggagagtgggagggaagcacttctgctgctgcacacgcagtgctgctacgtggcgtggaggaccccgaggagatggacacactgtttagcggtcactttccacgtgcattctcatcctcgctgattaccacaatatctgtgtataaatagcagctctccctttttatatccttctcctgcctgattcatttsgtgatgcagggttagtgacatttgattcgctaccatggcgattgcaaaacgaagatttcataaacattggactgggatgtgtcctgaatgaatcagccaggaggaggaggacgggcaatccctgggggagctgcacctgagccagccttggccctgttcccagatgaagaaaatgagcacaaggatgatgtgatattagtatggagcaagaaaagaataaatctatagggaatggaagagtgcagagggggcaaatctgctaggaaaaacttctatatcagaggtgtgagtcaaagatag

SEQ ID NO: 86564 - DNA, 600 bp, Chicken  19866894387062_1
tgttaatttccactgaagtcaatcacaagttaatttaggaggttagctgaccaactgcatgctgagcacccagcaggttggcagtaaagcagatcacaaggccatggaagctctgtttccttgggaagcagggctgaaagctgtgctcctgcagtgctagggctggctgttctgctctgctccctctgcaccatgccagaaattgccagttttgcttctgcttgaaaaaaaataagtgtaatgaatacaaaatgaaaacttctttaaagagcagtaactgattacctatgctgctctacracttgcataagctgtttcataattgtttcttcaaatacctaacagtcacaatgayggacatcacgtgattttggaaataaagcacctgcaacgttcacttatttttactgatggagttaaaacagatcacatatccaaaattagatgccttaattggaggcatcctaggtatcattcctttttaagggaatgatgtattttaaaccctgaagaatcagcaggaagaatagtctgtgctttgattaaagatcctctaaaaatacacacaaatattttaacttaataatgtcactggagcta

SEQ ID NO: 86565 - DNA, 600 bp, Chicken  19866894387062_2
tgcatgctgagcacccagcaggttggcagtaaagcagatcacaaggccatggaagctctgtttccttgggaagcagggctgaaagctgtgctcctgcagtgctagggctggctgttctgctctgctccctctgcaccatgccagaaattgccagttttgcttctgcttgaaaaaaaataagtgtaatgaatacaaaatgaaaacttctttaaagagcagtaactgattacctatgctgctctacracttgcataagctgtttcataattgtttcttcaaatacctaacagtcacaatgayggacatcacgtgattttggaaataaagcacctgcaacgttcacttatttttactgatggagttaaaacagatcacatatccaaaattagatgccttaattggaggcatcctaggtatcattcctttttaagggaatgatgtattttaaaccctgaagaatcagcaggaagaatagtctgtgctttgattaaagatcctctaaaaatacacacaaatattttaacttaataatgtcactggagctacagtatgtgaaatgacctgggcaaggacagggactttgtgctgctgatgggtttt

SEQ ID NO: 86566 - DNA, 526 bp, Chicken  19866894387063_1
ctttggtctccacctccatggcctttggccaaagtgtccattccaacacattccattgaattccctgctctggcacggggaatccaacaaggagggctccagggctccaaaaggaaaagaaggagcggaggcagaggtggggggcacagcctctggggcagggggttccccccacaccctggaggctcccagggagcatgtctgcatgtgtgggattgagcaggatccctttgaagcccagataagctgagggagcattccaaacaagccaaaccagttccagggccatcgctttgaacrgcaccacagccagcactggccaatcccctttgcccaccaccattcctctgctcagccctatagggatatggcgagccacccgygtggggcaggggttcaactttgtctcccccaccccatgagacccaacaagccccaacatgacattccctccagggyagggcgagctgctcggcaaatgcctctccctattgctccttgaaaaagtggagacctccaacactgg

SEQ ID NO: 86567 - DNA, 443 bp, Chicken  19866894387063_2
ccaacaaggagggctccagggctccaaaaggaaaagaaggagcggaggcagaggtggggggcacagcctctggggcagggggttccccccacaccctggaggctcccagggagcatgtctgcatgtgtgggattgagcaggatccctttgaagcccagataagctgagggagcattccaaacaagccaaaccagttccagggccatcgctttgaacrgcaccacagccagcactggccaatcccctttgcccaccaccattcctctgctcagccctatagggatatggcgagccacccgygtggggcaggggttcaactttgtctcccccaccccatgagacccaacaagccccaacatgacattccctccagggyagggcgagctgctcggcaaatgcctctccctattgctccttgaaaaagtggagacctccaacactgg

SEQ ID NO: 86568 - DNA, 367 bp, Chicken  19866894387063_3
agggggttccccccacaccctggaggctcccagggagcatgtctgcatgtgtgggattgagcaggatccctttgaagcccagataagctgagggagcattccaaacaagccaaaccagttccagggccatcgctttgaacrgcaccacagccagcactggccaatcccctttgcccaccaccattcctctgctcagccctatagggatatggcgagccacccgygtggggcaggggttcaactttgtctcccccaccccatgagacccaacaagccccaacatgacattccctccagggyagggcgagctgctcggcaaatgcctctccctattgctccttgaaaaagtggagacctccaacactgg

SEQ ID NO: 86569 - DNA, 600 bp, Chicken  19866894387067_1
ttgcccaacatttcacaggggctgccacagatggtgactgaagtctgcactggggaaaatccagttccgtgcaggtgaaccactcctccattcaagccaccttggaaaagaacagaaaatgagatgtaagacatagcccagtagccagcaatcaagaggagtatttctatgaactcaaaatttttgtcgtcgtgcaaaaaaataagaacaaaaataatcacaatccatcacacagcacctcttggaggaacgaccatttgtgacttaccccagttgcaacgcacagctgtcaccatcagmtgagagatgaaggtcaggttggaggaggcccagcccctagggacatccaggcccagcayggggtattcaccagcagggagtagaggaggagaacactgcagctctgagtgggtgatggtgacacccctacaagcagagtccccaacaaatacgtggatggtgtccatctccatgacctgtgatacatttattgttaataggaggccagtcacaacaagtgaaaggaaagctggtgtagactcctcattgtaactgatttttccaacatcataggagatgccatctactgtcagtctcaga

SEQ ID NO: 86570 - DNA, 600 bp, Chicken  19866894387067_2
tccagttccgtgcaggtgaaccactcctccattcaagccaccttggaaaagaacagaaaatgagatgtaagacatagcccagtagccagcaatcaagaggagtatttctatgaactcaaaatttttgtcgtcgtgcaaaaaaataagaacaaaaataatcacaatccatcacacagcacctcttggaggaacgaccatttgtgacttaccccagttgcaacgcacagctgtcaccatcagmtgagagatgaaggtcaggttggaggaggcccagcccctagggacatccaggcccagcayggggtattcaccagcagggagtagaggaggagaacactgcagctctgagtgggtgatggtgacacccctacaagcagagtccccaacaaatacgtggatggtgtccatctccatgacctgtgatacatttattgttaataggaggccagtcacaacaagtgaaaggaaagctggtgtagactcctcattgtaactgatttttccaacatcataggagatgccatctactgtcagtctcagagccctagtaccattgcctgggggcaccgtgcactggatggctatgcaggtgacattgag

SEQ ID NO: 86571 - DNA, 600 bp, Chicken  19866894387076_1
gcaccaaagttacagagctccttactgaaggagctgattctaaaagttggtttgtcttcagaaggcagttaggcaggttcttggggacaggaaaaatattcaagtttggtgagtacaaagtcatatctctgttgtttgggacacatgaacagcaactgaggcagaggctggaattcggaaaggaaaatggtcacctgaactatcaagatgttactgatccggccacagacttggatttactcctttttgcaacaactgcgtccaaagagtagacataattctgtccctcataacttaaartgttttgattggaaggaaaacctggggacatagcctaggactcttctatgagagtacaacgtgggtatttttttagtctgtatatttggtcattaagctgataggagcatatatatgaagttgtgacttgttcagtctgtgagcatctcaagcgtattctgctacagtactgttttctaaaggtaaaagaattgaaatccgtttcatcctgagtttccctacttgatacttctctgcacagtttttctgattccttcattataagtaggtgctaaaggaaaagttaacttttgtcagtaa

SEQ ID NO: 86572 - DNA, 600 bp, Chicken  19866894387088_1
tgtaaaacagtgtccagggaagaaacttggtggatcctgggggatgagagaggcctaccctccaggtgcctcaggctcataaccatactggtacttaggtgattgctgcaaccaaccgtgttgatatcttggacccagctttgctccgctctggacgattagatcgcaagattgagttcccaatgcctaacgaggaggccagagccagaattatgcagatccattcacgcaaaatgaatgtcaggtatgggataggtgtgacctggggctgtgtttgtcatgaatgctgatggtatttcrgggctatggagtggtaggtaccctcctctggtgagagctcccttgggtttacggaagctctgtaccctgcttctgtttggcatatgttctcacacttctttatctccccactctaattagccctgatgtgaactacgaggaactggctcgctgcacagatgacttcaatggagcccagtgcaaggctgtatgcgttgaagcggtaagtaatcctctagagcagccagcacgcacaggagggaaataattaccaccactccagctttcttaatgtgaacctcaccaaaatatgtcttgttg

SEQ ID NO: 86573 - DNA, 600 bp, Chicken  19866894387088_2
aggttcaagcaaagaaaaaagccaatctgcagtactatgcctgatctctgcccagtcaaggcagtggccctgggagaggacaggactagactggactgtaccactttctgtctggaaaaaataaagcatttttttcctctaaaatgatgatgtgttggggccgttgccctcgttcagtggttctacatctacagcagggaaggtaagaacctcctgtcctcagtgcccatcatgctgcccatggattaaatcctgctctgctacttcaggaggaccaccaggtaatacggcagtaagtgkactttggaatccatgatctgcagctcagacagcatcccctggttttacaaacaggctgtacacctttgtcagaatctttaaaaatttttcagccaacactcagctctgcagtggagaggtgaacaggactcacacctgaatgatgttttaactttttcatttaagcttaaacttaactctggaagctttgacaccattgctgggatagatgggagttatgggtgagtgagtctggtaattgataaaaaaagaattcacgattacatccactgagcaagtcgttctgtacttttaatgcca

SEQ ID NO: 86574 - DNA, 600 bp, Chicken  19866894387094_1
gtgtctcccatcactgccttggagattccctgctttcttatctgtctgttggttcgcagacaaagctgtattacaaactcctttctgtggctaactcttagcttaactttttgttctcagccccaccaaagagagcacagcccaaatccttctctcatcagcatccaaacatcacatccttttctttggaaaagattaatgacctaattcatttatagaaattagttggtaaagattgttttttcttccccagaatatgtagttttcctccatttgtaattgcagtacattgatggattygtggatattcataacaagatctgtcatcgtttcttgctgaattagcatatataacattagtcatgcatcaagttcccaatgtgaaatcacttgaggctccattaaaagtataagcaaagtatttgcaaggtagtgataaggtaaaaagtacccaccagtatctttcaacagaagctgaatgtttacagtgtattctgcatattctgattttgtttttgcttttaaaaaactgccactgatatagggatgggcttgacttcacacctactttcttaacatcttgaaaatatcttttttcct

SEQ ID NO: 86575 - DNA, 600 bp, Chicken  19866894387096_1
gagagtctaaaaatgatgcttcatttattaaataatgcaaaaattatattcggatactgctggagatttttgttagacctttctaaatatcacagctgaggctgaaaacatttgacttcagttatgggaggcaatagtgagaacaggacatactgccaaaaaattccaattttttgcttgatttgaaatgaatatgttcttggaacagcacctgtcactgtttcccaatctttgtaccagaaaaaaatgatccttgcctattttgaaaacactgagatcatttaataaaagctttcatawtttttttccctgataaaaaaaagcctttgcacttaacattgttcctccacagcatgggtctgctacatccagtagttgtagcagtggaagcagcaatggcatctatggtagtagaatgtgaagtaacttcaaatttacactgaagctgtaaaaattgtcatagaaaattcaggaaaaaatggtacatagtgacacaattctaaggcttattgccagattttgatatccagtttgccagctgtactgtgcactgcccagctgattcaaaccatatgccttgagcaaacaatcacttaagtg

SEQ ID NO: 86576 - DNA, 600 bp, Chicken  19866894387100_1
accctaattcaaattatgtagctgtgtctcagtttcttctcttatctttttattttccctctttccttgtctgctttttcctcttgtctctttttctcttcttctctttgtttctcttttccttccttcttttcttttttctctttctcctttctttgttttttctttttttgttgttgttttgttttttcccagaactgtttttctctgtaaaatgccattgttttcatcacgagggaattatgcagaacttttcctcaggtctgtgttaaatacagcaggtctgtaatggcttttttytttctttttgtgagctttcaacatttcaacckgagwaataatttttaagaattatttatttctgcattttgagctattcatgttatacattctgtccctttctacaaatatgtcaatattgaatgctagcagtttatgtcttaagtctattcatagctttctgaatatttctttcaaatgttgggaaaaataaagaaaaacaatgcagcatataaaaatagagttgctcaggaatgtattattcataatgaacatgagaacctgtttttccagaagaattggtctgattaaatcattcac

SEQ ID NO: 86577 - DNA, 597 bp, Chicken  19866894387100_2
tttcttctcttatctttttattttccctctttccttgtctgctttttcctcttgtctctttttctcttcttctctttgtttctcttttccttccttcttttcttttttctctttctcctttctttgttttttctttttttgttgttgttttgttttttcccagaactgtttttctctgtaaaatgccattgttttcatcacgagggaattatgcagaacttttcctcaggtctgtgttaaatacagcaggtctgtaatggcttttttytttctttttgtgagctttcaacatttcaacckgagwaataatttttaagaattatttatttctgcattttgagctattcatgttatacattctgtccctttctacaaatatgtcaatattgaatgctagcagtttatgtcttaagtctattcatagctttctgaatatttctttcaaatgttgggaaaaataaagaaaaacaatgcagcatataaaaatagagttgctcaggaatgtattattcataatgaacatgagaacctgtttttccagaagaattggtctgattaaatcattcactactaaggtcgctagttatttatttttgt

SEQ ID NO: 86578 - DNA, 593 bp, Chicken  19866894387100_3
ttctcttatctttttattttccctctttccttgtctgctttttcctcttgtctctttttctcttcttctctttgtttctcttttccttccttcttttcttttttctctttctcctttctttgttttttctttttttgttgttgttttgttttttcccagaactgtttttctctgtaaaatgccattgttttcatcacgagggaattatgcagaacttttcctcaggtctgtgttaaatacagcaggtctgtaatggcttttttytttctttttgtgagctttcaacatttcaacckgagwaataatttttaagaattatttatttctgcattttgagctattcatgttatacattctgtccctttctacaaatatgtcaatattgaatgctagcagtttatgtcttaagtctattcatagctttctgaatatttctttcaaatgttgggaaaaataaagaaaaacaatgcagcatataaaaatagagttgctcaggaatgtattattcataatgaacatgagaacctgtttttccagaagaattggtctgattaaatcattcactactaaggtcgctagttatttatttttgt

SEQ ID NO: 86579 - DNA, 600 bp, Chicken  19866894387103_1
agggaatgttaaaaacaaaaagacaacaagaaacagtactttgagagacaggatgaactaaaactgggaagggggaagagcacagcgctgctttttcctgtacagacattgaaagcagctcaataacattgtgatttgatacgataaagagcgcgaggaagcacaattagaagcagggataaatgcttcaagtttcaaaagtgagttttcccaacattaaatacagaataaacaactactgctgttaatgcatgtattcagtgtacagctgtagcatgacgggtgcacatcatcctcackgagaggtccaacctgccaaccagcaagcgtttcagtgagatgacatggcccatgaagaccactgctctaacagacaggcagaggtgctatcaatcttattcctatcctcacagatgggcagagcctgtrgacttctccattccagcsccctgcacacttctgctatgcagcacattagcatgagaagaccacagcagtgggaggtggttcagaacaaagagatgtcctccmtgaaacaacaccttccagaagcaccacatacttgacagamcatgagtttgagtgaagaggataagaaaa

SEQ ID NO: 86580 - DNA, 600 bp, Chicken  19866894387103_2
tgtgatttgatacgataaagagcgcgaggaagcacaattagaagcagggataaatgcttcaagtttcaaaagtgagttttcccaacattaaatacagaataaacaactactgctgttaatgcatgtattcagtgtacagctgtagcatgacgggtgcacatcatcctcackgagaggtccaacctgccaaccagcaagcgtttcagtgagatgacatggcccatgaagaccactgctctaacagacaggcagaggtgctatcaatcttattcctatcctcacagatgggcagagcctgtrgacttctccattccagcsccctgcacacttctgctatgcagcacattagcatgagaagaccacagcagtgggaggtggttcagaacaaagagatgtcctccmtgaaacaacaccttccagaagcaccacatacttgacagamcatgagtttgagtgaagaggataagaaaaccagccacagcactcacaagctgttagccagtgggtaagaaattctgctttcactcagatttgctcacaacagcacagcttacyggtattttcctcatcctcaccattttgctctatgctaccaaactg

SEQ ID NO: 86581 - DNA, 600 bp, Chicken  19866894387103_3
agagcgcgaggaagcacaattagaagcagggataaatgcttcaagtttcaaaagtgagttttcccaacattaaatacagaataaacaactactgctgttaatgcatgtattcagtgtacagctgtagcatgacgggtgcacatcatcctcackgagaggtccaacctgccaaccagcaagcgtttcagtgagatgacatggcccatgaagaccactgctctaacagacaggcagaggtgctatcaatcttattcctatcctcacagatgggcagagcctgtrgacttctccattccagcsccctgcacacttctgctatgcagcacattagcatgagaagaccacagcagtgggaggtggttcagaacaaagagatgtcctccmtgaaacaacaccttccagaagcaccacatacttgacagamcatgagtttgagtgaagaggataagaaaaccagccacagcactcacaagctgttagccagtgggtaagaaattctgctttcactcagatttgctcacaacagcacagcttacyggtattttcctcatcctcaccattttgctctatgctaccaaactggaatttgagtggcatggg

SEQ ID NO: 86582 - DNA, 581 bp, Chicken  19866894387103_4
acaactactgctgttaatgcatgtattcagtgtacagctgtagcatgacgggtgcacatcatcctcackgagaggtccaacctgccaaccagcaagcgtttcagtgagatgacatggcccatgaagaccactgctctaacagacaggcagaggtgctatcaatcttattcctatcctcacagatgggcagagcctgtrgacttctccattccagcsccctgcacacttctgctatgcagcacattagcatgagaagaccacagcagtgggaggtggttcagaacaaagagatgtcctccmtgaaacaacaccttccagaagcaccacatacttgacagamcatgagtttgagtgaagaggataagaaaaccagccacagcactcacaagctgttagccagtgggtaagaaattctgctttcactcagatttgctcacaacagcacagcttacyggtattttcctcatcctcaccattttgctctatgctaccaaactggaatttgagtggcatgggtgggggttctgctttaaatgaaatgaaacaaatttaagcttaaaggaacactggcagcacattgg

SEQ ID NO: 86583 - DNA, 541 bp, Chicken  19866894387103_5
tagcatgacgggtgcacatcatcctcackgagaggtccaacctgccaaccagcaagcgtttcagtgagatgacatggcccatgaagaccactgctctaacagacaggcagaggtgctatcaatcttattcctatcctcacagatgggcagagcctgtrgacttctccattccagcsccctgcacacttctgctatgcagcacattagcatgagaagaccacagcagtgggaggtggttcagaacaaagagatgtcctccmtgaaacaacaccttccagaagcaccacatacttgacagamcatgagtttgagtgaagaggataagaaaaccagccacagcactcacaagctgttagccagtgggtaagaaattctgctttcactcagatttgctcacaacagcacagcttacyggtattttcctcatcctcaccattttgctctatgctaccaaactggaatttgagtggcatgggtgggggttctgctttaaatgaaatgaaacaaatttaagcttaaaggaacactggcagcacattgg

SEQ ID NO: 86584 - DNA, 428 bp, Chicken  19866894387103_6
tgctatcaatcttattcctatcctcacagatgggcagagcctgtrgacttctccattccagcsccctgcacacttctgctatgcagcacattagcatgagaagaccacagcagtgggaggtggttcagaacaaagagatgtcctccmtgaaacaacaccttccagaagcaccacatacttgacagamcatgagtttgagtgaagaggataagaaaaccagccacagcactcacaagctgttagccagtgggtaagaaattctgctttcactcagatttgctcacaacagcacagcttacyggtattttcctcatcctcaccattttgctctatgctaccaaactggaatttgagtggcatgggtgggggttctgctttaaatgaaatgaaacaaatttaagcttaaaggaacactggcagcacattgg

SEQ ID NO: 86585 - DNA, 600 bp, Chicken  19866894387110_1
gattgctattagccaggtaattacaagcacattatgtaaaaacagcatcttaaatccagtttaatattaatctatgtcaaatttacagtgacagcatgctattcttactacagaatattgatgtaatgatctccttgcaagaatgcagccctaaaacagagcaagcagacatttcctttagaggaaaggaaggatgtagttggctctcagagccactgctatttctgtaacttttgttttaagatgctgcctgctggcaatcatgttcctttaattttccttttgatgacagagaggcarggatgtacttcaaataccaggatttgaggaatttaattcctggatctgctctgagcaaaaggaaaaagctcacgtggaaatcagcggaactgcccaattcccccttcctctgctctgtcttaatgagcccctggccctctttggcgtggagggttgttggggccctttatacagagatgtggtggggctgaagggtgctcttctgctcagtatggttctgtacaggagagttagttcttgcaaaatgagaattggggacacaacaaaaactgtggagaaacaatacagcccaaatgacaa

SEQ ID NO: 86586 - DNA, 600 bp, Chicken  19866894387110_2
tctgtacaggagagttagttcttgcaaaatgagaattggggacacaacaaaaactgtggagaaacaatacagcccaaatgacaaacccaatacagctttgattttctttttaatttttgttgttgttgctgttagaaaaccattcagcaaattgtattgtattgatttcagaatcagtctagacctgaattgtctcagtagtgcattgtggggttttttgttatgcctccatgttcttgccaaaagccatctcctgcactgtgaacatgagatgtccgtgatgcaatttagtcaccaaawgcatggtgatgactattacagaacatgagcagtttggcaaggggacagaaggagacatcaaagctgataggctatgcaccagcatccccaaacagagattctcatttcaggcttctcattgtgccaggggtttttgcatttaaaagatgctaaaatcctgctgttctttccacaggaagacatttttgtttctcagtttacagctgctttcatgttcgtttcttcgaactttcccacttcctggtgggattttcttaccattttctgctgtatggatatatagcaacaagccagcaagaa

SEQ ID NO: 86587 - DNA, 600 bp, Chicken  19866894387117_1
atgctgagaggcttttctgtcatcaggctgattaagttaaaattctgcagatacttttgtgtgtttctctaaaaatctgctttgaaaaagttatcacagcattagtgcgtggctctgcttctcctggatgggaagtacaagttattacacaacttcaaacagaaggtggagtatgtttttagttaaaacttcagaaccattgatggaatgttactggaatggtttttaggtacttgcttatttacagcaagtgaaacttaagttacagtgaagtctgaaaagtaaaattctatgacagcrttatttgaatgcactctgttctagaaaagcttaattcctgcaaatcacagcagtcatgcgtagttcatttgacccttttggacaggtttttatagaatagtggcagtatatattcaagtataatatacacagcatattttcaaaatgtcttcatctttagagttcatgttgtgtgtaattttggctgtgctttcataaggtattattctcttgatttaattctcagaacgataccatttgcagaagtgtaattttactcttgattacgtttgtggtttgtcttccccatgatggtagctg

SEQ ID NO: 86588 - DNA, 600 bp, Chicken  19866894387148_1
agtagccagtatgttattttcagtgcatgattaaggcaaatactgtgcgttatcccaccaatctgttttcagaattgagggtaaaatgtagaggagtcttgacatgcctcttcaactttaccatgtgttatagatgtgggaactagtgcttatcctcgtataaatctttcttcaactgcagcattaacatgtaccatgtgagagaagggtttgataatgtaatgaagaactttatcaattcctttagttaaataaaaaaaatatgtatatatattttttctatggaaaggtcattaaaarccctctataaagctgtcatgactgtaaggagaaattattcaataggctgataaatcttaaattcaggattgggaaatattgtataaaaataatgagaatccttgcatataacttacttgaaggtggtcttgcttttgaccgcagaaagtggatgggagaatttgaaacaattctttttataaaaggcagtttagccttaaaaggttgatttgaaaagacgtaaaattcagacaagttacaagtttttaaaaatagtcacatttcagttaattttacttaggttatcgagttactgttttt

SEQ ID NO: 86589 - DNA, 600 bp, Chicken  19866894387154_1
gtccaggccccccctgcagctccccctttctccctccagctctctgcctttacctgacaggaacttccacaccaataatgcaatcaaagcaacgaagagaaccaccaaggggacgaccagccaagcctcaatggggatcaggttgggctgcggctctgggggagagtaccgttgtcagtaaacaaaggggcggcccccaaatcccaactccacacatcccatgctgccaggcttaccccaagagaagagaccaggctggggcaggctggcgtgctccacgcggcaccggtacttgtcccyatcctccggcagcacatcaatggcagccgaagtgtggtaagtgccatccctattgggcacgatgcccccccagcgggtctcctggtcccggaccatgctgtccttcatccagctgatggcgatgggccgcgggtagaagccgtgagcgtggcaggacaaggtcaggaacccatcggcctccttcccccacactcgcacctcgggctgcactgcaggtggttgatgttgtgggccgggctgagcaccccacactgagcccctgccccacacccagcccagccccacgtctccctcccattc

SEQ ID NO: 86590 - DNA, 600 bp, Chicken  19866894387159_1
gggttcacctgagtctaaaagcatccatgactacagaaagacatggctccagaaacaggctggagacaagctggggtgagaaccagcttcccgtcttgctggtcatgctgggccatggtgggcaagtctcagtctctgaatgtcactctagatgcatttcaaatgtgcttcatccaggtatacctcaaatctaagaaatgcctacagcagagagttggctcttacccttgtcctgctcggaagtagcctccaggacagccacagaggtaacctccatccgtgttggagcagccataactrcaggggctgccgccagctgagcattcatccacatcctggcaccccccaaaggcctggtcaaagtcaaagccagacggacagacgcacttgaaacttcccagagtgttgtagcaggaggcagagccacaggcagttgggctggagcactcattttcatctgcaccagagacagcaaactggttagaaacttagtgggcaaaggtttctggggcagggcaggaagcacagtgctggctctgcagatgtgaacccagaaatctgtgtcagcaatggtcagggtggctgcagagggactcaggg

SEQ ID NO: 86591 - DNA, 599 bp, Chicken  19866894387165_1
  misc_feature (1)..(59): n is any nucleotide
nnnnnnnnnnnnnnnnnnnnnnnnnnnnnnnnnnnnnnnnnnnnnnnnnnnnnnnnnnnttaagagcatcagagttaccatgcacactgtgatgcttatagttttacatgtaagtattcagagaagaaacagcaattaaatgattcctttcaaggcaacctagtaatcttattttaatggaaacatcagaggaaaaacagcagttagaagaaagaattccgggccactatttctatactatacatttttttttcaagccacagtgaaaagtctcaaagcaacaatcatttcccttaaatwtttttttttccccaaacagccggaacaaaatagttcagcaccaatctcaacaataagttgacatgacagtaagtcacgtagtgcttccagaacagccttctgaattcctgcaaatttttggggcctaggacatcttcattatttacaattctgagtcttcccaaagccacggttatacttctagcctagctcacctattgctggagaagcaaattggcaataaaacacatgatattgccttctgaagacgacaaaatacctggttgagttagtgcttactctggtatgggccagggaat

SEQ ID NO: 86592 - DNA, 599 bp, Chicken  19866894387169_1
  misc_feature (1)..(147): n is any nucleotide
nnnnnnnnnnnnnnnnnnnnnnnnnnnnnnnnnnnnnnnnnnnnnnnnnnnnnnnnnnnnnnnnnnnnnnnnnnnnnnnnnnnnnnnnnnnnnnnnnnnnnnnnnnnnnnnnnnnnnnnnnnnnnnnnnnnnnnnnnnnnnnnnnnntgctgcctttcagatctgattatgagtgacttgatgacccacagctgagaaaatcagagctccttacccctttcatacatctcctagcagaggaaagttttacagagttttaaagaatggagacaaattgtagaagcatcttaaaataatttmttttcatgttttgaacaatcttagaaatggtgaactcatcaggtgtttctaaattctagagagataaggattttctgtgtaggacattcttttgtattttgatgtaactgaacctgtgcaggtgagactgccagccagccatgaaggacagagtgctttggaaggaaacaaactacaaacatgagtagtgttccagtttttccatgttcacaggaaccccaaaccaatgagctttgagtcagatcacttcaaagcctagcagtgctagatctttaaacaaagcctcttttttttcttgt

SEQ ID NO: 86593 - DNA, 600 bp, Chicken  19866894387177_1
acatgaccatattggagcttacagcaactgaagtgcttgtgcaaaggactggcataactaggattaattaacatggctaagattaggaacacctatgcctctatcagaagcaacacattaaatagaacatagtagtgcaacaacctttattgaaactaaaacacacaaaacattaaaataagcaagttaagagtagagaggtagtctgttgtctaaatgtaggtttctttaagttcaagagacagtactaatgcctccatttacatcacacaaatccacaggttttcttgttttttcacrccatacagttaagctaattaagtaatcttaggtgcctgaaaaatatcttcctttaagtgatttatgagaatgggatttctcaaatggacacagagatctaagtcatgaattggagttgaatagatcaaagttaaatcggtttgaaaattgtctatacgtaccattaaacaaatttacaaactgtatttagaagtattatttcattttttttattattttaaagtaaaagggtaaacttccgggatgttcactcagtctaatctcctgaacacagaagctttcaatcctttttagaagcaa

SEQ ID NO: 86594 - DNA, 600 bp, Chicken  19866894387181_1
tgaggtcttgtttcttctaaaaaggatggatttctggtagagttttggaaagtgcatcttgatttagctgcataaatatgcatagatcatctggcttgttgatttgttgttttggttttttttagaaaaaggtttgatttccttacatttactaagggagaatagaggaaactgatttgttcctctgcgtttttcataattgtattccttattcatagcacaacttagactaacagtcaatgagcagatctaggcactttcgcatctagatactgtgtaggtacaggggtaggatttttyccactttttagcctatgtttattcagtacatatccattgatagttcatgtattttggggttcatttttagacaaattttccacttttggaggcagcaagtactatttaatcaatgtttgcaattgcaagatattcattagaactacacaaattcatagctctcagggcagtgacagaacgacaagaaatgaagcagctgaagtgcttcttagtgaacagtcctgacctgggcagaaagtttgcaggcttcttgaaggccattttatgaccagatctggaaacacgttacttttctgatca

SEQ ID NO: 86595 - DNA, 600 bp, Chicken  19866894387196_1
tctgggtgttctgaaagatgcaagcttagtaggtgagtgaaaaagagagagtgtagttcaggagaagaaattctgtcttgtgaggtattgtgggttttttggtatgccccgaagctcaacatagtgagctactgagattccaaattgcctcttctgccctaaagttggaatcatgcctggggcaggatggcattacacagaacttcacttggcagtgctgctgtgcactgcagggttctccaaggacccttgggaacagccagtcttcagtcactcacggcagccacacaggcagtggtragaagagcatattacaccattggctcaccaggatgtaggcaaggacacaagcctgctctccacaagcctgtccatcccagagatgagtgtggttggccagaccaacattttgtgtggtaaaataatgtaagtggactgtttttagcaatgttattgctgttatggcatctgacggggctgtggagcaccttctgcctcacctatgtgtgccgctgctaaaatcagcattatgtcttttaccacgggtgtctaagctgcttctttgtcaagattcacagcttaacaagattcacaactctt

SEQ ID NO: 86596 - DNA, 447 bp, Chicken  19866894387201_1
tgaaatgaaagtgaaaggtagacttcaggagagcacctcctacactccagacactaatgagcatccagtctccaggaacagatacaactatctgaagtaaatccctggatcaggtcctcagcaccaaaccactacctctatggatctgctcccactgcatcacaccaaattctaacacagacagtgtctacctgcaaatatgttaaagctgagggaaaaaagaaaaaaagaaaagaaaaaggaaagaaaaaaagagagaagagaaggaagatgaagcttgcattaaatgttgtttttttkgggttgtttttttttttaaacaaaaagggaataaaagccttggtagaatagcccagaaaccccacattcaaaaggagttacaatattttgagtttaacaagactgtggagatctatagagctatctctctatagatactaagaaaaa

SEQ ID NO: 86597 - DNA, 600 bp, Chicken  19866894387207_1
agcggcgagctgggagagactgaactggcacccggggctgcagcttttataaaggagagagggtggagcataacttgccatcctcctcttcgccgagtatcaagtgaaaaatctagccgctgctggctgacaaaataagagtgcgttcattggaatgattaaggaattaaaaatgactaactctatggtaccccctttaacgtggcttggaggagcgggggcagcaattccctcctcctcaggcagagataagcagagcggagttcccggcacgggagttcttgggagcccgtttccccyggctccttcccttgcaatacttactgcgaggagagagccggctttcgtagctgcatctctttgtgtgcaggggggggaaaaaagggaaggggaaaaaaaaaaagccggagaaatcgaaacgttgctgcaaggcaatctggtgtcgctcgtggcacygggaggtgttttgccgcgtgattatccgcacagtgtaataaacatctgaagggaaattgagccagcagcagcgtgctgggggggagggaaggctgctaacaggtgagtccaggaaagagtcacaacctattgcaaaaacacacg

SEQ ID NO: 86598 - DNA, 600 bp, Chicken  19866894387207_2
gattaaggaattaaaaatgactaactctatggtaccccctttaacgtggcttggaggagcgggggcagcaattccctcctcctcaggcagagataagcagagcggagttcccggcacgggagttcttgggagcccgtttccccyggctccttcccttgcaatacttactgcgaggagagagccggctttcgtagctgcatctctttgtgtgcaggggggggaaaaaagggaaggggaaaaaaaaaaagccggagaaatcgaaacgttgctgcaaggcaatctggtgtcgctcgtggcacygggaggtgttttgccgcgtgattatccgcacagtgtaataaacatctgaagggaaattgagccagcagcagcgtgctgggggggagggaaggctgctaacaggtgagtccaggaaagagtcacaacctattgcaaaaacacacgtacgcacgccctctcatgtgcatgcgggcgatctcccggtgtggagttgcacactcgcaaagcacccgtctttgtgcagcctgctccgcgccgacacattcctgcagtgtcatgcactgcaggcactcagcaggcgatcgctctgcatcccaagca

SEQ ID NO: 86599 - DNA, 600 bp, Chicken  19866894387207_3
gcgtgattatccgcacagtgtaataaacatctgaagggaaattgagccagcagcagcgtgctgggggggagggaaggctgctaacaggtgagtccaggaaagagtcacaacctattgcaaaaacacacgtacgcacgccctctcatgtgcatgcgggcgatctcccggtgtggagttgcacactcgcaaagcacccgtctttgtgcagcctgctccgcgccgacacattcctgcagtgtcatgcactgcaggcactcagcaggcgatcgctctgcatcccaagcatccccctctcctcckctccgctacgtcgcatgctcggctacgtgcagatttcatctcattcacacatccctgggcatccatgtgttctccttcactctctccctctcccttcctttctcacatgcgcacaccctcatggcctcatctcgcagcatcacacactctctctcagactatctgggtttctcatgcagccaatcctctctgaaacacgccacctcacgccagcgctcacatatacactgtgcgaggtgtcatcaagcgtccctgcacagtaggcatgacaacgcctccaagttggatagttatgccccc

SEQ ID NO: 86600 - DNA, 600 bp, Chicken  19866894387207_4
ctccctctcccttcctttctcacatgcgcacaccctcatggcctcatctcgcagcatcacacactctctctcagactatctgggtttctcatgcagccaatcctctctgaaacacgccacctcacgccagcgctcacatatacactgtgcgaggtgtcatcaagcgtccctgcacagtaggcatgacaacgcctccaagttggatagttatgcccccaacccgactttggtcccaggggttagtctggaaggtcgtaatgaggctgggggccctctgtagctttccctttcagagacacrgaattcaattgcaaaatggaagracctayggtygggcagcgtgtcaagatgcccttgggttgcaagggatcaagatgcctttaggttgcatgtgatcacagcaattgcccctgccccagaagatgaggggaggatttccccaccaacggggcattcagcagatctctgccagccccggagcccggggaatctgcatgagtggaacgtgaagattgtcctgggagtccctcaggtgggctcagtcccagcctggagctcaagtgggaaggaagtggaaatgcaacacatacctttgttctt

SEQ ID NO: 86601 - DNA, 600 bp, Chicken  19866894387207_5
atgcgcacaccctcatggcctcatctcgcagcatcacacactctctctcagactatctgggtttctcatgcagccaatcctctctgaaacacgccacctcacgccagcgctcacatatacactgtgcgaggtgtcatcaagcgtccctgcacagtaggcatgacaacgcctccaagttggatagttatgcccccaacccgactttggtcccaggggttagtctggaaggtcgtaatgaggctgggggccctctgtagctttccctttcagagacacrgaattcaattgcaaaatggaagracctayggtygggcagcgtgtcaagatgcccttgggttgcaagggatcaagatgcctttaggttgcatgtgatcacagcaattgcccctgccccagaagatgaggggaggatttccccaccaacggggcattcagcagatctctgccagccccggagcccggggaatctgcatgagtggaacgtgaagattgtcctgggagtccctcaggtgggctcagtcccagcctggagctcaagtgggaaggaagtggaaatgcaacacatacctttgttcttgtgtccaccgtcagacactttag

SEQ ID NO: 86602 - DNA, 600 bp, Chicken  19866894387207_6
acaccctcatggcctcatctcgcagcatcacacactctctctcagactatctgggtttctcatgcagccaatcctctctgaaacacgccacctcacgccagcgctcacatatacactgtgcgaggtgtcatcaagcgtccctgcacagtaggcatgacaacgcctccaagttggatagttatgcccccaacccgactttggtcccaggggttagtctggaaggtcgtaatgaggctgggggccctctgtagctttccctttcagagacacrgaattcaattgcaaaatggaagracctayggtygggcagcgtgtcaagatgcccttgggttgcaagggatcaagatgcctttaggttgcatgtgatcacagcaattgcccctgccccagaagatgaggggaggatttccccaccaacggggcattcagcagatctctgccagccccggagcccggggaatctgcatgagtggaacgtgaagattgtcctgggagtccctcaggtgggctcagtcccagcctggagctcaagtgggaaggaagtggaaatgcaacacatacctttgttcttgtgtccaccgtcagacactttagcaagga

SEQ ID NO: 86603 - DNA, 600 bp, Chicken  19866894387207_7
cctcatggcctcatctcgcagcatcacacactctctctcagactatctgggtttctcatgcagccaatcctctctgaaacacgccacctcacgccagcgctcacatatacactgtgcgaggtgtcatcaagcgtccctgcacagtaggcatgacaacgcctccaagttggatagttatgcccccaacccgactttggtcccaggggttagtctggaaggtcgtaatgaggctgggggccctctgtagctttccctttcagagacacrgaattcaattgcaaaatggaagracctayggtygggcagcgtgtcaagatgcccttgggttgcaagggatcaagatgcctttaggttgcatgtgatcacagcaattgcccctgccccagaagatgaggggaggatttccccaccaacggggcattcagcagatctctgccagccccggagcccggggaatctgcatgagtggaacgtgaagattgtcctgggagtccctcaggtgggctcagtcccagcctggagctcaagtgggaaggaagtggaaatgcaacacatacctttgttcttgtgtccaccgtcagacactttagcaaggacttc

SEQ ID NO: 86604 - DNA, 600 bp, Chicken  19866894387212_1
gttgtactagctgaaactgctcttagtatcaattactgttactgcaacagattttcttttgtactgtggcaccttgtcatctacctcatataatctgaatgagtttggacaggtacaactccatggagcacagttaacacacataatagaaaaaattatgtagctatgtgttagttctttcataattgaattaaagttgagaaaaactccagtgagcagctagttgcagtatgaagctgagtatcttgctgtcatacttcattgttttgtactgtactgccagaaagctatttttagacmtgctctgcaaatacacagttgttgcttatatcttgtctaaaggaagtaaggttgccctactaagactttactcttctctcaagggtgaactaaaatccattaaatttaaaaacacactgtaaaccctgcacaatagttgctgtgatgaaactatggtttaattatatataacaaaccatcaatttgggaaagtcagatagatatatctgcaaattattgtttcttcattctctcccaaaagtcattgtctctgtgtctattgtttgaaagttaattttgctggcataacaacaaaataaa

SEQ ID NO: 86605 - DNA, 600 bp, Chicken  19866894387219_1
aaaggaatgttacaaagccatctgtaagaggagcagaattacatgaacccgaataaacgactgccttaactactccaaaacccacaatcagggtacctgataatcattcagaaaagaagcagacttgtgatcccagcttttttaactgacaccatctgcctcttagtctctttctcctgctgacaccaacaggttttcaccttctggttcacgaacaccttgccagaataatttccatccctggctggaaccaggctgcctttttcctcactctgtcgtgcctcaggcagagctttcccwggagcagtgctggaagacaggaggtcctcctctgtcctggagtggctgtgaacatctctggcactgctgtgtcatgcacctttgtttctggagagcagagtggaagggtgggtgaagcaggaatgtggatctgcccactgctcataagtacctacctgcagacttagcaccagcgaggcacctcccctcacacaggggagcagtgggaaacctggctcttaataaaagaaggctttcaaaagkctggcagagtgaacaatgtcaggcttgaaacttaaacgttgcactggttatttggtg

SEQ ID NO: 86606 - DNA, 600 bp, Chicken  19866894387219_2
gctggaaccaggctgcctttttcctcactctgtcgtgcctcaggcagagctttcccwggagcagtgctggaagacaggaggtcctcctctgtcctggagtggctgtgaacatctctggcactgctgtgtcatgcacctttgtttctggagagcagagtggaagggtgggtgaagcaggaatgtggatctgcccactgctcataagtacctacctgcagacttagcaccagcgaggcacctcccctcacacaggggagcagtgggaaacctggctcttaataaaagaaggctttcaaaagkctggcagagtgaacaatgtcaggcttgaaacttaaacgttgcactggttatttggtgttcctacggtgaaagaccacattccacatacaagatgtaaaagattatttttcttcaaatttgggcacatctgtggccatcatatttcactgayaagagccaggcaaaaggaaaacrgattgtctcacacagtgctgtctcggtgtaccttctccttctatgtaccagttatctgaacctgtcctctgttgtctcatgagctgttgatgattacatctaatacattatcttttaaacccagca

SEQ ID NO: 86607 - DNA, 600 bp, Chicken  19866894387219_3
gcagagtggaagggtgggtgaagcaggaatgtggatctgcccactgctcataagtacctacctgcagacttagcaccagcgaggcacctcccctcacacaggggagcagtgggaaacctggctcttaataaaagaaggctttcaaaagkctggcagagtgaacaatgtcaggcttgaaacttaaacgttgcactggttatttggtgttcctacggtgaaagaccacattccacatacaagatgtaaaagattatttttcttcaaatttgggcacatctgtggccatcatatttcactgayaagagccaggcaaaaggaaaacrgattgtctcacacagtgctgtctcggtgtaccttctccttctatgtaccagttatctgaacctgtcctctgttgtctcatgagctgttgatgattacatctaatacattatcttttaaacccagcatgaagctaattactgccacctatatctccaggcaccttgactgcagctctgattattcttagctttatatcaagaaaccccactgaccccttactgtatgaattcctcatttatagatttttctgtgctgtgcatgtatttcaggcacatc

SEQ ID NO: 86608 - DNA, 600 bp, Chicken  19866894387219_4
caggaatgtggatctgcccactgctcataagtacctacctgcagacttagcaccagcgaggcacctcccctcacacaggggagcagtgggaaacctggctcttaataaaagaaggctttcaaaagkctggcagagtgaacaatgtcaggcttgaaacttaaacgttgcactggttatttggtgttcctacggtgaaagaccacattccacatacaagatgtaaaagattatttttcttcaaatttgggcacatctgtggccatcatatttcactgayaagagccaggcaaaaggaaaacrgattgtctcacacagtgctgtctcggtgtaccttctccttctatgtaccagttatctgaacctgtcctctgttgtctcatgagctgttgatgattacatctaatacattatcttttaaacccagcatgaagctaattactgccacctatatctccaggcaccttgactgcagctctgattattcttagctttatatcaagaaaccccactgaccccttactgtatgaattcctcatttatagatttttctgtgctgtgcatgtatttcaggcacatctttacagaaggaaatgcagtcaa

SEQ ID NO: 86609 - DNA, 600 bp, Chicken  19866894387227_1
tggcagggaactgcagccttcagtttaccagtagggaaaaaaaggctgatttacatgtccagtactgaacactggcccatacaacaccaggacttactatgcagccacctcagcccatttgtaggcatcttaagcatctgtaaacgcattgtgtgagatgaataatgatcttgacttctcttcctgcttcactaagatctttcctgctgtgaagttcagtgatctgagaacggtggctcttctatcctttgagctgaactaggaaaaagttggtttcccagttcttttcaactcaaatgygtaatgagggaaaatacaaacctgcttaaaaaccttttcttgtctaaggtcaggattaggagcaagcattactccccaggaatcccctggtagctgcgggcggttgcagcgatgttaccaccaggatctgggcatttkattctgctcagggtcctggaagtgacgtgggaattcaagactaagaagtctgagttttgtaaaccttttttctactttaaattgacaggtgctgctgttgatgatcagacttttaaaaataaggacatggcttggccaaagctgaaatgggtttagtctccc

SEQ ID NO: 86610 - DNA, 600 bp, Chicken  19866894387227_2
tgtaaacgcattgtgtgagatgaataatgatcttgacttctcttcctgcttcactaagatctttcctgctgtgaagttcagtgatctgagaacggtggctcttctatcctttgagctgaactaggaaaaagttggtttcccagttcttttcaactcaaatgygtaatgagggaaaatacaaacctgcttaaaaaccttttcttgtctaaggtcaggattaggagcaagcattactccccaggaatcccctggtagctgcgggcggttgcagcgatgttaccaccaggatctgggcatttkattctgctcagggtcctggaagtgacgtgggaattcaagactaagaagtctgagttttgtaaaccttttttctactttaaattgacaggtgctgctgttgatgatcagacttttaaaaataaggacatggcttggccaaagctgaaatgggtttagtctcccagaaaagttgttttctctgctgccatctgacacaggtagagctagtgccaacctagtgagtgcaaattacagctaacgtgaggtggaatatcttgtgcacggacctatgtagctgtgtaattgcttggcatgtctttg

SEQ ID NO: 86611 - DNA, 600 bp, Chicken  19866894387227_3
ggcatgtctttggccctttgcttgtcccaagtgataggtgtgtgaatgggtttatacaaataataattctcaaacttacagccaaccgttttcctccctccattaccctgctggaaaagatttcacagcagtttgtgtttgttgcagaagccacataagaggtgaagttaatcagaactttggctgtcactccacttctagcagagatagttggagaggttttttcaagcttcgagcagtgcagcttgcttcacattttaaatgaagtaaggtaagagttgacccgtgacaacaagaaawtaatgacttaagatctggatcatctggaacccaaactgatccacagaaacaatccgtggacaaaaaaaaaaaaaaaaaaagaaagaaaaagtgagaattgaagtcacatatgaaccaggaataatcctccttctctctcaagtttacaatgaaatgtgtgaaattgaaagggcaaactgtggtataaatttcactcacctgttgtggagctgagatcagggatacactgaggttatggaagtgaatcctggggattcgctgcagggcacagcaaggaatatcaggtgctttgtacattaa

SEQ ID NO: 86612 - DNA, 600 bp, Chicken  19866894387236_1
cgctctccagtggctctgtggggctgtcaccagaggctgtcttcatgcagtatttgagtgcttccacggaaagccacagctgatgggcctttctggcctcctcttctgctactgcgtgacctgcaaagtaagtcaaggggactctcagttggggtacacaggaaaagcatcaaacacaaaagtgttccagttcaagtaacaaaagccatccctctcaacacttcctaaagaagccacccccttgccacctgctcagagcaagtctgttccacacctcagggtcacagtcccggccaacaragcaaagctatggcttcggcagaaccagctttggactttgcagctgggatttattgagtacccagccaatggcaaaccatcagccacatggctaacccagtgttcaagcaccagatttggataagaactgtgactgctccttaaagagatgagatctcagtgctcactctcaactgcttgctcgattcctttcagcctggcgtaggcagtgtttatatccagcgtgaagttgtcaagctgctcctgagtaaggcgtcggaattgcatttcttgctcgctgagtttctctgataagttctg

SEQ ID NO: 86613 - DNA, 600 bp, Chicken  19866894387250_1
gtatgtctgtctcagcagcagtcatataaaagaattgctgtttatgaaatttacagtagagaacccaaagtcttgggaagaagggaaaagtatgagggcttagaaattagaaattagaattagaaattagaatttagagaattctttttccgtctgcattcaactcaatgaatgatatgggaaaaaaaagggcctgaaagatacaatgttaggcagataatgaaatgtgtgcccttgcttgggctgaggaagatatcttttgggatatagagtttgattccactgagataatgcatgaaktttaaactcaaagaacttgggcccttaaactgggagaaataagtatgagttttgcaggttagaggataaaactttgcagacactatttatgtgacttggcaaaaagccaaaccgtcaagcaactgcattggtttgactttttttgtaacaactgctgaaaaagcatgtgtagataaagatgaaagcatcatgtaagatgtaaaggattgctttgataaaatgagcccagcgtagaagagtgtcctaccctatttccaacccattttccagattgtataatcctactttcattcacaggtc

SEQ ID NO: 86614 - DNA, 600 bp, Chicken  19866894387256_1
gtgtttaatgcatcgcttctgaaacaattacattttcaggataagagtccagaagctgcctgctgccatgagtgctcatagtcatttccacttagtgaagatttaaaaattcaaatattgaacttggttgtatgtaacttattatttgggggaatgggacgttaaaagaaatttggaagtgctatgtctaccctttgtaaaactatatcccaaagcccaaattgcactgcaatgttatttaacaatgcaatgagctgtaaaatagacagttttaatgcagttgagccctcaagcttattyttacttttaaaacactgatttcttactgtggaaacaaacaaccgaataatatacattgctttctttcatgatctttatggcactattatttttgaccagggaggacaataatataatctaaatgatacagattgcttgttttcttccttaataggaaagataatgaatggctttgttttggtggctttattgcctgtaggataatgaaatatcccagcatgggtttcattaagccttctctagtttygctatgatatgctcattaaaatgccagacctcctatttgatatgaagggaagc

SEQ ID NO: 86615 - DNA, 600 bp, Chicken  19866894387256_2
caatgagctgtaaaatagacagttttaatgcagttgagccctcaagcttattyttacttttaaaacactgatttcttactgtggaaacaaacaaccgaataatatacattgctttctttcatgatctttatggcactattatttttgaccagggaggacaataatataatctaaatgatacagattgcttgttttcttccttaataggaaagataatgaatggctttgttttggtggctttattgcctgtaggataatgaaatatcccagcatgggtttcattaagccttctctagtttygctatgatatgctcattaaaatgccagacctcctatttgatatgaagggaagcagatwtttcagaattcaatgcatggggaaagactggggacaggtgtcgccaaaggaactgctggttctttagaccagggctggcttcagccatgagagaaacagaatcaatagtgcagcttattaamgtgctatagttcatgatgccataggtatgaarctatgggagccttgacatttaaactttctcattattcacagagttatagaatcgtagaaccgctcaggtggaagagaatttaaagagt

SEQ ID NO: 86616 - DNA, 553 bp, Chicken  19866894387256_3
tttaaaacactgatttcttactgtggaaacaaacaaccgaataatatacattgctttctttcatgatctttatggcactattatttttgaccagggaggacaataatataatctaaatgatacagattgcttgttttcttccttaataggaaagataatgaatggctttgttttggtggctttattgcctgtaggataatgaaatatcccagcatgggtttcattaagccttctctagtttygctatgatatgctcattaaaatgccagacctcctatttgatatgaagggaagcagatwtttcagaattcaatgcatggggaaagactggggacaggtgtcgccaaaggaactgctggttctttagaccagggctggcttcagccatgagagaaacagaatcaatagtgcagcttattaamgtgctatagttcatgatgccataggtatgaarctatgggagccttgacatttaaactttctcattattcacagagttatagaatcgtagaaccgctcaggtggaagagaatttaaagagtccaactgcagc

SEQ ID NO: 86617 - DNA, 431 bp, Chicken  19866894387256_4
cagattgcttgttttcttccttaataggaaagataatgaatggctttgttttggtggctttattgcctgtaggataatgaaatatcccagcatgggtttcattaagccttctctagtttygctatgatatgctcattaaaatgccagacctcctatttgatatgaagggaagcagatwtttcagaattcaatgcatggggaaagactggggacaggtgtcgccaaaggaactgctggttctttagaccagggctggcttcagccatgagagaaacagaatcaatagtgcagcttattaamgtgctatagttcatgatgccataggtatgaarctatgggagccttgacatttaaactttctcattattcacagagttatagaatcgtagaaccgctcaggtggaagagaatttaaagagtccaactgcagc

SEQ ID NO: 86618 - DNA, 399 bp, Chicken  19866894387256_5
ataatgaatggctttgttttggtggctttattgcctgtaggataatgaaatatcccagcatgggtttcattaagccttctctagtttygctatgatatgctcattaaaatgccagacctcctatttgatatgaagggaagcagatwtttcagaattcaatgcatggggaaagactggggacaggtgtcgccaaaggaactgctggttctttagaccagggctggcttcagccatgagagaaacagaatcaatagtgcagcttattaamgtgctatagttcatgatgccataggtatgaarctatgggagccttgacatttaaactttctcattattcacagagttatagaatcgtagaaccgctcaggtggaagagaatttaaagagtccaactgcagc

SEQ ID NO: 86619 - DNA, 599 bp, Chicken  19866894387263_1
  misc_feature (1)..(233): n is any nucleotide
nnnnnnnnnnnnnnnnnnnnnnnnnnnnnnnnnnnnnnnnnnnnnnnnnnnnnnnnnnnnnnnnnnnnnnnnnnnnnnnnnnnnnnnnnnnnnnnnnnnnnnnnnnnnnnnnnnnnnnnnnnnnnnnnnnnnnnnnnnnnnnnnnnnnnnnnnnnnnnnnnnnnnnnnnnnnnnnnnnnnnnnnnnnnnnnnnnnnnnnnnnnnnnnnnnnnnnnnnnnnnnnnnnnnnnnnnccccgggcagagccaggctggggtcttgtggggatgctcccagagctgccccgtgtcctgctccacrctcatcgcccacctcgccgtgaggaacggcgcgtcccctccttgtcaccaccctgctgggacatccgtgaccagccccacatgtgccattccagagccctcctcaccccacagcytgtgtcccactgcctgggatgatgctggggggcccaaggcctctcctccccgtgctttcaggctgttgtcaatcctacctagatgaacccactcttgttctgttttctttgtcttccccccgctgtctctctctcttagcccaccctgctgcgggaggatccaaatgtgtgtattgcctgtcac

SEQ ID NO: 86620 - DNA, 599 bp, Chicken  19866894387263_2
  misc_feature (1)..(118): n is any nucleotide
nnnnnnnnnnnnnnnnnnnnnnnnnnnnnnnnnnnnnnnnnnnnnnnnnnnnnnnnnnnnnnnnnnnnnnnnnnnnnnnnnnnnnnnnnnnnnnnnnnnnnnnnnnnnnnnnnnnnnnccccgggcagagccaggctggggtcttgtggggatgctcccagagctgccccgtgtcctgctccacrctcatcgcccacctcgccgtgaggaacggcgcgtcccctccttgtcaccaccctgctgggacatccgtgaccagccccacatgtgccattccagagccctcctcaccccacagcytgtgtcccactgcctgggatgatgctggggggcccaaggcctctcctccccgtgctttcaggctgttgtcaatcctacctagatgaacccactcttgttctgttttctttgtcttccccccgctgtctctctctcttagcccaccctgctgcgggaggatccaaatgtgtgtattgcctgtcactggtactctgtgttgcttctctgctttggggaggctgtgccaaggagcatttgtgcagcatggggaagggctcccasggctgctcccagcrcgctggcaaaggggcagtggcaga

SEQ ID NO: 86621 - DNA, 503 bp, Chicken  19866894387263_3
ccacatgtgccattccagagccctcctcaccccacagcytgtgtcccactgcctgggatgatgctggggggcccaaggcctctcctccccgtgctttcaggctgttgtcaatcctacctagatgaacccactcttgttctgttttctttgtcttccccccgctgtctctctctcttagcccaccctgctgcgggaggatccaaatgtgtgtattgcctgtcactggtactctgtgttgcttctctgctttggggaggctgtgccaaggagcatttgtgcagcatggggaagggctcccasggctgctcccagcrcgctggcaaaggggcagtggcagagcatggtgccctcctgcgggaacggttggcacagggatgtccctgcactgtcatcatgcccttcccttgtgcagggcatgcttactgcagtgtgaggtcctgcaaattcgcccggtgggacctggtgttagggtcaccgcagggacccttttccccatgctgtaa

SEQ ID NO: 86622 - DNA, 489 bp, Chicken  19866894387263_4
ccagagccctcctcaccccacagcytgtgtcccactgcctgggatgatgctggggggcccaaggcctctcctccccgtgctttcaggctgttgtcaatcctacctagatgaacccactcttgttctgttttctttgtcttccccccgctgtctctctctcttagcccaccctgctgcgggaggatccaaatgtgtgtattgcctgtcactggtactctgtgttgcttctctgctttggggaggctgtgccaaggagcatttgtgcagcatggggaagggctcccasggctgctcccagcrcgctggcaaaggggcagtggcagagcatggtgccctcctgcgggaacggttggcacagggatgtccctgcactgtcatcatgcccttcccttgtgcagggcatgcttactgcagtgtgaggtcctgcaaattcgcccggtgggacctggtgttagggtcaccgcagggacccttttccccatgctgtaa

SEQ ID NO: 86623 - DNA, 555 bp, Chicken  19866894387266_1
agcagaggagtttgggaagctcctcctataactgacagtggaaaccctcgaagagtcacccaggctctgcagcagctcacacatctcctggtatgtgaggttggccaccatgccccaacatggcacggtgatgatatttctcccccagaatgcagcagggtatgctctgcacagtgctgggggatggatcacacaatttcagttgatccaagtttattctgtcacagataatttaatatcaaattaaaaagagaaagcagagccactactctttaggtagaactggtcaatttcagcacrtaatcggtcagtgcagtgtggttacacttctttcctttgtctggtgggtccccagttgatcttcatttttactccatttgctctccctgagctgttttgtagcctgtggctctccagatgggctgtgcagaatgagcccacagctgggctgagtgcaggacagtcttgctcaacgtgcacagtatttttgaaaggtcagctaatgggagagctaagcctgcatttgctgacaaatattgaacttaagcagttaag

SEQ ID NO: 86624 - DNA, 600 bp, Chicken  19866894387269_1
aaactggtggttacatcctgtctgcgatatgcagttgcgtaactaatcaggtgggccaaaaaagtatcaataaataaatctttaagaaacataaaatgggatttggctcgaaggacaataggacctgtggaagaaatttccacattaaaaaaacatcgctctttctgaatcctggggtgaagaaacagtttgaaacgaagcagacaattccataattttagggggaaaatatttattataaaagagacaagttcaccaaaacatccagtccaagtttaatttagaaaaaaaatcctcagycccatgctcaactttgctcgcagtcgtaaactggagcactgtggtttcaagggcttggggagttctaagctttctgtataagcactgtgcctacatattttgtgatccagacctgattttgcctttaattctacaccaggagacccaaaggttaactttgagcatgggtcctactttttttccagagatgtgcagtacatggcaagacatcattccctccaaagtatcagaaagaccatgagcagtggggatgttttcctaagactggaaaggaccaagagaagcatccccaggtaggca

SEQ ID NO: 86625 - DNA, 600 bp, Chicken  19866894387276_1
ataacagagacatcgctaccattacagtaaaagattatcttaatggtggggactaaaacatctgagtatcacatcaggctttccccacaaacttcaagaggcaatcactgcttataacttgtttgttgctttggcaatctcttgaaacaagagctgtgccccatagcattactgtaaggctgactttcatgagaatctagaattaagttgataaagctcttgcatcatgcttctatttttcttgcaggatttattaaatcataaagtaaaagaagtgaattccctaggaatcctaagagkacgtatgcaaaacccaaaatggttgtgacagcagttggaaaaacaagcagaaagaaatatatgggagtctgctgttgaagtgtaagtggccatgaacatgcaaatgcttttggaaaacaatcctgctatgagaaacttttacaagtgtcctgcttcatttcctggaacaggaagggaagtaggtcataacactatcttttgaagtaatgacagataactgcacttgttgatgtctttctatgagcccctgatgctaacaataggacaaagatgatctcagagtgccaaaatttccccacc

SEQ ID NO: 86626 - DNA, 600 bp, Chicken  19866894387280_1
ctttcatcagctgcatgtgcccaatgggccttgggatgctctgcatggcagaggaaggagcacatcagtggggtgctccacacagcagctcctctccctctatctgccatggtcatgcatgggcaaagggctctgatcactcactgggaagttattcaggtgtctgcgcaaagtatgtgagtggttgttccatagacaggaagcactgacagtttgatgtgcaaatcataacacgtatcgcttggcctctgagcacttccacacttgcataattaaaatgaatctgtagacgtttttatrgtaaacatgctgaaaatctgcagagtaaaaatataacaacagtgaacctcacattctgcacaatttggaaatatatcccttgatgtcgaagtgtaaatcaaagcctctatgcaaaatgcaaagaacatcggaaactctgggcaatcatacacagatatatctgaacagtagtttaagttatattattcactggaatcttttcctctagcatcaaaaaaaaaagaaatgcaaacccatcaaggagactataaatatttcgagttttcatctagtaaatcatgacagagctgaaatattata

SEQ ID NO: 86627 - DNA, 600 bp, Chicken  19866894387281_1
ccaagggcttctttagctttaaaagcattcttgttgcatcagccatggaatgaaaaatattctctggatgttatgaccatgtaaggtggtggttttttgaattctacttgtgtatcttttatcggtattcttgtgcaaataactcagcaaaccttcctcactctttgggacagtcagaaagataatagcatcacttggaaagtaataaataggtaaggctttaaggtcaagcattgtgtttccttgactttcagtagcctgtagctactgaaaaaggatgtctgctttaaggtactgctkatgatttgttatttacaggttatattacttcagaaatcatcagtgtgttctctttgtgcaagaagttaacttaacaacaatcagagttggtccttaaagtgtaagtgaaggtgtcctaagtgatgtctaaaagacatgtagttacttttagtgagctatatttcacaccatagggggaacacctttctttagcctgtattgcttttgtttgttgttggtgaacactgacccataaaaaaaaaattgtaaatgcataagtacatgctcaaaagatactgcaatacacaatcagcagcatat

SEQ ID NO: 86628 - DNA, 600 bp, Chicken  19866894387283_1
atagtgaagtagataaaaagcagaaccaaaaaactggccattttctagacacctgagacatttaggatagagtaacatttttaagtgtaagattaagtacaagtatgaatttcaaaatgtaatcataattcccaggagcaaagcatgaagtgttcataattgccacgtggaagtactaatagcaggagaaaaaatgtaacacaagttcataaactgattatattgttctgtatatttgaaaatatccaaagtaatgaagactgaaaacatgcctgattaagaaaggaaggaaggaacaartgaatgatcagagaaagagagaaagaaagagagaaagaaagaagaacaattacaaaagaagaagaagaaaaactaggaaaaaaacttttgcaatgattcctgactgtgaaatacggtgtttctttttggattatagttgtaaattttaagtaraagagaaacaaygtagttttccagatctgtgaaaagttgatccgttttaaattaaacatgttccattcattgattgcttgggaaaaataatccataaaacctacacaagtattttgattaagaaaggtcatggtaatgcgttatgag

SEQ ID NO: 86629 - DNA, 591 bp, Chicken  19866894387283_2
tcataattgccacgtggaagtactaatagcaggagaaaaaatgtaacacaagttcataaactgattatattgttctgtatatttgaaaatatccaaagtaatgaagactgaaaacatgcctgattaagaaaggaaggaaggaacaartgaatgatcagagaaagagagaaagaaagagagaaagaaagaagaacaattacaaaagaagaagaagaaaaactaggaaaaaaacttttgcaatgattcctgactgtgaaatacggtgtttctttttggattatagttgtaaattttaagtaraagagaaacaaygtagttttccagatctgtgaaaagttgatccgttttaaattaaacatgttccattcattgattgcttgggaaaaataatccataaaacctacacaagtattttgattaagaaaggtcatggtaatgcgttatgaggttgtagggagataagtactcgttttgcctgctatcaatacctaattaagctagggaactgtttttctgccattgccaatgaagtagctgtgcaagtgtccctttccttaacagggctgggaggaaatgatgaatcattttttt

SEQ ID NO: 86630 - DNA, 579 bp, Chicken  19866894387283_3
cgtggaagtactaatagcaggagaaaaaatgtaacacaagttcataaactgattatattgttctgtatatttgaaaatatccaaagtaatgaagactgaaaacatgcctgattaagaaaggaaggaaggaacaartgaatgatcagagaaagagagaaagaaagagagaaagaaagaagaacaattacaaaagaagaagaagaaaaactaggaaaaaaacttttgcaatgattcctgactgtgaaatacggtgtttctttttggattatagttgtaaattttaagtaraagagaaacaaygtagttttccagatctgtgaaaagttgatccgttttaaattaaacatgttccattcattgattgcttgggaaaaataatccataaaacctacacaagtattttgattaagaaaggtcatggtaatgcgttatgaggttgtagggagataagtactcgttttgcctgctatcaatacctaattaagctagggaactgtttttctgccattgccaatgaagtagctgtgcaagtgtccctttccttaacagggctgggaggaaatgatgaatcattttttt

SEQ ID NO: 86631 - DNA, 600 bp, Chicken  19866894387297_1
agcttctgcatatggctcctagggaactgctgagatggagaaaagtctctgtgacacctctgttgtggtgaaaatggacaacagccgaagtctggacacggagggcatcctcaggggcattgagctctggtatgaagatgtagctcagaaaagcaaggccgagttggatgcactgtacagaactagggtgagttgtagcaaccagtaacacatctttagctctgtaggtgccaaatgtagtagctcagagacaatgacttcattcattctgtcttgactatgtgacttccagactttgcyttccattctgctaaacttggtggaatttccaagttargagaacatccccaaaacgcacacagtgcaatgggacagcactcagccactcagggaatggggaggtggtgggtgagttgggctctgagagctgcaggaggaatgctctgtttggtgctgacatsctcaggagctgctatgcatgagaactttcctcaagtctggaaacagaggaaaggctcctatgttgcaaacaccaccagtgcttactgccagmtctgtcttttctgacagtaccaagagctcgaggagacaaagaggaag

SEQ ID NO: 86632 - DNA, 600 bp, Chicken  19866894387297_2
gagaaaagtctctgtgacacctctgttgtggtgaaaatggacaacagccgaagtctggacacggagggcatcctcaggggcattgagctctggtatgaagatgtagctcagaaaagcaaggccgagttggatgcactgtacagaactagggtgagttgtagcaaccagtaacacatctttagctctgtaggtgccaaatgtagtagctcagagacaatgacttcattcattctgtcttgactatgtgacttccagactttgcyttccattctgctaaacttggtggaatttccaagttargagaacatccccaaaacgcacacagtgcaatgggacagcactcagccactcagggaatggggaggtggtgggtgagttgggctctgagagctgcaggaggaatgctctgtttggtgctgacatsctcaggagctgctatgcatgagaactttcctcaagtctggaaacagaggaaaggctcctatgttgcaaacaccaccagtgcttactgccagmtctgtcttttctgacagtaccaagagctcgaggagacaaagaggaagcaatgcagtgaactgaagtcccaccagcaagagattg

SEQ ID NO: 86633 - DNA, 600 bp, Chicken  19866894387297_3
agttggatgcactgtacagaactagggtgagttgtagcaaccagtaacacatctttagctctgtaggtgccaaatgtagtagctcagagacaatgacttcattcattctgtcttgactatgtgacttccagactttgcyttccattctgctaaacttggtggaatttccaagttargagaacatccccaaaacgcacacagtgcaatgggacagcactcagccactcagggaatggggaggtggtgggtgagttgggctctgagagctgcaggaggaatgctctgtttggtgctgacatsctcaggagctgctatgcatgagaactttcctcaagtctggaaacagaggaaaggctcctatgttgcaaacaccaccagtgcttactgccagmtctgtcttttctgacagtaccaagagctcgaggagacaaagaggaagcaatgcagtgaactgaagtcccaccagcaagagattgaggagctgagttttgtgatgcagagatggcagtgtgaccttgaaaaygtgaagaagagggtacgatggtctgcttttaccctgaaaatttacctattttatcctacgtgtgggatcccaagtct

SEQ ID NO: 86634 - DNA, 600 bp, Chicken  19866894387297_4
atgacttcattcattctgtcttgactatgtgacttccagactttgcyttccattctgctaaacttggtggaatttccaagttargagaacatccccaaaacgcacacagtgcaatgggacagcactcagccactcagggaatggggaggtggtgggtgagttgggctctgagagctgcaggaggaatgctctgtttggtgctgacatsctcaggagctgctatgcatgagaactttcctcaagtctggaaacagaggaaaggctcctatgttgcaaacaccaccagtgcttactgccagmtctgtcttttctgacagtaccaagagctcgaggagacaaagaggaagcaatgcagtgaactgaagtcccaccagcaagagattgaggagctgagttttgtgatgcagagatggcagtgtgaccttgaaaaygtgaagaagagggtacgatggtctgcttttaccctgaaaatttacctattttatcctacgtgtgggatcccaagtcttgttttctgcacctcttgcatttcttctgtctttatctaagagcatggtctcattgctctagagaagatcttagcagtgccaagcagaaaag

SEQ ID NO: 86635 - DNA, 600 bp, Chicken  19866894387297_5
actcagggaatggggaggtggtgggtgagttgggctctgagagctgcaggaggaatgctctgtttggtgctgacatsctcaggagctgctatgcatgagaactttcctcaagtctggaaacagaggaaaggctcctatgttgcaaacaccaccagtgcttactgccagmtctgtcttttctgacagtaccaagagctcgaggagacaaagaggaagcaatgcagtgaactgaagtcccaccagcaagagattgaggagctgagttttgtgatgcagagatggcagtgtgaccttgaaaaygtgaagaagagggtacgatggtctgcttttaccctgaaaatttacctattttatcctacgtgtgggatcccaagtcttgttttctgcacctcttgcatttcttctgtctttatctaagagcatggtctcattgctctagagaagatcttagcagtgccaagcagaaaagtagggttatctgctggtctattctctgttggattgattattgcaaaaaattaattgtgccatattagatgtttggaattgctgcagcactcagacaattgcttcagtgagaattccagcaggagacaatgc

SEQ ID NO: 86636 - DNA, 599 bp, Chicken  19866894387315_1
  misc_feature (1)..(56): n is any nucleotide
nnnnnnnnnnnnnnnnnnnnnnnnnnnnnnnnnnnnnnnnnnnnnnnnnnnnnnnnccacactgcagactagtttaccctttgacgacaaacaaggcaaagatgacaagtgatgaactcacaaagtggctcttaccataccagttaccttccagcaaactctgctccattcctgtgaggtcagtgtacaagcaatacactcttcacacacagtatccctaagccatatgtaaataatactcttttgattgtcttcaatatttgttgatatcaaacagcttcaaaggaacagtaacccagmctgtttctctactctgtgtacaaagaacatgtcagggatgtgtacaaggacatttttttctccctcagcatatcatcatgcagagaggttgtgaaggacttaaatgggaagcagaaattatatatggggtcattaaccttctgtttcaagaccatctcacccaacacaccctgcacatgtgctattgggaagttagcccttcccagcctgccaacagtgcaaaatgtgaggtggcagtcaaagcaaactcaaggttggaagcactcagaaataaagaaaccataagctraagcctcttc

SEQ ID NO: 86637 - DNA, 600 bp, Chicken  19866894387315_2
agtaacccagmctgtttctctactctgtgtacaaagaacatgtcagggatgtgtacaaggacatttttttctccctcagcatatcatcatgcagagaggttgtgaaggacttaaatgggaagcagaaattatatatggggtcattaaccttctgtttcaagaccatctcacccaacacaccctgcacatgtgctattgggaagttagcccttcccagcctgccaacagtgcaaaatgtgaggtggcagtcaaagcaaactcaaggttggaagcactcagaaataaagaaaccataagctraagcctcttctcctgggcctattttggaagttaattcttctgagaaactatataatatcctgtctaatcttctgcttcttcttttcctcacacagattttttttttcttaagacgattaataccttctcaaaggagggaagaatttcctgttatacaacactcattttccagttgaagagcattttctagaaacagaaaacagaatcacagaatcacgggatatcccaaattggaagggaccctcaggaatcatcaattccaactcctacctagtccaagaaactcctcaactgacacag

SEQ ID NO: 86638 - DNA, 599 bp, Chicken  19866894387321_1
  misc_feature (1)..(148): n is any nucleotide
nnnnnnnnnnnnnnnnnnnnnnnnnnnnnnnnnnnnnnnnnnnnnnnnnnnnnnnnnnnnnnnnnnnnnnnnnnnnnnnnnnnnnnnnnnnnnnnnnnnnnnnnnnnnnnnnnnnnnnnnnnnnnnnnnnnnnnnnnnnnnnnnnnnnttatgtacctcactcaagtccactaaaatcctagaagggaaagtttctttcagggagtgtgactgttgtataaccagaaacccctacagcacagccgtactctgtcctgccaacccacatgcccataccacctgagacacagctctcacacwgttcaagcgatgagcaccaatggacacagaactccagttctgatgaataaaaatacccatggtaaaaataacctattgtctatcacaactctgccttgtaacatgattgagaaagaagagtcaagttaccctttttgttcacatcctcttccgtcactgctgactggcacaatgtttttacaagttcatgacaactgctgttagtcaggccttgagcatccatcaggtgaagcatgattgaactraacaaacagaggtcttttaagtgttccactgccccactgctggcttcacagacc

SEQ ID NO: 86639 - DNA, 600 bp, Chicken  19866894387321_2
tactctgtcctgccaacccacatgcccataccacctgagacacagctctcacacwgttcaagcgatgagcaccaatggacacagaactccagttctgatgaataaaaatacccatggtaaaaataacctattgtctatcacaactctgccttgtaacatgattgagaaagaagagtcaagttaccctttttgttcacatcctcttccgtcactgctgactggcacaatgtttttacaagttcatgacaactgctgttagtcaggccttgagcatccatcaggtgaagcatgattgaactraacaaacagaggtcttttaagtgttccactgccccactgctggcttcacagacccgactgtacaacttgaagatgttgttcttcagggtctcatccctgagcacctsctgyaccaccactgggtgcrgcaagatgcaattctgcagccaccgcagagttaacgaaacattctgcataytgaggctgtgctcaaccatggactttaccagccatttagttactatgcaggcagatgcacaggtcagactgactgcttcatctccaagatcagcagaatttgaggggttcctctgaatgttt

SEQ ID NO: 86640 - DNA, 581 bp, Chicken  19866894387321_3
atacccatggtaaaaataacctattgtctatcacaactctgccttgtaacatgattgagaaagaagagtcaagttaccctttttgttcacatcctcttccgtcactgctgactggcacaatgtttttacaagttcatgacaactgctgttagtcaggccttgagcatccatcaggtgaagcatgattgaactraacaaacagaggtcttttaagtgttccactgccccactgctggcttcacagacccgactgtacaacttgaagatgttgttcttcagggtctcatccctgagcacctsctgyaccaccactgggtgcrgcaagatgcaattctgcagccaccgcagagttaacgaaacattctgcataytgaggctgtgctcaaccatggactttaccagccatttagttactatgcaggcagatgcacaggtcagactgactgcttcatctccaagatcagcagaatttgaggggttcctctgaatgtttggtaggcagcgctgggaaagcaggctcccagtggacaaatatggcattcagatcctctctgcatttctccagctcaaaaggcattcag

SEQ ID NO: 86641 - DNA, 577 bp, Chicken  19866894387321_4
ccatggtaaaaataacctattgtctatcacaactctgccttgtaacatgattgagaaagaagagtcaagttaccctttttgttcacatcctcttccgtcactgctgactggcacaatgtttttacaagttcatgacaactgctgttagtcaggccttgagcatccatcaggtgaagcatgattgaactraacaaacagaggtcttttaagtgttccactgccccactgctggcttcacagacccgactgtacaacttgaagatgttgttcttcagggtctcatccctgagcacctsctgyaccaccactgggtgcrgcaagatgcaattctgcagccaccgcagagttaacgaaacattctgcataytgaggctgtgctcaaccatggactttaccagccatttagttactatgcaggcagatgcacaggtcagactgactgcttcatctccaagatcagcagaatttgaggggttcctctgaatgtttggtaggcagcgctgggaaagcaggctcccagtggacaaatatggcattcagatcctctctgcatttctccagctcaaaaggcattcag

SEQ ID NO: 86642 - DNA, 561 bp, Chicken  19866894387321_5
ctattgtctatcacaactctgccttgtaacatgattgagaaagaagagtcaagttaccctttttgttcacatcctcttccgtcactgctgactggcacaatgtttttacaagttcatgacaactgctgttagtcaggccttgagcatccatcaggtgaagcatgattgaactraacaaacagaggtcttttaagtgttccactgccccactgctggcttcacagacccgactgtacaacttgaagatgttgttcttcagggtctcatccctgagcacctsctgyaccaccactgggtgcrgcaagatgcaattctgcagccaccgcagagttaacgaaacattctgcataytgaggctgtgctcaaccatggactttaccagccatttagttactatgcaggcagatgcacaggtcagactgactgcttcatctccaagatcagcagaatttgaggggttcctctgaatgtttggtaggcagcgctgggaaagcaggctcccagtggacaaatatggcattcagatcctctctgcatttctccagctcaaaaggcattcag

SEQ ID NO: 86643 - DNA, 510 bp, Chicken  19866894387321_6
agttaccctttttgttcacatcctcttccgtcactgctgactggcacaatgtttttacaagttcatgacaactgctgttagtcaggccttgagcatccatcaggtgaagcatgattgaactraacaaacagaggtcttttaagtgttccactgccccactgctggcttcacagacccgactgtacaacttgaagatgttgttcttcagggtctcatccctgagcacctsctgyaccaccactgggtgcrgcaagatgcaattctgcagccaccgcagagttaacgaaacattctgcataytgaggctgtgctcaaccatggactttaccagccatttagttactatgcaggcagatgcacaggtcagactgactgcttcatctccaagatcagcagaatttgaggggttcctctgaatgtttggtaggcagcgctgggaaagcaggctcccagtggacaaatatggcattcagatcctctctgcatttctccagctcaaaaggcattcag

SEQ ID NO: 86644 - DNA, 600 bp, Chicken  19866894387322_1
tttattacatatttcagtataatttatagatgttacttgaaatatgctttggaaatgggagagagcttgttcattttagcttgtgaactgccggcaataactgtggttccagtcatgaaaaatttgcttatcactctgaagagctggactgtggactgtatgggtgtttttccctgtccagaggtgcttctttttgaggtctaaacaccagacctttgtctggtgatgtattccccttgcttaaaaaaaaaaaaataacccactgttttgcaagtgaacttacacccgtatcctcacttyttatgcattatccacattatcttctgcaaacatctataaatgatatggagaaagaataacttgcaattatttttttttccttaagttcwgtcttttgatgaaataggataagtctattttatgccctgcagatctttggaaagctgattggtatttttcatttacttttccagtccgattgtgttctgtctgtttcttcctcaggctgttcctattctttcttgtctctgcaaatctgaaatactacctagaagaacagaggaatgaattatgtaattgctaatttgaaaaggggggagg

SEQ ID NO: 86645 - DNA, 587 bp, Chicken  19866894387322_2
gccggcaataactgtggttccagtcatgaaaaatttgcttatcactctgaagagctggactgtggactgtatgggtgtttttccctgtccagaggtgcttctttttgaggtctaaacaccagacctttgtctggtgatgtattccccttgcttaaaaaaaaaaaaataacccactgttttgcaagtgaacttacacccgtatcctcacttyttatgcattatccacattatcttctgcaaacatctataaatgatatggagaaagaataacttgcaattatttttttttccttaagttcwgtcttttgatgaaataggataagtctattttatgccctgcagatctttggaaagctgattggtatttttcatttacttttccagtccgattgtgttctgtctgtttcttcctcaggctgttcctattctttcttgtctctgcaaatctgaaatactacctagaagaacagaggaatgaattatgtaattgctaatttgaaaaggggggaggatacagtggtgttctcacagtgtcggaagtaatgtggcaaaggagaagagaaaggaccttcttgtaagggaagagt

SEQ ID NO: 86646 - DNA, 600 bp, Chicken  19866894387324_1
tgagtttttctgaggaggtgcttcagacgagatgcagaaagaagcacgtgggacttaatggccatagcagcaggggtgcattaaattttctcctgaatgcatgatgcaatttaattttgtccaagaggagtcaatctgtgtgctctgagacttctcccatggtgcaaaccagagcagagtctgtggagacaattaggagactctcttccaaaatgcatgcctgatcttcaccagaactcaaagataatgcaaatgttcctaagaatgttaacatacgccataaagagggtgatgtaaagrtgaggcgactctgccatcaatccacgtatactggattatgaacgaactcttactaggggaaagatggcttgttaaggatcacttggctgtagtaagcacactgaatagcaggagcctggggttttctgctgaagcttagccagaagttacatgacaaagggacttcaaacacaagtcatccatttgtctgcatcagcaactttgatcaggtgaaacaaagggattgttgtcttgagccctacaggcagcaggaatacctctgcaagtgcctcctgtgttcttaccactagctaagctagt

SEQ ID NO: 86647 - DNA, 600 bp, Chicken  19866894387324_2
acttggctgtagtaagcacactgaatagcaggagcctggggttttctgctgaagcttagccagaagttacatgacaaagggacttcaaacacaagtcatccatttgtctgcatcagcaactttgatcaggtgaaacaaagggattgttgtcttgagccctacaggcagcaggaatacctctgcaagtgcctcctgtgttcttaccactagctaagctagtcagaaggaagacaagtgggagtatgagaaagaaggggtgaaaagatcagttggtgtgctgcttttataaggataggcaargggtggcacttaaatgccaagtaactgtgttggctgttcacaacagttcataattgcatttgcttctgtctcacacctcccaccttgaaaagccggattcctggggagttgtgttttctcctgaggaagaacatgctgaagcagcatggagtggaaccacagaatctcaggagccacaggagctcatgatacaatggggcaattactgcctcctgttccagttccctaagaaggtcatgggcagccagtctgtactataagtactgtctaagagcagacagggcaggatggaccttcctc

SEQ ID NO: 86648 - DNA, 600 bp, Chicken  19866894387340_1
taataattcattatttaaaatgccattgtttggcagtgtccgtatttttacctagtctaaaaaagaaaaatccaaaaattaaatggacttagagaatgtttccagctttgatttcaggactggatcactgataagatgtttcacactgtttacattattcatcaatgagttcctactcttgcaaactagtctaagcttcagttccacttgaacttttaattgagatagagaaagaaaggaagaaaggaagaaaggaagaaaggaagaaaggaagggaagatgtgagaactgttgtttctwtccagaaaaggcaagcatttacaaaaacagcagaaactgaaccacaaggatcacaattgatgtttataatgaaaacatgaaacaacaacccttccttctgagacaagtcaattaaataaaatggattctcatgacacttacatgaaacttgtttccatattatacataaatgtgatactaatgtgagaaagaaaatgtgattcaaacacatatccactgtgcttacatcctactccaaactctccagtcaatgtcccagaagtgtccttgcatgaagtatgcaatacagctaaaaattgt

SEQ ID NO: 86649 - DNA, 600 bp, Chicken  19866894387343_1
cttgtcagtcccatccacactgctttaggtactaaagacctgatttaggtttctcactacatcactaacatgtttttgattttttttatctttaaagccttaatacccttaggtgtgagccaggtttcacagcccatcagctcattcgaaatattgaccataaaatagttggaacatgttaattttgttaaaccactacaatttctcctgtaggtatatgtggatttgaggatacattaacatgctgttgggtgatttgtgaatcagcacctttagatgagggccataccgtactccttwtgggtcaaaggatgtttcatgctgatttgagctatggttaaaaaagaaatgcagcttgcacgctgcaaggtgaggaaaccagaactctgtgaaaaatactcatggcacagtgaaagtgagaaaattaaagctatgaaagcaaccttgctatctttaattctttggacaagtagttctttcaatagcgataagctgatttactacaggatcccttgattattcaaaatcccaagaaaccaaattctctgaattttcctccttggaaatgcagtggacactttgttctctaattgatccaat

SEQ ID NO: 86650 - DNA, 600 bp, Chicken  19866894387348_1
aacgagtgcattcacaaaaagccctgaaattgtgttatgctctgaagtaggctcttgattttgtgactactgaatattatctttggttgctagaagctggtcatgtggaaaagcagctcttgagaaggagggagcatcgatttcttgttccaaatcagtttttgaggagacaaggaataggagagcattagaatagaaaactacagcatgcccaaacacatttcttcgttgtgtgacgattttatttttctgaagttcagttaaagccaatataaacttataaatcgttaatggttcttytgtaaaggtgcaggctttagagtatcagtagaagtaaatactgttacacaaaagagctcctatacagacatttttagcatacacgctttagggaagaaaaacaattctgtgtttaatccccgagcgcaacaaggaggggaagatcataatgaatgttcacatttggatagtacttgctgaggagctgaccacgttctttaattaaacaaaaccaatgtttgaagtgttaaagatgtcttgttgcacgttgaataagatctcatagtacgcaaaatgtgtagagataacatgctttagttg

SEQ ID NO: 86651 - DNA, 599 bp, Chicken  19866894387349_1
  misc_feature (1)..(65): n is any nucleotide
nnnnnnnnnnnnnnnnnnnnnnnnnnnnnnnnnnnnnnnnnnnnnnnnnnnnnnnnnnnnnnnnntcagtgtgtcttggttagcttgctcctggtggggaccaggttcagctgtgattttgacagatgctttgctggatgactctttcaaggatgcctgttcttcaccttcatcagaatgctctactgcaggcctcagtttcacagacgctctctcttctttagtagatattaccttttgctcccgtatatttcctatgtcactcttcccagtgtgctcattatcattaacagcatcacyttctccttgagtatcctcattcgctkcttcttccagtgtaacatcttcagctggctgcagttgtgcttcaagatattccacaacagataattcttcctctgctatttttttgcgttcttcctttatttttttacgggctctgtaacccctgtaattgctttgaacaatgatagctgcttcttcttctgwtttaggaagggcactcttcactccagctgtacattcctcattttcttgaagttctttttccttctccttttcactagaggatgccgcattctcagtttctttctttctaa

SEQ ID NO: 86652 - DNA, 599 bp, Chicken  19866894387349_2
  misc_feature (1)..(39): n is any nucleotide
nnnnnnnnnnnnnnnnnnnnnnnnnnnnnnnnnnnnnnntcagtgtgtcttggttagcttgctcctggtggggaccaggttcagctgtgattttgacagatgctttgctggatgactctttcaaggatgcctgttcttcaccttcatcagaatgctctactgcaggcctcagtttcacagacgctctctcttctttagtagatattaccttttgctcccgtatatttcctatgtcactcttcccagtgtgctcattatcattaacagcatcacyttctccttgagtatcctcattcgctkcttcttccagtgtaacatcttcagctggctgcagttgtgcttcaagatattccacaacagataattcttcctctgctatttttttgcgttcttcctttatttttttacgggctctgtaacccctgtaattgctttgaacaatgatagctgcttcttcttctgwtttaggaagggcactcttcactccagctgtacattcctcattttcttgaagttctttttccttctccttttcactagaggatgccgcattctcagtttctttctttctaagtgattccctaaatggaatggagttt

SEQ ID NO: 86653 - DNA, 600 bp, Chicken  19866894387349_3
aggcctcagtttcacagacgctctctcttctttagtagatattaccttttgctcccgtatatttcctatgtcactcttcccagtgtgctcattatcattaacagcatcacyttctccttgagtatcctcattcgctkcttcttccagtgtaacatcttcagctggctgcagttgtgcttcaagatattccacaacagataattcttcctctgctatttttttgcgttcttcctttatttttttacgggctctgtaacccctgtaattgctttgaacaatgatagctgcttcttcttctgwtttaggaagggcactcttcactccagctgtacattcctcattttcttgaagttctttttccttctccttttcactagaggatgccgcattctcagtttctttctttctaagtgattccctaaatggaatggagtttgggggaaaaattacagttgaaggagatgaaagatggtgacagctttacaattccctttggtgaactaccatcgtgtagcaaatggcaatttgatagattgtaacatggtaaaaattcagtgcatatagctagaattagggccacactgttcctgcccattgtcc

SEQ ID NO: 86654 - DNA, 599 bp, Chicken  19866894387351_1
  misc_feature (1)..(90): n is any nucleotide
nnnnnnnnnnnnnnnnnnnnnnnnnnnnnnnnnnnnnnnnnnnnnnnnnnnnnnnnnnnnnnnnnnnnnnnnnnnnnnnnnnnnnnnnnntatctcattgtaaattcaagtatttatgccagacctacaggaccaatagagtgcaattctatctgtgaataagtagaagattaccctaatctaacagaaacagacttcgaaacagttaactcaaaaacctccagacaagcatagtctagtctccacagggaaaaaaaaaaaagactacaataacacctctctcccagacacacacaaaaraagctagtcttcaaattgaacatacttgactgcaattttaaagctttattccataaaatcttcagatatgagaataatgggtagcccttctcttgagacagtagacttctttcagaaagctgtaacttctattcactttctactgcaaagttgaaagccctgcaatggtatgacaaaataacttttactcgagcaaagcacagcagccccaacataatytctttaaacayctaatgctagtcaaagacaatgaaaggaaagcaacatgggctagaacagtatctaaccagcagatctgc

SEQ ID NO: 86655 - DNA, 600 bp, Chicken  19866894387351_2
tccagacaagcatagtctagtctccacagggaaaaaaaaaaaagactacaataacacctctctcccagacacacacaaaaraagctagtcttcaaattgaacatacttgactgcaattttaaagctttattccataaaatcttcagatatgagaataatgggtagcccttctcttgagacagtagacttctttcagaaagctgtaacttctattcactttctactgcaaagttgaaagccctgcaatggtatgacaaaataacttttactcgagcaaagcacagcagccccaacataatytctttaaacayctaatgctagtcaaagacaatgaaaggaaagcaacatgggctagaacagtatctaaccagcagatctgctaaacactgctgcttttgcagctgctttgaatggtctaagcaatcagagcatcagagctcttacacttccaaaaccacacctcaaaaacctctactgatctagtaccttctgccacaccgtacagaaaaagtcaaagtattaaaaagcatttctaaataacacaacataaatgaaactctgaagataccaaaacaattcttcagaaaaaaaaccacaaca

SEQ ID NO: 86656 - DNA, 600 bp, Chicken  19866894387351_3
atagtctagtctccacagggaaaaaaaaaaaagactacaataacacctctctcccagacacacacaaaaraagctagtcttcaaattgaacatacttgactgcaattttaaagctttattccataaaatcttcagatatgagaataatgggtagcccttctcttgagacagtagacttctttcagaaagctgtaacttctattcactttctactgcaaagttgaaagccctgcaatggtatgacaaaataacttttactcgagcaaagcacagcagccccaacataatytctttaaacayctaatgctagtcaaagacaatgaaaggaaagcaacatgggctagaacagtatctaaccagcagatctgctaaacactgctgcttttgcagctgctttgaatggtctaagcaatcagagcatcagagctcttacacttccaaaaccacacctcaaaaacctctactgatctagtaccttctgccacaccgtacagaaaaagtcaaagtattaaaaagcatttctaaataacacaacataaatgaaactctgaagataccaaaacaattcttcagaaaaaaaaccacaacacacaatgctat

SEQ ID NO: 86657 - DNA, 600 bp, Chicken  19866894387354_1
aacacactgaagacagtcactagggcgtatatgaatggtaaatgtagcaactgggatcactatgtacctgctataatgcaacacttcatacacagctaatttctcttaagaatgcaaaggacacttctgtattttcactaacaagaaagaagagtgttagtttgctgtcattgtcgtaggagtcttttgtgcctatgactcccctcgctacaactgctagcaataaatcacattctacactcccttaattggattacatacctaagaaagcacagttctcagtaagagctggcaaaaaawatcagtatctatgtaaagcagtaaaagggaatataatcatggacgttaaaatattgtacactgtaaggcaagttaaagtccctctgaattgtcttggtctttttcagataattctttgtccctgttctaagtgtagctttctcatgtccaatccagcaataaaaaccattccaaactttcctcatgatttttactagattaaaacctattagtcctcagtacatgtacacagatcacactgcctttgtgttacacggacgggaagctgcagattccaaaagtcttctgaggacaatggaa

SEQ ID NO: 86658 - DNA, 600 bp, Chicken  19866894387355_1
tagagacatgcatgaaaaacaatccctaaactgctacttgcttgcaaaacgatttaaaacgcacaaaccatatctaatgggtacgatttcaagttgctggaatatcaggcaactaaaatttggacgcagtaagaacctgtctggccaaaagcactgccagttaattctaagtccacgcgcagtcctctggaaacaatttgctcctaaaccaacgtgctgtagtatttgaaggcatggtgccaaacttaaaataccctcatttcttcctgcggtaggcatgcagccttctttagaaccaartacatcaataacttccatacacattgatttccagatctcccccaaaatggcaattcyttcaatctaaggatgcatgaaaataaaacctccagtaattgaaggaaaaataataaaccttgatagctgagctgaattccattcagaattagactgcaactggtcaatacagctgggtaccactacactacagctatcatgccctttaatttctagagcagagtctatcaggggctgattttaagcccttcctgcactacacaaacagcacagcacatcattccggtgtgcggatcccaatgc

SEQ ID NO: 86659 - DNA, 600 bp, Chicken  19866894387355_2
aacgcacaaaccatatctaatgggtacgatttcaagttgctggaatatcaggcaactaaaatttggacgcagtaagaacctgtctggccaaaagcactgccagttaattctaagtccacgcgcagtcctctggaaacaatttgctcctaaaccaacgtgctgtagtatttgaaggcatggtgccaaacttaaaataccctcatttcttcctgcggtaggcatgcagccttctttagaaccaartacatcaataacttccatacacattgatttccagatctcccccaaaatggcaattcyttcaatctaaggatgcatgaaaataaaacctccagtaattgaaggaaaaataataaaccttgatagctgagctgaattccattcagaattagactgcaactggtcaatacagctgggtaccactacactacagctatcatgccctttaatttctagagcagagtctatcaggggctgattttaagcccttcctgcactacacaaacagcacagcacatcattccggtgtgcggatcccaatgctccccatcagtcactgctgaaataaacagcgacacgagctttatttcacaaagagcc

SEQ ID NO: 86660 - DNA, 600 bp, Chicken  19866894387358_1
aatcctttctccctcatccatctccttgttttagaatagcccataaaaatgaaaaacaaagagaaatccctcttcatcacatagatgaaatagaaaatgaaataaggtccagacatcatgaagttttttgttgttgtttgtttgtttgtatggtagactctaccaattaagaaccacaacacaggaaactacagtctacacctggaaaagagcaggaatttttctgttccttggatttcggtagcattcaaatggaatttgaaattaagtagggtcaggacaaccatttgagaggattcmgaatattttagaattgaaatacatgcacctgcattgcactgatctttgtaatattcattgcaataggctaaaatccatccaggaaragggagcactgccctcttgtatccagaaagtactccagctgctgagaaaagggcacagcacccatttctccagttctttcctgctttccctggcttttatttgcaaatgctttgatttcaactcaaatagtagatagtgagtcattatacgtattttgacccctttctttccacaacatggcaaagtataaggggaactagtgccatttcagtc

SEQ ID NO: 86661 - DNA, 582 bp, Chicken  19866894387358_2
gaaatagaaaatgaaataaggtccagacatcatgaagttttttgttgttgtttgtttgtttgtatggtagactctaccaattaagaaccacaacacaggaaactacagtctacacctggaaaagagcaggaatttttctgttccttggatttcggtagcattcaaatggaatttgaaattaagtagggtcaggacaaccatttgagaggattcmgaatattttagaattgaaatacatgcacctgcattgcactgatctttgtaatattcattgcaataggctaaaatccatccaggaaragggagcactgccctcttgtatccagaaagtactccagctgctgagaaaagggcacagcacccatttctccagttctttcctgctttccctggcttttatttgcaaatgctttgatttcaactcaaatagtagatagtgagtcattatacgtattttgacccctttctttccacaacatggcaaagtataaggggaactagtgccatttcagtccaatcacaaggcccaaaatttgtgaaatcaacctttgtttcctgcatgaagaaccttaagtgattgaa

SEQ ID NO: 86662 - DNA, 600 bp, Chicken  19866894387374_1
ccctgctcacagcagggctacctgacatcttctgttaaaaagcccttccctcaaaacacagttctagctgggagtctgaactggaggaaaatgaaagctacagcagatcacaacgagaagtaaatgccacttcagaagcttatctcagtgactgatcccaactaaaacggtatcttaagcagcagctgaacacaattcacacctactggcagcgacaccctgccctgtcgctttgcagaaagatccaaggagaggtgataccatcaggcggtgaagttctagatttgattgctgggaaartctcctggaaattgccagtgactgaaattaaattacagtgacggggaagcaatttccacctctctgataaattgttgagattctgtgttttgttacactgaggttgccatttgattcacttatttctatgcctaaataaacrcaactaacagaggagataaaagttgaggagggtattactataaaccaagtgaacagggggttaaactgcagtggcacatacacataaccatgcttgcaaaaaacaagcacttgctcgcataccatcagtaactgagacattctgtatatggcagcatt

SEQ ID NO: 86663 - DNA, 600 bp, Chicken  19866894387374_2
tctcagtgactgatcccaactaaaacggtatcttaagcagcagctgaacacaattcacacctactggcagcgacaccctgccctgtcgctttgcagaaagatccaaggagaggtgataccatcaggcggtgaagttctagatttgattgctgggaaartctcctggaaattgccagtgactgaaattaaattacagtgacggggaagcaatttccacctctctgataaattgttgagattctgtgttttgttacactgaggttgccatttgattcacttatttctatgcctaaataaacrcaactaacagaggagataaaagttgaggagggtattactataaaccaagtgaacagggggttaaactgcagtggcacatacacataaccatgcttgcaaaaaacaagcacttgctcgcataccatcagtaactgagacattctgtatatggcagcattagcccctcaggaagctactaagcctacgggttttatagggcacatctggaaatgatgtttttttgactatttaaagtacgtatacagatacaagcatagcactctgtagcccagtaagaagaccattttgagagaggattaa

SEQ ID NO: 86664 - DNA, 599 bp, Chicken  19866894387375_1
  misc_feature (1)..(58): n is any nucleotide
nnnnnnnnnnnnnnnnnnnnnnnnnnnnnnnnnnnnnnnnnnnnnnnnnnnnnnnnnnaggaaagcataattttcccaagctctttctcattctgtgctgtcccaggtggccagctgacagctcatgcatcacttttgctacacaccagccattaaaacacatgcttgcttccataaagaccatggtatccctgcccacagcagagcattggaaccagatgagctctaagccttccaacccaagacactatatgattctgtgattccacgataagtgctgaactattgccatcacagagrgaacatcagggtatttggtgggtccagtataacgggaggtcagaggggcaggaggtcagaaaataaaaagtaatactgtgctttgtcttcaccgtacatggaaagggaaaggatagcacctacaaggaggaaaacagaagagtccaaaacctgaggcaagtcacacagggtgctgtgtaaagaacacgaaagctaggagagctgcagccctgttgggtatattcccctcaaaaatgaagaaatgagccttgaacataaatgcaaagaaaaaggttatgatatttccgttgggcagaaga

SEQ ID NO: 86665 - DNA, 600 bp, Chicken  19866894387382_1
gtacagaacctgtatatacaggcagcagccagtagagccgaagagtagaaccaaaaaagcgtatcaaggaatggggtcttggagatgcctgtagagaatagttgattctctgtattgtggaaaactaaagttgagcgacttaggaaatctacagccctttgtcacacatagttgttgtgatgtaaacgagcagcgacttttcatcctgctaaaagtcagtgacttttgtaccagttcttgctcacagctggatcttgagttttgtccagggctaagcatttctctcccctctctggaaastggctgtcagcccttccctgtcttgtgaaacatatgcaaaggtcaggattgggtattggagtcttcagcagggagcgtggctgctggaaaataaaactgccatgaaaccagtcgctcataacaatgagcagttagtgctttcaagatgtgagccagcatatgtcgtggcttccattgcagtgttatctgctctgatcaatgggtgtgaaattaacttgttcctgatgtgatctgcgtttgtaagaggggaagttggtcagcatatagaaggtgctgtccagggcatgtttgtaatgttgg

SEQ ID NO: 86666 - DNA, 600 bp, Chicken  19866894387388_1
gtttgattgcagctctacccttccttcccttttcataaaaacaaccgtgtcagctgtgaagaaggatgctgtcaatccgttttcctggaacaggctcatattgttcagtccaacatttaacatttttattgccttagagtgagaaagaaaatttcaagcagtgaaaaaaatctaatcatctattcagagaagcaataagccaccattattcagcagtatcatggagatgcctctggaatgcaaaacccgtacctctgagagcagtgctagtctgccctttatttaatgaactgaggatgmgttttaagtactcccattcgtcttctcttggtttatctcaattctgcaagagataatggtagggttggggggttttttgcctttatttttattttttttaaattatactaaatatcatgactgtaagttgcagaataaaaccaataagaaatcattcacttgccagtgctggattgttccctgtagcttatcttttgctccctaaagtatatatataatggagcttctgttgaaactgaagaacaatacataattacatgctttattgttataatttgagcctctgggtattgtgttagc

SEQ ID NO: 86667 - DNA, 600 bp, Chicken  19866894387391_1
atattatttagtctgtaaccacagccatgaaatcctgcaggcagacctcaggcagccgcacagctcgtgctgggagcagcggggcgcgcgtgggtgccgggggtgcttcacagccaccactgcaaatacaggaacacacacagaagggggaacggaaccgaaataccgccagcagagatgtatatcaacaccaaacatcagcagcgactgtttgttttgcataagcaattgttatgtagcagaacggtcccttttttcggttgtgtttaccatcgtttttttcacctggaattgcaacarataaccgcaaacgggttctctgaggttaaaaaagaagcaaataaattccttaggcgctttgcccttctacgtttctcaacgcagcacaatccgcgtatttcaggttcacaccgtgggtgggggctgcagcggcgctccgctccctttgcacccatcgcaccgcgtctcgcgctcagagctgcgacggagaggaacttccgcgccctgccgcgcgggacagcgccggagcggagcggggccgtgcggggagcgctgcgctcagctccgcggggcggctttggggccgcgggctgacggagc

SEQ ID NO: 86668 - DNA, 599 bp, Chicken  19866894387399_1
  misc_feature (1)..(4): n is any nucleotide
nnnnttgccaacatttggtgatgactggtaaatgcttccctggtattttctaactctcccaagtagaatgctgtagctccactgcactgagtattcattgtagaatgctcacgaagaaaccacagattaacttttcaagtggatgaagcccccacggtcaatggaaaaaaaaatgttacataaggcactacttttgttttttaattctgacttgcttagtgcacacagaatttgaagtgttttcatgagcatttcttccaatggcagctgttgttacagtaccttccacctctgtactaygtcttgygttaagttggtttagctttttgttagactatatggygagtaagcttggggaactgatttggattaaaaacagtgttttttttacttatctttttagaactgatatcagtcccatggcaaagctcaacatgtgctttcacaaaaagtattggcattggtggggcaatacagtactggatggggracacggcttccttttgcaggaaggaatacttttgaaactggtctgttgcattctgtattcaaatcagattctagttcttcctaaaggaggattagagaacatgcgtact

SEQ ID NO: 86669 - DNA, 600 bp, Chicken  19866894387399_2
ccaacatttggtgatgactggtaaatgcttccctggtattttctaactctcccaagtagaatgctgtagctccactgcactgagtattcattgtagaatgctcacgaagaaaccacagattaacttttcaagtggatgaagcccccacggtcaatggaaaaaaaaatgttacataaggcactacttttgttttttaattctgacttgcttagtgcacacagaatttgaagtgttttcatgagcatttcttccaatggcagctgttgttacagtaccttccacctctgtactaygtcttgygttaagttggtttagctttttgttagactatatggygagtaagcttggggaactgatttggattaaaaacagtgttttttttacttatctttttagaactgatatcagtcccatggcaaagctcaacatgtgctttcacaaaaagtattggcattggtggggcaatacagtactggatggggracacggcttccttttgcaggaaggaatacttttgaaactggtctgttgcattctgtattcaaatcagattctagttcttcctaaaggaggattagagaacatgcgtactcctttttc

SEQ ID NO: 86670 - DNA, 600 bp, Chicken  19866894387399_3
tattttctaactctcccaagtagaatgctgtagctccactgcactgagtattcattgtagaatgctcacgaagaaaccacagattaacttttcaagtggatgaagcccccacggtcaatggaaaaaaaaatgttacataaggcactacttttgttttttaattctgacttgcttagtgcacacagaatttgaagtgttttcatgagcatttcttccaatggcagctgttgttacagtaccttccacctctgtactaygtcttgygttaagttggtttagctttttgttagactatatggygagtaagcttggggaactgatttggattaaaaacagtgttttttttacttatctttttagaactgatatcagtcccatggcaaagctcaacatgtgctttcacaaaaagtattggcattggtggggcaatacagtactggatggggracacggcttccttttgcaggaaggaatacttttgaaactggtctgttgcattctgtattcaaatcagattctagttcttcctaaaggaggattagagaacatgcgtactcctttttctccatgctacctatgtattttctctttacttccttt

SEQ ID NO: 86671 - DNA, 600 bp, Chicken  19866894387399_4
cttttgttttttaattctgacttgcttagtgcacacagaatttgaagtgttttcatgagcatttcttccaatggcagctgttgttacagtaccttccacctctgtactaygtcttgygttaagttggtttagctttttgttagactatatggygagtaagcttggggaactgatttggattaaaaacagtgttttttttacttatctttttagaactgatatcagtcccatggcaaagctcaacatgtgctttcacaaaaagtattggcattggtggggcaatacagtactggatggggracacggcttccttttgcaggaaggaatacttttgaaactggtctgttgcattctgtattcaaatcagattctagttcttcctaaaggaggattagagaacatgcgtactcctttttctccatgctacctatgtattttctctttacttccttttttaccttcaaataaagcaggtatttctcatcttctccaatgttttctcaaagcagattggctttctgggtgactcactcacctctaatcttaattgctactccaggagcatacacaaaagacatttgagacaattttcagcatttc

SEQ ID NO: 86672 - DNA, 600 bp, Chicken  19866894387401_1
gagacatggttaagaggcgtggtagggaagggttggcagttggactagattatcttagaggtcttctccaaccttaatgattctctgaggatcaagtccaactcctatctacgaaaagccatccaaaaatcagaccatgtgtctgagagcctacacagagaaccaaacccacacggagaggaagcattccatcaagtcctgctcctctgatccttctcttcatctcaagcccttgagctgatcttccactgtgggggtcttggagacagtaggtgcaaaaggaggaagccttgtcccagractgggactgcatgcatggctgcagccacaataagagcttgtggagagcaaggaaagggcatgaggaagtcatacaggctgggggaagaacagatgtttgaccagcagaaacttccaacttctgcagatgtcagtttgatacaagaagcaccactagaaaggcgtaaaggtggagggcatcacaagaaccagcaaggtagaacaccagaaaaatagctgaaccatttgtctatgaaaggcaacaaatagttgtgtgttcaagcgtgatattaggcataatggagaccctttacctttttg

SEQ ID NO: 86673 - DNA, 599 bp, Chicken  19866894387404_1
  misc_feature (1)..(51): n is any nucleotide
nnnnnnnnnnnnnnnnnnnnnnnnnnnnnnnnnnnnnnnnnnnnnnnnnnnagggtgaacctctgagtgcattgtggtgtcctggcgtgtgagggttttattcagcttggctgatttaatttcttccatttgtggcaataaaacagatctttcccaacgaagcacatgtctgaagctgtccttatctgacttcattctaaggatgcttatctcatccttcagtatatccttaattatcgcccctgtgtgtattttggagcacttcaggacaaacagttgcagcagtgtgcagaggagccyggaggccgtggggctgttccagcccacaaaccccatagcagcagtggcagcggctgctcggtgtcaccccgtgtccctgcaggggacggagcagctcaggaacatccccaccaccccttggaggcaccaaattggctcctctcctcccagctccgctcctccagttctgttatctgctgcctggcagagggatgtgaaagaaaggagaattttggacgtgktttagagctgctggagagctgaggggcaggtgtttgggagctgctatgtgaaatggagccaggtgggctcggaggcgg

SEQ ID NO: 86674 - DNA, 600 bp, Chicken  19866894387404_2
gtatatccttaattatcgcccctgtgtgtattttggagcacttcaggacaaacagttgcagcagtgtgcagaggagccyggaggccgtggggctgttccagcccacaaaccccatagcagcagtggcagcggctgctcggtgtcaccccgtgtccctgcaggggacggagcagctcaggaacatccccaccaccccttggaggcaccaaattggctcctctcctcccagctccgctcctccagttctgttatctgctgcctggcagagggatgtgaaagaaaggagaattttggacgtgktttagagctgctggagagctgaggggcaggtgtttgggagctgctatgtgaaatggagccaggtgggctcggaggcggctttaatccattccttggctcccgaggtggtgatgagtgctgcttaccaggcttgggcaccttgaaaaatcagcttgaaatgcagagtgcaacagtggcgtttgattcgcttccaagtggagtggggccacagagcagtgagcgtgtaaaggggctcggggggggtctgtgtgggggttctgccccttgggggtttggccccagccctcagcaatggctctg

SEQ ID NO: 86675 - DNA, 599 bp, Chicken  19866894387405_1
  misc_feature (1)..(44): n is any nucleotide
nnnnnnnnnnnnnnnnnnnnnnnnnnnnnnnnnnnnnnnnnnnnctgcttggtggggtgttttttctttgcctcttttcaagtaaaagcatatatttccagaatgcagtggtcccgtgtgttagtcggagatataaatctgtattcgtgtcataatgtgcaagtgagattgctacaacacattcttttctttgcctctctgcaaacagacttcatccatccccctccacagatccgagtctgttatctggaactgcgaggcaggtgctggtgctacatatgtcactcctctacatggcarctgcttcaaatacatcaatacctcgcctgcagaatgkgcatcttttcctgyggcacaygtgtcttgtccctgctgatgtaatgacgtggcttattatggcgtatttaattgcgaagagcgtggtgagctgcctgcctgtcacaggagtcccttttcctccagttgatgtggagatgcaaaccccggtgtgctgagcaccacgtgctgtggggcacggggagaaggtgggaagagtgctggaaagccacatccgttggaaatgcccatgttcagctgtcatcggtcagtttgagacgagc

SEQ ID NO: 86676 - DNA, 599 bp, Chicken  19866894387405_2
  misc_feature (1)..(7): n is any nucleotide
nnnnnnnctgcttggtggggtgttttttctttgcctcttttcaagtaaaagcatatatttccagaatgcagtggtcccgtgtgttagtcggagatataaatctgtattcgtgtcataatgtgcaagtgagattgctacaacacattcttttctttgcctctctgcaaacagacttcatccatccccctccacagatccgagtctgttatctggaactgcgaggcaggtgctggtgctacatatgtcactcctctacatggcarctgcttcaaatacatcaatacctcgcctgcagaatgkgcatcttttcctgyggcacaygtgtcttgtccctgctgatgtaatgacgtggcttattatggcgtatttaattgcgaagagcgtggtgagctgcctgcctgtcacaggagtcccttttcctccagttgatgtggagatgcaaaccccggtgtgctgagcaccacgtgctgtggggcacggggagaaggtgggaagagtgctggaaagccacatccgttggaaatgcccatgttcagctgtcatcggtcagtttgagacgagcctttactgaccaggtgtgattggcaccttggtttgga

SEQ ID NO: 86677 - DNA, 600 bp, Chicken  19866894387405_3
gtggggtgttttttctttgcctcttttcaagtaaaagcatatatttccagaatgcagtggtcccgtgtgttagtcggagatataaatctgtattcgtgtcataatgtgcaagtgagattgctacaacacattcttttctttgcctctctgcaaacagacttcatccatccccctccacagatccgagtctgttatctggaactgcgaggcaggtgctggtgctacatatgtcactcctctacatggcarctgcttcaaatacatcaatacctcgcctgcagaatgkgcatcttttcctgyggcacaygtgtcttgtccctgctgatgtaatgacgtggcttattatggcgtatttaattgcgaagagcgtggtgagctgcctgcctgtcacaggagtcccttttcctccagttgatgtggagatgcaaaccccggtgtgctgagcaccacgtgctgtggggcacggggagaaggtgggaagagtgctggaaagccacatccgttggaaatgcccatgttcagctgtcatcggtcagtttgagacgagcctttactgaccaggtgtgattggcaccttggtttggacgtctcatctgaaag

SEQ ID NO: 86678 - DNA, 600 bp, Chicken  19866894387405_4
gttttttctttgcctcttttcaagtaaaagcatatatttccagaatgcagtggtcccgtgtgttagtcggagatataaatctgtattcgtgtcataatgtgcaagtgagattgctacaacacattcttttctttgcctctctgcaaacagacttcatccatccccctccacagatccgagtctgttatctggaactgcgaggcaggtgctggtgctacatatgtcactcctctacatggcarctgcttcaaatacatcaatacctcgcctgcagaatgkgcatcttttcctgyggcacaygtgtcttgtccctgctgatgtaatgacgtggcttattatggcgtatttaattgcgaagagcgtggtgagctgcctgcctgtcacaggagtcccttttcctccagttgatgtggagatgcaaaccccggtgtgctgagcaccacgtgctgtggggcacggggagaaggtgggaagagtgctggaaagccacatccgttggaaatgcccatgttcagctgtcatcggtcagtttgagacgagcctttactgaccaggtgtgattggcaccttggtttggacgtctcatctgaaaggcgcagc

SEQ ID NO: 86679 - DNA, 599 bp, Chicken  19866894387412_1
  misc_feature (1)..(134): n is any nucleotide
nnnnnnnnnnnnnnnnnnnnnnnnnnnnnnnnnnnnnnnnnnnnnnnnnnnnnnnnnnnnnnnnnnnnnnnnnnnnnnnnnnnnnnnnnnnnnnnnnnnnnnnnnnnnnnnnnnnnnnnnnnnnnnnnnnnnnntgcacatttgagagccacgggatccatagtagtttgtctgtggagaaggcatccaccatatcgccgtaggatgaaacaaagcttgtggttgggttgagcagcccctgctggctcatctctttccacagccaagcagctgtacaagccaggacagtcatagcaaagycactgcagcatccatgttgttctggataagtctgggagacagtcacttgtcaaacaagtttgtttctttatgtttacattgttatgtattcttttctgctggtatgttctttatgccttaatacgtgggaagaaaaaagtaatgtttctacaaaatgctgtctttgtaacygtgaggaaaattagaaacagttactcctgatcattaagttgtaatttttcatttgtagtgatgatgtttagcttcatttaaaaaatatgaatttagaaaaggtctaaagcatctaaattcacccrtgt

SEQ ID NO: 86680 - DNA, 600 bp, Chicken  19866894387412_2
ctgtggagaaggcatccaccatatcgccgtaggatgaaacaaagcttgtggttgggttgagcagcccctgctggctcatctctttccacagccaagcagctgtacaagccaggacagtcatagcaaagycactgcagcatccatgttgttctggataagtctgggagacagtcacttgtcaaacaagtttgtttctttatgtttacattgttatgtattcttttctgctggtatgttctttatgccttaatacgtgggaagaaaaaagtaatgtttctacaaaatgctgtctttgtaacygtgaggaaaattagaaacagttactcctgatcattaagttgtaatttttcatttgtagtgatgatgtttagcttcatttaaaaaatatgaatttagaaaaggtctaaagcatctaaattcacccrtgtgataatcaaaagtgcaacttctaacattttattcctggtgtgttccttaaagaagctaacagtatttttcagtgaagctgtctgagaacatgagagcctcttcattcaaaaaaatgcaaaaggttagctggtctcagtaacagaattctgttgtgtgtcatcagttagatat

SEQ ID NO: 86681 - DNA, 600 bp, Chicken  19866894387412_3
aagycactgcagcatccatgttgttctggataagtctgggagacagtcacttgtcaaacaagtttgtttctttatgtttacattgttatgtattcttttctgctggtatgttctttatgccttaatacgtgggaagaaaaaagtaatgtttctacaaaatgctgtctttgtaacygtgaggaaaattagaaacagttactcctgatcattaagttgtaatttttcatttgtagtgatgatgtttagcttcatttaaaaaatatgaatttagaaaaggtctaaagcatctaaattcacccrtgtgataatcaaaagtgcaacttctaacattttattcctggtgtgttccttaaagaagctaacagtatttttcagtgaagctgtctgagaacatgagagcctcttcattcaaaaaaatgcaaaaggttagctggtctcagtaacagaattctgttgtgtgtcatcagttagatatgtaatcaaatagataataaaagctttattaagagattatattgacttttaagctagctgtcctttgaaaatgtgtttgtttactcatccttttcactgttacatactgccatacccttcccactc

SEQ ID NO: 86682 - DNA, 599 bp, Chicken  19866894387419_1
  misc_feature (1)..(46): n is any nucleotide
nnnnnnnnnnnnnnnnnnnnnnnnnnnnnnnnnnnnnnnnnnnnnnttaaaatcttgtgaagtctgaaggttaaatgatgacataatggttaaatatgacattacatatatctaacgttatatccttgtctgcctgaaaaaagttgcaccggttttcagtatctgacatgtacagacagtcctattctaaggactggagatgtaaaatgatttcagactacagagtaagtccttgtgtctgaatggtaatctttgcctacgtgtctgttcctttgtaagcaattattgtgccaatgttayattttaagctattcccatagaaaatggaatatttgtttgatgaatggaggaactcaattccagtcactgttccatttgtgacaacttccaaatgaggtgcactgtttttgtacatttgacctcctcttatttgtgaaaaagaagttttcattgtgcatccaggaaatagtgtgtagtgtgacacaractagattttgaggatttagtcttgcaatacttagagttctcggcttgtgtgagacacctttttctcctacactaccagaawttttttatcttctgtctgtattggaaaagga

SEQ ID NO: 86683 - DNA, 600 bp, Chicken  19866894387419_2
ctaaggactggagatgtaaaatgatttcagactacagagtaagtccttgtgtctgaatggtaatctttgcctacgtgtctgttcctttgtaagcaattattgtgccaatgttayattttaagctattcccatagaaaatggaatatttgtttgatgaatggaggaactcaattccagtcactgttccatttgtgacaacttccaaatgaggtgcactgtttttgtacatttgacctcctcttatttgtgaaaaagaagttttcattgtgcatccaggaaatagtgtgtagtgtgacacaractagattttgaggatttagtcttgcaatacttagagttctcggcttgtgtgagacacctttttctcctacactaccagaawttttttatcttctgtctgtattggaaaaggaaagtgagtggtaacttgggctggtcctttctttgtcttcaggaaatgcagttctgaagaatggacttcagagctgttctttattttggtatagaactgaaattacatagaaaaattgctttgatttttgttgtggaaatatgtagggcacatggagcgagggctgaaaagctgctgattataatttg

SEQ ID NO: 86684 - DNA, 600 bp, Chicken  19866894387419_3
tcctttgtaagcaattattgtgccaatgttayattttaagctattcccatagaaaatggaatatttgtttgatgaatggaggaactcaattccagtcactgttccatttgtgacaacttccaaatgaggtgcactgtttttgtacatttgacctcctcttatttgtgaaaaagaagttttcattgtgcatccaggaaatagtgtgtagtgtgacacaractagattttgaggatttagtcttgcaatacttagagttctcggcttgtgtgagacacctttttctcctacactaccagaawttttttatcttctgtctgtattggaaaaggaaagtgagtggtaacttgggctggtcctttctttgtcttcaggaaatgcagttctgaagaatggacttcagagctgttctttattttggtatagaactgaaattacatagaaaaattgctttgatttttgttgtggaaatatgtagggcacatggagcgagggctgaaaagctgctgattataatttgacttgttaaaagattggaaggagaaaaaatagaaaaaaaacagaagaattctgtaggagtctgaaaggcattagtcaaatct

SEQ ID NO: 86685 - DNA, 600 bp, Chicken  19866894387421_1
gccccacataatgtgaaaccagctcctcctggcttaattacttcaaatcctcttaccaccagtgctttccctgacaagtaattctccctttgcccttcagaaactgttgttttgctctcagagtatcgactgtacccccattaaagcaaacaaaaagatcaatactccactaccatcaccaacggtaacaaaacaaatactgcagaaacgatggaataaaattgtagatttctttgtcacctgtgccaagcatcacttaggatccagtgtaggatttgactgcttatgtttggagagctktgaatgggccagcttgcgcctgcactgctgggtcctgcaggatggtcacgttgcactgtgctctggcttgctgaatcttgggcctccccagaaggggatgggaggagtggtggggatgtctcttgccttgctgcactctgactgcttgctgcacagactaggttctagttctggtcctcattatggcacatctttatgtttctttcctttgtgtgtcctctgggattgagaacccaggttcctaggatgaatttaaaatgggactgcatgggcttgcattctgcacgaatgtgctgtcag

SEQ ID NO: 86686 - DNA, 600 bp, Chicken  19866894387437_1
ctctccgtgttacctgaacagggtattaatgctctgccttcctgcgtaggaagctaagcgtggcaatggcacgggctggagctcaagggcaactgcaaacaaacattttttagcttagaaaaggctgttggtgagcagtgcttaacacacagacagagcttaatgatgagtgatttagaagtggcacatgaaaagaaccgcaagaggggtgttgtattttgggtgctgcaaaacacgaaagataaagaacctgtctgagagattttttcagttttgaatgtctgctgcaacaattgaaaygtgccatggaaatcattcaggtttttctaatttatctgacaatttttcagggaaacatgttttttagtcattaagatttttgaggtaatcacgtaatgccaggcagataatttatggtcctttgaattttttgttgaaattagaattgactcagctggatttgtaatacaacattttgaataatttaaagccacccacttgaagatttcaaatcaggctgctctcgtgtgataaagaatttccattttggtggttgaaacacgatgaggttttaacagacttcttaactcctctcttcac

SEQ ID NO: 86687 - DNA, 600 bp, Chicken  19866894387438_1
ctcccagtatgtgaatgccagtgagtaggctacacaaggtttttttgtagcaatccttccatgcttacagtcctctttcttccactcccattgcttcttctcttcagtcttcttccacttgtttcatgtcctgttccagttagtgcttcagtgttgataatcacacaaggaagtcagatgaaaaaagtacactcactacagtatttttttctttgcaatttggatgtgtgaagaaagttcaaattgcaacatgttttatgcaactcattaactgttggaaaagtgtcaaaaaagaatctycagcaggatcatgaaatgtgtcagggacttgaatttccagctaagaccagtttctgagactcaactaggtctttcagatctgctctctaatgttctgtttgatttcagttaaactaagatacaaaataagtggattttccaaacttgttagcagctttatttactgtaatttacagtagtgcccttctgtactattttctgttctatcttatattctacaggaaaactttgaaactgaaaggaaacccaaacataagaataaaactattaatgaaattttactgtggaggcatttaccct

SEQ ID NO: 86688 - DNA, 600 bp, Chicken  19866894387439_1
agcccaccacggagctgaaaatgtcaacattgggcatctcacaaggaaaacaaccacagggatcatccacgagggaatgtaatgtttagaaaagctatgaaagagcctaggttattcctgagatctgcagcacttacgtcactgaagaccctgtttctctgccctgattccctccaaggaaggaaagtggcagtgcagcgttgcaggcagcggccccgcagggcagcatgcagtagggcaggaggctcagagaccctgctgagggaatgagggtgggagaaggcaggaaaggcactgagractgcctgcaggtagctgctgcccagcccccaggaggggctcctcagcctcctctgctccaggaggatggctcctgtgaagtcactttctcttgggggacatttaaatttcaattcccttcttcttccctagaaatactgcattccctttccctgcttccaaataggatcctgtgggatataacactccatatgtagttatgtgctacagaagtgcatccaaagcaaaacatttttatttagggtctttataagcacattctgatttatccttgcccaaactgatgtgccacattatctg

SEQ ID NO: 86689 - DNA, 600 bp, Chicken  19866894387439_2
tttcaattcccttcttcttccctagaaatactgcattccctttccctgcttccaaataggatcctgtgggatataacactccatatgtagttatgtgctacagaagtgcatccaaagcaaaacatttttatttagggtctttataagcacattctgatttatccttgcccaaactgatgtgccacattatctggccccacatttgcacgagttactgcatttgattgacacaagatgctgcaaatagtcccctatttaactcttattccaacagaaatttacaggaggatttttgttcaycagatatcttccttgatgtcctcaagctgctggctgggtggccattttctatyacaagcattatgcattkctctaggtccaaaatgaatgcggccccagataatatttttttaccccacaaagcttgtgtgtgtgctgggagaaacacaccggggaaatttcacatcaactacayaagcatctttgctgccatgcgcccatatttccacataagcacccacacgatgctcagcctcccttgctgaatgagatacccagcatggatgaatattcacaggaaagaactcggaagagctgtga

SEQ ID NO: 86690 - DNA, 600 bp, Chicken  19866894387439_3
aaataggatcctgtgggatataacactccatatgtagttatgtgctacagaagtgcatccaaagcaaaacatttttatttagggtctttataagcacattctgatttatccttgcccaaactgatgtgccacattatctggccccacatttgcacgagttactgcatttgattgacacaagatgctgcaaatagtcccctatttaactcttattccaacagaaatttacaggaggatttttgttcaycagatatcttccttgatgtcctcaagctgctggctgggtggccattttctatyacaagcattatgcattkctctaggtccaaaatgaatgcggccccagataatatttttttaccccacaaagcttgtgtgtgtgctgggagaaacacaccggggaaatttcacatcaactacayaagcatctttgctgccatgcgcccatatttccacataagcacccacacgatgctcagcctcccttgctgaatgagatacccagcatggatgaatattcacaggaaagaactcggaagagctgtgattgtcaggaggaggcgtttgcgttctgtaatgctgctcctgtgcacagccagc

SEQ ID NO: 86691 - DNA, 600 bp, Chicken  19866894387439_4
atataacactccatatgtagttatgtgctacagaagtgcatccaaagcaaaacatttttatttagggtctttataagcacattctgatttatccttgcccaaactgatgtgccacattatctggccccacatttgcacgagttactgcatttgattgacacaagatgctgcaaatagtcccctatttaactcttattccaacagaaatttacaggaggatttttgttcaycagatatcttccttgatgtcctcaagctgctggctgggtggccattttctatyacaagcattatgcattkctctaggtccaaaatgaatgcggccccagataatatttttttaccccacaaagcttgtgtgtgtgctgggagaaacacaccggggaaatttcacatcaactacayaagcatctttgctgccatgcgcccatatttccacataagcacccacacgatgctcagcctcccttgctgaatgagatacccagcatggatgaatattcacaggaaagaactcggaagagctgtgattgtcaggaggaggcgtttgcgttctgtaatgctgctcctgtgcacagccagctccaggtaacgctttcc

SEQ ID NO: 86692 - DNA, 600 bp, Chicken  19866894387439_5
gatgtgccacattatctggccccacatttgcacgagttactgcatttgattgacacaagatgctgcaaatagtcccctatttaactcttattccaacagaaatttacaggaggatttttgttcaycagatatcttccttgatgtcctcaagctgctggctgggtggccattttctatyacaagcattatgcattkctctaggtccaaaatgaatgcggccccagataatatttttttaccccacaaagcttgtgtgtgtgctgggagaaacacaccggggaaatttcacatcaactacayaagcatctttgctgccatgcgcccatatttccacataagcacccacacgatgctcagcctcccttgctgaatgagatacccagcatggatgaatattcacaggaaagaactcggaagagctgtgattgtcaggaggaggcgtttgcgttctgtaatgctgctcctgtgcacagccagctccaggtaacgctttccaagctcctgagacaggtggggaaaactccccattggcatgggtcaccctggtttacccagcagggatgatagaatggcttattttggagggaccttagagatcac

SEQ ID NO: 86693 - DNA, 455 bp, Chicken  19866894387441_1
acagagcaaacaagcagtttctttctctcaatacataaatgatcctagcaattaagaaatttctgcagttttttcagattttaagacttcttctttgtagctgtttatcttcatcattctaagctacttttatgtagacaagaaaaattgagtatcttaattttaattaaaacctaaggtaagaggagtagtgggaggtaggccatttgtatttctgaatcaaattttaagatcatctagattttcaaacagtttgtactttggaacctattaaccatgtattttgatagtgtcttatgraaacagtagtctctttccatttaagttcttaactacaatagtgaccttattggaagctgcttaaattttccagcatattgatactttgttctcaaatacagtaaatcagagccagaacacagtcaagaatcaggacgattggaggaaaaaaaaaa

SEQ ID NO: 86694 - DNA, 599 bp, Chicken  19866894387449_1
  misc_feature (1)..(2): n is any nucleotide
nntattatttcctctaaatatttcattattttatatttatttaatgttattgtcattatttatttatactcatttttgtttcttgttctgtgctgagagaagtaaaaccaattatatatgcacatgtttatccaagctggccatagatgacagggttgcttcattttttagatctcctaaaccctgatcaagtgccagcatttcacatcatttggcagacatcaatactgtaaaaaataaaaaaaggaaaacagctatgacatgtgatgagatatcaataatcaaaatgacataacagcrgtgtccacaatcactcaacctgaaaggataggaaattaatagttttttgcactggagatctaggtatccagagaccttccargctttcaaagaaaaacaagtgatgaatgtactgttttgctgacctaacacaatctctctgctgtttgctcttcttcctgtagactaccaatggccttaacacaactactgcatccgtccttcagttttcccttggtaagtttagctcagtctttcacctgagaaagtgtaaaaagtcgttgttgcaatggaaaatgaccctcagtttyattttcatt

SEQ ID NO: 86695 - DNA, 600 bp, Chicken  19866894387449_2
ttgttctgtgctgagagaagtaaaaccaattatatatgcacatgtttatccaagctggccatagatgacagggttgcttcattttttagatctcctaaaccctgatcaagtgccagcatttcacatcatttggcagacatcaatactgtaaaaaataaaaaaaggaaaacagctatgacatgtgatgagatatcaataatcaaaatgacataacagcrgtgtccacaatcactcaacctgaaaggataggaaattaatagttttttgcactggagatctaggtatccagagaccttccargctttcaaagaaaaacaagtgatgaatgtactgttttgctgacctaacacaatctctctgctgtttgctcttcttcctgtagactaccaatggccttaacacaactactgcatccgtccttcagttttcccttggtaagtttagctcagtctttcacctgagaaagtgtaaaaagtcgttgttgcaatggaaaatgaccctcagtttyattttcattgttttgtttggtggcactcgacatgagagattcaaaacatcttgtaaaaactacagcacatttattcatctcttgataatcca

SEQ ID NO: 86696 - DNA, 600 bp, Chicken  19866894387449_3
cataacagcrgtgtccacaatcactcaacctgaaaggataggaaattaatagttttttgcactggagatctaggtatccagagaccttccargctttcaaagaaaaacaagtgatgaatgtactgttttgctgacctaacacaatctctctgctgtttgctcttcttcctgtagactaccaatggccttaacacaactactgcatccgtccttcagttttcccttggtaagtttagctcagtctttcacctgagaaagtgtaaaaagtcgttgttgcaatggaaaatgaccctcagtttyattttcattgttttgtttggtggcactcgacatgagagattcaaaacatcttgtaaaaactacagcacatttattcatctcttgataatccatgaaactcccaatataaactttgaaaaggagcaattccagtggatactctgatgatgggagatatggtcgtggagtaatctttatcacatctattttataacccagtggcaaatgctataatcacttgttctttctctaatgtgtgattgctgtttctaaaatagaactagcaaaagtggatttttcttctttaatattttaaaccct

SEQ ID NO: 86697 - DNA, 600 bp, Chicken  19866894387452_1
agggcctgccgcttgggctccacgtcgcagtaggcctcgtggaagcgcacgatattcaccacccacgagcagaggccggctgccgcgtaggacttggtggttacgaattcgggtttaaacttgggatcctctaaataaggctggagggctttgaggcagttctcgtggatgttctccttgtcgaacttgatcaaggagtccaggaacgcatccaccctggccatggtggctctcgctgccttccagctcctgtccttgggaatcttccctcccggggccatcagcaccatcacagcagcrgtgacattgctgacagccggaggtggtgacccaaaggatttcagttccgtcaggttcttctgaaaagggaaaaygaagtcattagacaaaaacaaaacggttttctgtttgttccactgctaatatactcaggcacctgaaatgctgatctgataaattggttttactccacctgraagtcactgcctctcaataaccaatgtgcacgtttatggcatgtgctccactcccacactcagctcctggtttcccacccaggaccagcacagcacactcttcctccccacactcccaaccctt

SEQ ID NO: 86698 - DNA, 600 bp, Chicken  19866894387452_2
gccggctgccgcgtaggacttggtggttacgaattcgggtttaaacttgggatcctctaaataaggctggagggctttgaggcagttctcgtggatgttctccttgtcgaacttgatcaaggagtccaggaacgcatccaccctggccatggtggctctcgctgccttccagctcctgtccttgggaatcttccctcccggggccatcagcaccatcacagcagcrgtgacattgctgacagccggaggtggtgacccaaaggatttcagttccgtcaggttcttctgaaaagggaaaaygaagtcattagacaaaaacaaaacggttttctgtttgttccactgctaatatactcaggcacctgaaatgctgatctgataaattggttttactccacctgraagtcactgcctctcaataaccaatgtgcacgtttatggcatgtgctccactcccacactcagctcctggtttcccacccaggaccagcacagcacactcttcctccccacactcccaacccttccctgggcccagggctctacagaaaggggctttgtgcactcctgctagaatgggataaggccaagagaaacctt

SEQ ID NO: 86699 - DNA, 600 bp, Chicken  19866894387452_3
cttgtcgaacttgatcaaggagtccaggaacgcatccaccctggccatggtggctctcgctgccttccagctcctgtccttgggaatcttccctcccggggccatcagcaccatcacagcagcrgtgacattgctgacagccggaggtggtgacccaaaggatttcagttccgtcaggttcttctgaaaagggaaaaygaagtcattagacaaaaacaaaacggttttctgtttgttccactgctaatatactcaggcacctgaaatgctgatctgataaattggttttactccacctgraagtcactgcctctcaataaccaatgtgcacgtttatggcatgtgctccactcccacactcagctcctggtttcccacccaggaccagcacagcacactcttcctccccacactcccaacccttccctgggcccagggctctacagaaaggggctttgtgcactcctgctagaatgggataaggccaagagaaacctttccagataacaacctctgtatagcagtctccagccccactaagacttgtcttgcagggcagctcatgctcccttggtgctcagcttctccccgtgccagaga

SEQ ID NO: 86700 - DNA, 599 bp, Chicken  19866894387457_1
  misc_feature (1)..(19): n is any nucleotide
nnnnnnnnnnnnnnnnnnnataatatccatctgacacatcacaagggactgataatgcaacaaagtagaattaatgattgtatcaaaaatacaattagatccacaatcttttaatcttctttagagaaaaataaatggaaattctctagtttaacacatttcaagaaaagggacaacaatttggaactcaaataatcttcctgtgaccatcagggctggacccacatttgatcagggaaaatgtcttctaaatgctgggaaaggacaagaagtttgtgagcaaaaccaagcaagtaagaratcaygcacagccaacagacaagaaaacacgttataagagatccaacagcctttctaataagacggactaaaactaattaatacgcagaagacatcagaactgcaccactatgtttaataaggrgtaattaataagcagaagttctcacggagtcacaccaccaacataaaacacagatgtcaaaagataattttggaggataaacacaactcagcactccctaaatcctgctaatatttactcaggagatgttcaaagccctaccccatttaatctcaattaatttaattacattatt

SEQ ID NO: 86701 - DNA, 599 bp, Chicken  19866894387457_2
  misc_feature (1)..(14): n is any nucleotide
nnnnnnnnnnnnnnataatatccatctgacacatcacaagggactgataatgcaacaaagtagaattaatgattgtatcaaaaatacaattagatccacaatcttttaatcttctttagagaaaaataaatggaaattctctagtttaacacatttcaagaaaagggacaacaatttggaactcaaataatcttcctgtgaccatcagggctggacccacatttgatcagggaaaatgtcttctaaatgctgggaaaggacaagaagtttgtgagcaaaaccaagcaagtaagaratcaygcacagccaacagacaagaaaacacgttataagagatccaacagcctttctaataagacggactaaaactaattaatacgcagaagacatcagaactgcaccactatgtttaataaggrgtaattaataagcagaagttctcacggagtcacaccaccaacataaaacacagatgtcaaaagataattttggaggataaacacaactcagcactccctaaatcctgctaatatttactcaggagatgttcaaagccctaccccatttaatctcaattaatttaattacattattataat

SEQ ID NO: 86702 - DNA, 600 bp, Chicken  19866894387457_3
agaaaaataaatggaaattctctagtttaacacatttcaagaaaagggacaacaatttggaactcaaataatcttcctgtgaccatcagggctggacccacatttgatcagggaaaatgtcttctaaatgctgggaaaggacaagaagtttgtgagcaaaaccaagcaagtaagaratcaygcacagccaacagacaagaaaacacgttataagagatccaacagcctttctaataagacggactaaaactaattaatacgcagaagacatcagaactgcaccactatgtttaataaggrgtaattaataagcagaagttctcacggagtcacaccaccaacataaaacacagatgtcaaaagataattttggaggataaacacaactcagcactccctaaatcctgctaatatttactcaggagatgttcaaagccctaccccatttaatctcaattaatttaattacattattataatccatgcaatttaacttctcctccacttttaaactaccagtgctatcccaaccattttcaaaggcccagttccgtacagcaactggtggtaggcaattctgccagaggaaattcagatggc

SEQ ID NO: 86703 - DNA, 600 bp, Chicken  19866894387463_1
gaaatgagttgtttcatttcatagggcttggaaatagggaagtcagcacagggcatctgtgcaggttgtgtacacactcattcttttattcataaaatatatacttatatatatttatatttcagatatatttactcctaatttcagcagaagctttcagcacaacgtttatctgcagatgaaggatcaccaaatgcttacaactgaaggaaatgaacatcaaaggtatccagtaaattattttgggagttggatttttcacagagcaagtctcactttttgtaagttctgttttctatraaaaaaatacagtttatgtatggtttgaagacagaatctagctgtgcattacggtgggctctggtttgtatgtctgacagctgagctgtaagtgaacgtgacagctttgtggccaaaaggaagtcccgagactcagcttccagaactcaggttcagtgaagtgagagaggtaagagagcacaaatcagaacatttcttattctctcagtgtaactaatggccctccagtgggtcctgcccagttgttttgggtcgagagggaggcaaggaaggacaaaagggggaatagacataaactgt

SEQ ID NO: 86704 - DNA, 600 bp, Chicken  19866894387463_2; identical to SEQ ID NO: 86703

SEQ ID NO: 86705 - DNA, 600 bp, Chicken  19866894387465_1
caaagtatagaacgctgcggtaaaaaggggttttgctagtgaccaactcttctagaagtaagggtctttttggaatttgcctttcttgggcgtgctgtctgcttcatttcacttcattcctcatttcttgcacaaaaaggtacctgagctgaagctgcctcctttcagcgttgtttatttggctttaaatcagtccttgggtgtccttggctacagctgggtttgcatactagtagtgtatgtccttgaagactaaatggccttcgtgtgactccttaataatctcgtcttgtggtgatrtgtgcatgttaatatgctgggtgtagcaataaacatagttcaagcaatattgttcctgtaaataattagcagtgttggctagaggagagcataacgaaggtggctcatatctgggccttycccatcctgtgggtactcctaccccatctgcagtatcctagtggttcagctgctcggcactctgactgctggtggagctaaattaagcccttgctcggatggcaagtgctctgtatgcaacagaagccaggtcagcaccatctcattcagctgaggacacgacctaatccaggattcacc

SEQ ID NO: 86706 - DNA, 600 bp, Chicken  19866894387465_2
tcatttcttgcacaaaaaggtacctgagctgaagctgcctcctttcagcgttgtttatttggctttaaatcagtccttgggtgtccttggctacagctgggtttgcatactagtagtgtatgtccttgaagactaaatggccttcgtgtgactccttaataatctcgtcttgtggtgatrtgtgcatgttaatatgctgggtgtagcaataaacatagttcaagcaatattgttcctgtaaataattagcagtgttggctagaggagagcataacgaaggtggctcatatctgggccttycccatcctgtgggtactcctaccccatctgcagtatcctagtggttcagctgctcggcactctgactgctggtggagctaaattaagcccttgctcggatggcaagtgctctgtatgcaacagaagccaggtcagcaccatctcattcagctgaggacacgacctaatccaggattcacccttcaattagactgaactggtcatgatggctcagtcagtggcagcagcagcagcagccagctccccatgaatgaattcaatcatctgataggatctccattagcatgtactagtgtcaag

SEQ ID NO: 86707 - DNA, 600 bp, Chicken  19866894387465_3
aggtcagcaccatctcattcagctgaggacacgacctaatccaggattcacccttcaattagactgaactggtcatgatggctcagtcagtggcagcagcagcagcagccagctccccatgaatgaattcaatcatctgataggatctccattagcatgtactagtgtcaagcccttcatttcctttgaatctgagcaggtaaggtcctggtttgttgtatccacagtgtgatgggagacagaactactgccactctgcatgttgcccattttgtgtgtatggcatcatttcttattaayacattattttataaagggraagggggagagaatgtgggacaartcctgggaccagaaccactgcagaatgtgctgtactggtgcacctcatcagcacctgctctcatgttcatagccagcacttcaggcatgcacacagtgcactgaacagagctccgttgtgtggtgcaaagcaaaacagcgtgggtggctgcatctcagaaaccgtgtgcgctgtgctgtaagctcctgtttgcacatcagatagcatggaggatggcttcaggaagattacctatggactattggcattatgtccca

SEQ ID NO: 86708 - DNA, 600 bp, Chicken  19866894387465_4
cagctgaggacacgacctaatccaggattcacccttcaattagactgaactggtcatgatggctcagtcagtggcagcagcagcagcagccagctccccatgaatgaattcaatcatctgataggatctccattagcatgtactagtgtcaagcccttcatttcctttgaatctgagcaggtaaggtcctggtttgttgtatccacagtgtgatgggagacagaactactgccactctgcatgttgcccattttgtgtgtatggcatcatttcttattaayacattattttataaagggraagggggagagaatgtgggacaartcctgggaccagaaccactgcagaatgtgctgtactggtgcacctcatcagcacctgctctcatgttcatagccagcacttcaggcatgcacacagtgcactgaacagagctccgttgtgtggtgcaaagcaaaacagcgtgggtggctgcatctcagaaaccgtgtgcgctgtgctgtaagctcctgtttgcacatcagatagcatggaggatggcttcaggaagattacctatggactattggcattatgtcccataggaaaaacaacctgaca

SEQ ID NO: 86709 - DNA, 600 bp, Chicken  19866894387465_5
ggattcacccttcaattagactgaactggtcatgatggctcagtcagtggcagcagcagcagcagccagctccccatgaatgaattcaatcatctgataggatctccattagcatgtactagtgtcaagcccttcatttcctttgaatctgagcaggtaaggtcctggtttgttgtatccacagtgtgatgggagacagaactactgccactctgcatgttgcccattttgtgtgtatggcatcatttcttattaayacattattttataaagggraagggggagagaatgtgggacaartcctgggaccagaaccactgcagaatgtgctgtactggtgcacctcatcagcacctgctctcatgttcatagccagcacttcaggcatgcacacagtgcactgaacagagctccgttgtgtggtgcaaagcaaaacagcgtgggtggctgcatctcagaaaccgtgtgcgctgtgctgtaagctcctgtttgcacatcagatagcatggaggatggcttcaggaagattacctatggactattggcattatgtcccataggaaaaacaacctgacaccacctctgctttccctggggtgt

SEQ ID NO: 86710 - DNA, 600 bp, Chicken  19866894387467_1
gtacaatataactcattttttagccaccttcagtagtcataagtctgccttacagccatttacaaccagtttcttacagtctagcagtgccaagatgctgcagggcatcagctgacctcgcttgaaggtcatcgtggcgagatcttgatcataaagtcaacttctaaaacatagtaaattctttgtgacttgctgtatggtatagccccagacataccacagggctgagcgactgcatgaaacaggaacatggtttttgcagactgtcacatccctcccatgcatcaaagaaagctttcyctcttccctagaacaagggattctggtttttaattagagctgctttttagtttagcataattcctctcacaccgaatcacgctttacccagggacttctccaacagatcagagcagatgctgtgcagcttgggtcaagtccatgctggggctttcagccaccaacagcacataggagaaaaacattttagattattttttatagccaggttccctgctcttaagtgttgattttttgtgtgtgcaaatatatgtaggttgctctcaaattaatacctcctatttatttccatgaaaatta

SEQ ID NO: 86711 - DNA, 600 bp, Chicken  19866894387471_1
tcatctgtaaactactggaatttgcacgttacacagaggttagggcaaatcactggcatttcttcattgatttctaatttaagaaccaagcatagtaagatttacactgcatggagcatcctctccattttaggaaagtatctgctgcatatcactacaagcaaaaagtaatttttatccatgagtagacctgaactgtttaatgctgcttgttttaagtgggctgcagtgatttacctacagcctggaacacatacctaaacatattagccaagtgagcaaatttcactacttccattwctcacttgcttgtcatccaatagcctataagtcctaagcatcctgaaagcagatatgactacttaaataattctatcaccagaacaagtaaggagcacagaagccatgagratatactttcaaaacctctaaacccctttgctttgactctgcatttgctacagagaaataaacttcccaatgcagattcagggagctttggtaaagagtgaacatctagagcatggcactatccgatattcgctatctttgttcatgtcagttctttcacatcataattctttacaaggacagtctgac

SEQ ID NO: 86712 - DNA, 600 bp, Chicken  19866894387471_2
tggagcatcctctccattttaggaaagtatctgctgcatatcactacaagcaaaaagtaatttttatccatgagtagacctgaactgtttaatgctgcttgttttaagtgggctgcagtgatttacctacagcctggaacacatacctaaacatattagccaagtgagcaaatttcactacttccattwctcacttgcttgtcatccaatagcctataagtcctaagcatcctgaaagcagatatgactacttaaataattctatcaccagaacaagtaaggagcacagaagccatgagratatactttcaaaacctctaaacccctttgctttgactctgcatttgctacagagaaataaacttcccaatgcagattcagggagctttggtaaagagtgaacatctagagcatggcactatccgatattcgctatctttgttcatgtcagttctttcacatcataattctttacaaggacagtctgacagttctaccagcaatgctgagacaggatggagtagaagacaattttttattctttatttgttttaaagaatgaggtcagcataacactcagtgcatgtccattttcttaaa

SEQ ID NO: 86713 - DNA, 599 bp, Chicken  19866894387481_1
  misc_feature (1)..(122): n is any nucleotide
nnnnnnnnnnnnnnnnnnnnnnnnnnnnnnnnnnnnnnnnnnnnnnnnnnnnnnnnnnnnnnnnnnnnnnnnnnnnnnnnnnnnnnnnnnnnnnnnnnnnnnnnnnnnnnnnnnnnnnnnnnaataaaaatattgttttctaactgactcgtaccagccaagctgaatagggaaaaggaaacatcttttttttgccccatcatcattttacattctttagtttggggatgaatctggtattttcttgtgtttatacagtatcactataaacttatcctctgtcattttatctgatagctkttttttatatttgtccatgaaaaaaacaaagccaaagccatcttcataagattgggtccccaaatgttctatttcatgttgttagctctaaggaaaaaaacctaaaatggacacaacagaactgtaacatgcacataattataatcaaatctctgtccctggtgacaactttcatgaacaacagtcccaaatatcctaaatgagagtagtaaggtaaacccaaagatggactccttgtggtttgtgtcatataaaacacagacatcctctcagaattcagattacattccttatgcaaa

SEQ ID NO: 86714 - DNA, 480 bp, Chicken  19866894387481_2
aacagaactgtaacatgcacataattataatcaaatctctgtccctggtgacaactttcatgaacaacagtcccaaatatcctaaatgagagtagtaaggtaaacccaaagatggactccttgtggtttgtgtcatataaaacacagacatcctctcagaattcagattacattccttatgcaaaaactttttggtagcaagaggaaagttgagaatacatttcttcattcatcagtttcctgaggaatctacaactgttgtggaaaggaacaaatacacacgttttattaggactatgyacyttatgtactccctgaactgacgcagccaaggaaaaaatagactcattttgtttttttgaatattaatataaagttacaccactgagttttcttttattactacaaacagagctacaacacagtatctagtactgtgttagtgcacagaatggctgtaggttataggaggtgaaacag

SEQ ID NO: 86715 - DNA, 477 bp, Chicken  19866894387481_3
agaactgtaacatgcacataattataatcaaatctctgtccctggtgacaactttcatgaacaacagtcccaaatatcctaaatgagagtagtaaggtaaacccaaagatggactccttgtggtttgtgtcatataaaacacagacatcctctcagaattcagattacattccttatgcaaaaactttttggtagcaagaggaaagttgagaatacatttcttcattcatcagtttcctgaggaatctacaactgttgtggaaaggaacaaatacacacgttttattaggactatgyacyttatgtactccctgaactgacgcagccaaggaaaaaatagactcattttgtttttttgaatattaatataaagttacaccactgagttttcttttattactacaaacagagctacaacacagtatctagtactgtgttagtgcacagaatggctgtaggttataggaggtgaaacag

SEQ ID NO: 86716 - DNA, 600 bp, Chicken  19866894387487_1
aaagtgctcagatagagagggattagaaaaagtaagtcaggaaataaaaaattgaggaatcagaggcaaaagaacgtggtatcaagaattcatgggagaacaacatgaaccagagatgaaaaagaaaatgagctctgtcttgtgatagatagagatgggtacaaaatcaaacacctatgctcaactacaggctcagctcagcatttataaagacagaagttaggctgtactcttggagtttaaatgtagtgtatgtgtacttacgttcaggcaatttgtgagccctggtttcaccaagawgatgttcttttgtgtttytgtgtttccagattctggcgtgctcttactgaggtttaactttgcttcgtcatatggaaaacataatgcaagtggagatctcaaacagcctcaaggtttaaaaatatttagtgaaagggatatggtttggacccaaatataataagtgatgatgaaacaaggttgcagaggaagagtaaccagcctgagtcttcattagtatcacaggttgcttgacactcacttcactttttcaaataagaagcctgtttatcctatgcctattgtgttggttaccatagt

SEQ ID NO: 86717 - DNA, 600 bp, Chicken  19866894387487_2
gggattagaaaaagtaagtcaggaaataaaaaattgaggaatcagaggcaaaagaacgtggtatcaagaattcatgggagaacaacatgaaccagagatgaaaaagaaaatgagctctgtcttgtgatagatagagatgggtacaaaatcaaacacctatgctcaactacaggctcagctcagcatttataaagacagaagttaggctgtactcttggagtttaaatgtagtgtatgtgtacttacgttcaggcaatttgtgagccctggtttcaccaagawgatgttcttttgtgtttytgtgtttccagattctggcgtgctcttactgaggtttaactttgcttcgtcatatggaaaacataatgcaagtggagatctcaaacagcctcaaggtttaaaaatatttagtgaaagggatatggtttggacccaaatataataagtgatgatgaaacaaggttgcagaggaagagtaaccagcctgagtcttcattagtatcacaggttgcttgacactcacttcactttttcaaataagaagcctgtttatcctatgcctattgtgttggttaccatagttttgcagtcagatttctg

SEQ ID NO: 86718 - DNA, 600 bp, Chicken  19866894387489_1
gtacctatcacttaattgccattcagtcatccttcattcatcagcattcaaacatacactagacacatccacaccatgagataaacaacaggacagagacacctgaataagtagagacatcatacagcatttgcttgttcatagataaacttatctccaaagatgtattagacatttacaaccacatacaatggtattaaggcatatatattgacctcattcctggggctgctgaggtcattgcagagctcacagaaacatagaattgaattgaaaggaacccttaaaggtcatctagtmcaactcctctgcaatgaacagggacatgtacagcaacagctggtcagtcagagccccggtcagtctgaccttgcacatcttcagggatgggacatgctctgcctctctgggcaagctgttcctgtgcctcactaccttccccacagaaaacattttccttttatccaatctaaatctcctctattttagtttgaaaacattccctttgtcctgtcacaatagacattgctgaagagtctccttctttcttatagtcactgtttagatactggaaggctgctatcaggtctcctcagagcc

SEQ ID NO: 86719 - DNA, 600 bp, Chicken  19866894387503_1
aatgttttttcctcctatgtgctgatggattaagatcttactccttgaacctcaaatgtgtgataagaaaatcacataatgattcattatgtaagatcttctgcttttgaagaattacctttcacgagatagctgcagtgaaatagcaaacatgacagcagcacctctgacggaagagaaatgcctccttccctggctgcctccctgcctttgcaatctgtgcactctcctataattcttaacattttggatgactttctttacatagacctttctttttcttcttaatttttcaagttytactttaatgactgcatagatgatgctttttcatctacatatatttaccccttttagtaacacaaagctttctgagcttttacacagagtgcaactgcaatactagctctatctatactcatagttttacatttcaaagccactgtactcttcatgtcttattaacagaaagaaaacaggaacattaacttgcattagatagtaacaacctgtgttaagcctctcactaaattctgacttactagcacaagtttttcatgtaaacttcgttaacctgcaaaccttccagcactgagctgc

SEQ ID NO: 86720 - DNA, 598 bp, Chicken  19866894387503_2
gatgatgctttttcatctacatatatttaccccttttagtaacacaaagctttctgagcttttacacagagtgcaactgcaatactagctctatctatactcatagttttacatttcaaagccactgtactcttcatgtcttattaacagaaagaaaacaggaacattaacttgcattagatagtaacaacctgtgttaagcctctcactaaattctgacttactagcacaagtttttcatgtaaacttcgttaacctgcaaaccttccagcactgagctgcaggttgccaccctatcawaaagctgaacaagctaaattatagatcactgaggttttagagaataaaccccaggaactgttttgctgaataaattactcgagcttccatcacgcaattgcagtacacaaaccaaattattctccaattttctacattaatatatattgctttgacatcctaactaaattatcaaataatcaagaactgaaatcaaccgaacagtatcttattatcatatgatctatgtgttccacagaagtctaatttatctttcaaattacaaaatcttccagatttgacactgggatgtgtgatg

SEQ ID NO: 86721 - DNA, 599 bp, Chicken  19866894387507_1
  misc_feature (1)..(152): n is any nucleotide
nnnnnnnnnnnnnnnnnnnnnnnnnnnnnnnnnnnnnnnnnnnnnnnnnnnnnnnnnnnnnnnnnnnnnnnnnnnnnnnnnnnnnnnnnnnnnnnnnnnnnnnnnnnnnnnnnnnnnnnnnnnnnnnnnnnnnnnnnnnnnnnnnnnnnnnntgttttatcacaaatgtgcatttttttaaagtgtgacagttccttttctggcagctaaccgcatgtgtattgctggtgactcaatcacacagcacctcacaagcggacagtgttgatttcttattgaaacatgtgtggaggcgtaatragaattaggggggatacacaaaatcaaagcaaagtgagttctggggatcccaaacccctgagtccataaaggtccaaaatggatttgctgatacagcatgtgtttgccagaaaacatgattaccagctgtacatttgctttgtcgtaayttatttaactgaattttaattggataarcaatgtagagtcttgaccattaaagtcctgataatattcttttgttttaacaagcgcaggaagctatcgtggaggagcaggagagccgaaaggaggaaaatattcacttgactcggttcctg

SEQ ID NO: 86722 - DNA, 599 bp, Chicken  19866894387507_2
  misc_feature (1)..(3): n is any nucleotide
nnntgttttatcacaaatgtgcatttttttaaagtgtgacagttccttttctggcagctaaccgcatgtgtattgctggtgactcaatcacacagcacctcacaagcggacagtgttgatttcttattgaaacatgtgtggaggcgtaatragaattaggggggatacacaaaatcaaagcaaagtgagttctggggatcccaaacccctgagtccataaaggtccaaaatggatttgctgatacagcatgtgtttgccagaaaacatgattaccagctgtacatttgctttgtcgtaayttatttaactgaattttaattggataarcaatgtagagtcttgaccattaaagtcctgataatattcttttgttttaacaagcgcaggaagctatcgtggaggagcaggagagccgaaaggaggaaaatattcacttgactcggttcctgagggttcttgctaacttcttagccctgtgcacacttgctgggagtggctacctcatattttttgttgtgagaagatcccagaaatttgccctggaaggtctggagaactacgggtggtgggaaagaaatgaagttcgtgctagcacatt

SEQ ID NO: 86723 - DNA, 600 bp, Chicken  19866894387507_3
ttaaagtgtgacagttccttttctggcagctaaccgcatgtgtattgctggtgactcaatcacacagcacctcacaagcggacagtgttgatttcttattgaaacatgtgtggaggcgtaatragaattaggggggatacacaaaatcaaagcaaagtgagttctggggatcccaaacccctgagtccataaaggtccaaaatggatttgctgatacagcatgtgtttgccagaaaacatgattaccagctgtacatttgctttgtcgtaayttatttaactgaattttaattggataarcaatgtagagtcttgaccattaaagtcctgataatattcttttgttttaacaagcgcaggaagctatcgtggaggagcaggagagccgaaaggaggaaaatattcacttgactcggttcctgagggttcttgctaacttcttagccctgtgcacacttgctgggagtggctacctcatattttttgttgtgagaagatcccagaaatttgccctggaaggtctggagaactacgggtggtgggaaagaaatgaagttcgtgctagcacatttctgaaatagatgtggtttgaaactgttc

SEQ ID NO: 86724 - DNA, 599 bp, Chicken  19866894387508_1
  misc_feature (1)..(5): n is any nucleotide
nnnnncttataactactgctctctataactacctcctcaggtagttatagagagcaataaggtctcccctgagcctcctcttctctagactgaacaatcacaactctctcagcctctcctcctaaggcctgtgtccagacccctcaccagctttgttgcccttctctggacacgctccagggcctcaatgtctttcttacacagatgtatttcttaaatagaataaaggcatgtagtattctctcctccattggtatctggcctcttcaagttcagcctagtaatttctaagttaaatartttttaggttacattaaggcaaagtaagtacagcaatttcatcatccataaaagcttgagcttttggaaataccgttcagtaaaaacaaataatcagatctgatatgctattatgcttgctttattttagaaattatttctgaaagaagatgtctacctttgtgaccactaaatgagatttacatattttgtttcagtggtgccgttgtccagcccagaatattagtgattaatttttagttttgaaagtcatgtccctcatcattggcttctttatacctgtacatctgaatttacca

SEQ ID NO: 86725 - DNA, 600 bp, Chicken  19866894387526_1
tcacgtatttatatctatattttaacgccttcagtatttccaccttgagatcgtcatgtcaaaacatttcaatcctggctgttagaagcttgaggagacaggcattgtacattatagaataattgatgagtagtacgtgttatttcccatatctcataaaaatagcgccctgaacagttgtatatcacctgtgttgttttcatttcttgggtagtccatttcgtttcattttctctctcaaaacattgcataaaagtactatattttagctgccaaaaacatttctacttgaataataarggggatggaagacaaactgtaggaaacaaggagrctgaaaatgatcactgtaaaaaccataattaatatacagtagatttttcctatttgcataaagatgacaggtttctaggcaagaatgtgctcttcagcaagttgaagttataactatgtgactatatttaaaaaaagttttaaatgacaaagtattggtggagaggtgttattttgtatcatagcaggttttgtatataaacactgaaatgtcaggttttacatagtttgaaatgtctaaaaaatgcctattgctgaaattcaaat

SEQ ID NO: 86726 - DNA, 600 bp, Chicken  19866894387526_2
tatttccaccttgagatcgtcatgtcaaaacatttcaatcctggctgttagaagcttgaggagacaggcattgtacattatagaataattgatgagtagtacgtgttatttcccatatctcataaaaatagcgccctgaacagttgtatatcacctgtgttgttttcatttcttgggtagtccatttcgtttcattttctctctcaaaacattgcataaaagtactatattttagctgccaaaaacatttctacttgaataataarggggatggaagacaaactgtaggaaacaaggagrctgaaaatgatcactgtaaaaaccataattaatatacagtagatttttcctatttgcataaagatgacaggtttctaggcaagaatgtgctcttcagcaagttgaagttataactatgtgactatatttaaaaaaagttttaaatgacaaagtattggtggagaggtgttattttgtatcatagcaggttttgtatataaacactgaaatgtcaggttttacatagtttgaaatgtctaaaaaatgcctattgctgaaattcaaatgtcataacagttcctctgcatatatatcactttg

SEQ ID NO: 86727 - DNA, 600 bp, Chicken  19866894387542_1
tttaacttctttgaaagacagcagacaaacaaacaaaagccatttattgtctagaaccgatcaagtaattagaatttatacctgaagctggatttctttcttcttgcctgccatctccctgtaattacaggaagcacatcaaaacatgaagaacatttaatattgttaaagaaaagtgagccacatttgtgacatgtagaactaatcttttcaacatagcactgtattcagattaaaacttaatcttaaaacttaaaacttaagtccactgaaggccctacaacaatggcagtttaaacrtcacatcagcgttctgtggaaaaatatgagacttgctagyagaaccaacatagcacaggaaattgaataaaaattagcttcttaatctgttaggatcttcagtattctttggcctcaagcatatttcaaattcataattgctctgataagaatgaccaaagaaccttggataggatgacagctgctgtgacattgaaccatttcagaaaactaataattaaagagcttcaactcaaaatgtcattagatcaagtttcttgtcttctgggatacatgtaaagcaatgattttcaagtgtcc

SEQ ID NO: 86728 - DNA, 600 bp, Chicken  19866894387542_2
catttattgtctagaaccgatcaagtaattagaatttatacctgaagctggatttctttcttcttgcctgccatctccctgtaattacaggaagcacatcaaaacatgaagaacatttaatattgttaaagaaaagtgagccacatttgtgacatgtagaactaatcttttcaacatagcactgtattcagattaaaacttaatcttaaaacttaaaacttaagtccactgaaggccctacaacaatggcagtttaaacrtcacatcagcgttctgtggaaaaatatgagacttgctagyagaaccaacatagcacaggaaattgaataaaaattagcttcttaatctgttaggatcttcagtattctttggcctcaagcatatttcaaattcataattgctctgataagaatgaccaaagaaccttggataggatgacagctgctgtgacattgaaccatttcagaaaactaataattaaagagcttcaactcaaaatgtcattagatcaagtttcttgtcttctgggatacatgtaaagcaatgattttcaagtgtcccacaactgaactgccaaactgaatcatgattcattcatca

SEQ ID NO: 86729 - DNA, 600 bp, Chicken  19866894387542_3
cattccctcattaaaaaaacatacccttctctctctctctctctctttctctctctctctgtatctctctccctctctctccccctctttttaatagatatttaactttgatttgagtggaaaaactatcaatgacattacatgcttgggtgaaatttgatttcagtttctagatgaatgttggctgaatgataaatgtgtcactggatcagcagtggaagtggaggttttcatagctcttggttaagatagtagcctttgtcatgggaaaaaggaaagtgccaccatgaatgtcacctmtgttatctgtgtactgttatttgacagctcaacragcagatgagtccagaggtagaagtgtcctgtcattcacactggagctgctcccttcagaacaaaggcagaggcacagagaccaatgcaaaagacaactcttgcttaatgcctcgtctgactaattcacacatgaaaataaacctgggtgcacactcatgaacactatcaaaatgacattaaaaacacacgatctttgcatacacacactcaataccttagcacagactttcatgcagacatatacaggaacgttctgggtttctt

SEQ ID NO: 86730 - DNA, 600 bp, Chicken  19866894387542_4
ctctctctctctttctctctctctctgtatctctctccctctctctccccctctttttaatagatatttaactttgatttgagtggaaaaactatcaatgacattacatgcttgggtgaaatttgatttcagtttctagatgaatgttggctgaatgataaatgtgtcactggatcagcagtggaagtggaggttttcatagctcttggttaagatagtagcctttgtcatgggaaaaaggaaagtgccaccatgaatgtcacctmtgttatctgtgtactgttatttgacagctcaacragcagatgagtccagaggtagaagtgtcctgtcattcacactggagctgctcccttcagaacaaaggcagaggcacagagaccaatgcaaaagacaactcttgcttaatgcctcgtctgactaattcacacatgaaaataaacctgggtgcacactcatgaacactatcaaaatgacattaaaaacacacgatctttgcatacacacactcaataccttagcacagactttcatgcagacatatacaggaacgttctgggtttcttcagcctggagaataggatgctctggggagacctt

SEQ ID NO: 86731 - DNA, 599 bp, Chicken  19866894387548_1
  misc_feature (1)..(90): n is any nucleotide
nnnnnnnnnnnnnnnnnnnnnnnnnnnnnnnnnnnnnnnnnnnnnnnnnnnnnnnnnnnnnnnnnnnnnnnnnnnnnnnnnnnnnnnnnncagcagctgagccaggagaaagctgacctgcagctggagagcgaggagctgaacatcctccatcaggtatgggccatctctggcttccatagtgttgttctccctctagggctcctccttcccagcactttcctatctgctgcaggtgcttcaaggacttccaagctgcagcgagccaacaagatggagctgcgaaagcagccggaggaygtgagcgtggcacggcggactgagttctactttgcccaggcacgctggcgcctgacagaggaggatgggcagctgggcatagctgagctggagctgcagcgcttcctctacagcaaggtaccgagctggttggtggccctacagcccctgtgcaggggcctggaggtgtggggttaatgattctgtgtgcgcaggtcaacaagtctgatgacactgctgagcatctgctggagctgggctgggtcacaatgaacaacctcctgcccaacgctgtgtacaaggcaaggggagcagctctg

SEQ ID NO: 86732 - DNA, 600 bp, Chicken  19866894387548_2
cttcctctacagcaaggtaccgagctggttggtggccctacagcccctgtgcaggggcctggaggtgtggggttaatgattctgtgtgcgcaggtcaacaagtctgatgacactgctgagcatctgctggagctgggctgggtcacaatgaacaacctcctgcccaacgctgtgtacaaggcaaggggagcagctctgcaccctggggaccttttggtgagctggccctgtggctgtcctcactccagtcacccgctttcctccctgcaggtggtgctgcgtccccagagctcctgccartccggccgccagctggcactgaggatcttcagcaaagtccggccgcctgtgggaggcatctccatcaaggagcactttgaggtgctggggctgacctgggaggtggcagggcatgggcagcattcatccagctctgacacatctctctccctgcaggtgaatgtggtcccgctcaccatccagctcacccaccagttcttccataggatgatgggtttcttcttccccggacgcaacgtggaggaggaggaggtgggggatgaggaagacaagtccaagctggtgacaacaggtgtgtgg

SEQ ID NO: 86733 - DNA, 599 bp, Chicken  19866894387563_1
  misc_feature (1)..(248): n is any nucleotide
nnnnnnnnnnnnnnnnnnnnnnnnnnnnnnnnnnnnnnnnnnnnnnnnnnnnnnnnnnnnnnnnnnnnnnnnnnnnnnnnnnnnnnnnnnnnnnnnnnnnnnnnnnnnnnnnnnnnnnnnnnnnnnnnnnnnnnnnnnnnnnnnnnnnnnnnnnnnnnnnnnnnnnnnnnnnnnnnnnnnnnnnnnnnnnnnnnnnnnnnnnnnnnnnnnnnnnnnnnnnnnnnnnnnnnnnnnnnnnnnnnnnnnnntgtactgacactgaactcattttgcctactgttcaactagtaagaaaaaaamcaaaagatgtttttcctctgtttctatttccttgatgtcaggtgtctattttcaaggctttatgctgctgctaaatgtaaactttgctattttctggcatgatgaaagctgaaagcttcttctcattcctaatggcattctgccaagatattctcaggaaaaaaaaaacaaaaaacaaaacttgggctgattcacagatctaatgttcaagatctaacctcactgcttgtataaaccatgacatggtcttaccttcccttcctatatttagctctcagtgttcttrgttagtatggtta

SEQ ID NO: 86734 - DNA, 600 bp, Chicken  19866894387563_2
agtaagaaaaaaamcaaaagatgtttttcctctgtttctatttccttgatgtcaggtgtctattttcaaggctttatgctgctgctaaatgtaaactttgctattttctggcatgatgaaagctgaaagcttcttctcattcctaatggcattctgccaagatattctcaggaaaaaaaaaacaaaaaacaaaacttgggctgattcacagatctaatgttcaagatctaacctcactgcttgtataaaccatgacatggtcttaccttcccttcctatatttagctctcagtgttcttrgttagtatggttaggttkcagttggacttgatgatctctaacgtcttttccaacctgagcaaccctgtgattttaatactgcatccaggccaaatttaaagatgcaaatgatggaaaattcagagcattccatgataaaatgataaataatgagcttcttgagcggttagaagctgtatggtatgcttctagtttgaatttgtttaattttaacttccagctgttttatcttcttatacatttgccaatagcttgaatgtctgttgtagcatgatgctactatgcacgataagaatcaaa

SEQ ID NO: 86735 - DNA, 600 bp, Chicken  19866894387563_3
agatgtttttcctctgtttctatttccttgatgtcaggtgtctattttcaaggctttatgctgctgctaaatgtaaactttgctattttctggcatgatgaaagctgaaagcttcttctcattcctaatggcattctgccaagatattctcaggaaaaaaaaaacaaaaaacaaaacttgggctgattcacagatctaatgttcaagatctaacctcactgcttgtataaaccatgacatggtcttaccttcccttcctatatttagctctcagtgttcttrgttagtatggttaggttkcagttggacttgatgatctctaacgtcttttccaacctgagcaaccctgtgattttaatactgcatccaggccaaatttaaagatgcaaatgatggaaaattcagagcattccatgataaaatgataaataatgagcttcttgagcggttagaagctgtatggtatgcttctagtttgaatttgtttaattttaacttccagctgttttatcttcttatacatttgccaatagcttgaatgtctgttgtagcatgatgctactatgcacgataagaatcaaatatgaaaccagatgactt

SEQ ID NO: 86736 - DNA, 600 bp, Chicken  19866894387566_1
aatgtcacagctcatgcactgagacagtctctgccctgccccaacctttaggaacctcttccctttaaccgcattgcccactctgaagaagcaaagacaccacaagaaatgccattaaagcctctaaccctgtgctgctcttccaaaggcaataggcagcagatgggacactgagtcatatcccaccatgggacactgggtcgtgtcccactgcaggtctggccaccaccccagcacctggggaaatcccactttctgagctgggaaatgccactgagggagtatgagaacttttccccstttttttcacctatccatcttctgtttccatggaaacacggccagagcatcagctgtccagaggcagccggggagtgggaaccccctggggaggctttcatacctgaaaactacaagtggtgatttgcaaagcatggacttgttgttgctttggggctcccaggtctctccgaatgtttaaatgcatatagaagatgaatatgtttcctttacaggataacaaacgtagtttaacagctcatagtttacacctgtagctggataatgttgtggagagtctatgatgtgggctgggatgct

SEQ ID NO: 86737 - DNA, 600 bp, Chicken  19866894387589_1
attataaaaggaaagctcagattatctgagagggcggtgtgacagcacgggcagccccacaaactgggccctgtgctgtgcccatagcagctgctgctcccagccccggcccaccaggccctgtatgcagttgcactgacagctccaggtgtggctgcgctcagtgccatcccattgcgtggcagaggagcggtgcttccaaggagcagggctctgctggaggcattttgccactcagcccatgcatttctattgcagttccctgtattgtgcgcctgatctcttgtccttaaaatcccygttggtgtgrtgggttcctgtatagccagggctattctaaagcatggtgtgcatggatagggtctcagctttccatgtcaggggtggttgaacaaccccaagcacattttgggggcccagcactctgctgcacgctcctatccccgctctccagagccacagtgctcactgctccagcagcttcccaggtgggactgttcctttcagcccttttcctgctctggcgcaacttcctcactccataaaagtgaaaggtgacgtctgagtaaatattgcactgacctctcacctcaccgcctc

SEQ ID NO: 86738 - DNA, 600 bp, Chicken  19866894387589_2
gaaagctcagattatctgagagggcggtgtgacagcacgggcagccccacaaactgggccctgtgctgtgcccatagcagctgctgctcccagccccggcccaccaggccctgtatgcagttgcactgacagctccaggtgtggctgcgctcagtgccatcccattgcgtggcagaggagcggtgcttccaaggagcagggctctgctggaggcattttgccactcagcccatgcatttctattgcagttccctgtattgtgcgcctgatctcttgtccttaaaatcccygttggtgtgrtgggttcctgtatagccagggctattctaaagcatggtgtgcatggatagggtctcagctttccatgtcaggggtggttgaacaaccccaagcacattttgggggcccagcactctgctgcacgctcctatccccgctctccagagccacagtgctcactgctccagcagcttcccaggtgggactgttcctttcagcccttttcctgctctggcgcaacttcctcactccataaaagtgaaaggtgacgtctgagtaaatattgcactgacctctcacctcaccgcctccctctgctgc

SEQ ID NO: 86739 - DNA, 600 bp, Chicken  19866894387592_1
tcttccagctgcagcccactgatgaccagcgtcccagagctctcgtcagcctgggatgaaaacctcaggcgggcaaaaggggctgtatggttgtatgagcctcctcggcccttgctctgaagcaaatactgcagggacctgttgggaagctgccggtaccaggccacgtaaatataggaagcgctggagctgtaggtacattgcagggtctctgtccaccctgcttgcaccgtcactgcagacttcttcgcatggatttcatctctcagaaatacacctgaaaccacatcagagatactyacccactgctttgctcacaggcacttggaaagaatagcccatggctgtagaaggaatcaagcaatgctgttgttagaagtcaagtgtttttgaatactcgggggaagaaaggaactaagagcagatccagacaagctgcaggcaagtcgccaggctggcacggggaccagaaatatgccgaacacaatcatttgcttccagcactgcttctgagtcccgctgcaatgaaaggagtggcgaaaggaaaggagctcttgcttaaatgatagggccatctgtggtgtgctgtgacatccatca

SEQ ID NO: 86740 - DNA, 599 bp, Chicken  19866894387603_1
  misc_feature (1)..(35): n is any nucleotide
nnnnnnnnnnnnnnnnnnnnnnnnnnnnnnnnnnnatctaaaatctggggtaaccaaaatgtttttaggtaattttatttatttatttatttatttatgctaaattaccgattttggatgtttagcttgatccagatcccatccaaattctgtggggttcgttccattgtcaatacagacttttttcatatactcactaacaaagaaacagttttgaatgttttccaggcaattatttaccttgtgccacatgcttagatgtttaaaagatgaaaatcacagcagaatacattggttttrtattcatgcacatgaaaatataataatcaggtttaawattaaaattcttwcccatatgtatacatttgtgtgcatttatatatatatgagaaaaygtatataaaactaatatttaagtaactcagcaattatgtttgttaagttactttgtcctttttcatctggtcagtatatacattgttgtgtattttgttaatgcgctgtattgcatgtaagtagaaacacctatataatgccattaataagacctcagaaagattaaggactctagtaacattaattcagcctcgctctttaca

SEQ ID NO: 86741 - DNA, 600 bp, Chicken  19866894387603_2
ctaaaatctggggtaaccaaaatgtttttaggtaattttatttatttatttatttatttatgctaaattaccgattttggatgtttagcttgatccagatcccatccaaattctgtggggttcgttccattgtcaatacagacttttttcatatactcactaacaaagaaacagttttgaatgttttccaggcaattatttaccttgtgccacatgcttagatgtttaaaagatgaaaatcacagcagaatacattggttttrtattcatgcacatgaaaatataataatcaggtttaawattaaaattcttwcccatatgtatacatttgtgtgcatttatatatatatgagaaaaygtatataaaactaatatttaagtaactcagcaattatgtttgttaagttactttgtcctttttcatctggtcagtatatacattgttgtgtattttgttaatgcgctgtattgcatgtaagtagaaacacctatataatgccattaataagacctcagaaagattaaggactctagtaacattaattcagcctcgctctttacagctggggtgttgtaagacttggatagcaccgtgcagta

SEQ ID NO: 86742 - DNA, 600 bp, Chicken  19866894387603_3
taaccaaaatgtttttaggtaattttatttatttatttatttatttatgctaaattaccgattttggatgtttagcttgatccagatcccatccaaattctgtggggttcgttccattgtcaatacagacttttttcatatactcactaacaaagaaacagttttgaatgttttccaggcaattatttaccttgtgccacatgcttagatgtttaaaagatgaaaatcacagcagaatacattggttttrtattcatgcacatgaaaatataataatcaggtttaawattaaaattcttwcccatatgtatacatttgtgtgcatttatatatatatgagaaaaygtatataaaactaatatttaagtaactcagcaattatgtttgttaagttactttgtcctttttcatctggtcagtatatacattgttgtgtattttgttaatgcgctgtattgcatgtaagtagaaacacctatataatgccattaataagacctcagaaagattaaggactctagtaacattaattcagcctcgctctttacagctggggtgttgtaagacttggatagcaccgtgcagtagtcggttaagata

SEQ ID NO: 86743 - DNA, 600 bp, Chicken  19866894387603_4
tatgctaaattaccgattttggatgtttagcttgatccagatcccatccaaattctgtggggttcgttccattgtcaatacagacttttttcatatactcactaacaaagaaacagttttgaatgttttccaggcaattatttaccttgtgccacatgcttagatgtttaaaagatgaaaatcacagcagaatacattggttttrtattcatgcacatgaaaatataataatcaggtttaawattaaaattcttwcccatatgtatacatttgtgtgcatttatatatatatgagaaaaygtatataaaactaatatttaagtaactcagcaattatgtttgttaagttactttgtcctttttcatctggtcagtatatacattgttgtgtattttgttaatgcgctgtattgcatgtaagtagaaacacctatataatgccattaataagacctcagaaagattaaggactctagtaacattaattcagcctcgctctttacagctggggtgttgtaagacttggatagcaccgtgcagtagtcggttaagatacatactaatgacagagggcagtgctgaaggacgtagtgcaggagt

SEQ ID NO: 86744 - DNA, 573 bp, Chicken  19866894387603_5
attaaggactctagtaacattaattcagcctcgctctttacagctggggtgttgtaagacttggatagcaccgtgcagtagtcggttaagatacatactaatgacagagggcagtgctgaaggacgtagtgcaggagtatagctcttctgtgcctgcagtgtgcagcttccctggcagaggccgggtgctatgaaggcatagctgcttgtcacacttcaccttcaagtgaagcgatgttgaaaacacttctgaaatcattaccctgaatctgagagtgggagcactcccaggctgcagcstaagtgttgcatgctggcacagatgccgccttattctgggaaaatgtggacaaaacgtggacaaagttgtctgttagttttcattttgtgtctttttattgagatacgctgtgataattgtatttgctgggtgaaaatgccacaaaaaagagtttaaaagagaaatacgagcctagggaggcctcattacagagtaactgcaaaactaaataatgcaagggacatgaccttgataaaaagaactttaatactaaacatgttttaataatatta

SEQ ID NO: 86745 - DNA, 600 bp, Chicken  19866894387608_1
taaacctgggcccttccccacctcagcctgtgcaccttggctttccctgaacatccacgcagaaactgtccagtttggttccactggcaagtgctcaggagggtggcagagctgtttgggaacgttatcaggcctcctgactgccagtctggagtagcacgtgatgcctaagtgctgccaggttgcattacgtgccaatataacaacctctgcccaagcacccagctcgatggtttgaagggctgggcagtcagcttctgcatacggtctgtctcaggggcactgcatcccccagcaatwggcttaaataacacaaggtgatgggcactacgggtataaattgcagaaagccgtggcctggggaggctgtgggctgcatgcattatggcatgragctatcaggccaccagcagggccagtaagaccttcacgtgctgcagcactcggggtggggagctgctggggcaytgcttgggctggaattgggatgggaagaaaaaggcactggagaattgtatctcttggcctcgttcacgagccctgcccttgtgtgttttgttttttttctttaagtcagaacaatgtgagcctgagacacgc

SEQ ID NO: 86746 - DNA, 600 bp, Chicken  19866894387608_2
ctcaggagggtggcagagctgtttgggaacgttatcaggcctcctgactgccagtctggagtagcacgtgatgcctaagtgctgccaggttgcattacgtgccaatataacaacctctgcccaagcacccagctcgatggtttgaagggctgggcagtcagcttctgcatacggtctgtctcaggggcactgcatcccccagcaatwggcttaaataacacaaggtgatgggcactacgggtataaattgcagaaagccgtggcctggggaggctgtgggctgcatgcattatggcatgragctatcaggccaccagcagggccagtaagaccttcacgtgctgcagcactcggggtggggagctgctggggcaytgcttgggctggaattgggatgggaagaaaaaggcactggagaattgtatctcttggcctcgttcacgagccctgcccttgtgtgttttgttttttttctttaagtcagaacaatgtgagcctgagacacgcagtcctgcagccatgtgtgagctgtgggagggggtgtgctgggtgggggagtgccctgctgcaggactgggggccgttctctggttcaggaac

SEQ ID NO: 86747 - DNA, 600 bp, Chicken  19866894387608_3
taagtgctgccaggttgcattacgtgccaatataacaacctctgcccaagcacccagctcgatggtttgaagggctgggcagtcagcttctgcatacggtctgtctcaggggcactgcatcccccagcaatwggcttaaataacacaaggtgatgggcactacgggtataaattgcagaaagccgtggcctggggaggctgtgggctgcatgcattatggcatgragctatcaggccaccagcagggccagtaagaccttcacgtgctgcagcactcggggtggggagctgctggggcaytgcttgggctggaattgggatgggaagaaaaaggcactggagaattgtatctcttggcctcgttcacgagccctgcccttgtgtgttttgttttttttctttaagtcagaacaatgtgagcctgagacacgcagtcctgcagccatgtgtgagctgtgggagggggtgtgctgggtgggggagtgccctgctgcaggactgggggccgttctctggttcaggaacaagcctgcacatcttctgcctgatgtaaaacatagcaggttggccctgaatgccatcttcagctttttgggcttt

SEQ ID NO: 86748 - DNA, 599 bp, Chicken  19866894387611_1
  misc_feature (1)..(87): n is any nucleotide
nnnnnnnnnnnnnnnnnnnnnnnnnnnnnnnnnnnnnnnnnnnnnnnnnnnnnnnnnnnnnnnnnnnnnnnnnnnnnnnnnnnnnnntcacactatattttcaatagtctttgggtaaaagagcgtatatcataagatggagcagtatttgataagcataatttcacagcatcctatcatcccataaatacagagaggtttcatattaaaaaattatcaaaaagatgtacctgtatccagcacaacacactccagaattttatttatttctagggaatggacaaagctacttcaaatacytccttctgacctgacagtaaggccaggtaaaaaatatttccaccagaggtcacaytgaacctctcacagcaaatatccctaatggaggcaaagagtagataggctactgtcctgacataggactgtgaagatagcaacatatctacatgaatttaaaaattaagtcactagcagtgacagcaacacaaagtgagaataaagttaaccgcagaaaaagctggggaaattcaaacatcaagaggggaattacgcaaaattgagaaattgcacaaggtattaaaatcaagagaatgtgaagc

SEQ ID NO: 86749 - DNA, 599 bp, Chicken  19866894387611_2
  misc_feature (1)..(32): n is any nucleotide
nnnnnnnnnnnnnnnnnnnnnnnnnnnnnnnntcacactatattttcaatagtctttgggtaaaagagcgtatatcataagatggagcagtatttgataagcataatttcacagcatcctatcatcccataaatacagagaggtttcatattaaaaaattatcaaaaagatgtacctgtatccagcacaacacactccagaattttatttatttctagggaatggacaaagctacttcaaatacytccttctgacctgacagtaaggccaggtaaaaaatatttccaccagaggtcacaytgaacctctcacagcaaatatccctaatggaggcaaagagtagataggctactgtcctgacataggactgtgaagatagcaacatatctacatgaatttaaaaattaagtcactagcagtgacagcaacacaaagtgagaataaagttaaccgcagaaaaagctggggaaattcaaacatcaagaggggaattacgcaaaattgagaaattgcacaaggtattaaaatcaagagaatgtgaagctcagaaaaaaatgcctataaaagattattgttatgcaatttagttgttggaattg

SEQ ID NO: 86750 - DNA, 600 bp, Chicken  19866894387611_3
ataggctactgtcctgacataggactgtgaagatagcaacatatctacatgaatttaaaaattaagtcactagcagtgacagcaacacaaagtgagaataaagttaaccgcagaaaaagctggggaaattcaaacatcaagaggggaattacgcaaaattgagaaattgcacaaggtattaaaatcaagagaatgtgaagctcagaaaaaaatgcctataaaagattattgttatgcaatttagttgttggaattgaagtcatagcctttagattgttcaaacggaagaacagccaacawatatcgagttgctctcagttaagagaaaataagcaaacttctgcaagagttctcaggtarcactaagaacataattcaagcaaaataagcttgctaaggaaggtacaaasaaaataatttcaaagttgtcacataatgcayattttagcctgcagactactttaaactagaaatttttgaaggaaaagaaaaaaaaaacagcttgtctttggaaaccyaggcagagtttccaaaccaaggaagagaaacagcaaatattcatctttaacatttgaggttattccacattgaaccattaag

SEQ ID NO: 86751 - DNA, 600 bp, Chicken  19866894387611_4
attaagtcactagcagtgacagcaacacaaagtgagaataaagttaaccgcagaaaaagctggggaaattcaaacatcaagaggggaattacgcaaaattgagaaattgcacaaggtattaaaatcaagagaatgtgaagctcagaaaaaaatgcctataaaagattattgttatgcaatttagttgttggaattgaagtcatagcctttagattgttcaaacggaagaacagccaacawatatcgagttgctctcagttaagagaaaataagcaaacttctgcaagagttctcaggtarcactaagaacataattcaagcaaaataagcttgctaaggaaggtacaaasaaaataatttcaaagttgtcacataatgcayattttagcctgcagactactttaaactagaaatttttgaaggaaaagaaaaaaaaaacagcttgtctttggaaaccyaggcagagtttccaaaccaaggaagagaaacagcaaatattcatctttaacatttgaggttattccacattgaaccattaaggttagaaaagacctctcagatcatctagtccaacaccagtactgcccactaaaccagaac

SEQ ID NO: 86752 - DNA, 600 bp, Chicken  19866894387611_5
cagaaaaagctggggaaattcaaacatcaagaggggaattacgcaaaattgagaaattgcacaaggtattaaaatcaagagaatgtgaagctcagaaaaaaatgcctataaaagattattgttatgcaatttagttgttggaattgaagtcatagcctttagattgttcaaacggaagaacagccaacawatatcgagttgctctcagttaagagaaaataagcaaacttctgcaagagttctcaggtarcactaagaacataattcaagcaaaataagcttgctaaggaaggtacaaasaaaataatttcaaagttgtcacataatgcayattttagcctgcagactactttaaactagaaatttttgaaggaaaagaaaaaaaaaacagcttgtctttggaaaccyaggcagagtttccaaaccaaggaagagaaacagcaaatattcatctttaacatttgaggttattccacattgaaccattaaggttagaaaagacctctcagatcatctagtccaacaccagtactgcccactaaaccagaactcattgaagtacaatggaaacaacagagcagggatgataaaatatatatt

SEQ ID NO: 86753 - DNA, 600 bp, Chicken  19866894387611_6
aggggaattacgcaaaattgagaaattgcacaaggtattaaaatcaagagaatgtgaagctcagaaaaaaatgcctataaaagattattgttatgcaatttagttgttggaattgaagtcatagcctttagattgttcaaacggaagaacagccaacawatatcgagttgctctcagttaagagaaaataagcaaacttctgcaagagttctcaggtarcactaagaacataattcaagcaaaataagcttgctaaggaaggtacaaasaaaataatttcaaagttgtcacataatgcayattttagcctgcagactactttaaactagaaatttttgaaggaaaagaaaaaaaaaacagcttgtctttggaaaccyaggcagagtttccaaaccaaggaagagaaacagcaaatattcatctttaacatttgaggttattccacattgaaccattaaggttagaaaagacctctcagatcatctagtccaacaccagtactgcccactaaaccagaactcattgaagtacaatggaaacaacagagcagggatgataaaatatatattttagcttaaaaacataaataattcaatatta

SEQ ID NO: 86754 - DNA, 600 bp, Chicken  19866894387611_7
taaaagattattgttatgcaatttagttgttggaattgaagtcatagcctttagattgttcaaacggaagaacagccaacawatatcgagttgctctcagttaagagaaaataagcaaacttctgcaagagttctcaggtarcactaagaacataattcaagcaaaataagcttgctaaggaaggtacaaasaaaataatttcaaagttgtcacataatgcayattttagcctgcagactactttaaactagaaatttttgaaggaaaagaaaaaaaaaacagcttgtctttggaaaccyaggcagagtttccaaaccaaggaagagaaacagcaaatattcatctttaacatttgaggttattccacattgaaccattaaggttagaaaagacctctcagatcatctagtccaacaccagtactgcccactaaaccagaactcattgaagtacaatggaaacaacagagcagggatgataaaatatatattttagcttaaaaacataaataattcaatattacttttttacctcatattcaccttctccaaaggtaattagagcaaaaatttcttaggtcagttttcatcacatcaaga

SEQ ID NO: 86755 - DNA, 600 bp, Chicken  19866894387614_1
aaatacagttattataatattgagatgatgaactggataccagatccatgaggttaaaatgttaatgttagaggattaaggataagctggatcttacaacttcagtggtgagttaatttgacaagagagcaaagtaatgtcagtagttaactatctttgcactgactatcctagttcatattgtttctcataaatcacaaggactgagggaaatccttcaacattctgtggctggacttcaaataaagtgagaagttgtgagagagaccagatctcagacagaagcctttcagctgaaaygcgaaaagctctttcccttcaaagcacacttctttctactcctaaaaacagttcccagtgacagaccatatggttctgctgaacagcttataaagaatggcaattaatgttatggaagttgttactgaagtcagtattcacactgactgcttctgcatggtaggcctcaggcctcagtgcggatgtttacgtgaaaaatgttaactagtgagaacatagcaagatatcagcgatataattaaagaaggttagtgcttaagatgaagaaagtaagataccaactgcactgtattgacgaaa

SEQ ID NO: 86756 - DNA, 600 bp, Chicken  19866894387617_1
aatagcatgataatgtcattgcctttaccgacagcaacagaaagctgcaattagacttctttgatcaaaatgctagataaaaatcaagagaattttctaaagtagatctaaagcatgaggaataactcagttcatctttaaaagtcacctctgtgcaacgcagtgcctgggatccgtgtgcacacagtgcacgaagcccttcatggcacttgtccacagttccccaaggtcagatcactcccgtggtggcctcacacctctgtatctgcttagggtgttttgagggctctgtcactgccrgtactgagcacccacaggaatcatggatttaccttgcaccacccaaacgtgctcagagcagggctgctgcctctgtctgcatgccagcacgctgcatgacgcggtatgagcagaggtgttgggcacagagctgctccagggggctggctccatgtgaggctcagccccattgcattatcgtgcataatgatgaactcagggaaccatggatagatactcacttaggaactggcacccgaattagtgtcccatccacttctgggttcaggttcattccgctctcccttatagccttcatag

SEQ ID NO: 86757 - DNA, 600 bp, Chicken  19866894387623_1
tccttaagcaaatgtatgcaaatcatccccgggagggcgttatttatttatttatttatttatttccttccctccctttcctcccttctgttttcacaccaggctttatcccttctacgcacggagggacggagggaaaatgcaatatctgttccaccgcggagcaaccgcgggctgcacactgctgccgggacctgcggcagtcggcgcggatccgtttgctgcccgtaacattatatgcccggcagacgtcagatcagcactgaccccatgtgcacgcacagcatcacgcacatagargagagggagggaaaaaaaagagggcacaaacgcagcagtcttatttcaccatgtgccataaaaacggtcttatttcaccacaggccatttcacggtcccaaattctgcaggggatgctcacaacatggtggcttttccccaggaaaggatgacaagcatcgggatttctttttttcccttaacagtcccttttttgggaaaaaaaaaaaaaaaaaaaaagattcctagattgagacgtcaaatgctgaccagaaaagcaaaacgaacgcacgccctttcagaccgcgtgctgcaatcaca

SEQ ID NO: 86758 - DNA, 600 bp, Chicken  19866894387628_1
gcaacaaaacagaaaacaaactgatgagagattctcactagaaaggagatcctgttagttgacaaggctaaagaaagtgctttcgcatctgtcataggaaaaagaaagtaaagcgtgttaatcagcaagcacagaatagaagaaatagcaagtgaaatcagcttcttgggtgatttaagttactccacccaagatgaagcaacaaagacaaaaaacctaaagagacagaggacttcctggaaaacctgaccagatgcattaacacagtactaattagtaaattagcctattgcacaattwaaaaaaataaataaatatcttaaaagtctgggagaacgaggaagtaccaagtgacaatattcctatcagaacaaaaaactggaaccacgttggctttataaatttctcttgaatttctgctaacaaagtgaaataaataccaggagagaaaaaaaatctcctaatcatttggagaataatggaagcatggcaaaatcaagccattttagacagttttasatgtatatagccaatagcttttggcacataaacactgcacccaccgccaacaggatatctcatgtattaacttacttctgt

SEQ ID NO: 86759 - DNA, 600 bp, Chicken  19866894387628_2
aagagacagaggacttcctggaaaacctgaccagatgcattaacacagtactaattagtaaattagcctattgcacaattwaaaaaaataaataaatatcttaaaagtctgggagaacgaggaagtaccaagtgacaatattcctatcagaacaaaaaactggaaccacgttggctttataaatttctcttgaatttctgctaacaaagtgaaataaataccaggagagaaaaaaaatctcctaatcatttggagaataatggaagcatggcaaaatcaagccattttagacagttttasatgtatatagccaatagcttttggcacataaacactgcacccaccgccaacaggatatctcatgtattaacttacttctgtgtccaagtgatggtgtaatttccaacacctcttctcttccattaccaggaacaattttataaaacactgctgataataggagctgacagacctagcagtaaaactacagcctgttcccagaaggctatatagaataactatatagagtcacaagcatttaacccactgagtgaaagtgtatttaacagagagcataatacctttggtgtttcagggtct

SEQ ID NO: 86760 - DNA, 600 bp, Chicken  19866894387630_1
tcaatctcacatacatttcaatctccccagaaatggtaaaagttatacctggttttcttttccaatccccaagtgcctggaagcaaataatattgataatgtatccacctattttgctgtgaaaactctgacccattttgagcatcctgtaaaggaaggggaatttaaggacacataagagattattgacatgaaatgaaaggcactgggaatcagttgctgtcccagtttgaacttgtggatagcgtgctggaggcctgatgggttttgtttgttctgcttttttattatttgaagcckcttgctctcgttttctgtttgagaaactgcagtattgcaatgctgaatctggtccagtgagctgaaaatgtttatgatgattactggaactaatcataataaatgcatcagtgttcatctgtgctttgttttatgaatcttctgattttgctgttgttcggtaggattcgcagggtacttttatctccaacaagcacgtgcagtccctgtgcagtcttttccagctgaaattgtacagcccttcagaaacttttgaaagataagagcttcttcataaagtgtgttcttcagacttgtttt

SEQ ID NO: 86761 - DNA, 600 bp, Chicken  19866894387638_1
tctgctgggttattgataccttttgtatagagcagtgcagtgcctaattgggctctttgcctattccaacatgcttccagcaagcagaacctacagcagcccttagcagaaagcagctcatggtgctatggggagaagtagggcacgatgaaaacacatcctgggcaaacaggcaccgctcccctcgtggctcgcaggtgcaagccctgctggcgcacacaggtgtgttttccttgctctgatctgggccagggctataaacaagcaggcaatccctgagcaagaaagggctccttgtgygctgcaagcacttgtgccaagctgggggagtgtggggattttatgcccctcctttcccgtgtgttaggaaggcatctcgctgctggaccttgcatccctgccagccagaacgcagctctttgaagaggctgcacttggagggaaggatggaaagggctggagggagctgggggtgcccgcagccgtgggagggagcgtggcactgcagtaggtggggctgcatccgtgcccaggcggtgcagggaagaattgtgccttttcatggagctgggtgaggcttggaggtgatgcctgcgccct

SEQ ID NO: 86762 - DNA, 600 bp, Chicken  19866894387640_1
aaacgagttcaggcagtcgtcggaacaatacatctgatgtgctgttatgtcacagcgagtaaatatgcagagcatttatcataacacatagctaggccagtgtgacagtactgtataaaaaccaattgagggtcaccatattcttcagctttgtttaattttaaaaggagtatattttttcctattttatatcaggtaactaaattatgctagttgtgtggataaccttgaactatgctttgatggacagaatcttaatggtgctccatctgatccaagttggtatgtattgaaagagaygagctttactgttgtcctttccatcagtagaacagtaacatgatgttaagacattgtttttgctgattgaagctgagatgagtttgaactacagttatatgggaattaaaatacctttttttatcatcagtttgtttcattggtagttcccacattattgtaagcctgacagatgattagttttctcggggtggggagggtgggtgccttttcatttcttttctctttcttttttacactgaagaatacatccttattgttctatactgaaacaagtaatgtgtaattctggtggggtcc

SEQ ID NO: 86763 - DNA, 600 bp, Chicken  19866894387651_1
gtggaaaaatcttttgctacttttatgtgccttatttatatgaaggaagccaaacagtgtgtaattgcctctctggtatggttcaagtgaatgagatgaattagttcatctttgatttttatttttaagttaacaaaataaatacaagcagagatatagcccctatctccctgaccaatgttttacaacatccaaaaaattaattcagcatgtatgttatcatctggtagcccagaattcacttgtgtgtcgtaacattgccagatcagcttcccctgttttggtgagactgcctggccratagatgtgcttcataatcactstaagactttgagaaaaaataatttagggatcgctgttactttttatccttgtttgatttgtgtaactatactttattcaagcgcaggcctctctgagtgtgcgtaggggaggtggtgtgctgctgtgccagataaagccgcagtcaagccgtgagaatgcattgccttaacacacgctccctggggtaactattcacataaaaaaacaaacatttgtttttagtttcataattacatgcaggcaaaatatttcaaactgtactgactgttgaaatta

SEQ ID NO: 86764 - DNA, 600 bp, Chicken  19866894387651_2
tatgtgccttatttatatgaaggaagccaaacagtgtgtaattgcctctctggtatggttcaagtgaatgagatgaattagttcatctttgatttttatttttaagttaacaaaataaatacaagcagagatatagcccctatctccctgaccaatgttttacaacatccaaaaaattaattcagcatgtatgttatcatctggtagcccagaattcacttgtgtgtcgtaacattgccagatcagcttcccctgttttggtgagactgcctggccratagatgtgcttcataatcactstaagactttgagaaaaaataatttagggatcgctgttactttttatccttgtttgatttgtgtaactatactttattcaagcgcaggcctctctgagtgtgcgtaggggaggtggtgtgctgctgtgccagataaagccgcagtcaagccgtgagaatgcattgccttaacacacgctccctggggtaactattcacataaaaaaacaaacatttgtttttagtttcataattacatgcaggcaaaatatttcaaactgtactgactgttgaaattactgtttaccagagtcttgtgtaa

SEQ ID NO: 86765 - DNA, 600 bp, Chicken  19866894387664_1
cctactgagaggaaaaaggagtgatcttcactggcacagcgaggcctttctgctgacactcttacaaagggtctgaagcagataaaaacctccaaaatctgtctcaatcatcctcacatttcatgagagaggactattcagatctctttgaaagtagctgatagtgccactgtctccaagggaaaaaatggctcctgaggacacttagggccttagaaataccccttttggcctaacgcaatacagatggactagcagtaaaagaatatggctgtgactgcagcacatatacctgtactkacagcacagtcagagacttctgtgcccggacagggcagttgcttacgcattcaactgaatttctgttgcagatgtattcctggagttaatacaattgtttagatgtgcaacaggaatccgggatgagcattaacatagaaactggttatgctgagcagtcatccagcaagacatgctggatgttttgtagatgtacactgacagcaaagatgtctcatcttgtgtctgaggacttatgccattgtctacccaaggtgagggctgacatcataaggaatttttcagtctgatcatctgcat

SEQ ID NO: 86766 - DNA, 600 bp, Chicken  19866894387677_1
gctgccgggctcccttccccgccgccccacagccacacgagggttagacaaacaggcctgcaggtgctggcaaaaaggaaatgccctctgagttcacagcagggctggcacttggatatttctgtattgcccgcatctaaaaaaagactcagttcacacaagtagctattttaccttactgtcccacaagaactaaatgcattttttccgattacactttcccaccataaaacacacgacaaaatgtgacacacattttgaaatattcataggaaagcattttgcttatatatagaaacrtgagtatatatggaaacacacaaaatgatgtggttatatatagatgtctcctcactgtataactaatattagttcatggaattggaagttacacacaactaaaaaaaaatgacttgagatccagtgagctttgccatgaagcagacaaagcagtaaaccacccttggatttatgataatttcactatgaaatgctgaatggtgaattccccagagtattcctctgacacagaaatactcaaaaaaacaaacaaagtaggagatgagtccaagatgcttgctggaaagacatttactcctc

SEQ ID NO: 86767 - DNA, 600 bp, Chicken  19866894387678_1
atcagttctcatcagcacttgttgagacactctaagatgttatttcaagcttcagggtctctgaaaaaaacacataaaaagaatatcacgtgtattagctattcagtttttaaagtcttcagacaaagtattttacaactgcctaactacagtagagctattgtcaaggctagatctagattttgtctagccgagtttggagagccccaaggtttttcaagaacccttaaatgatggatacctcataatccctttgattgcctcccaagaaaatcttttcctaatgtccagttttgaacstcatttattttccttcagaaatatctatcagttgttttcatttgtaacagaatttaaaaagtccttttactaaagacacttccacagccrtaaacaagttgcataygtttagctacatttcttatagactttctactgtcagagaagaagctacagtactaaacaggtgctgtttaagagaagaatcacaaaaacttcccaatttttgtaattaattctatatacagtggttactttcattttacaatcccctacactttatgacaaatacagaacctagtccttgcagtcatccttcct

SEQ ID NO: 86768 - DNA, 600 bp, Chicken  19866894387678_2
tgtattagctattcagtttttaaagtcttcagacaaagtattttacaactgcctaactacagtagagctattgtcaaggctagatctagattttgtctagccgagtttggagagccccaaggtttttcaagaacccttaaatgatggatacctcataatccctttgattgcctcccaagaaaatcttttcctaatgtccagttttgaacstcatttattttccttcagaaatatctatcagttgttttcatttgtaacagaatttaaaaagtccttttactaaagacacttccacagccrtaaacaagttgcataygtttagctacatttcttatagactttctactgtcagagaagaagctacagtactaaacaggtgctgtttaagagaagaatcacaaaaacttcccaatttttgtaattaattctatatacagtggttactttcattttacaatcccctacactttatgacaaatacagaacctagtccttgcagtcatccttcctccatgacactaaacagaacagagcaatgaaaagttcttgctgcatgcaaagctggaggcccaagcttgcaccttgccctggattcctgct

SEQ ID NO: 86769 - DNA, 600 bp, Chicken  19866894387678_3
tttttaaagtcttcagacaaagtattttacaactgcctaactacagtagagctattgtcaaggctagatctagattttgtctagccgagtttggagagccccaaggtttttcaagaacccttaaatgatggatacctcataatccctttgattgcctcccaagaaaatcttttcctaatgtccagttttgaacstcatttattttccttcagaaatatctatcagttgttttcatttgtaacagaatttaaaaagtccttttactaaagacacttccacagccrtaaacaagttgcataygtttagctacatttcttatagactttctactgtcagagaagaagctacagtactaaacaggtgctgtttaagagaagaatcacaaaaacttcccaatttttgtaattaattctatatacagtggttactttcattttacaatcccctacactttatgacaaatacagaacctagtccttgcagtcatccttcctccatgacactaaacagaacagagcaatgaaaagttcttgctgcatgcaaagctggaggcccaagcttgcaccttgccctggattcctgctacaggcttcccctgtt

SEQ ID NO: 86770 - DNA, 599 bp, Chicken  19866894387684_1
  misc_feature (1)..(114): n is any nucleotide
nnnnnnnnnnnnnnnnnnnnnnnnnnnnnnnnnnnnnnnnnnnnnnnnnnnnnnnnnnnnnnnnnnnnnnnnnnnnnnnnnnnnnnnnnnnnnnnnnnnnnnnnnnnnnnnnnntaaaagttacacggatggcgagagctgcccctgcgtgccccacataggcggcgggtctgagcggcttccccgggcaggcggactcccaaagtggagcgggagctgatgctgatgaaaccaacttttagtcacaaaggcagggatgtaacgccagcgagcagcgtgctcctcgtctgcgcacccggyggggtggggcagggcagagccatttgcccgagccagtaaggcaggctgtattcaaagctggggattaaaatagaaatgcgttcgagagcggttttgggacgaccgcgctttctactgaaggaaagctccacgctggtggaatcttatagagatgccctgagaaataaaagcccttgcaaattacacagttttacatttaaaaggtaagcaaagcagmgagaagtcagatacacttcatcacaaaactctctttgttctttcaacacgtcttttagctgcaaaacctaatggcttctttg

SEQ ID NO: 86771 - DNA, 600 bp, Chicken  19866894387684_2
tgatgctgatgaaaccaacttttagtcacaaaggcagggatgtaacgccagcgagcagcgtgctcctcgtctgcgcacccggyggggtggggcagggcagagccatttgcccgagccagtaaggcaggctgtattcaaagctggggattaaaatagaaatgcgttcgagagcggttttgggacgaccgcgctttctactgaaggaaagctccacgctggtggaatcttatagagatgccctgagaaataaaagcccttgcaaattacacagttttacatttaaaaggtaagcaaagcagmgagaagtcagatacacttcatcacaaaactctctttgttctttcaacacgtcttttagctgcaaaacctaatggcttctttgtaaacatctcacagagctgggtactaagcctcgccgaagcagagttacggggaatttggactggcaaagcccttggccgttgaaaacacgtatgtttttcatggctgctaaagattcaaaccatacaggcaacgtgagccaggtaaacgtctcaccgaaatgatttacaggccagcgttgcacaataaattcaagtaatacgtaacaaaaggcatcta

SEQ ID NO: 86772 - DNA, 600 bp, Chicken  19866894387686_1
gtgtgtgtccttgcaacgatgtgcaaacttcccccgttaccttccttccacttatacaggtcaactcgctggttgctctaaaatacaaaggaagaagtgccgggcaaacaaggcaggacaggaatccacatgtcatgaccaggtttccttccctttgaataccctgctagcaattggtcccactgtgaacaacaaagccctgcttgaccaaaagcagaacaaagatgaacatacaggctgcaaaggcccctcaaaagcctaccctctaattatatccacttaaaattggagataaacaasaacaggagaaaaatctcattgcaaaacaattccataaactgatgttctcagaacttttatttcttaacaacaagctgtaactgcgggcaacaggcaagcacattttctctgcaggaatagcctggcagcccgttcacattcacaaccagttttcagcaagggggatgatggatcaccactggtccacctcagctctccctcgattcccttctgcaataatcagggctgctgccaaatgagaacagcacagtctaatggtttcagggtcacctcctcaagggtacttccatttcgccagtt

SEQ ID NO: 86773 - DNA, 600 bp, Chicken  19866894387686_2
aaactagaagatgtaagcatttatcactaactgtaaaccacaggagcaaaacaaatgaatcaatgacaacattatttagggtttcttcattcattccaggaataaatcctcccccaaacacagccacaccgttacttgaaactagccactgtactttaagtccatgttctgccctactcaaaattcacttcagcccaggccaactctcacctttctgagacagaaactgcctttttgtgtgcatacatagtaccaagcccagtgggtctttagccgtgactggaaattcacaaacagaarccaaaatagaatcacagaatatccccagttggaaaggacccataagggccattgagtccaattcctgactccacacagaaccaaataacaggacttttcaaatttcaccctgtgttagtccctcatttccaagtgcacaggcagacagaggcaaagataacagagacagacaaatcttacattttgtggctttttttttcctaccccaaagctgcttcttaagagtttgaactcacagataaaacactccagccttccctgaaatgggaggtctcctcccagctcagcaataatataact

SEQ ID NO: 86774 - DNA, 600 bp, Chicken  19866894387692_1
ctcccctgacacagctccatgccgttccctcgggccctgtcgctgtcacacagagcagagctcagcgctgcccctccgctccctgtgaggagctgcagccgccatgaggcctcccctcagctcctctgctccgggctgaacaaactcaggatcttcagctgctcctaacgtcttgcccttcaaacccttgactatctttgcagccctctttaactttcctaatacgtacacatactttcttctagactggtcatctgccctgctgccagtaccgtgtgagcaggtgggagagctctgatrtaggctccaaagtggttctgctgtaggaagccagtgcatgaacctggccctctgcagggatcagttgttcagtggtgctggattgtccaggcttccaactttctgcaggattacaactattgccagtgaaacagttaataaaggaagagtttgttccctaagccagaatcttaatttcaagctgacttctttctgttaggactcttcagttctgttatcactctgctgtgcgtaatctttaccttctctgtcagtggaaattgcatgggtctggtgaagagcaaaaacaggctcacaagt

SEQ ID NO: 86775 - DNA, 599 bp, Chicken  19866894387693_1
  misc_feature (1)..(76): n is any nucleotide
nnnnnnnnnnnnnnnnnnnnnnnnnnnnnnnnnnnnnnnnnnnnnnnnnnnnnnnnnnnnnnnnnnnnnnnnnnnntttaatcacttgaactgaggtaaagcatgaaatgcccaagtgaacaagtactgaaaaatacatacaaaattgaatgtgcaaagcatggacaaattttctttcaaacaaacatttgtatttattcattacagcaaaaggcattcaccacttcttcatacagctcaggatctcaattttaacccacttaatggtggcttttgtcctttgcctcttgttgtaccccraacagaccttttttcttgcaaatcttttgcccrtgcttttgaatctgatgtacagaaaggttcattttcccaaaacaactttatatgtcatgtctggacctatgtacttataaacatacayaaactcattagcactattttcttgctttgtttaaaggattttcaacaatttccagtagtaaaggcactctctgatcaccttgaccagttacaaaaacaaaaataacctgatggcattattttcaagatggtaaccgcagaaaagcttctgaataatttgcaaatcaacagagtgtcaa

SEQ ID NO: 86776 - DNA, 599 bp, Chicken  19866894387693_2
  misc_feature (1)..(43): n is any nucleotide
nnnnnnnnnnnnnnnnnnnnnnnnnnnnnnnnnnnnnnnnnnntttaatcacttgaactgaggtaaagcatgaaatgcccaagtgaacaagtactgaaaaatacatacaaaattgaatgtgcaaagcatggacaaattttctttcaaacaaacatttgtatttattcattacagcaaaaggcattcaccacttcttcatacagctcaggatctcaattttaacccacttaatggtggcttttgtcctttgcctcttgttgtaccccraacagaccttttttcttgcaaatcttttgcccrtgcttttgaatctgatgtacagaaaggttcattttcccaaaacaactttatatgtcatgtctggacctatgtacttataaacatacayaaactcattagcactattttcttgctttgtttaaaggattttcaacaatttccagtagtaaaggcactctctgatcaccttgaccagttacaaaaacaaaaataacctgatggcattattttcaagatggtaaccgcagaaaagcttctgaataatttgcaaatcaacagagtgtcaaaaataaattaaagaaataaattgctgatccaca

SEQ ID NO: 86777 - DNA, 600 bp, Chicken  19866894387693_3
aagtactgaaaaatacatacaaaattgaatgtgcaaagcatggacaaattttctttcaaacaaacatttgtatttattcattacagcaaaaggcattcaccacttcttcatacagctcaggatctcaattttaacccacttaatggtggcttttgtcctttgcctcttgttgtaccccraacagaccttttttcttgcaaatcttttgcccrtgcttttgaatctgatgtacagaaaggttcattttcccaaaacaactttatatgtcatgtctggacctatgtacttataaacatacayaaactcattagcactattttcttgctttgtttaaaggattttcaacaatttccagtagtaaaggcactctctgatcaccttgaccagttacaaaaacaaaaataacctgatggcattattttcaagatggtaaccgcagaaaagcttctgaataatttgcaaatcaacagagtgtcaaaaataaattaaagaaataaattgctgatccacataccttgatgaagtggagcacgcaaaactgccaaacagtgctcttcacatgattgcagtatgctttgtaccaaactacattgggttaga

SEQ ID NO: 86778 - DNA, 600 bp, Chicken  19866894387695_1
tcaactgacagtaatacgtctcacaaagtccccattcctacagcatctaagcaccccccagtcctgaactggctttttaacatcatagaatcagaataacagaatgtcccgagctggaagggacccacaagggtcatttagcccaactctcagctctacatagcaccacccagaatccaaacccagtgtctgagagcgctgtccaaacgctccctgagctccagctcttggggccgtgcccactgccctgggcagcccgttccatgcccaccgccctctggtgcagaccctgtccctcamccccagctgcccctcccctgacacagctttttccatacagatctcaatcaggatgctgggcccacrtaccccagattcctgggatgatgaactcaaatctagaggtaaagcttcttccgtggagctacttggacacctcatggtaaaacaaaagcataagtgaaatgcagtcrtatygtcatgcccaactcgcctgggctttggtgagagctggatccaagtgccaacttttcgsttataacaaaaaactgcaacacttcacgttatcctgttggggagaaactcaaatttttgatacaa

SEQ ID NO: 86779 - DNA, 600 bp, Chicken  19866894387695_2
aactggctttttaacatcatagaatcagaataacagaatgtcccgagctggaagggacccacaagggtcatttagcccaactctcagctctacatagcaccacccagaatccaaacccagtgtctgagagcgctgtccaaacgctccctgagctccagctcttggggccgtgcccactgccctgggcagcccgttccatgcccaccgccctctggtgcagaccctgtccctcamccccagctgcccctcccctgacacagctttttccatacagatctcaatcaggatgctgggcccacrtaccccagattcctgggatgatgaactcaaatctagaggtaaagcttcttccgtggagctacttggacacctcatggtaaaacaaaagcataagtgaaatgcagtcrtatygtcatgcccaactcgcctgggctttggtgagagctggatccaagtgccaacttttcgsttataacaaaaaactgcaacacttcacgttatcctgttggggagaaactcaaatttttgatacaatttgtaaaatctaaaatagcttcagcagatgctcacttcttacttgttgagcatttccaggcaagc

SEQ ID NO: 86780 - DNA, 600 bp, Chicken  19866894387695_3
aatccaaacccagtgtctgagagcgctgtccaaacgctccctgagctccagctcttggggccgtgcccactgccctgggcagcccgttccatgcccaccgccctctggtgcagaccctgtccctcamccccagctgcccctcccctgacacagctttttccatacagatctcaatcaggatgctgggcccacrtaccccagattcctgggatgatgaactcaaatctagaggtaaagcttcttccgtggagctacttggacacctcatggtaaaacaaaagcataagtgaaatgcagtcrtatygtcatgcccaactcgcctgggctttggtgagagctggatccaagtgccaacttttcgsttataacaaaaaactgcaacacttcacgttatcctgttggggagaaactcaaatttttgatacaatttgtaaaatctaaaatagcttcagcagatgctcacttcttacttgttgagcatttccaggcaagctttagcagttttacctggggaataagaactttagctccggtttcccggacaacctgctgtaattgcatctagattatacacctccacaaaaccccatcaaagcccac

SEQ ID NO: 86781 - DNA, 600 bp, Chicken  19866894387695_4
caaacccagtgtctgagagcgctgtccaaacgctccctgagctccagctcttggggccgtgcccactgccctgggcagcccgttccatgcccaccgccctctggtgcagaccctgtccctcamccccagctgcccctcccctgacacagctttttccatacagatctcaatcaggatgctgggcccacrtaccccagattcctgggatgatgaactcaaatctagaggtaaagcttcttccgtggagctacttggacacctcatggtaaaacaaaagcataagtgaaatgcagtcrtatygtcatgcccaactcgcctgggctttggtgagagctggatccaagtgccaacttttcgsttataacaaaaaactgcaacacttcacgttatcctgttggggagaaactcaaatttttgatacaatttgtaaaatctaaaatagcttcagcagatgctcacttcttacttgttgagcatttccaggcaagctttagcagttttacctggggaataagaactttagctccggtttcccggacaacctgctgtaattgcatctagattatacacctccacaaaaccccatcaaagcccacagct

SEQ ID NO: 86782 - DNA, 600 bp, Chicken  19866894387695_5
gtgcccactgccctgggcagcccgttccatgcccaccgccctctggtgcagaccctgtccctcamccccagctgcccctcccctgacacagctttttccatacagatctcaatcaggatgctgggcccacrtaccccagattcctgggatgatgaactcaaatctagaggtaaagcttcttccgtggagctacttggacacctcatggtaaaacaaaagcataagtgaaatgcagtcrtatygtcatgcccaactcgcctgggctttggtgagagctggatccaagtgccaacttttcgsttataacaaaaaactgcaacacttcacgttatcctgttggggagaaactcaaatttttgatacaatttgtaaaatctaaaatagcttcagcagatgctcacttcttacttgttgagcatttccaggcaagctttagcagttttacctggggaataagaactttagctccggtttcccggacaacctgctgtaattgcatctagattatacacctccacaaaaccccatcaaagcccacagctggcggtaatcgctgacccagtccttttcttccatgctcacctgtgatggcaaatattt

SEQ ID NO: 86783 - DNA, 600 bp, Chicken  19866894387698_1
attctctgagtcttttggctcaaagaaagattgtaacttgttttgcttttattttgatttttactttatggttatatgatggagtagtatatgcaaaagtagtatagcagcaaatcaaaactatttgctgctgctaaagcattgattaaatatgtagcagaatgttttgcaaatatttccacctatttataatctagatttagagtttccatcacagcagtgtacagcatgaacttatgtacagctttgttaaatgtctcaaaaacagagaaactgggaaagagaccagtgcttgtatcrtaactgcttctttctgtgttgaactgcttagttaattatatttagaagtattggcaagatgtaaatatttatctgtgttagttctagctgttgtgtttggccttgcagtagtgcagtggggttaaatcatttacaaacttctgtagttctcagagagctccatgttttgacctgtgcaaattaagatatctgactaaaaagaagcatgaatatattagagagaagagattggtttttcaaaaacagatcaaagtaaagtatggcatgggttgcaagttaacctgcagttctctctgtgkt

SEQ ID NO: 86784 - DNA, 504 bp, Chicken  19866894387698_2
rtaactgcttctttctgtgttgaactgcttagttaattatatttagaagtattggcaagatgtaaatatttatctgtgttagttctagctgttgtgtttggccttgcagtagtgcagtggggttaaatcatttacaaacttctgtagttctcagagagctccatgttttgacctgtgcaaattaagatatctgactaaaaagaagcatgaatatattagagagaagagattggtttttcaaaaacagatcaaagtaaagtatggcatgggttgcaagttaacctgcagttctctctgtgkttttttttttttttttctccaatatcagctgtttcttatgttcagcaaatcccccagatcccaggaggattcctggcatgagcaagacgaggaggaggagaaacacataaaaaaaattactgggtttgagcaatgaggtaaaaacaaagagaagcacagacaggggaaaaagaagagaggtagctttgaggtaaactttccagt

SEQ ID NO: 86785 - DNA, 600 bp, Chicken  19866894387699_1
attgaatgatgctgctttctccaatttgatggttttcagatactaaaaagctgctaccaaatttttatggggagtttgacatttaaaatgattatccactatacaatcaaataactggatacttatgtcacagactttgtttaaaaaatggtatctatatatgttaatacacttgttttagcaatgagagcataaatgcaagacaaattttctgggaggagaaatgaaagggagactgtctaaatttctatttttctgaagaaaggaatctgctgtaagagagagacagcaggaaaccartgaggaacagaatgmaaagccattgcttctgttagcaataatgtgcagctctgagatgttaaaagccttcctcctaggcacttttctgctaacaagtgtctcattctttctaaaatacctcaccttcagaacatcaggatatattgcctctttcttcatctatccactgtaaactgttctggagtgtcctggtgtcctggaacattcctctacaagtcatacaggcataatgttgctggactcattcttcccttcttttcctttcttttccttcctctgtcccttcctccctccctccct

SEQ ID NO: 86786 - DNA, 600 bp, Chicken  19866894387699_2
tttctccaatttgatggttttcagatactaaaaagctgctaccaaatttttatggggagtttgacatttaaaatgattatccactatacaatcaaataactggatacttatgtcacagactttgtttaaaaaatggtatctatatatgttaatacacttgttttagcaatgagagcataaatgcaagacaaattttctgggaggagaaatgaaagggagactgtctaaatttctatttttctgaagaaaggaatctgctgtaagagagagacagcaggaaaccartgaggaacagaatgmaaagccattgcttctgttagcaataatgtgcagctctgagatgttaaaagccttcctcctaggcacttttctgctaacaagtgtctcattctttctaaaatacctcaccttcagaacatcaggatatattgcctctttcttcatctatccactgtaaactgttctggagtgtcctggtgtcctggaacattcctctacaagtcatacaggcataatgttgctggactcattcttcccttcttttcctttcttttccttcctctgtcccttcctccctccctccctccgttccttccttcc

SEQ ID NO: 86787 - DNA, 599 bp, Chicken  19866894387700_1
  misc_feature (1)..(89): n is any nucleotide
nnnnnnnnnnnnnnnnnnnnnnnnnnnnnnnnnnnnnnnnnnnnnnnnnnnnnnnnnnnnnnnnnnnnnnnnnnnnnnnnnnnnnnnnnccagtttgagtgtatgcaccagactccaagaaaatgcttcttctgaatctttcttgaaagtaaatgcttgatgtctcattaaaaaaaaaaaaaagacattttatgttgggaatgggtagcgatagaactgaagcctcttctaccatctcaatttgcagactgagtgtcctatgctcaccctgcttctttgcttcagtgactgctctcttamctctgcactgcaacttgttttctagtgtgtttctagtaccagttttaattctgctgtgagcaaattattagagatgtatctatcataagcaaatacagagcacattgaaaactaagcatttcagcatttaagaatgcaccgttcctctgtctacgtatgtcgctgtaagaacctttgaaggctaacatgtcattgtttcagctaatgttaatgctgtgaataagctgttttctgtaacgccctcattagtcctgctttgcaactgccctttgaacacagtgatatcattgaaagcaata

SEQ ID NO: 86788 - DNA, 599 bp, Chicken  19866894387712_1
  misc_feature (1)..(256): n is any nucleotide
nnnnnnnnnnnnnnnnnnnnnnnnnnnnnnnnnnnnnnnnnnnnnnnnnnnnnnnnnnnnnnnnnnnnnnnnnnnnnnnnnnnnnnnnnnnnnnnnnnnnnnnnnnnnnnnnnnnnnnnnnnnnnnnnnnnnnnnnnnnnnnnnnnnnnnnnnnnnnnnnnnnnnnnnnnnnnnnnnnnnnnnnnnnnnnnnnnnnnnnnnnnnnnnnnnnnnnnnnnnnnnnnnnnnnnnnnnnnnnnnnnnnnnnnnnnnnnnntgccattgtgtcagactgcccctctgctgccatctgtcacatgscaacaacatgtaatgggttattggcaggaagcttcaacctcttctgccatctgatcagcatatgcctctggtgttgtgggtgaacataaactaagaggcattgcttttgaagcagccttcataaagtatataattttattaatatataagttacaaaacactaatttttaatccgtaggttctgttatgtcacaggaaatagtatggttttgccttggggcagtgaagtctggcagtgtagcaggcatgctgtggtaatgtctctggtgtacaatgtagttccttggaagtttgctcct

SEQ ID NO: 86789 - DNA, 600 bp, Chicken  19866894387715_1
cttggcactttctttgataaatgctacagaggggaaaaaagaacagataacaccaacagtttattaaactacattctccagaggaaaacagcatttgcttcattaatgaaatatctctagggaaaccattctaaattgtccaaagaagcttgaaggtttcctcctgagactataaaggcaaaggaaaaaacaagagaaaccaaaacactagcatgagaatctagcagagcctatcaatggccttttgtgctgttcttgaaacgtaactacataaagcagtgctaccccagaacaaatccrttccygcacactgttctccaactccccatctttactaagcccacacaaaatttaggcatacagttaagaatatccagtcatacataagcctacagagatacggttatagaacagatcccaggaagtacattgaaggctctgggcttcaatcactagggatgattctctggtttcaagagaagtatgaacatcactggagattaagaaattacagtcttctcagaattttatttatttatttttgggtagggaaagacctgacactttaatattgctacataaacaacaaatcaacacttg

SEQ ID NO: 86790 - DNA, 600 bp, Chicken  19866894387715_2
cactttctttgataaatgctacagaggggaaaaaagaacagataacaccaacagtttattaaactacattctccagaggaaaacagcatttgcttcattaatgaaatatctctagggaaaccattctaaattgtccaaagaagcttgaaggtttcctcctgagactataaaggcaaaggaaaaaacaagagaaaccaaaacactagcatgagaatctagcagagcctatcaatggccttttgtgctgttcttgaaacgtaactacataaagcagtgctaccccagaacaaatccrttccygcacactgttctccaactccccatctttactaagcccacacaaaatttaggcatacagttaagaatatccagtcatacataagcctacagagatacggttatagaacagatcccaggaagtacattgaaggctctgggcttcaatcactagggatgattctctggtttcaagagaagtatgaacatcactggagattaagaaattacagtcttctcagaattttatttatttatttttgggtagggaaagacctgacactttaatattgctacataaacaacaaatcaacacttggctcc

SEQ ID NO: 86791 - DNA, 600 bp, Chicken  19866894387719_1
tgggagctttttgggttttttattacttaggcacaaaatgtaatagcacagtaacataatttttactactattcattcactcttaagaatgcagtccaagcatttactttaaaacttaaggcaagtgctctaaatcatccatactggaataactgtttttctctaaactgactaaggaaatgaggtaactatctttcatactctgagttgtggctaagttgcataattaaatccacctaaacaaaatatgttccacatctgtatcactcagaagatttctttgcacatactcatcagctstatcttctgtaaatagttttccttaaaatatacattacttttcttcaccaagttggcacagactgaagaagaaaatgattattttttaaatttataaaagagaaatcttcaagtacaagtgcaaaatagatcattgctctttgttttcagttttggtttactgtatgtgctttccttgaaatattttttatttaatgggtgatacagatcaaaaagtaatgatacaatgagatggcaattagcatcacactcatagcctcttgtactttagaaccacagaaacatggaatagtttgtgtt

SEQ ID NO: 86792 - DNA, 599 bp, Chicken  19866894387722_1
  misc_feature (1)..(81): n is any nucleotide
nnnnnnnnnnnnnnnnnnnnnnnnnnnnnnnnnnnnnnnnnnnnnnnnnnnnnnnnnnnnnnnnnnnnnnnnnnnnnnnnntatatggtccaaatctatacaaaaggagtggagtgggttcagtccagtgctagcatcttcctcgtcgcacgcagcgagcagagccgagcagagggagcagggcagcgctgggcctgcggcaccaatggggaaacaatttgctgaggtggttgaagtatatgtttccaaaatctgtttgtgtccgtaagggttttagaggaggatgtcgtctgcttactyggtaacttctgtgtggcctgtgagtggtttcagatgctcggccaaaaccaaataatctctccttttaggaaattcaaaaagcatgcccgcgtcccaaaaaagaagggagatgtgaagtgaggtcccgtgctcctgccatagccctgtgtgcaatcgccactcgcccgcggggggacagcggcccgcgctggtataaatagagaccagatattgwgatttgggtttggatgagaccttctgttagcagattgcttttaactggagagaagactactgggttatgtcatacatctccataa

SEQ ID NO: 86793 - DNA, 600 bp, Chicken  19866894387722_2
caatttgctgaggtggttgaagtatatgtttccaaaatctgtttgtgtccgtaagggttttagaggaggatgtcgtctgcttactyggtaacttctgtgtggcctgtgagtggtttcagatgctcggccaaaaccaaataatctctccttttaggaaattcaaaaagcatgcccgcgtcccaaaaaagaagggagatgtgaagtgaggtcccgtgctcctgccatagccctgtgtgcaatcgccactcgcccgcggggggacagcggcccgcgctggtataaatagagaccagatattgwgatttgggtttggatgagaccttctgttagcagattgcttttaactggagagaagactactgggttatgtcatacatctccataattcagctgaatgttgcaaaaatgcccaaattagggcatggtacttacgagaagcaaaataacagaacgagtgagctttcataatgaggagaacttgcagataaagttgaaatttatggaagtgtaggagattttaaactgaagatttttggcttcttttctgggtagcccggccacgctgacaagtttataaatctctgcggtatttggctgata

SEQ ID NO: 86794 - DNA, 600 bp, Chicken  19866894387727_1
cagccccagctctctccagcccttccttatggtggagatgttccagttcctttgtggcccttcactgtgctctctccagtatgtccctgtctctctgctactgaggagcccagcactccagcacctcaccagcattggactaccatgaaaaaggtagatttgttaattgaaaagaggcacaatgcagactcctagctaatatccacatgactgtgtagctgcatagcctttctgtgcctcaggatcttgttccaggatagctcttagctttcaaaggtatatcttcagatctgtaggctrtgggtgttctagtcaagcattttttccaccattcagtgggtacttttcaaggagcactgaataaaggtttagctccaaggcttagaggaggaacggtgaaacaggacagagacctgtagacttcttgtatgatttccctcctcccttctcccgaaaacaaacaaaacaaaacaaaacaaaaacagcaaacaacaccaacaacaaaacacagcggcaaccaacaaaaataggaaaatatggtggcatgacaacatttgagatttcttgaactaacagggaaattaaatcagtcttttggtg

SEQ ID NO: 86795 - DNA, 595 bp, Chicken  19866894387729_1
aggagtaaaaaggctggactcctttcctggagtacccaaaggctgaccggagccgggaggaaaagaggtgataaaggttgagtgcaggtctgaagtactccatgtgtgggcttatttcttcccttaggaatagtctggattcctagctagagaggacaagtcttgttggaagccatgggcattgcatggtgtcctcggggcacatgactccaataaactggcagaagtttgcttgggattatctttctcttaagcaaataataataagaaaattaataaagatgaatctaatggctttcstctacttttccaatcacattagattgcttatcttctaaagctgagaataaactaacgagcttcagattgctgctgtgtagatctgaatatttataccaacagttacatatccctatccatacttcataatttaggtaaaccacgaacatgctgtttcgttactttgttctgctagttaatagctctgtactctttatccgatcagtatgcttaaacactaattgctctgtggagaacattgcattagaacatagtattcctactatcttactaataaaataaatcattatgtcaa

SEQ ID NO: 86796 - DNA, 599 bp, Chicken  19866894387741_1
  misc_feature (1)..(163): n is any nucleotide
nnnnnnnnnnnnnnnnnnnnnnnnnnnnnnnnnnnnnnnnnnnnnnnnnnnnnnnnnnnnnnnnnnnnnnnnnnnnnnnnnnnnnnnnnnnnnnnnnnnnnnnnnnnnnnnnnnnnnnnnnnnnnnnnnnnnnnnnnnnnnnnnnnnnnnnnnnnnnnnnnnntaattagtttcaatatctgagaaatattgtattaaaaacaggtctgtgtatttcaaagtggatttattagttaagtaaatgtattggccataattaaggatgaaagaagttgagcgatgtgttcttgtgtttcttartttttgttgttttttcttaaaaacctccattctaaaatactcatttttaactactaacctaagctcatcctctgtggagatcagcccccgggcttagatttcattcatatgatctttgggttcaactggatagaatctggactccaaaccatggaaaaattttcttcagtcatcactacactatttgaatctgatcatwtaattctacaaataaaaaaaatacttcttacttaaataaaaaaatacttaaatattccagaaatatgggttttcaacttgtccttcatagtctgttatgt

SEQ ID NO: 86797 - DNA, 600 bp, Chicken  19866894387741_2
aacaggtctgtgtatttcaaagtggatttattagttaagtaaatgtattggccataattaaggatgaaagaagttgagcgatgtgttcttgtgtttcttartttttgttgttttttcttaaaaacctccattctaaaatactcatttttaactactaacctaagctcatcctctgtggagatcagcccccgggcttagatttcattcatatgatctttgggttcaactggatagaatctggactccaaaccatggaaaaattttcttcagtcatcactacactatttgaatctgatcatwtaattctacaaataaaaaaaatacttcttacttaaataaaaaaatacttaaatattccagaaatatgggttttcaacttgtccttcatagtctgttatgtttctttcacctatatttggttcagctactatggagagaagctttgttagttgactgaaaaacaaaatgaagtgaattacatccactgtcctgttcgtaattgcggcattttgtctcactgttccacattacatgtaaagaccttcttcccttcaaggaaatggggctgtagggcaaaactgtgtcttgattcatgttctg

SEQ ID NO: 86798 - DNA, 600 bp, Chicken  19866894387747_1
tgagaaaacattgttccagctgtcatcacattgttcacactacagtattatgtacatagatagttacagctattgcctagtttccttattgtttgtttaggtcttttatatagcaacgacgtagagaaaaataataagaaaaataaataaattatttctgatttaaaaaatagatatgaactgggtgacttcagactataactgcacccctatggtttccttccttattgcaggaaaactctgattcatttgttatccaaataaagacattgttcaggcttggcttccagtatgttctaytggaatgcaggtattgctctaagacatcataatgcaatgacatctgaaacattttaattcttagctataaacatattttcttcttcccttttatcttacgtatattataaataataaacatggtctttgtagttaattcaaacccaaacggcgagatgcatcataaagaaaagtacaaaatctggttgtggctgcctgtttttcatttgtttgttcttgaccggatagtgaaaatgaggttaaagcatacatgtattcccacctcaccaggaagcatgcagttatgtcagacttggaaaa

SEQ ID NO: 86799 - DNA, 600 bp, Chicken  19866894387747_2
taatgcaatgacatctgaaacattttaattcttagctataaacatattttcttcttcccttttatcttacgtatattataaataataaacatggtctttgtagttaattcaaacccaaacggcgagatgcatcataaagaaaagtacaaaatctggttgtggctgcctgtttttcatttgtttgttcttgaccggatagtgaaaatgaggttaaagcatacatgtattcccacctcaccaggaagcatgcagttatgtcagacttggaaaaaaaaaatccttacagattttcaaatacaytgatgtagacatttctataatctccaggaaatcttggaaatagctttgtgcattcctggggtgtcctttctgcttgtatctatatattacatgcggtgggtttatcctctaaccctgaagccagttgccaaaaaatggtacttacccacactactaacctcttctgcaaatatcttcatgcttagtccttaagcaagcccaggaaatcttggagagaatgctaactggctcagatctaaatagtgattattctaacaatttcctcattgagattaccgaatattagcgcctgggaatatt

SEQ ID NO: 86800 - DNA, 600 bp, Chicken  19866894387756_1
tgatgaataacagtgtttacataaggcctttcaccctgaggtgcttcacagattacaaacatgcagctccacaacacagcgtgggcagaacagccgacttcaaagttttccaaagttttggctgagaaaatcccacacgcagaccatggcagggagcaacccaccttccagatatcagaaggcaaggcagttccaggaacgaaggctgcttccagcctcaaggtacatccacactgcaaagtaagccatatgccttgctctactctggaaatgacttggatgctctttcagtgtcttcakttaaataacttcattccctcagtgccaaagttcaaaccacttatttttcatattgtgtttcaacttgyttacaaggtccatgtgatcgttcacctttattttaacgccatttcacctcaatttccttcaactctgtctatctatgccaaccgcaaccaatgatcctgcaacccaaaactgtgcaaacttgagaaggagaaacaaagaagatgaaggcgaacatttcagacactgcatgtctgtacaaaaatgacagctaagcaatcccccaaaatagatgattcggggacttttggctgg

SEQ ID NO: 86801 - DNA, 541 bp, Chicken  19866894387756_2
ccacaacacagcgtgggcagaacagccgacttcaaagttttccaaagttttggctgagaaaatcccacacgcagaccatggcagggagcaacccaccttccagatatcagaaggcaaggcagttccaggaacgaaggctgcttccagcctcaaggtacatccacactgcaaagtaagccatatgccttgctctactctggaaatgacttggatgctctttcagtgtcttcakttaaataacttcattccctcagtgccaaagttcaaaccacttatttttcatattgtgtttcaacttgyttacaaggtccatgtgatcgttcacctttattttaacgccatttcacctcaatttccttcaactctgtctatctatgccaaccgcaaccaatgatcctgcaacccaaaactgtgcaaacttgagaaggagaaacaaagaagatgaaggcgaacatttcagacactgcatgtctgtacaaaaatgacagctaagcaatcccccaaaatagatgattcggggacttttggctggggagcattc

SEQ ID NO: 86802 - DNA, 600 bp, Chicken  19866894387758_1
cctgttggaggctgggcatttaagaagcaaattgggcacagctttacggatcaggggatgctgtgtgcccactgctggcgtggtttcatgtccaagcatcccagtgctgacttttgtcacctgttactttactggaatttagaaatttatacctttgaagtgatggggcacttgaaaatattattgcctcagtgagtttcgtatgcaaatagtggagcaaagccaaaggtccctctcgggcagcctgctcctagaggttgctccataaaagtttgtctgctaccagctgttacgccagtsttcttactagaaaraataatggttttttgcaacctaaaattgagggtttcacagactgcaactggcaaattggcagccatgctcctctgctgtagactgaaagcctgtggcagacagaaaagaattaattcttcggtaacagctttagaagctgcggctgctggtgagctctagaaagcacacctgaaatgcagaataaatgtgataattatatagtcagacaatatgcagattgttacagatggcatacgtatccarcttaataacatatccttagaattggggatggaaagtggtatg

SEQ ID NO: 86803 - DNA, 600 bp, Chicken  19866894387758_2
ggcatttaagaagcaaattgggcacagctttacggatcaggggatgctgtgtgcccactgctggcgtggtttcatgtccaagcatcccagtgctgacttttgtcacctgttactttactggaatttagaaatttatacctttgaagtgatggggcacttgaaaatattattgcctcagtgagtttcgtatgcaaatagtggagcaaagccaaaggtccctctcgggcagcctgctcctagaggttgctccataaaagtttgtctgctaccagctgttacgccagtsttcttactagaaaraataatggttttttgcaacctaaaattgagggtttcacagactgcaactggcaaattggcagccatgctcctctgctgtagactgaaagcctgtggcagacagaaaagaattaattcttcggtaacagctttagaagctgcggctgctggtgagctctagaaagcacacctgaaatgcagaataaatgtgataattatatagtcagacaatatgcagattgttacagatggcatacgtatccarcttaataacatatccttagaattggggatggaaagtggtatgagttattggattta

SEQ ID NO: 86804 - DNA, 600 bp, Chicken  19866894387758_3
tgctccataaaagtttgtctgctaccagctgttacgccagtsttcttactagaaaraataatggttttttgcaacctaaaattgagggtttcacagactgcaactggcaaattggcagccatgctcctctgctgtagactgaaagcctgtggcagacagaaaagaattaattcttcggtaacagctttagaagctgcggctgctggtgagctctagaaagcacacctgaaatgcagaataaatgtgataattatatagtcagacaatatgcagattgttacagatggcatacgtatccarcttaataacatatccttagaattggggatggaaagtggtatgagttattggatttaaaaaagaaaaaagcaccaccactcagaggaactgtaaaattcatttttggcgagtgctggaacattccagttctgattttacctgtactcattgcctgctcttcaggttctttttcctctaaaacacccacattgggaggaggaaattaagctttgccctgttgtgcttccatagagcagcagcagactgattctgtcatcctgttctatttcaaaccgaattgccaaagtcctgcagactttt

SEQ ID NO: 86805 - DNA, 600 bp, Chicken  19866894387763_1
taatttcattcagagaaagaaaaagaccaaggctttttatgtcccgacttaaatattgaaactccagctctcatcaaatactggaaatgaaaggcaccataaaatgctattgttatccatctattccctatgcatttgctagcaaaaactaacctttggaaaggctacattttcctgttggttttttatgagtaaattgaatgctgttctactgacctcactcctgaattctgtacctgagaggtgaccttagctctgacagctatgagttgtgtggacaagagcagcgcatcctcaccrgaatagctgctggaatccatcacttaccaggttttattagaacaytwtaattaaaataaatagaaataaagataatgaaagactcctactgccttcagtgtaaagggccacaactcacctttcacctggatcagatgagagagaaatccctccctgtacacagcagctgccatccctgccaaagcaagactggaactaggagatgcttaacgaaccagaaactcccatccacgtcgaggtagagtaaccagatatacttcatgtacaacacacaacagaaacctacctgggtgccatcct

SEQ ID NO: 86806 - DNA, 600 bp, Chicken  19866894387763_2
gacttaaatattgaaactccagctctcatcaaatactggaaatgaaaggcaccataaaatgctattgttatccatctattccctatgcatttgctagcaaaaactaacctttggaaaggctacattttcctgttggttttttatgagtaaattgaatgctgttctactgacctcactcctgaattctgtacctgagaggtgaccttagctctgacagctatgagttgtgtggacaagagcagcgcatcctcaccrgaatagctgctggaatccatcacttaccaggttttattagaacaytwtaattaaaataaatagaaataaagataatgaaagactcctactgccttcagtgtaaagggccacaactcacctttcacctggatcagatgagagagaaatccctccctgtacacagcagctgccatccctgccaaagcaagactggaactaggagatgcttaacgaaccagaaactcccatccacgtcgaggtagagtaaccagatatacttcatgtacaacacacaacagaaacctacctgggtgccatcctgtgctggcatatgctggcacgttaaataaaacccacttggcgtga

SEQ ID NO: 86807 - DNA, 600 bp, Chicken  19866894387763_3
cttaaatattgaaactccagctctcatcaaatactggaaatgaaaggcaccataaaatgctattgttatccatctattccctatgcatttgctagcaaaaactaacctttggaaaggctacattttcctgttggttttttatgagtaaattgaatgctgttctactgacctcactcctgaattctgtacctgagaggtgaccttagctctgacagctatgagttgtgtggacaagagcagcgcatcctcaccrgaatagctgctggaatccatcacttaccaggttttattagaacaytwtaattaaaataaatagaaataaagataatgaaagactcctactgccttcagtgtaaagggccacaactcacctttcacctggatcagatgagagagaaatccctccctgtacacagcagctgccatccctgccaaagcaagactggaactaggagatgcttaacgaaccagaaactcccatccacgtcgaggtagagtaaccagatatacttcatgtacaacacacaacagaaacctacctgggtgccatcctgtgctggcatatgctggcacgttaaataaaacccacttggcgtgaca

SEQ ID NO: 86808 - DNA, 599 bp, Chicken  19866894387767_1
  misc_feature (1)..(7): n is any nucleotide
nnnnnnncaaagggtgtacttaaatcaagctactcaaactttcaagaaaagtaatgcaagataaattgaacaggacttcataactgctatttcagacttaagtatagagactccagaatttagatttgcaactgaatagaaggcagaagctactacttgggagactgagcttgttttatgaaggcaaccaggaacaattctgagtacatcctagaattcagagcagaaactgtatgacttaactactgctacatcagcagtaggtaaacactgaagaaataagatgcttagaggcctgarctttaaccttggtggaaagacttttactccatatacccagggaggagagaatactgttctccctgctgctgttcatcaccatcctgcaggcttcgggacctttgattcaagggacagatgttttgtattaacatagacagcactgcacaataaactaagatcttttccaaagggacactgaagaacagaaggctatgacagacagtccagtactctgtctygaaaagttcttttcacacatgatatcacatcattttwacatccagcactgtcataatgaaagccatratctgccacac

SEQ ID NO: 86809 - DNA, 600 bp, Chicken  19866894387767_2
agcagaaactgtatgacttaactactgctacatcagcagtaggtaaacactgaagaaataagatgcttagaggcctgarctttaaccttggtggaaagacttttactccatatacccagggaggagagaatactgttctccctgctgctgttcatcaccatcctgcaggcttcgggacctttgattcaagggacagatgttttgtattaacatagacagcactgcacaataaactaagatcttttccaaagggacactgaagaacagaaggctatgacagacagtccagtactctgtctygaaaagttcttttcacacatgatatcacatcattttwacatccagcactgtcataatgaaagccatratctgccacaccagttactgatacatctatattaggctgcactgtaagcactatagtgtaagaggaatacagatcagttcagacaagaaaaagaaaaccattcatctcatccactgcactagcttcctcttggctgcttcttgattccagctctctcattaagtttaacttctctggctatgcatacttttaatagggttaaactgcaagacaccccaacacactccacctag

SEQ ID NO: 86810 - DNA, 600 bp, Chicken  19866894387767_3
agtaggtaaacactgaagaaataagatgcttagaggcctgarctttaaccttggtggaaagacttttactccatatacccagggaggagagaatactgttctccctgctgctgttcatcaccatcctgcaggcttcgggacctttgattcaagggacagatgttttgtattaacatagacagcactgcacaataaactaagatcttttccaaagggacactgaagaacagaaggctatgacagacagtccagtactctgtctygaaaagttcttttcacacatgatatcacatcattttwacatccagcactgtcataatgaaagccatratctgccacaccagttactgatacatctatattaggctgcactgtaagcactatagtgtaagaggaatacagatcagttcagacaagaaaaagaaaaccattcatctcatccactgcactagcttcctcttggctgcttcttgattccagctctctcattaagtttaacttctctggctatgcatacttttaatagggttaaactgcaagacaccccaacacactccacctagcaccccacgtgagccaactgcacaaagatgcaagcag

SEQ ID NO: 86811 - DNA, 600 bp, Chicken  19866894387767_4
tagaggcctgarctttaaccttggtggaaagacttttactccatatacccagggaggagagaatactgttctccctgctgctgttcatcaccatcctgcaggcttcgggacctttgattcaagggacagatgttttgtattaacatagacagcactgcacaataaactaagatcttttccaaagggacactgaagaacagaaggctatgacagacagtccagtactctgtctygaaaagttcttttcacacatgatatcacatcattttwacatccagcactgtcataatgaaagccatratctgccacaccagttactgatacatctatattaggctgcactgtaagcactatagtgtaagaggaatacagatcagttcagacaagaaaaagaaaaccattcatctcatccactgcactagcttcctcttggctgcttcttgattccagctctctcattaagtttaacttctctggctatgcatacttttaatagggttaaactgcaagacaccccaacacactccacctagcaccccacgtgagccaactgcacaaagatgcaagcaggacaaagccaagcaagactctcccttcacc

SEQ ID NO: 86812 - DNA, 600 bp, Chicken  19866894387767_5
ctcttggctgcttcttgattccagctctctcattaagtttaacttctctggctatgcatacttttaatagggttaaactgcaagacaccccaacacactccacctagcaccccacgtgagccaactgcacaaagatgcaagcaggacaaagccaagcaagactctcccttcaccatactactgtttgggtcctctgcaaaacaaagggttaattcaaagcaagccatgcatgtcctaaagcgaaaagcattttaatctgtgctcagtttatagatagcatccaatagccatacactgagmattaaccccctatcctgatcatgagaccaagctgttccctcctgtgtgtgtgtacacatgggcagtggagggggggtggtctttgttcaactaggtcaaccttattcttaaaggattagctgtgtaatccagcccatcccaagctgggtgcaggggaagtggaggaggagctgcacaggcactaaccaccaaagacagggtaggtcccagcaggatgtttgcagaggactcattctcattcctcacagcccagcagatctggccccctgcccaagaagggctcttcagcactgagcagtg

SEQ ID NO: 86813 - DNA, 406 bp, Chicken  19866894387767_6
tgtgtgtgtacacatgggcagtggagggggggtggtctttgttcaactaggtcaaccttattcttaaaggattagctgtgtaatccagcccatcccaagctgggtgcaggggaagtggaggaggagctgcacaggcactaaccaccaaagacagggtaggtcccagcaggatgtttgcagaggactcattctcattcctcacagcccagcagatctggccccctgcccaagaagggctcttcagcactgagcagtggccacaaggccccaggaacaaggaactcctttcagcacattacrggaggggaaagatgacagatcacccctttaccccctcacttcctgccactgtgtattaaaacaactcaaaactgagaagcttcagaatatctgactgcagctgagg

SEQ ID NO: 86814 - DNA, 599 bp, Chicken  19866894387768_1
  misc_feature (1)..(131): n is any nucleotide
nnnnnnnnnnnnnnnnnnnnnnnnnnnnnnnnnnnnnnnnnnnnnnnnnnnnnnnnnnnnnnnnnnnnnnnnnnnnnnnnnnnnnnnnnnnnnnnnnnnnnnnnnnnnnnnnnnnnnnnnnnnnnnnnnnntcagttaaagaaaaatgcatttaaaatagatttgaaacactaagaaatccatgaaacaactgctttcttaactatgggcatccacccctggcctccaagtaatcccatggtaacaatgccatttaaagaagatacactaagtattaaaaaacaaacttttaagagcccraagtatgtgttacagtaggtcgctcggcagacaccagtgacccaccttgtaattgtaaattaattgggcattcaactacaacaaatcttagctaatacagaccagacatgcagccatgcacactccggcactgaggccacagctgtgagcaatgccagctggttcactgcagagctctggcacgagggcacctcagaccaccccagcatgcctgctggcccctggcattgctggctgcagcaggaccaaggccttttctgtcccatgaacttcccatctctgtgtccttcatctctgag

SEQ ID NO: 86815 - DNA, 600 bp, Chicken  19866894387774_1
gttgtacattgtgtatatgaactacaggaataagagaaggacagaggtgcttttctttccaagccatcgtgctagacagctctcttctacacttgtggaaaattctcagcagtgcctggtcccaactagcttgccagcagtcagattatggggaattaatgaactccatccaaaactaagtgtaatttttgagatgattttcctatgaaatgagtttggatacactgagcaaacagtgctaacaagattttggttgcccttttgaaagaataagtaagcatttaagtcttcaaggacagmtamcaatttaaaaggacaaactggcawaattataggcataatgctaatggtaggcagacataaaaaaaataggtcagttagcatgagcatcctgaaaattcaggagtattgctgaacagttttggactacgaatcttgtgaaacttttgttctgtttttagcatttcctggatgtggtaaggcaggaaatattgcataaacagcccttatcgtggtgttttggtgcttccagttccagtgccagtaaaaaccaaaaggtcccagggaatcataactgaaaacacacagaaagtgttggta

SEQ ID NO: 86816 - DNA, 600 bp, Chicken  19866894387774_2
gtacattgtgtatatgaactacaggaataagagaaggacagaggtgcttttctttccaagccatcgtgctagacagctctcttctacacttgtggaaaattctcagcagtgcctggtcccaactagcttgccagcagtcagattatggggaattaatgaactccatccaaaactaagtgtaatttttgagatgattttcctatgaaatgagtttggatacactgagcaaacagtgctaacaagattttggttgcccttttgaaagaataagtaagcatttaagtcttcaaggacagmtamcaatttaaaaggacaaactggcawaattataggcataatgctaatggtaggcagacataaaaaaaataggtcagttagcatgagcatcctgaaaattcaggagtattgctgaacagttttggactacgaatcttgtgaaacttttgttctgtttttagcatttcctggatgtggtaaggcaggaaatattgcataaacagcccttatcgtggtgttttggtgcttccagttccagtgccagtaaaaaccaaaaggtcccagggaatcataactgaaaacacacagaaagtgttggtatta

SEQ ID NO: 86817 - DNA, 600 bp, Chicken  19866894387774_3
gaataagagaaggacagaggtgcttttctttccaagccatcgtgctagacagctctcttctacacttgtggaaaattctcagcagtgcctggtcccaactagcttgccagcagtcagattatggggaattaatgaactccatccaaaactaagtgtaatttttgagatgattttcctatgaaatgagtttggatacactgagcaaacagtgctaacaagattttggttgcccttttgaaagaataagtaagcatttaagtcttcaaggacagmtamcaatttaaaaggacaaactggcawaattataggcataatgctaatggtaggcagacataaaaaaaataggtcagttagcatgagcatcctgaaaattcaggagtattgctgaacagttttggactacgaatcttgtgaaacttttgttctgtttttagcatttcctggatgtggtaaggcaggaaatattgcataaacagcccttatcgtggtgttttggtgcttccagttccagtgccagtaaaaaccaaaaggtcccagggaatcataactgaaaacacacagaaagtgttggtattatgtgaatataaagagactaatgat

SEQ ID NO: 86818 - DNA, 600 bp, Chicken  19866894387778_1
ttaacagcatgctgattcagtcaattggtctaataagtagcagcctttaaatggctgcttagtttctctctgtggatgaagtgtatagctctctacctccctcaactttctgtaaggtgtttttcttgaaacactgttcaagaagtttcagttagaataaacttttgggtgtgggattttctgattcaattctgcccttggataaccatagttcctccagaaacagctacgtttctaaggctactcataacttttgcaaggtttctcctatttaaaaccaaactcttctcatctataggmggaaactttttcttgcaaatgaagtgaatgcaggcgccttttcggtattcctttatcttatagtcaaatgaggacataagactagaatggaggattcaagagatttttaaaagcctccttagcagagagaagagagtcrtcttctcttttgttcctcagtagcttccaacttttcataaatagtttagctcctttgaagtgcaagcatttgtgctacatacagaatacctgcatatttgtggcatctaggtttaagcacttcaagacattcttcacctataaactgagacagtagcatct

SEQ ID NO: 86819 - DNA, 600 bp, Chicken  19866894387778_2
aagaagtttcagttagaataaacttttgggtgtgggattttctgattcaattctgcccttggataaccatagttcctccagaaacagctacgtttctaaggctactcataacttttgcaaggtttctcctatttaaaaccaaactcttctcatctataggmggaaactttttcttgcaaatgaagtgaatgcaggcgccttttcggtattcctttatcttatagtcaaatgaggacataagactagaatggaggattcaagagatttttaaaagcctccttagcagagagaagagagtcrtcttctcttttgttcctcagtagcttccaacttttcataaatagtttagctcctttgaagtgcaagcatttgtgctacatacagaatacctgcatatttgtggcatctaggtttaagcacttcaagacattcttcacctataaactgagacagtagcatcttctcacttcaggaggccaatgtgggattatatctgcccatctggagcaaggagcagttcattacttcagttcatacctcgggcatgaaaccattgccataaaagaccacagtagaagtaattagtgggatggtggatgt

SEQ ID NO: 86820 - DNA, 600 bp, Chicken  19866894387778_3
ctcctttgaagtgcaagcatttgtgctacatacagaatacctgcatatttgtggcatctaggtttaagcacttcaagacattcttcacctataaactgagacagtagcatcttctcacttcaggaggccaatgtgggattatatctgcccatctggagcaaggagcagttcattacttcagttcatacctcgggcatgaaaccattgccataaaagaccacagtagaagtaattagtgggatggtggatgtagggaatggatagctgtagagactgttaggtaggctgggagtgtggtgkgcaggaaggatagaaggttttgagtgctctctcacattttatcagtgccagttttctgggcaaagattcaggaaagagcctacagaaaggaatgragcaaggagaagtatatttttgagtggagggagggcctatgctaagtgtgtagttctggaatttggattagaatttaatttgtttggttgtctcagtcatggcagaaaatgttaagtcataccatgcttggctacaagtgtcctaaacacatgcagaggtttctgaggagtggttsgggtctaaaaactacttttcttttagttt

SEQ ID NO: 86821 - DNA, 600 bp, Chicken  19866894387778_4
ctgagacagtagcatcttctcacttcaggaggccaatgtgggattatatctgcccatctggagcaaggagcagttcattacttcagttcatacctcgggcatgaaaccattgccataaaagaccacagtagaagtaattagtgggatggtggatgtagggaatggatagctgtagagactgttaggtaggctgggagtgtggtgkgcaggaaggatagaaggttttgagtgctctctcacattttatcagtgccagttttctgggcaaagattcaggaaagagcctacagaaaggaatgragcaaggagaagtatatttttgagtggagggagggcctatgctaagtgtgtagttctggaatttggattagaatttaatttgtttggttgtctcagtcatggcagaaaatgttaagtcataccatgcttggctacaagtgtcctaaacacatgcagaggtttctgaggagtggttsgggtctaaaaactacttttcttttagtttacatagggaaagtatttcctgagtcctccctgaactagtttgtctgtcttgtttttccaatagtcacctaggaaagagtctcgttcttttctcat

SEQ ID NO: 86822 - DNA, 523 bp, Chicken  19866894387778_5
gactgttaggtaggctgggagtgtggtgkgcaggaaggatagaaggttttgagtgctctctcacattttatcagtgccagttttctgggcaaagattcaggaaagagcctacagaaaggaatgragcaaggagaagtatatttttgagtggagggagggcctatgctaagtgtgtagttctggaatttggattagaatttaatttgtttggttgtctcagtcatggcagaaaatgttaagtcataccatgcttggctacaagtgtcctaaacacatgcagaggtttctgaggagtggttsgggtctaaaaactacttttcttttagtttacatagggaaagtatttcctgagtcctccctgaactagtttgtctgtcttgtttttccaatagtcacctaggaaagagtctcgttcttttctcatttgaaaagcaagaatgattagatcattttcaagagtttctataggatttccaagtgctcacagccgaaaggaacatctgtcaccttaaaagctactgta

SEQ ID NO: 86823 - DNA, 600 bp, Chicken  19866894387781_1
gagagcccaaactatagctaataaagttagctgacgacatggaagtcgtagtgtgggacacactgaagatgacgggtcactggcacgcagcaatctggatgggcacaagcaagccatgtgcatttcagtgctaacacatgtcagatcatgcctcccgggaaaaggatgcaggccacagcggttctcagtcaaaaaccatcgccaaaatggttaatgtgaagatggcatggagaaatgtcatggagagaggcgccaccccctccagcactcaactgcattgatctgcatgggatggaggcyctgccaactggaaggctgaaggagtgcgaagggctggggagagccaaaaagctcttagcacaaagagggcagagggtcagggattactcttaaacagccacgcggaaaccacaagtatgggaacagaggccccgctggacacagttcactgaggtccaagcgccaggcagcagggggcaggtaaggaggcaggaaggccactggaagcatttaagataactctccttctctggaaacatttatatcacaattggctgtatctgctctagctcaaccaggaatgcttcctgtaagaactta

SEQ ID NO: 86824 - DNA, 600 bp, Chicken  19866894387782_1
gttcactgcaaagggaggataagcataacggcagcattgttagcagtgctgtaatcttgttgattaggatgctgttcagtcaatttagcttcctgctcattttaaaatctctctctttaaactctcttcaaaaaactgttgctaaaagaagcagttataaaaaaataaataaaagaaatcagaagccttgttctctcctgggaagccacttatacttgactcaggagaaacagcaggtacacagaaaacctgcttaggaagctgtgccaagctaaactaattctgacctttccttccttyttctttctcctgacacgtttccccctcatttgccaggttagctgcaagctagattaagttcaccatatagcttattgagtagtttaatgactaaatccttatatcagtctacataaattaygaaggaaagtacaataagtccaggaagaaataacagcaaaattttgttacgcaccaacagaacaacaaaagtttgtagcctcagttgttagcacagcattactgaatgacagctcagcaaaacytgagagtagaactgtaatcacaaacatctctttttcttttgtttacagaagttac

SEQ ID NO: 86825 - DNA, 600 bp, Chicken  19866894387782_2
ctctcttcaaaaaactgttgctaaaagaagcagttataaaaaaataaataaaagaaatcagaagccttgttctctcctgggaagccacttatacttgactcaggagaaacagcaggtacacagaaaacctgcttaggaagctgtgccaagctaaactaattctgacctttccttccttyttctttctcctgacacgtttccccctcatttgccaggttagctgcaagctagattaagttcaccatatagcttattgagtagtttaatgactaaatccttatatcagtctacataaattaygaaggaaagtacaataagtccaggaagaaataacagcaaaattttgttacgcaccaacagaacaacaaaagtttgtagcctcagttgttagcacagcattactgaatgacagctcagcaaaacytgagagtagaactgtaatcacaaacatctctttttcttttgtttacagaagttacagtttaagaaactcttactatcttactacatacagtgcagaaagactagcagactttgaatttcttggctctccatcaagcacacaaaaaataaacagctactatataaaaacatacaata

SEQ ID NO: 86826 - DNA, 600 bp, Chicken  19866894387782_3
aaacctgcttaggaagctgtgccaagctaaactaattctgacctttccttccttyttctttctcctgacacgtttccccctcatttgccaggttagctgcaagctagattaagttcaccatatagcttattgagtagtttaatgactaaatccttatatcagtctacataaattaygaaggaaagtacaataagtccaggaagaaataacagcaaaattttgttacgcaccaacagaacaacaaaagtttgtagcctcagttgttagcacagcattactgaatgacagctcagcaaaacytgagagtagaactgtaatcacaaacatctctttttcttttgtttacagaagttacagtttaagaaactcttactatcttactacatacagtgcagaaagactagcagactttgaatttcttggctctccatcaagcacacaaaaaataaacagctactatataaaaacatacaatacacaagttcaagctatgcctaaaaccagagacaaagattacagcacttcctaggaacacttcagatttgagttgcttccatacactaccatctagatacaagcagcacaaaaaacaacaacaga

SEQ ID NO: 86827 - DNA, 600 bp, Chicken  19866894387788_1
agtaagcaagtgtcattttgctcttaaatttcacaatgcctctccagatgaaatttatttttaaggaatctctttagtcactattttacagcatacttgaactttactatcaagtgaactgccagtaattgtgcattcagtactgattaggcaaaggaaaatctctggggaaggaacatcagtctttgtattgaaaaaaatagtcctctggaaataatataaagcacttctgggtcttccatttctgtgagtcactgaatgagtaaaagacaccttcctgggttccagaataaatttaartatctgtctaaatgttcagaaaacttactaagatattaataatattttaatattttccatgaaaaaaaatccttcaagttacacatttcaacttcaagaagaatgcatatctctayataaattctaagtcagggggctttggggtagcaagggaaaaaatagcagtttgaggaggtgaaattttcacctaagctcagcagatctcctgctgtccccatcagcctgctgctccagccctccccaacacttgcttgtcaccatttcactgctgaaacccttgaagaaggatctggggtttgg

SEQ ID NO: 86828 - DNA, 600 bp, Chicken  19866894387788_2
aactgccagtaattgtgcattcagtactgattaggcaaaggaaaatctctggggaaggaacatcagtctttgtattgaaaaaaatagtcctctggaaataatataaagcacttctgggtcttccatttctgtgagtcactgaatgagtaaaagacaccttcctgggttccagaataaatttaartatctgtctaaatgttcagaaaacttactaagatattaataatattttaatattttccatgaaaaaaaatccttcaagttacacatttcaacttcaagaagaatgcatatctctayataaattctaagtcagggggctttggggtagcaagggaaaaaatagcagtttgaggaggtgaaattttcacctaagctcagcagatctcctgctgtccccatcagcctgctgctccagccctccccaacacttgcttgtcaccatttcactgctgaaacccttgaagaaggatctggggtttggatcttgaccaacctcatcgcagtctgcmgcactagtgcacagwgcagggaygcaggaacctcagagacaacagggtaggatcaggcagagaaaggtatatccttttattccagttt

SEQ ID NO: 86829 - DNA, 581 bp, Chicken  19866894387788_3
taagatattaataatattttaatattttccatgaaaaaaaatccttcaagttacacatttcaacttcaagaagaatgcatatctctayataaattctaagtcagggggctttggggtagcaagggaaaaaatagcagtttgaggaggtgaaattttcacctaagctcagcagatctcctgctgtccccatcagcctgctgctccagccctccccaacacttgcttgtcaccatttcactgctgaaacccttgaagaaggatctggggtttggatcttgaccaacctcatcgcagtctgcmgcactagtgcacagwgcagggaygcaggaacctcagagacaacagggtaggatcaggcagagaaaggtatatccttttattccagtttctctactggcacacctgaatgggtgatgggggcaagggctgcttcttcgtggggcagatgctgagtgctgagacgtgggccctggtgtttgtatcctgctctttggaaaggaaaggcagcaaataaaatttaggaagcagtgatgttagatacccacagtgccaaagcactgaaccatcaagctggattccta

SEQ ID NO: 86830 - DNA, 566 bp, Chicken  19866894387788_4
attttaatattttccatgaaaaaaaatccttcaagttacacatttcaacttcaagaagaatgcatatctctayataaattctaagtcagggggctttggggtagcaagggaaaaaatagcagtttgaggaggtgaaattttcacctaagctcagcagatctcctgctgtccccatcagcctgctgctccagccctccccaacacttgcttgtcaccatttcactgctgaaacccttgaagaaggatctggggtttggatcttgaccaacctcatcgcagtctgcmgcactagtgcacagwgcagggaygcaggaacctcagagacaacagggtaggatcaggcagagaaaggtatatccttttattccagtttctctactggcacacctgaatgggtgatgggggcaagggctgcttcttcgtggggcagatgctgagtgctgagacgtgggccctggtgtttgtatcctgctctttggaaaggaaaggcagcaaataaaatttaggaagcagtgatgttagatacccacagtgccaaagcactgaaccatcaagctggattccta

SEQ ID NO: 86831 - DNA, 558 bp, Chicken  19866894387788_5
attttccatgaaaaaaaatccttcaagttacacatttcaacttcaagaagaatgcatatctctayataaattctaagtcagggggctttggggtagcaagggaaaaaatagcagtttgaggaggtgaaattttcacctaagctcagcagatctcctgctgtccccatcagcctgctgctccagccctccccaacacttgcttgtcaccatttcactgctgaaacccttgaagaaggatctggggtttggatcttgaccaacctcatcgcagtctgcmgcactagtgcacagwgcagggaygcaggaacctcagagacaacagggtaggatcaggcagagaaaggtatatccttttattccagtttctctactggcacacctgaatgggtgatgggggcaagggctgcttcttcgtggggcagatgctgagtgctgagacgtgggccctggtgtttgtatcctgctctttggaaaggaaaggcagcaaataaaatttaggaagcagtgatgttagatacccacagtgccaaagcactgaaccatcaagctggattccta

SEQ ID NO: 86832 - DNA, 600 bp, Chicken  19866894387790_1
gctgtgaagaggaaaaggaaagcaaactttaaaataccaaatattttgtcatgacatgtcgcacatgttgagatttatgcagtcagagaataaatgtcttttgctcttttagagcttggtttagaattacttaacatcccactgagaactaagcatacaccttctctcctcagtatttcaacagaagatatagcactaaagtaaaacaacctgtaagtgacctgcatacaaaactcagcaggctttaaaatacgtcagtaattcacaagtcaacaaacgtatcagctatcaggtaactcrcatcctctcatactgacaactgctggactgcacacatgctgaccaccaacagttctgtgaccgtagtattaaccattttgttctcgatttcatgagctttcaagggagactgtactttttcctctcaagaaattcatgtggttatttagaatatcacaatgatcagaagtacctacattactctttctgattcaattccaaagctaatggcaaagctcctgacactaaatcttacatgctacgtaattactctgcttctacatttcacctgaatgaccacttcacattcaagacttctgg

SEQ ID NO: 86833 - DNA, 600 bp, Chicken  19866894387790_2
cagttctgtgaccgtagtattaaccattttgttctcgatttcatgagctttcaagggagactgtactttttcctctcaagaaattcatgtggttatttagaatatcacaatgatcagaagtacctacattactctttctgattcaattccaaagctaatggcaaagctcctgacactaaatcttacatgctacgtaattactctgcttctacatttcacctgaatgaccacttcacattcaagacttctggtaaatgtcaaggcaaaaaaaaaaccagcattacacgatttaaaacatgraaaaaacctccaaacaaggtaaagaagctatcaaactcaaccctattaagttttaargttgcttgtttttcctggctttcactataagtcaattttccaaaggaagattattccatgagacgcatgcaattctctgttgctgcttggacttcaggcacttccactagaatacagacacatatgtattaacatatggctcatcagcatagtttcatgtttaaaaaaacaaaacgaagcagaataaagttcagttcagtctctatatgaagtcctgagtgactagtctattctttagttcct

SEQ ID NO: 86834 - DNA, 600 bp, Chicken  19866894387790_3
agactgtactttttcctctcaagaaattcatgtggttatttagaatatcacaatgatcagaagtacctacattactctttctgattcaattccaaagctaatggcaaagctcctgacactaaatcttacatgctacgtaattactctgcttctacatttcacctgaatgaccacttcacattcaagacttctggtaaatgtcaaggcaaaaaaaaaaccagcattacacgatttaaaacatgraaaaaacctccaaacaaggtaaagaagctatcaaactcaaccctattaagttttaargttgcttgtttttcctggctttcactataagtcaattttccaaaggaagattattccatgagacgcatgcaattctctgttgctgcttggacttcaggcacttccactagaatacagacacatatgtattaacatatggctcatcagcatagtttcatgtttaaaaaaacaaaacgaagcagaataaagttcagttcagtctctatatgaagtcctgagtgactagtctattctttagttcctagcatttcctttccgatacaatgaacatccacaaacaaattatttttggacagaagt

SEQ ID NO: 86835 - DNA, 600 bp, Chicken  19866894387794_1
gaccatgaaccttgatacaaatatgaaagtttaactatgaaaatatttccattgtacatacttttcattagactgttatctctgtatctaagatgacatacacatatgtctctccttaacactcttctccttgatttttttttctttacagatatctatattggatttgatgttgctgttggcttgttgttcatttttaaccttgttctactctatctcctttatcactatggacgctgcaggcgcagaaacaattaccaagacatttaaaagagaggtgaagaaataaaagcgagcagmtagacatcaggcaattctttaaattgctctggcttgtatccatcagtttgctttggccaaatacatctccgaagcacattcaacaaacttgaagagctgaggtatcagtggccctcagtcctaaaagactgagtatctccagtgagaaacactgtagaaaattattattaagaatatacattggtaggaagagagaattacttcaatttctacctttaggtttttcactactatgaaacactattaagccagccactagggtgaaggagtactattgcttatgaatatttttggcttttc

SEQ ID NO: 86836 - DNA, 599 bp, Chicken  19866894387795_1
  misc_feature (1)..(17): n is any nucleotide
nnnnnnnnnnnnnnnnnctgagatgagcttattgtcatgttattttcctatttttgtttgagattctattcaacatggagtaaacccaccaattttaaaatctcagaacacaggcagtgttatccccccttttgtgtgtctggtgaattccatgagagtgtgagatggtactcagggctactcaggtactcagtactcagggctaagtcacaacggcttaagaaaatatcctcaagagaaataatgaataaaattgtcatcctgtgaccacttaaaaagtagattaacttttctgtgatragcaactcttttggcatacttctgacagctgtaaaatcaatcacatgagtaacagcttgtatgatcataccccatagagtgctgtactacagccttcatccaggcaaaattccaagaagttcatgtagakctttgtctgggtggtaaatttattgcttgatggctgcaaataataataaaaaataataatttttacctttcaaccaaaatttatgttgtgattctgggccttaccttgttcctctttaaaacggtcattcttcctgttgtccatctgttctgamcascacagaaagtgg

SEQ ID NO: 86837 - DNA, 600 bp, Chicken  19866894387795_2
tttgtgtgtctggtgaattccatgagagtgtgagatggtactcagggctactcaggtactcagtactcagggctaagtcacaacggcttaagaaaatatcctcaagagaaataatgaataaaattgtcatcctgtgaccacttaaaaagtagattaacttttctgtgatragcaactcttttggcatacttctgacagctgtaaaatcaatcacatgagtaacagcttgtatgatcataccccatagagtgctgtactacagccttcatccaggcaaaattccaagaagttcatgtagakctttgtctgggtggtaaatttattgcttgatggctgcaaataataataaaaaataataatttttacctttcaaccaaaatttatgttgtgattctgggccttaccttgttcctctttaaaacggtcattcttcctgttgtccatctgttctgamcascacagaaagtggatgagggagaagaactttgatgcaaagcatggaagagtattctgtaacacgtataagtatcttgtatgtcatgaaatagactggttcttttttgctgacatccaatatgtcctggtagtttatttgcttta

SEQ ID NO: 86838 - DNA, 596 bp, Chicken  19866894387795_3
taacttttctgtgatragcaactcttttggcatacttctgacagctgtaaaatcaatcacatgagtaacagcttgtatgatcataccccatagagtgctgtactacagccttcatccaggcaaaattccaagaagttcatgtagakctttgtctgggtggtaaatttattgcttgatggctgcaaataataataaaaaataataatttttacctttcaaccaaaatttatgttgtgattctgggccttaccttgttcctctttaaaacggtcattcttcctgttgtccatctgttctgamcascacagaaagtggatgagggagaagaactttgatgcaaagcatggaagagtattctgtaacacgtataagtatcttgtatgtcatgaaatagactggttcttttttgctgacatccaatatgtcctggtagtttatttgctttaattaggcaaataatatgtgtattttctgtcttaagaagaaaaaggaaagaagaatgctgatctggagttaccttttctaaagaactcataatcgattctacaggaatcactgttggagaaagtaagattttacgatctagaaagaaatcg

SEQ ID NO: 86839 - DNA, 593 bp, Chicken  19866894387795_4
cttttctgtgatragcaactcttttggcatacttctgacagctgtaaaatcaatcacatgagtaacagcttgtatgatcataccccatagagtgctgtactacagccttcatccaggcaaaattccaagaagttcatgtagakctttgtctgggtggtaaatttattgcttgatggctgcaaataataataaaaaataataatttttacctttcaaccaaaatttatgttgtgattctgggccttaccttgttcctctttaaaacggtcattcttcctgttgtccatctgttctgamcascacagaaagtggatgagggagaagaactttgatgcaaagcatggaagagtattctgtaacacgtataagtatcttgtatgtcatgaaatagactggttcttttttgctgacatccaatatgtcctggtagtttatttgctttaattaggcaaataatatgtgtattttctgtcttaagaagaaaaaggaaagaagaatgctgatctggagttaccttttctaaagaactcataatcgattctacaggaatcactgttggagaaagtaagattttacgatctagaaagaaatcg

SEQ ID NO: 86840 - DNA, 600 bp, Chicken  19866894387801_1
gaaatcagaatgcaggtatgattttcagaccataatgagaacattatttgtactaaattacttgcataacagatgctgggtagaacagatactaagagagcttaatcccaatgaattaatcaaatttcctagttaactctgactaccaaaagagtcactactacataagaccttaccatccactgcattagccataagctgctgggaaagtcttagcataagattagcaaaggatagggcataccctaagacaaacgggtaaccagagcattccccagcatgcactgaggagatgtgttygatgcgcagtcagtagggaaggcagacactgcaaggggcagagctggccggctggctctgttccgggaaggacgtctgtgaggctattttaggtggacaaatctaccagcttaactctactgaaagggcaggaataaaattaatcttttctacattctgtggacttagagacactatagactgcacacttcaccaacaaaatatttgattcctcttttatccggacaccacacaacggtcaggaagtagttccctggttttgtgctccgacttatgctttgggatatacatgcatgaaaa

SEQ ID NO: 86841 - DNA, 599 bp, Chicken  19866894387808_1
  misc_feature (1)..(148): n is any nucleotide
nnnnnnnnnnnnnnnnnnnnnnnnnnnnnnnnnnnnnnnnnnnnnnnnnnnnnnnnnnnnnnnnnnnnnnnnnnnnnnnnnnnnnnnnnnnnnnnnnnnnnnnnnnnnnnnnnnnnnnnnnnnnnnnnnnnnnnnnnnnnnnnnnnnnctgattgttgagctaatgtaacaagtaattaagttaatataacactgaaaggaagaagagagtaaatatttgacacagatccccagaaactgataaaaagtacttttccagaaagtgtgggaaatattttatcaccctcctctgaccttcayagaaaaggttaaaggctgttctagctctgtttcatcaaaagtttccatctctgcaaggcaaacttcattatttgtacatcagaaatttcctgttgtgccaggtatcaccaaaccaagagggagctcttctagagcttaagagataccacgacaaggccggccagagggctaaacacaaaaacagccatgaaataatagagcccacaagtcccttagagccacccagtcagtcttggccaggagctgtacccactgcacaccttggacttgtcctactttttttcctgaagctgcaacac

SEQ ID NO: 86842 - DNA, 512 bp, Chicken  19866894387808_2
gtacatcagaaatttcctgttgtgccaggtatcaccaaaccaagagggagctcttctagagcttaagagataccacgacaaggccggccagagggctaaacacaaaaacagccatgaaataatagagcccacaagtcccttagagccacccagtcagtcttggccaggagctgtacccactgcacaccttggacttgtcctactttttttcctgaagctgcaacactacagaaagaggtttcttcttttttagttaactgaaatttccagatcactttccttgatagatcatttctttcyaaatccagctggctctaataaggctgccgcactactcttaatgatttggaagcagtgttaatggctgtcacctgctatacttcagactgtcaataaagacaaattaaccactaagttctggttggttaaaagacgggaagaccttcctatcacagcttgtcagggcactcaagctgctagagggcttgctgctgagaaatggaaagcatttc

SEQ ID NO: 86843 - DNA, 600 bp, Chicken  19866894387811_1
ttcttattaccattaattttgttatttacctgtaccatgatgaaattaaagtgtgctcgaaaacatccttgcctctgcagtaaaattaataacactgttaatctactgtcactaacaagggcagtattccaatcacttcctggagtttggaaaagtacaggagaaggatattcctaagacagaaagttgtttttcacacagctacattctcattgctgtagttataccattgttttcttgctgacctgctatgagtcctactgcctccacacctgtgacttcactatcgtctttgatgascagaatcactttccccacctacttctttggaggcctctactcaatcactgcgttaggtagatatccccactgaggtatgggacccacaaacctatctgagtgctcatacaaaaggcattggtatatactgacagaatccttccactctgctacagcacttttctgggaaaggagaagagcagaagaaaaaaaggctctagttgccaaacgggcttttaccacatttcccctgcactgataagaaagtttagggtaactgagagctacagctcatcactaatgctatatcattgaatgttt

SEQ ID NO: 86844 - DNA, 600 bp, Chicken  19866894387812_1
tctgcacttctcccttattgaactccatgagattcctgtcatcccactccaagaccgttggggtccctatggatgactgcttaatctggtgagtaaagacgctaggactcagttccatgtgcagaattcctgcatggtactgttaaaccacttcctttctcggtatttcacttcctcatttgtaatgggagtacaaccgagctcagctatcttgcaggaagtggtgggagttagtaagttaatgaatgtctataaggaaattagaaagtccactgtctatctggtgtggtagttcccatmtcccagtaagagatgaaaaacatatgcaaatccttaatatgaatccttagtaaagtactggttaatttctggtcatcatcatgaaacatatttttaatattcattactttttatgataattacaaacaacacgagtgactacaaacatcagtgcttataagcacagtaaaaaacagcttgcctgtttccaactgaagaagctgtttcccttaataccagacattctggtaattaccatttttataacataagctgttggtaattttttggttttgtttttgtttttccttctttcaactg

SEQ ID NO: 86845 - DNA, 600 bp, Chicken  19866894387815_1
actagtaagaacattttcggtgactgggttgtttgggctacagaagagaggactgaggggatgaggatgtgctcacaatgcctccaacgctgctgctcagagctgaatgcgctgcctagggagtctggaaggacaggccaaggagcatggcctataactgcaccaaaaaaaaacccgaacatctaattagctgctgggggcatcttagattctagataccagccatacaaataatatatcaatgctgagagccctgttacagaggctgtggagtcttcaccagctgttgagctgttaagygtaggttagcaacaagcctgcagtgaccttgatacatttgaagatgagatcatcctgtgatagttctcattttctagtaccatctcagctaggaagctattcttttctagatgctacttaaaaatatggcattttcccccttcagaatgaatctttttttttttctgctacctgtttttcttttctaaactttaagtttggaacagccacaggctgtcatgctttgctgtttgagacatgactatacatagatttggcacttataaagccatttaaagtttttttttttctttttactta

SEQ ID NO: 86846 - DNA, 600 bp, Chicken  19866894387825_1
gaatcaggaacttaaagacttgggggaacttgcacctcactgggacaatatgcgtaaaagtgttattgctcactgtgatcagatgttgagcatgtatcaggatactctcgcagagcttggaaagcatacaggtatgaaagtagcctcctctcagctggaaaatttaactgtcaacctagtcaacacttattatatactgaactattcaggggaaataagccacctaaaatgaaaatatttataatcaatttatttcagagataccgagagtttccctgttccttctgttttctttttttyccatgcattctaggatgttttcatagttaatgtagcacatggttatacagcaaccaaaaaattgtagaagtggctgtgcctctttaaactgcatattccccttgaatgtactgctctagtaatattgagtaccatctgacagctgagaacagtcttagagaggtagttctgtcagttgttctggaaatataagttgcgtttaacagtgtagagaacaacagtaatacrttttacatatcctttgtgcatttgtcattgtccaggtcatgccagaaaagcacatgatttatgtagtatgca

SEQ ID NO: 86847 - DNA, 600 bp, Chicken  19866894387825_2
atgaaaatatttataatcaatttatttcagagataccgagagtttccctgttccttctgttttctttttttyccatgcattctaggatgttttcatagttaatgtagcacatggttatacagcaaccaaaaaattgtagaagtggctgtgcctctttaaactgcatattccccttgaatgtactgctctagtaatattgagtaccatctgacagctgagaacagtcttagagaggtagttctgtcagttgttctggaaatataagttgcgtttaacagtgtagagaacaacagtaatacrttttacatatcctttgtgcatttgtcattgtccaggtcatgccagaaaagcacatgatttatgtagtatgcacagtctgtctacagtccagaagtagcagtgtgtaatactttttgttttttacctgtagtggtctgctgtgcgtgaggtgtttgttcagttgtatttgtcaggatcttgtggactgtaatgtattgtagtgtccacatgagttgagtaaaggcagcatcagtgacaaatgtacagggaggcagctggtctttttctcttgtaaaaattcttgcttataaaaagaacaag

SEQ ID NO: 86848 - DNA, 599 bp, Chicken  19866894387832_1
  misc_feature (1)..(49): n is any nucleotide
nnnnnnnnnnnnnnnnnnnnnnnnnnnnnnnnnnnnnnnnnnnnnnnnntgaagtttgggctgtccatagcccagctgatcgatgtggtaaggagcccacatagggatctcatcctaggacctctgagccatttcttctgccctccatgctgctgactgtccccggtaggggacaagccacccacccgcctctacaaaacctccaacgagcaggggacattgctcattgctcctccatcccaagcctccccttcccctgaaagcaagacagcatcaaggaaaactgcactgctctccatycccattcttatcttcccatcawctatatctatagggctatgcctgggcttgtttttacatccatgtcttgctcgttactgtcatgcacacccatcttgtccatccatccatccacccatccacccacccacccatccacctaccaccacagaacccccagaccagggtgcttggcactgaaggtaaccctgggtctctctggtctcccctccccaccccgctgccccagaggggtcacccagagcagggtacccagccactctttactacctatagcctttctactatctgctacatag

SEQ ID NO: 86849 - DNA, 599 bp, Chicken  19866894387832_2
  misc_feature (1)..(27): n is any nucleotide
nnnnnnnnnnnnnnnnnnnnnnnnnnntgaagtttgggctgtccatagcccagctgatcgatgtggtaaggagcccacatagggatctcatcctaggacctctgagccatttcttctgccctccatgctgctgactgtccccggtaggggacaagccacccacccgcctctacaaaacctccaacgagcaggggacattgctcattgctcctccatcccaagcctccccttcccctgaaagcaagacagcatcaaggaaaactgcactgctctccatycccattcttatcttcccatcawctatatctatagggctatgcctgggcttgtttttacatccatgtcttgctcgttactgtcatgcacacccatcttgtccatccatccatccacccatccacccacccacccatccacctaccaccacagaacccccagaccagggtgcttggcactgaaggtaaccctgggtctctctggtctcccctccccaccccgctgccccagaggggtcacccagagcagggtacccagccactctttactacctatagcctttctactatctgctacatagagcctagataaatccatcatct

SEQ ID NO: 86850 - DNA, 600 bp, Chicken  19866894387834_1
actcctaaagttcacattagggaaaaacaaacaaacaacacatttatcacatgacaataagagtacaattcggccaagagttaggtgttaagacaaatttcctaacctttctggtttttgcttttttccccctcagaattcagttagtaacttgaagagcttgttaccttaaccaacaacaggctctatccacacctcacttttggctttctaccattatttagtatttaagcagcttaatggggaattcttcttagtttggagcacttattaccactcaggattttaaaatcttaagcwttttttttttttcttatgatcctctattggtgcagccttctcatagtcatcccraagcatccatactattttccttcaaaaaaaatctactttaagtctatttgccctgttctaactttatcttaacatgataccacaagcagtctgaccaaggaccagtattagaaccagtgccaccaaaacaaggcaaaacactttagtaaatggggattcctcattgagaagcactgaggcagccatttaccatctggacaatctctccagagaggtttgctgtctgccaggggactgcattcatga

SEQ ID NO: 86851 - DNA, 600 bp, Chicken  19866894387834_2
ctcctaaagttcacattagggaaaaacaaacaaacaacacatttatcacatgacaataagagtacaattcggccaagagttaggtgttaagacaaatttcctaacctttctggtttttgcttttttccccctcagaattcagttagtaacttgaagagcttgttaccttaaccaacaacaggctctatccacacctcacttttggctttctaccattatttagtatttaagcagcttaatggggaattcttcttagtttggagcacttattaccactcaggattttaaaatcttaagctwtttttttttttcttatgatcctctattggtgcagccttctcatagtcatcccraagcatccatactattttccttcaaaaaaaatctactttaagtctatttgccctgttctaactttatcttaacatgataccacaagcagtctgaccaaggaccagtattagaaccagtgccaccaaaacaaggcaaaacactttagtaaatggggattcctcattgagaagcactgaggcagccatttaccatctggacaatctctccagagaggtttgctgtctgccaggggactgcattcatgat

SEQ ID NO: 86852 - DNA, 600 bp, Chicken  19866894387834_3
caataagagtacaattcggccaagagttaggtgttaagacaaatttcctaacctttctggtttttgcttttttccccctcagaattcagttagtaacttgaagagcttgttaccttaaccaacaacaggctctatccacacctcacttttggctttctaccattatttagtatttaagcagcttaatggggaattcttcttagtttggagcacttattaccactcaggattttaaaatcttaagctttttttttttttcttatgatcctctattggtgcagccttctcatagtcatcccraagcatccatactattttccttcaaaaaaaatctactttaagtctatttgccctgttctaactttatcttaacatgataccacaagcagtctgaccaaggaccagtattagaaccagtgccaccaaaacaaggcaaaacactttagtaaatggggattcctcattgagaagcactgaggcagccatttaccatctggacaatctctccagagaggtttgctgtctgccaggggactgcattcatgatatcaagcagctacctggtacgataaagccagaggactactatccacaccwact

SEQ ID NO: 86853 - DNA, 600 bp, Chicken  19866894387834_4
ccraagcatccatactattttccttcaaaaaaaatctactttaagtctatttgccctgttctaactttatcttaacatgataccacaagcagtctgaccaaggaccagtattagaaccagtgccaccaaaacaaggcaaaacactttagtaaatggggattcctcattgagaagcactgaggcagccatttaccatctggacaatctctccagagaggtttgctgtctgccaggggactgcattcatgatatcaagcagctacctggtacgataaagccagaggactactatccacaccwactttttcaaaaaggatcacattagtctgcaacaaggatattacttaatattagaagaaattttatggcccttggaaagatttgaaaggataaggagcagaggtagtgttctcctctatcatcccagctggagactgggacactggtggatttttcagtggacaaggaattaactggatggttatagccagatggttgtggtcattggctctatgtccagctggaggctggtcacaagtggtgtcccacaggggtccatattgagactggtgctctttgctacatttgtcaataacacag

SEQ ID NO: 86854 - DNA, 600 bp, Chicken  19866894387843_1
aactcaactgtttatgctcttgaacaagctgagctaatacaaaagttagaattaccgtgaggattgctcagttttgtgtaggaggtgaatgcaatttgcgcacagacgtctctttcgatataaattattacttaattatatgatatacacaaagagggaacatcatgtgagagcaatatggtgatattatgacagcaaagacttagattgacttaaatagtcatggtgctgtatcctttagatactgtaagggttcaacaacaaacttgaaatcaaacttatttaatagaaatttagagrtaaattaaaaataatttaaaagcttttcattcaacttagagtagaagagcttcaaagatataactgcgaacaaagtttttgttagcaatgtgtatttttgttaatgaaaatgtaaatataattgtttcatttgtatatacattatatgcatgtttgtttctctcgctgtgatatgtagttgatttctggtttccgttcagtgcttctggtgagtgtaaagttagagttttttgtttgctgaggaaatactctgctttcttttattcaacataataattggttactgatgattttacattc

SEQ ID NO: 86855 - DNA, 600 bp, Chicken  19866894387854_1
actcaccaggcaggcaggcaactccactcctgagcacttcagggttcacatccttgactatggaaggtgcagaccggccgccccaagcagccccaggagctggggatctggggggactaacagctgttgaggtttcctccagggcacaggctttacctgctggcttcaatacatctgcaccagatacttcttttaccacctctgccccgtccgataccatgcctgcaagacaagcagcagtcagaacctggagcccagctccacccagaaaggtcccagggaaatcccactctggggagrgacgatgtgcccccagcaccgtgcagctcccagtcctcgtgccagcagcacgcatcgtacatgctatgaaccagtcgtaacaygaatgctgcagcaattaaaaaaaaaggcaacaacrgttcatcatgaagttttcaaactgtaacagctcacttcagagaaggattactgtactccgggacattgctgaaggtaacgtttggagcaggacatgtccgctggcagccccaagtccggagcagcacaaatccctggcggagctccagcagcacgagcactgcaaagtgataaagcagcttc

SEQ ID NO: 86856 - DNA, 600 bp, Chicken  19866894387854_2
caagcagccccaggagctggggatctggggggactaacagctgttgaggtttcctccagggcacaggctttacctgctggcttcaatacatctgcaccagatacttcttttaccacctctgccccgtccgataccatgcctgcaagacaagcagcagtcagaacctggagcccagctccacccagaaaggtcccagggaaatcccactctggggagrgacgatgtgcccccagcaccgtgcagctcccagtcctcgtgccagcagcacgcatcgtacatgctatgaaccagtcgtaacaygaatgctgcagcaattaaaaaaaaaggcaacaacrgttcatcatgaagttttcaaactgtaacagctcacttcagagaaggattactgtactccgggacattgctgaaggtaacgtttggagcaggacatgtccgctggcagccccaagtccggagcagcacaaatccctggcggagctccagcagcacgagcactgcaaagtgataaagcagcttctgacagggagagctgctccagccgagcagaattactcccccgacaccacttgcagactgcttcttgaaaatgcaaagccgamt

SEQ ID NO: 86857 - DNA, 600 bp, Chicken  19866894387854_3
aacagctgttgaggtttcctccagggcacaggctttacctgctggcttcaatacatctgcaccagatacttcttttaccacctctgccccgtccgataccatgcctgcaagacaagcagcagtcagaacctggagcccagctccacccagaaaggtcccagggaaatcccactctggggagrgacgatgtgcccccagcaccgtgcagctcccagtcctcgtgccagcagcacgcatcgtacatgctatgaaccagtcgtaacaygaatgctgcagcaattaaaaaaaaaggcaacaacrgttcatcatgaagttttcaaactgtaacagctcacttcagagaaggattactgtactccgggacattgctgaaggtaacgtttggagcaggacatgtccgctggcagccccaagtccggagcagcacaaatccctggcggagctccagcagcacgagcactgcaaagtgataaagcagcttctgacagggagagctgctccagccgagcagaattactcccccgacaccacttgcagactgcttcttgaaaatgcaaagccgamtggaggctgacaaatcagctgggaattagccagcaa

SEQ ID NO: 86858 - DNA, 600 bp, Chicken  19866894387854_4
ygaatgctgcagcaattaaaaaaaaaggcaacaacrgttcatcatgaagttttcaaactgtaacagctcacttcagagaaggattactgtactccgggacattgctgaaggtaacgtttggagcaggacatgtccgctggcagccccaagtccggagcagcacaaatccctggcggagctccagcagcacgagcactgcaaagtgataaagcagcttctgacagggagagctgctccagccgagcagaattactcccccgacaccacttgcagactgcttcttgaaaatgcaaagccgamtggaggctgacaaatcagctgggaattagccagcaaagagacctcrttctgctcgtccagacttttttaattaacagttagcctgaatggcaaaaatctattttaaaaccctgaagaacagaaggacgagaccaatcagcaccgtttgggaactggagcaaacacttcatatccctgacactgcagctctaaagaacaartgatcggattcatctgattccaaaattaattagctgttcctgcacacacaaattaacgccagttttctctccattttgagtttcaattttcatgtaaagg

SEQ ID NO: 86859 - DNA, 600 bp, Chicken  19866894387854_5
aagttttcaaactgtaacagctcacttcagagaaggattactgtactccgggacattgctgaaggtaacgtttggagcaggacatgtccgctggcagccccaagtccggagcagcacaaatccctggcggagctccagcagcacgagcactgcaaagtgataaagcagcttctgacagggagagctgctccagccgagcagaattactcccccgacaccacttgcagactgcttcttgaaaatgcaaagccgamtggaggctgacaaatcagctgggaattagccagcaaagagacctcrttctgctcgtccagacttttttaattaacagttagcctgaatggcaaaaatctattttaaaaccctgaagaacagaaggacgagaccaatcagcaccgtttgggaactggagcaaacacttcatatccctgacactgcagctctaaagaacaartgatcggattcatctgattccaaaattaattagctgttcctgcacacacaaattaacgccagttttctctccattttgagtttcaattttcatgtaaagggagctggagagaagaattctccccgctatgggagaaatgttactcc

SEQ ID NO: 86860 - DNA, 600 bp, Chicken  19866894387854_6
aagtgataaagcagcttctgacagggagagctgctccagccgagcagaattactcccccgacaccacttgcagactgcttcttgaaaatgcaaagccgamtggaggctgacaaatcagctgggaattagccagcaaagagacctcrttctgctcgtccagacttttttaattaacagttagcctgaatggcaaaaatctattttaaaaccctgaagaacagaaggacgagaccaatcagcaccgtttgggaactggagcaaacacttcatatccctgacactgcagctctaaagaacaartgatcggattcatctgattccaaaattaattagctgttcctgcacacacaaattaacgccagttttctctccattttgagtttcaattttcatgtaaagggagctggagagaagaattctccccgctatgggagaaatgttactccccatttcccagcacggtaagaattaaaaggcagcagcgtgtctttggatcctaagcacacagctaagctgcctcactgctgggcagaggcacatgctgcagaaaaaaggccgcacttctctgcaagtcatggaaccttcagtatctatcaatag

SEQ ID NO: 86861 - DNA, 600 bp, Chicken  19866894387857_1
attacttttttcttggtttgagttttattagacagttacaaaatttatattgttcaaaattacttcattgatgacccacacagaaatgtgattttgagatgctgtccactttctgctgaaaaagaaagtaattgattttgttttggtttggattatactttttctgagatcactggagagaaataaaaatattatgttttatccataatgacaagaaatataattttgaggtagtgaatgaatagctaaaactaaagaaaagacaaagatgcctttagaaaaatgcttgaacttactctygtattgagtcttgacagctgcttcacattttcttctagaagagagccttcatgcatcattcatagctagaatgaatatctattcagtatgctgcttcttcacatattaccttcattctttatcgaagtcaaagatgactcaactcattcatatatctcaggaaaaccacagaaccgttcttttgtattgcaaataaaagaagaaaatagcattcactgccaaagaaataatgtttgcaatggtaagcaggactactgagctgggtgggagtgttccaaaaaagttgtcttctctcatctc

SEQ ID NO: 86862 - DNA, 599 bp, Chicken  19866894387858_1
  misc_feature (1)..(47): n is any nucleotide
nnnnnnnnnnnnnnnnnnnnnnnnnnnnnnnnnnnnnnnnnnnnnnnacaagtctgatttaaaaaaacaccaaacaaacaaacaaaaagacacccaacaacagcattgtaatgagcaactcctaaactaataacacgcatatacaattttcttttaacatgctgtggtcttatctgtcaatctttgaggtccctttcaatccaagccgttctatgatcctctaatctatgatcctctaattctatgatcacagcctcacgctgagcaccaaaaggactgttgtgatttaaccagcgagcrgctccgcagcatgcagctgttcacttgatccccttggcagtgggatgggtgagagaactgagggaaaaaaaggcaaaacctgtggattgagatagagagagtttcataggacaaagaagaaaggtaaaataataatgacagtgatataagaatacactaaacaagtgatgcactgtgcaattcctcaccacctactgactgatgcccagacgacctctgagcagtggcagctgcccctgtccagctcccccagttgtgttgctcagctcaatgccatatgttatgggtcatgcctttgg

SEQ ID NO: 86863 - DNA, 600 bp, Chicken  19866894387863_1
atagggacagccagctgctgcattgcctgctagaataaaagaaagcgttagtgctgcaagtcctctgccatattcacgtggcagcccactcatcaccccaagcctacctagcttgtctgcatagtaagggcatttgcgtatgtctcctttcccatcgtggactggaacacctccatcctgggcttcttctgccagcgacctgccgatcttgtccagttcatcaaatacctgcaagtgggcacagtgagtgcacagagtgagcaaagccagacagctgccatacagacccatggagacacrcagagaactggcaagagctgcttctgcctgcctccacccagattccaaatacagcatttgatactcatttcagagtgccttgcaggcagatgtgtggttacatctcatttggcacacaccacagctctgagaaggcacagccaatactaaaagcaccaggttgcctcatgcacatggaagtacagggcaaagagccctcccctccctgctgccagaccctctctggggttgctgctcccatttgtgcagtcccttctagctctgctggagggcttccataaggatcctgatgaaggagct

SEQ ID NO: 86864 - DNA, 553 bp, Chicken  19866894387873_1
tgctggaatgacatagaaccctacatagaaaagcagtgtgctggctgctttatgggatacaaaaatggcaagatccttctctcagactaattactggaaaagtctggattctccaaacaacaaactttgccctccagtgcagagaaaattgctttaaaaagtaattattattcactgaaatgaaccggaacaattttggaagaaaggaagcagaacagttctgaaataactgaatatattatcttgctaggcaaagaaaaagaaagaagaaagaatgagaacatacaaatacagcacatmcatgtttcggtgttcaaactcaagtccaaaaactatcaagggtttttggtaaagtcaaccactgttctaagtagccactcatttcagttattcagagaggacttggctggctgaacacaagaatcaagagccatttttgatgctctcaagtttgcaatgtagtctctgaccgtattactttaattttaatagttctatctgccctgatttagttctaaggcaatttaaagtccagatgagacctgagaaaata

SEQ ID NO: 86865 - DNA, 600 bp, Chicken  19866894387886_1
cactcccatgtgcagcacttgctccgtggaggctggtgagattaaatgcccagcaagcacccaggaagggctgccagctgcagcttctctccattagtacgacgtgtgccagggactgggagctgagcagccccagaaggcagcttcctgatgcaattaagatagaggtgaatttagagacatcttgccagtctcatgggacacatgctgctaattaaaagtcaatcagtgcatttaggaccaaggacgaagaagcatgctctggtggtagaagacatttctgcatgttctcattactcyggtgtctggatctacagaaygtggcctgtgcaagagaggtttccttggactcttggcttacactgtatgctttatccagcctaaacgtttgggaaaatcagagaggcaggccgtcctgcaggtcaggcactggggtgaggctcaggggttttcagttttgcatttgaatcatctggatttgaagcacagtgctggaaaagtcactttctttatgcctccgttcacatcatacaggcagggcgtgcagagggcttcctctggtgggaccctgcccaaacaatagagctttgagccagggac

SEQ ID NO: 86866 - DNA, 600 bp, Chicken  19866894387886_2
gctccgtggaggctggtgagattaaatgcccagcaagcacccaggaagggctgccagctgcagcttctctccattagtacgacgtgtgccagggactgggagctgagcagccccagaaggcagcttcctgatgcaattaagatagaggtgaatttagagacatcttgccagtctcatgggacacatgctgctaattaaaagtcaatcagtgcatttaggaccaaggacgaagaagcatgctctggtggtagaagacatttctgcatgttctcattactcyggtgtctggatctacagaaygtggcctgtgcaagagaggtttccttggactcttggcttacactgtatgctttatccagcctaaacgtttgggaaaatcagagaggcaggccgtcctgcaggtcaggcactggggtgaggctcaggggttttcagttttgcatttgaatcatctggatttgaagcacagtgctggaaaagtcactttctttatgcctccgttcacatcatacaggcagggcgtgcagagggcttcctctggtgggaccctgcccaaacaatagagctttgagccagggacggtttcctattccaagtgtg

SEQ ID NO: 86867 - DNA, 600 bp, Chicken  19866894387886_3
ttggactcttggcttacactgtatgctttatccagcctaaacgtttgggaaaatcagagaggcaggccgtcctgcaggtcaggcactggggtgaggctcaggggttttcagttttgcatttgaatcatctggatttgaagcacagtgctggaaaagtcactttctttatgcctccgttcacatcatacaggcagggcgtgcagagggcttcctctggtgggaccctgcccaaacaatagagctttgagccagggacggtttcctattccaagtgtgcagcatggctggtctctcatctcsctcacccttaagacagctgtgatacaaatggtcaatcatcagaagactgttttttttcccgaccgtgaattcaatttcaaccaggcattgtgttctctgcaaattatgagcatttctgttggaaggtttgcgaccctggcaagcaagtgaatagggtttgtgcactgacagtaattaaatgatgcattcactttggggttgaggaggaaatgtgctctagggtggtccatcgaatccagaagcagcaccacacgactgaagaggcagctcaaacaaaggatttcacagcaagacttttac

SEQ ID NO: 86868 - DNA, 600 bp, Chicken  19866894387895_1
ggagccgcacggcccagcctcagccagagaccccggggcgtttcggcggggtgggggcagttcctcggctatccctgtttggcagcacggcgggtggggactcctcgtcggtgcgtggatgcgtacgtggggccgtgcggtgaccccaagcctctcatttctgtcatctttttgcctgtccccattcttcttgcacagggtgaagccagcggggatgggagcctaatcccctcctgacgccccgaaatacgggagagctgctccccagccccagctgcacccctggcagcactgagccckccgccccatggctgctgctgaccccacgctgcccccggaggaggtggctctgctggagctggggaaggcagccccccccgatgaggatcctccggccccagatgacggccgcggggatcccgacgccaccctgctgtgggaccagcgccagcacggcacccagggacagcccgaacccacagacaccaaaaggcgctcgagccccgagggggcccacgatgaccccgaagaggggactcctgcctgccccccccctgaggctgacggggaggaagatcccgggctgcccgtgatggcaga

SEQ ID NO: 86869 - DNA, 600 bp, Chicken  19866894387899_1
ggaaaaataagccaaagtggaagaagagtggttttatttcatttttgataaccactctcccttttcctgattacttttaggatgcaaagtgctctcttttagttcagcaggagaagcctgccccgagaagcagggcagccccatattcagtgggacagacctgcactcagatctatcactgcaacagcagcccctgctcagtacagcacaaagcccagtaaggttagtgggaatcagcactgcttcagtgacctttggttccagtgctctgaaacagtggcatcgtgtgcggggaaggcratactgacagagmagagctgaaaaagtgcagaagctgcagacttaccatttgctttcctttttttccttttaaacacagagtatgtgcttgctaatatttgctgcatgatgctcaactcctcttttctttccctgtgtgagaagaaaagcaaaggctcacgatgaaagctgaagctgcagctccagccccgcagagctcagcgtgggaggacacttgtgcctgcacagaatcccactgaagtcaagcagcccaaggctctgcccacacagctccctttgctcagctaatattacaactct

SEQ ID NO: 86870 - DNA, 600 bp, Chicken  19866894387899_2
aaagtggaagaagagtggttttatttcatttttgataaccactctcccttttcctgattacttttaggatgcaaagtgctctcttttagttcagcaggagaagcctgccccgagaagcagggcagccccatattcagtgggacagacctgcactcagatctatcactgcaacagcagcccctgctcagtacagcacaaagcccagtaaggttagtgggaatcagcactgcttcagtgacctttggttccagtgctctgaaacagtggcatcgtgtgcggggaaggcratactgacagagmagagctgaaaaagtgcagaagctgcagacttaccatttgctttcctttttttccttttaaacacagagtatgtgcttgctaatatttgctgcatgatgctcaactcctcttttctttccctgtgtgagaagaaaagcaaaggctcacgatgaaagctgaagctgcagctccagccccgcagagctcagcgtgggaggacacttgtgcctgcacagaatcccactgaagtcaagcagcccaaggctctgcccacacagctccctttgctcagctaatattacaactctgctttattgatgc

SEQ ID NO: 86871 - DNA, 599 bp, Chicken  19866894387900_1
  misc_feature (1)..(140): n is any nucleotide
nnnnnnnnnnnnnnnnnnnnnnnnnnnnnnnnnnnnnnnnnnnnnnnnnnnnnnnnnnnnnnnnnnnnnnnnnnnnnnnnnnnnnnnnnnnnnnnnnnnnnnnnnnnnnnnnnnnnnnnnnnnnnnnnnnnnnnnnnnnntttattaatggacgttggctgaggtgttacttttcaggcagtgtctccagttgcaccaagagctccacctagctatacagttgttttcagctctgtcccttcttttccttcaaataatgatgcatccatatataacgtaatagaaccccatgtgatccarggtatccccataaaatgaaatgtgcttcggatcagatccttgttattatatggatggtgaacatttgatctgcatttattgcagttgggctggagatcagagacaaataagtgtcctcagtagggcggttagctgatctttacttataatttctaaataaagactacgttcccatgaacagtggctcagtgcagcctactaaccatagtccttgtgtcattccactaaaagaattctctttccttttctgcatggctgtgctgaattctcaacagagttatctttcccctgtctcaaag

SEQ ID NO: 86872 - DNA, 600 bp, Chicken  19866894387901_1
acatgactcccatttctcacatatcccatttttcatctgccattgcagctgcaaccaaggagtttagtattagctcacagttattggcaattatatagaaaactccaaagtgaggcttaacaaatgagataccaggctacttgctaatatcattgctttgattgctagtctgagaattagatttgggagtccaataaatgattgggtaaatcctttagaatactgtctattcctagcagagagtaattaatgccatccaattagaattcagaattccacacagttgggacctaatggagsaaataattatgctggaggtgtgtacaaattaatctgcatttacaaatgccaaactcacattaaagactttgacttttcaaagatcacatgaataktgtcttttgagatagcaaatccactacctcaaagatttcctgtgggtatatttcatgctaaactttcatttttttattaaggactgcatggctgtaattcttctttgtgtctcagatttcccattggtaacacacaaaatatttctcattcagatcctttcttgcagcttaaaacttctcaatgaaaataatattgtttttaaat

SEQ ID NO: 86873 - DNA, 600 bp, Chicken  19866894387901_2
tagaaaactccaaagtgaggcttaacaaatgagataccaggctacttgctaatatcattgctttgattgctagtctgagaattagatttgggagtccaataaatgattgggtaaatcctttagaatactgtctattcctagcagagagtaattaatgccatccaattagaattcagaattccacacagttgggacctaatggagsaaataattatgctggaggtgtgtacaaattaatctgcatttacaaatgccaaactcacattaaagactttgacttttcaaagatcacatgaataktgtcttttgagatagcaaatccactacctcaaagatttcctgtgggtatatttcatgctaaactttcatttttttattaaggactgcatggctgtaattcttctttgtgtctcagatttcccattggtaacacacaaaatatttctcattcagatcctttcttgcagcttaaaacttctcaatgaaaataatattgtttttaaatgtaaatttgataactctgccagatacagcagcaaccagaatccattctgaaaatcagcagacctatggctgaaggtttctattcagaattcaaat

SEQ ID NO: 86874 - DNA, 600 bp, Chicken  19866894387906_1
gcttcacctgagcatgaggagctctgtgctgcactcagggctgttggcagcggagcgccctgcggagcagcatgccggctgcggtgggtataagcccggtctgtcactgcaatgaggtctgaagggtgaccttgtggggaccctgctctggagtcccttttaggaatgctgctcttaaaggatctcattctttgagataaagagtttctaatgaaaggcaattggataattaaaccattttgtattttaggatgaagaagcaccaaaaaacaattctatttcttttacagtaggaagccscagaagtacagactgctgggatagtttatctgatcttcatgttatttattctagttgtgtaccattgacttaaaggcagtgaccacaaattattagttgttgttgatgttcagttttgatggccagtgggagtcaggtttggtgctttcaactgcaaagttgttttctaatgtttatcttaatttccaaagcaaactctaatttatgtgttgaaaagctttgtctcaattgtttttttatagctgattttgtcattgggttttttgttgccttcagtgagaagagaacattccaagagag

SEQ ID NO: 86875 - DNA, 600 bp, Chicken  19866894387907_1
gttttatatttcaaatttgttcatatcttaatgtggaagtctggaatagtattcttacctgacaaaaatatctgctttgtacactgtatcaaaactggatatatttcttaatgaaatacttatatttcactcatttcttgtggattaaccaaaaaagtagtatcgttttccaaacttttaaaataagtacttagtactttacaataagtactacatactttagtactgaatgtatagacataattagaactatatccaaagtctggtagttcttttttcctctttttttttttttttttwaattattcacctctataggtgaaaggaccattgatgtgcacagtggcccattgcatctatttgactctaacagaatgtctttcccaggatttcttaatgtgatataaaatttcctggggttctggcttatgtgaaatgagtcgctgcatctgtttttattatgtactacaagaagtaagtccttgttgtcaagccaagtgatgcaggtgtgcttggccttctacattgcctgtgacagcagaccctggaattcactgtattttgggctcagttctctccaaagcagactttgaatacaaa

SEQ ID NO: 86876 - DNA, 600 bp, Chicken  19866894387909_1
atacgtgcatttgcagtggatgtttctgaagcaccccatctctttcctttatttgagctgaacctgaaggcacactgggctaccatccagcagacagctcatgaacactcactgaaaatatgttctggtattgttgtatgcaaacacatctgccctgcagatactgttgagcaacaggaagagtatgcaggctgccagtttcaaccctggagcccacttgttgtcaataagaattcgttttgtccggggaagagagcatttagggaacctgcagtgcctgctgtagccttccactccacrggcctccctgagagaacgtggagactggttaggccagggctgggagcaagccaatgtaaaaaccctaaacacacctccccgctgctcctgcaggctgcctgtcaagcccatcaggaagcactgagggtacttacgaggtgacacccagcgtctaaaggtgtgagtgcaagtgggttcctgcagcaccaggaccacagccctgccttcacccatcctgcaggtagatggcaggatgcagtcactcatgcaccacaggtcgtactgaagtgccacagaactttgttggataaacattgctat

SEQ ID NO: 86877 - DNA, 600 bp, Chicken  19866894387925_1
ggctggttggttatccatatttttgatagacactacttgcaattgcaagcaatacaggaggagagcgagcactcagtgtgttgtgcttcagtttcttgcagatcagcttattttgaccttgtgaaacacaagtgtaaagttagtaatgcagttatcatttgtgtattttctgctccacccttgcttgcagctctgtacctgtaaccaaaattacagtgcagttgtaatgctgataaatcttgaagactgtagccaggtgtaggaagttaggaagttgcatgctagacctgagaaaggaayggctgtctgtccctgtgggtgtgttgtgtgggatgagcagaatgcttgttgcagtgatatggtgtctgccttaactgctctttctgtaacaggggacatgggtgtaggaaagtcctgtttgcttcaccaattcacggaaaagaaatgtgagtatttcaatacacaatgttcattgaaactggtgtacttcatctctctttcctgcctttctgcttgtgtcgtaggtgagcttgatgtacatcttaacatgggtaggtttgtactgtgcttggtcagacttcgtttttgacttctgcaatt

SEQ ID NO: 86878 - DNA, 600 bp, Chicken  19866894387944_1
aaatattgttctggacattgcttaattttttaatacgttaaaacattgggtgcactctacaatgtttacaataaatgaaagccaacaggaacgtgtctttgttttcctaagtatccaagcagtctcccccaccacacatacatacatacaatgaattgatttacttcacaacatcctggagaagtagacagttatgatgatttccatgttgaaagtcagaaggtttaaacttaggggttatgtgatttgtccaaggcttcacaaaagccctaaggcaaactgagaaaagaattctcttcycttgacctggctgtctgtgccttgtctacaaggctgcctgtcttcctactagcctatagcctacagagaagtatgaatgcttattgatcctccagttacacaccaaaataagccagtgtaattcaatgtcaggtgatttcagtagaagcctcacgctctggatagaatttggcaagaaaataggttaatttttaaatctaaawatacctgctgagataccaatatcagaaaatgatttgttgctggttaatgaatgataattaatgcataattattttgattttccttagcaagtaaata

SEQ ID NO: 86879 - DNA, 600 bp, Chicken  19866894387944_2
ccatgttgaaagtcagaaggtttaaacttaggggttatgtgatttgtccaaggcttcacaaaagccctaaggcaaactgagaaaagaattctcttcycttgacctggctgtctgtgccttgtctacaaggctgcctgtcttcctactagcctatagcctacagagaagtatgaatgcttattgatcctccagttacacaccaaaataagccagtgtaattcaatgtcaggtgatttcagtagaagcctcacgctctggatagaatttggcaagaaaataggttaatttttaaatctaaawatacctgctgagataccaatatcagaaaatgatttgttgctggttaatgaatgataattaatgcataattattttgattttccttagcaagtaaataaatacagctgtgatatatagggatgctttgtatgagtaggagtatgataccatttttcctttgcacacaaaacacagcacttgggtctatagtcagcgcgcagcacggatcaggagccaaagcacccagtagctcttggcagcactgtgcaggcaatgaggcgagcccccctgtgctgcatgcttactgcacacagctccatt

SEQ ID NO: 86880 - DNA, 600 bp, Chicken  19866894387945_1
tcacttgttatgctttggcattttattttgatgagcctataatggcttagaagttttctcgtggaaaagagctttcatgagggcagcttctcataaagctacttttaaatcaagtttattccaactgctgaacttgatggtgggggggtgggtacagcttttgcttttagtttgtggatcttttttacctcaattaactgttcctcgtgttcttcgttatctgaatcatatgtgaccttcctcagattttccacatccaagtaaagttttttataacctgttatctgcagtaaggacatrtgcagatttgtcttaaacctggaataataacaaataacagaagctattaagaggcatagttaaccataaattcttgcttgaacaacgttaaggaaagtcttaagcacaacataaatgttacagtttggaagggctttacgtttacatgtcatatatacttcagcatactggtattgttattcggatcctatttctgcttataaaagtgctagctgatttgagagctgcacagtcaggacctcttcacttacatgcatgtaagtaatgcccctcagctaaaatctctgacgacacaaaaac

SEQ ID NO: 86881 - DNA, 600 bp, Chicken  19866894387945_2
ccataaattcttgcttgaacaacgttaaggaaagtcttaagcacaacataaatgttacagtttggaagggctttacgtttacatgtcatatatacttcagcatactggtattgttattcggatcctatttctgcttataaaagtgctagctgatttgagagctgcacagtcaggacctcttcacttacatgcatgtaagtaatgcccctcagctaaaatctctgacgacacaaaaactccacacatcatcctgactactgtactgtactcaatccaaactctgacataaacgttacaacytcaaagaagagtttcattctgaacagtcaaaattctagttcaggttttcccctcagtcactcgtaattacttcttcagaggaatgcaaactataatctggcatcattatattctctcaaacgtatctgagcaactacaaagttcatgacacaacttctgtgataatgctacttacaagcaaggagtaacacaagtgatgtgtggaggatatgttatctgaagttcatgtccatttaaactttgcaatttattttccagaacttcgatgtgacatagctataccttattttctaactccac

SEQ ID NO: 86882 - DNA, 600 bp, Chicken  19866894387946_1
tactgacttttaggcattctgttcacgctgcttcaaggacaagattaacatgcagcttatttcagtccagagctgtctgcaagtgttggtggatgtgcacagtcgtaaggagcttcagctcaagactgcagtttttgggtctcattgttagtttgcagttttgttttgctcttcctgaagtgaactgagaatgtttcgcatttgaatttctcccatttttttccttcaagatgatattaactgggggaaaaaaaggggcacgcaaccacagtgggttccatgtggcataaaaatccattyctccctctggtcatcttccagacagctgctgtctgaggtgctcagggatgtgtctgtaaaccagggagccggagcagtgtggggagcagagggtaaatgtccagctgctgctctctggctgagtgtgtggtggcagcctggtggtgttggcatcgatgtcctacacacagatggcaccagcagaagcaagcgtgcaaaatccctggcattacagaaaaggaacggggctgctggrtgccctctggcagagctgaagtcgttgggactgggaactccagcatccaactcttcctcgtgctc

SEQ ID NO: 86883 - DNA, 445 bp, Chicken  19866894387946_2
attaactgggggaaaaaaaggggcacgcaaccacagtgggttccatgtggcataaaaatccattyctccctctggtcatcttccagacagctgctgtctgaggtgctcagggatgtgtctgtaaaccagggagccggagcagtgtggggagcagagggtaaatgtccagctgctgctctctggctgagtgtgtggtggcagcctggtggtgttggcatcgatgtcctacacacagatggcaccagcagaagcaagcgtgcaaaatccctggcattacagaaaaggaacggggctgctggrtgccctctggcagagctgaagtcgttgggactgggaactccagcatccaactcttcctcgtgctccttcagcccctgcacagctctgcccatccgctgcatccagagggcacacactgagggcacacagcgccatgaaagaacag

SEQ ID NO: 86884 - DNA, 600 bp, Chicken  19866894387949_1
aaaggaaggaaatgctttctaccaccgggaaagtaagaaaaatgttgaccaaacagctgtgaatataaaaaccaacacgtgaagcctacagaaaacaaacaaaagcccataaagataattgagagaatccaaccaaggtgacaaccaagacagacgggagcttcatctgccattgggagctgtgttggaaccacgtgggcaaactcagggaaacaaggctgcctaggtctgttgtctcattcaagctcatcaccaattagctgcacgccgaaggtgattagggttgatcggaccgccctyagaaaaccaagcactccagtctgcaagcctacagcctttatttgcaacttccagcactgcagatgcacatatccaaccaagcgctttttgacatcattttrttcacattccagctgcacccaaaaccaaagtaaagcccaaccgagtcccacagcttaacggcactcctgagggtaagccagaattctctatcccatgttaaagtctggaggttcacaatccttctccatcgttcctctccagccaggacatgagctgaacccacacaatccacagggtaacagatggagctgacaccag

SEQ ID NO: 86885 - DNA, 600 bp, Chicken  19866894387949_2
aaagcccataaagataattgagagaatccaaccaaggtgacaaccaagacagacgggagcttcatctgccattgggagctgtgttggaaccacgtgggcaaactcagggaaacaaggctgcctaggtctgttgtctcattcaagctcatcaccaattagctgcacgccgaaggtgattagggttgatcggaccgccctyagaaaaccaagcactccagtctgcaagcctacagcctttatttgcaacttccagcactgcagatgcacatatccaaccaagcgctttttgacatcattttrttcacattccagctgcacccaaaaccaaagtaaagcccaaccgagtcccacagcttaacggcactcctgagggtaagccagaattctctatcccatgttaaagtctggaggttcacaatccttctccatcgttcctctccagccaggacatgagctgaacccacacaatccacagggtaacagatggagctgacaccaggagccctaatgagctatataaaccagactttattagcaaagtccatttgctggctgggggatcccagatatccaagccagccatttctgcccatcttactc

SEQ ID NO: 86886 - DNA, 599 bp, Chicken  19866894387951_1
  misc_feature (1)..(148): n is any nucleotide
nnnnnnnnnnnnnnnnnnnnnnnnnnnnnnnnnnnnnnnnnnnnnnnnnnnnnnnnnnnnnnnnnnnnnnnnnnnnnnnnnnnnnnnnnnnnnnnnnnnnnnnnnnnnnnnnnnnnnnnnnnnnnnnnnnnnnnnnnnnnnnnnnnnntaatctaaaaatagaaaggaagtgtcaaatagagaaatgtaagagaaagcaagttcagtgtggagctggaaggaataaactgcttccagcactgagccatttgtgtaagagactatagacacttgggtatcctcacagcatttcctattttrcagctgaaattacatcaatagggcatatcaggcagacacactgatgcaatgttcatgtggttttcaactcagcatcaccgtccatcctgtgagggaactgccacctcccacttcctccagttttaaatatcgctcatcagcacagggagtcattggccaggagctcagattccctcagtctgccatagtaagaatgaccaaacaattcagcatttcgtgactgtcctttagagcttcttgtgcactgtgggagctcccaaaatcaccctttggattgctcttccttggtttgtctcaca

SEQ ID NO: 86887 - DNA, 599 bp, Chicken  19866894387952_1
  misc_feature (1)..(16): n is any nucleotide
nnnnnnnnnnnnnnnngagaagtgagaggctgctcacatgtagtgacttgctggattattgagaacgactttggctgcaactactttgacttaccaatatatcttttccctccccctttctttttttttccataacagtaccattgtagagcttctataaaaaatgaaatttccttcttttccgacagacagaaatattaatgtggttcagagaaatacaactaaaataatgggagcttcagcaccgcttgagcctaccaggtgcaggctttacctgcacaagctgcagagatctgcccrcctgtctgaattcttacagcatacctgccagctttcccccttctgtggatccaccgatcaatttctccccttggttattaataaacttccttcagaaataaaacaggaggctcagagcatctccgggaacctctgctgccactgtgtataaaacagatgtaaatgyaaaagctgtctgctgcgcgacgttaagtagattacacctcccactatgcagaagagcactggcaccaacattatacccacttgttaagagtcagatagaatttttaytctgtttttaaatatttcataacttt

SEQ ID NO: 86888 - DNA, 600 bp, Chicken  19866894387952_2
aaatttccttcttttccgacagacagaaatattaatgtggttcagagaaatacaactaaaataatgggagcttcagcaccgcttgagcctaccaggtgcaggctttacctgcacaagctgcagagatctgcccrcctgtctgaattcttacagcatacctgccagctttcccccttctgtggatccaccgatcaatttctccccttggttattaataaacttccttcagaaataaaacaggaggctcagagcatctccgggaacctctgctgccactgtgtataaaacagatgtaaatgyaaaagctgtctgctgcgcgacgttaagtagattacacctcccactatgcagaagagcactggcaccaacattatacccacttgttaagagtcagatagaatttttaytctgtttttaaatatttcataacttttttttttttttaagtatctgtagtcaaacacaaggcaaaaagctgccaagaagcatttccctctggctggtggcgcctcggcgtttgcgctctcagcgcctctctgtaggcatgcaaaagcataactacgtcaacccatcttcagtatcacgagtgacaacacacga

SEQ ID NO: 86889 - DNA, 600 bp, Chicken  19866894387952_3
cctgcacaagctgcagagatctgcccrcctgtctgaattcttacagcatacctgccagctttcccccttctgtggatccaccgatcaatttctccccttggttattaataaacttccttcagaaataaaacaggaggctcagagcatctccgggaacctctgctgccactgtgtataaaacagatgtaaatgyaaaagctgtctgctgcgcgacgttaagtagattacacctcccactatgcagaagagcactggcaccaacattatacccacttgttaagagtcagatagaatttttaytctgtttttaaatatttcataacttttttttttttttaagtatctgtagtcaaacacaaggcaaaaagctgccaagaagcatttccctctggctggtggcgcctcggcgtttgcgctctcagcgcctctctgtaggcatgcaaaagcataactacgtcaacccatcttcagtatcacgagtgacaacacacgatgtttaaataaatgaatgattagctgtgggacgcaaaaggagattgtgtgttttgttgttgcttgacaagctgacaagcaggtgaaaaatcttgccctgtaaacaca

SEQ ID NO: 86890 - DNA, 600 bp, Chicken  19866894387953_1
ctgtggaagtcatctatttcaactgattttcaaacagctccagtagccctgattttgttaacatttttggccatagaaccagttttgaaagcagaggttctgtagtagtgctcattatttaatcataaagcaggtgtgaatagtatgcagtgtgagtgcatctgatacaagaaggaaaaaacaaaagatacaacaaaaatggacagccaattcatgtgtagaaattgctggaacacgataataaagaaacaaaaacgctgtggacagcaggctctatgaaatctggagaacaaggagagragccattcacaattttacatactggcaccctttcactacaggttgctgatgcagctacagaacacgcagttgcttcaattagaattttaaaaagcaggattgtgaaagtttgcaagaaacagatgtgatgttggaaggaggaatgccccaggttcacttatgtctaggcatgccctttattacaaaaaaagctcccaagagctgacaacactatagctgtctgctggaagagccccatatatgtgtaactcgctcagaggataccaattgctttggcacacttttagagtttgacaggtt

SEQ ID NO: 86891 - DNA, 600 bp, Chicken  19866894387955_1
taatatttttatactatgtatcagttatctcagatatctcaaaatacctagctgactgattgatttcatcagtggatttgtcaagttcctaaacccctacttagcgacatggggaaatttttctttcacacaaaaacagtataactggaatctgtattctcatgactgtgtcttatgctgattcttccctgcaagaagagtttctgttctagaagtctgtccccaaagatagaaagaacagcagctcctgattacaacagctgtgacagagctgggaaaccccttttcaaactctgccartagcacaacagagaaagttcattctcctatgccccattcagtcttgcagagggtccatcaacatttacataaagaaatacttcatcagcattaaacatttaatatttgacacttgtatacaactaaacctccctgagccacagaatccatgccttaaacataagaggtggtgaatccactgtgtgaattgatatgtccttgttgtggcacctatactggtgaatatgctttctggcttgtttgccttctcactccctcttatcagaataaagactcaaccagaattcctatattaatgca

SEQ ID NO: 86892 - DNA, 600 bp, Chicken  19866894387956_1
aggccttttgggtcattacacgatcacaagacttgctgaagtcctcttttcttctcagggattttccttagcatccaaattgcacaaaatgttgcaccaatgttattgtatttctgtggattgctagaagagttcaagtcaatcaacttgctcaagtcaagtcaatttacctgctatttacaagtagcgagggaatggtgatagttgtggtggtcaaaagctgtcttgggcatagtgaccacaaaatgattgagttctctattcttggtgaagtaaaatgttagtgagtttactataaarttttttaacctttcttttcattatatacactaattacagtaagtgtcgtgtcaaggaagattttgagctgaaattgtacaaacttaaccacacattctcacatctgttcttgacttgaaacttttctaattcattatagaaaattgtaaaagctaaagatcttttcactgagaggcatttctaataaacagagttttaaatgcaagtaatccctgagcttttattttagttctctgttattgtgctggggacccaaaaggcacctgatcgaagaatgatcctgggattaaacaaaatatt

SEQ ID NO: 86893 - DNA, 599 bp, Chicken  19866894387968_1
  misc_feature (1)..(104): n is any nucleotide
nnnnnnnnnnnnnnnnnnnnnnnnnnnnnnnnnnnnnnnnnnnnnnnnnnnnnnnnnnnnnnnnnnnnnnnnnnnnnnnnnnnnnnnnnnnnnnnnnnnnnnnntctgttcttcgctgtcaacagcagtaaagaaggcttagggatttcccaggacagctctggggtaactgctgcccccagtcacgacgttggttctgcagagtattaagagcttggacttgcctaaaacttaatggccaaagctatttccatgggcagttgaactgaatcagcgttctgcagaaagcagatgcttttyccacaagttttcatgctggcttttttckccattacaaactcaataatctctctttgctatcacatctttagctgcaaagttctgggttcagtgcttctgacagaggtgagcgcttctggaagaggaattttgccattccctgttccacaccaccagtaaagccagaatattacctaaatatcccttctagaacagaagcatatgtgcttcttctgaaaggtgcttcactaataaaaagagctccacgcgataacaatgtgcaattattcgctatgtaggaggatgtttgcctacatatg

SEQ ID NO: 86894 - DNA, 599 bp, Chicken  19866894387968_2
  misc_feature (1)..(76): n is any nucleotide
nnnnnnnnnnnnnnnnnnnnnnnnnnnnnnnnnnnnnnnnnnnnnnnnnnnnnnnnnnnnnnnnnnnnnnnnnnnntctgttcttcgctgtcaacagcagtaaagaaggcttagggatttcccaggacagctctggggtaactgctgcccccagtcacgacgttggttctgcagagtattaagagcttggacttgcctaaaacttaatggccaaagctatttccatgggcagttgaactgaatcagcgttctgcagaaagcagatgcttttyccacaagttttcatgctggcttttttckccattacaaactcaataatctctctttgctatcacatctttagctgcaaagttctgggttcagtgcttctgacagaggtgagcgcttctggaagaggaattttgccattccctgttccacaccaccagtaaagccagaatattacctaaatatcccttctagaacagaagcatatgtgcttcttctgaaaggtgcttcactaataaaaagagctccacgcgataacaatgtgcaattattcgctatgtaggaggatgtttgcctacatatgatgtgtattgctttgcaatttcctttcc

SEQ ID NO: 86895 - DNA, 600 bp, Chicken  19866894387995_1
ctttgtacctaacccaacagcatgggcagccacagcaccgtgatgcttctgggggaaaaagcatcatggtgccttcaagtgcatcagtaacatctccctctaacttagggcatggatgttgccctaagttgccaagttcaggtctgaggctggcaaacccgtgccagcttccaagcctgctttgctaatggctcagagaaaatctcagagcaaaacaaactatcttctttcaaaatattaactgtcaacctttacttgattcaagctggctggaaattacatgaccactctatggggccrctgagttgcagcacactgcatcagcaatgtgcccacctccagcactacagttaatgagagcccaggtttaagttaagttctgctcctactgttttaacttcaccgtgtgtcccacgggctgaaaaaaatcaaccttcctttagtgaaataaaggaaagagtaagaaagcccgttgtggtctggccacagggcacgatcacctcaaagctgctgctgtaggttgtaatagggtctaatgcctattttgctcttgcaaggagggcacaactctgtgtctgttcagccccagtcatggtggtg

SEQ ID NO: 86896 - DNA, 600 bp, Chicken  19866894387995_2
gcaatgtgcccacctccagcactacagttaatgagagcccaggtttaagttaagttctgctcctactgttttaacttcaccgtgtgtcccacgggctgaaaaaaatcaaccttcctttagtgaaataaaggaaagagtaagaaagcccgttgtggtctggccacagggcacgatcacctcaaagctgctgctgtaggttgtaatagggtctaatgcctattttgctcttgcaaggagggcacaactctgtgtctgttcagccccagtcatggtggtgatgggctgatcgttgggattgaygaccttggaggtctttcccaacctcagtgattctaggagtgggcatggmggtgatgggttgatggctggaccaatgatcttggtggacatttccatccttaatgattctatgactctattttctctcttactgccttgtgctaggagcttccacagtccccagagcacccaaagtgctgcatttttcccttttattttcttcccttctgcatcagcagccctgaaagctcatcctcggagagcagcatgcaatgaaaccgaagctgctggctcccaggtagcagcaccacgctgaactgg

SEQ ID NO: 86897 - DNA, 600 bp, Chicken  19866894387995_3
ttaagttctgctcctactgttttaacttcaccgtgtgtcccacgggctgaaaaaaatcaaccttcctttagtgaaataaaggaaagagtaagaaagcccgttgtggtctggccacagggcacgatcacctcaaagctgctgctgtaggttgtaatagggtctaatgcctattttgctcttgcaaggagggcacaactctgtgtctgttcagccccagtcatggtggtgatgggctgatcgttgggattgaygaccttggaggtctttcccaacctcagtgattctaggagtgggcatggmggtgatgggttgatggctggaccaatgatcttggtggacatttccatccttaatgattctatgactctattttctctcttactgccttgtgctaggagcttccacagtccccagagcacccaaagtgctgcatttttcccttttattttcttcccttctgcatcagcagccctgaaagctcatcctcggagagcagcatgcaatgaaaccgaagctgctggctcccaggtagcagcaccacgctgaactggaaccagtgagccagcccagactgctcaaggataaagcagcatgcaagaa

SEQ ID NO: 86898 - DNA, 600 bp, Chicken  19866894388000_1
gactatataattgtagtatagtctaaggtgtgttagctgtttgagattgatgttagtatgttagcatgagccatgcagtgctgtgagtgatcactgttaatgctgcagtttgttattggtggatatgtgaataagcatcaagtgaatgcgttgcaggagaaagacgtgaataacagaagtatgacttgcaggtgaagggtaaacagtatctgtttctcattgacatgctcactgcacttgtttggtcaagaaaagtttggtctgcagcaatgccacagatctaatacttccttcctctcygtaaacaaactttcctaataggagtgtgtcaggctgagtcaaatgtggatctggaggagaaccacaggggccagggtgtgggaaattgtcaactcattgcaagtgtggattttcctcacttcttcttagatgcttactcacttcagcttttcttgagtcatgagagttccctgagtttggagggtaggaggtgaatgctgaatgtagcctttgaggtggaagttgcrtaagactttagtaaaatactgacagatggcctgtaggtcgctggcacctttggtcttaatgaagtcttgaaag

SEQ ID NO: 86899 - DNA, 600 bp, Chicken  19866894388000_2
ctcactgcacttgtttggtcaagaaaagtttggtctgcagcaatgccacagatctaatacttccttcctctcygtaaacaaactttcctaataggagtgtgtcaggctgagtcaaatgtggatctggaggagaaccacaggggccagggtgtgggaaattgtcaactcattgcaagtgtggattttcctcacttcttcttagatgcttactcacttcagcttttcttgagtcatgagagttccctgagtttggagggtaggaggtgaatgctgaatgtagcctttgaggtggaagttgcrtaagactttagtaaaatactgacagatggcctgtaggtcgctggcacctttggtcttaatgaagtcttgaaagtaagatcgctatggacgctcrctatgctgaggtttaaaaaggaaaaaaaataataattgcttgtgttgctctttgtttagaagagttcaagcttctattgcagatctgaactgggaactgaagttgatgtgacttgggtttctcagggtgcggagcagacagtcatgatccatagcgaatcaagtttgttacccacggggcacaggtgtttctgaaagatttaaaac

SEQ ID NO: 86900 - DNA, 600 bp, Chicken  19866894388000_3
gagtgtgtcaggctgagtcaaatgtggatctggaggagaaccacaggggccagggtgtgggaaattgtcaactcattgcaagtgtggattttcctcacttcttcttagatgcttactcacttcagcttttcttgagtcatgagagttccctgagtttggagggtaggaggtgaatgctgaatgtagcctttgaggtggaagttgcrtaagactttagtaaaatactgacagatggcctgtaggtcgctggcacctttggtcttaatgaagtcttgaaagtaagatcgctatggacgctcrctatgctgaggtttaaaaaggaaaaaaaataataattgcttgtgttgctctttgtttagaagagttcaagcttctattgcagatctgaactgggaactgaagttgatgtgacttgggtttctcagggtgcggagcagacagtcatgatccatagcgaatcaagtttgttacccacggggcacaggtgtttctgaaagatttaaaactgaccctctatctctggctgtctcgtgcttgaaaagcacattatgatggagcactgacatgtctagcacaaaggctgagtcattggaacagtgc

SEQ ID NO: 86901 - DNA, 599 bp, Chicken  19866894388005_1
  misc_feature (1)..(139): n is any nucleotide
nnnnnnnnnnnnnnnnnnnnnnnnnnnnnnnnnnnnnnnnnnnnnnnnnnnnnnnnnnnnnnnnnnnnnnnnnnnnnnnnnnnnnnnnnnnnnnnnnnnnnnnnnnnnnnnnnnnnnnnnnnnnnnnnnnnnnnnnnnncaatgacatctacaaaaaccaagagattagtacattttctggaatacagaggaatcatataaaaatctaagtagtgttcccaatcaatgtgtaaatttgcaatggaattgcatgtgtctactgacttttaggcaaaaaaaaaaaagttttgtttctctttsggaaaacaatttcattaatttcccaaggtcttttccagaaatagcaatcaactgtttcacaagatatatactgtgacactttaataataaataaataaaaattaaagaaaagccagaagaagacggcatacatctccaattaatactttggaaaagttatggaattcaatattaactgtaggtaggcacaattaagatcttcctaggttctataaaccatggaaaaagtttggaagaagtttaggagtaacagcttcattaagatagttagaaataactgatgggagaagttttttgct

SEQ ID NO: 86902 - DNA, 570 bp, Chicken  19866894388005_2
gcaatcaactgtttcacaagatatatactgtgacactttaataataaataaataaaaattaaagaaaagccagaagaagacggcatacatctccaattaatactttggaaaagttatggaattcaatattaactgtaggtaggcacaattaagatcttcctaggttctataaaccatggaaaaagtttggaagaagtttaggagtaacagcttcattaagatagttagaaataactgatgggagaagttttttgctccaattagtgtaagaaaagcctaggaaagacaagaatcaatacrtacagctactcaagttataatctaattcaactagttctatttaagtagatgtatctgatcacgactacacatcagaatctgtaaacatataccctgaaatgtatctgcacagatcatcataaatttacatttaccctttcgttrtttttccatctttttaatttccatccatgcaatttcaaaattatcctaataaataatattagccttcctcttagtactatgaagatcacttcaaaggagttgaggagtttaacagttacacaagtt

SEQ ID NO: 86903 - DNA, 426 bp, Chicken  19866894388005_3
acaattaagatcttcctaggttctataaaccatggaaaaagtttggaagaagtttaggagtaacagcttcattaagatagttagaaataactgatgggagaagttttttgctccaattagtgtaagaaaagcctaggaaagacaagaatcaatacrtacagctactcaagttataatctaattcaactagttctatttaagtagatgtatctgatcacgactacacatcagaatctgtaaacatataccctgaaatgtatctgcacagatcatcataaatttacatttaccctttcgttrtttttccatctttttaatttccatccatgcaatttcaaaattatcctaataaataatattagccttcctcttagtactatgaagatcacttcaaaggagttgaggagtttaacagttacacaagtt

SEQ ID NO: 86904 - DNA, 568 bp, Chicken  19866894388006_1
gtacaaatgaaaacacttaactcactgattttaccagaatagagaacttattttcaatccaacattgcagtgactataaacatttctaaatttatatctttggcataaaaaatcagagaactgaattaggtgaaaagattacagaagcttgactcaggcagtgatgtgatttttcatggttcagtgtgtggatgctctggcagaaagaattggattgtttgtcttctgaaatatattccaaaatattttgaaaacatttatgttgcagtgtaatagaagttcaaattgggacctacaggrtaaacatgattaactctgtagctattcaaaatcatttaggctaaaactattgccagcctgctgaattaagaaggggataacatcactgtaatggttatttttgttgttagtgtatgtcataagaatttgtagttaaacaatctatcattgcgtatgcctgttttgacaacgtgctgttttaaaaataaactttgatgattatcttcagacacctacacgtagacaaactgtagacagttacctcccgcccttccaaagtgactgcaaa

SEQ ID NO: 86905 - DNA, 568 bp, Chicken  19866894388009_1
gtaatcctgtgggtgttttggaaaaggtgttaatgaaccataaagcacagagatctatttgtctgacaatgcttcataataagaaaagtaaatggtgtgtaaaaaaagggactgggtatgaatgtattaagttagtactgctggtcctttacactcatatgaaaagagtgcactcataggaaaggagtgcaggtactctacttggtcttgaagtggctttgttttaagaatcacacaccaaattcattttgcagttattaaaaatatttttatttgtcatattgcaaaagttatgaattyccaagaggggaaacgaggaaacagaaatcttacctatcgtttgttgtgaagcagttgttgcagatccagcatcaaggctttgtatattttgttctgtggttcttatctcttaagcaagtgtttctaagcaggattagatttatattgctgatactgtttagagcaatatttctggacatattgcaggagaaaccaaaagaagaaaacaaaatgtttttctttccttgtaaggaacatccactaagaactttgttgagagattacattg

SEQ ID NO: 86906 - DNA, 599 bp, Chicken  19866894388014_1
  misc_feature (1)..(88): n is any nucleotide
nnnnnnnnnnnnnnnnnnnnnnnnnnnnnnnnnnnnnnnnnnnnnnnnnnnnnnnnnnnnnnnnnnnnnnnnnnnnnnnnnnnnnnnncggagtttgaatcttaggagctgaagcctaaaggacagtctgcaagactgcaaagtttgatgccaacatataatcacagaatcattaagatctgaaagaccactaagataacctggttaaatcacacccctagaccatgtcccccagtgccacatctacccttttcttgaacacctccagggatggtgactccttcaactccctgagcagcstgtgtcaatgtctcaccaacaccgtaagccccataatcctttaccatttctgtctggcattgctggctctcagccagatgctagtctgggctcagagcatacatgttgcctacaaaacagagcttgggctatttccaagtggacacgtgagttcttccagatgactgatttggggtttttgtgtgtttccttttgttttaggcttctagcagacacaacacaatctcttctgttacaatctgacttacctgccacatgtagaggacatagtgaggccggccagatctgaggtaggtgta

SEQ ID NO: 86907 - DNA, 600 bp, Chicken  19866894388023_1
gtccacacctgctgaagtcaccagacctctgcagtaaggctttcactccaagtcaaatcagaaatgttggcaacatggcagtgaaacacaaagaccctccctgacatatcttgcactcacacttcaagtcgatccttctgttacccactgatctgataactacccaacggcacagagtgccagtacatgcactatgtgatatgcagggaagggaaacactttcccgtgggtcactgagaattttgccaaaatgtcccagtcagtgctctgtcagtcactgctgtgcaagaagaaagcaartggtcttcaataatgacaaagaagaaaaaccatcctccacaaaaaacacaaacaaggcatttraaagttggttttccagctctggtttaaagatacagttaaaactacgtttctgtataagggtgaaagcacatacattaggacaggattcaccccactgcaaagaaacgacaatgaaagcaggacagaaaaacttacacctctcataggcaggacrtgttctcaggaagttaactcacatatgggtggtctacaccatggtttaccattccatagcacacatctaatccttacatataa

SEQ ID NO: 86908 - DNA, 600 bp, Chicken  19866894388023_2
atgttggcaacatggcagtgaaacacaaagaccctccctgacatatcttgcactcacacttcaagtcgatccttctgttacccactgatctgataactacccaacggcacagagtgccagtacatgcactatgtgatatgcagggaagggaaacactttcccgtgggtcactgagaattttgccaaaatgtcccagtcagtgctctgtcagtcactgctgtgcaagaagaaagcaartggtcttcaataatgacaaagaagaaaaaccatcctccacaaaaaacacaaacaaggcatttraaagttggttttccagctctggtttaaagatacagttaaaactacgtttctgtataagggtgaaagcacatacattaggacaggattcaccccactgcaaagaaacgacaatgaaagcaggacagaaaaacttacacctctcataggcaggacrtgttctcaggaagttaactcacatatgggtggtctacaccatggtttaccattccatagcacacatctaatccttacatataataaataaaacggaattaaatgaagactatccctagtgcctcctaaaacggatggtaaaagctc

SEQ ID NO: 86909 - DNA, 600 bp, Chicken  19866894388023_3
actttcccgtgggtcactgagaattttgccaaaatgtcccagtcagtgctctgtcagtcactgctgtgcaagaagaaagcaartggtcttcaataatgacaaagaagaaaaaccatcctccacaaaaaacacaaacaaggcatttraaagttggttttccagctctggtttaaagatacagttaaaactacgtttctgtataagggtgaaagcacatacattaggacaggattcaccccactgcaaagaaacgacaatgaaagcaggacagaaaaacttacacctctcataggcaggacrtgttctcaggaagttaactcacatatgggtggtctacaccatggtttaccattccatagcacacatctaatccttacatataataaataaaacggaattaaatgaagactatccctagtgcctcctaaaacggatggtaaaagctcccttgagaatgggcccggatgaagcctttttctcacagctgatccaggagaggcagatagaaaactcctaaaaccagttcaaaacccttttcgtgcatgaaccttctgtacaaccttaagaaagtcacataacatctcctttgcgttttgctct

SEQ ID NO: 86910 - DNA, 600 bp, Chicken  19866894388026_1
agcagtgataagaagttttcaggtgccctgaagaaatctgactttgcatcgctgcagccaggcagtgcctttcctcaaaacttctttagagaccaaagaaaccagcagacacagcagaagcattagccaccagcctcctgttccccctcatgtgtgatttctgtcgtcagcctttcactttgtgtgtaaactgacgtttgtggtctcagcctgctgcctgccagacttgtgagatacacacctagccttgtggtttccagtattattttatttgtagtgttacagttcatgccctgctgyatggatctgatgycccttgctatgggctctctgcaaaactaacataaagggacaccaggatgctgcaggcttccatttaacatagcgcctaaataactgcttgtgggcacagctttgggaagaagggtaatctgacatcagtccgtcttggttcaaaggagaaggtttaggtctttaaaaaataaacagcaggacaatcttctgccatttcagtgagaagaactggcccaagcaagggtctgacaaatgacagagacggcataaagtttgtagcagcaatttgctcttgtggctcagctg

SEQ ID NO: 86911 - DNA, 600 bp, Chicken  19866894388026_2
agttttcaggtgccctgaagaaatctgactttgcatcgctgcagccaggcagtgcctttcctcaaaacttctttagagaccaaagaaaccagcagacacagcagaagcattagccaccagcctcctgttccccctcatgtgtgatttctgtcgtcagcctttcactttgtgtgtaaactgacgtttgtggtctcagcctgctgcctgccagacttgtgagatacacacctagccttgtggtttccagtattattttatttgtagtgttacagttcatgccctgctgyatggatctgatgycccttgctatgggctctctgcaaaactaacataaagggacaccaggatgctgcaggcttccatttaacatagcgcctaaataactgcttgtgggcacagctttgggaagaagggtaatctgacatcagtccgtcttggttcaaaggagaaggtttaggtctttaaaaaataaacagcaggacaatcttctgccatttcagtgagaagaactggcccaagcaagggtctgacaaatgacagagacggcataaagtttgtagcagcaatttgctcttgtggctcagctgcctacagcttagg

SEQ ID NO: 86912 - DNA, 600 bp, Chicken  19866894388030_1
ctcttttctcttgcttgttcacttatctgggtccccttagcaacatctttcactaatggaaaaatagcagtgctttctgtagtctcactgtttgaatcggaaatgaaatttacttggcaaaacatttaggttttccatcctactattccttctatcatcatgaacactaaatattgtgcattagagagatctacagattattaatttgtgcatctcatagttattgcaatgccaagtggaagtaggagtgtgtaaaaatagtcatctgtgtatggtaggattgttgcctctgcattggargaagaaagtctcttacattttgtacagaggcrtattatggactgcaatctccagagaaactgctttgcagagttcctttagagagacaagagagacacataatggaaattcaccatgatctcattttgctcaaaaagaattcactttaagacatatattctcaagtttaaaaaaaaaaatcccttacttctggaggccagggggtgctataggtatatgcattataatctctgtgggctcagtagtcagtacagagagctgctggttttttagatctgtgttgttctgatttctaactgt

SEQ ID NO: 86913 - DNA, 600 bp, Chicken  19866894388030_2
ccccttagcaacatctttcactaatggaaaaatagcagtgctttctgtagtctcactgtttgaatcggaaatgaaatttacttggcaaaacatttaggttttccatcctactattccttctatcatcatgaacactaaatattgtgcattagagagatctacagattattaatttgtgcatctcatagttattgcaatgccaagtggaagtaggagtgtgtaaaaatagtcatctgtgtatggtaggattgttgcctctgcattggargaagaaagtctcttacattttgtacagaggcrtattatggactgcaatctccagagaaactgctttgcagagttcctttagagagacaagagagacacataatggaaattcaccatgatctcattttgctcaaaaagaattcactttaagacatatattctcaagtttaaaaaaaaaaatcccttacttctggaggccagggggtgctataggtatatgcattataatctctgtgggctcagtagtcagtacagagagctgctggttttttagatctgtgttgttctgatttctaactgttttgtattttaaacaaattcagcacgaaaatt

SEQ ID NO: 86914 - DNA, 600 bp, Chicken  19866894388033_1
tcacactcggatttccctgacctactttaggtggctgcagggaccacactcacacaaagcaatgctacctttcttgcatgagtcagcagcgagcaacaggagagctgttattcgtaattgaaaaggaattaagtgattttgaagacagggagtgttctggattggtaaactgactgacagcaggagcacttcagaaaaggctgccttatgaaaagcagacttcaaaaggagaagtgacaagggccagagtgtttgtggtgctggaggaagtcattagaatttaaaagggacgcagatcgrgcaagcacaccaggcaaagaaagctgaactgctgccaaaagactttcttttagctttcccgttgcttcctagcctgttagaagagcagttccgtgcacatctgtatctcaaagcatttctcaagaaaacccttcaaactgctgaaaacatgagaaaggtgccaccatcacgaactagatgcctcccgcccccggttttccttttagcttattagctgtcttgttttcatcatttccaaacaagacagagcttctgcacgcccctcagcgataaggcatttcttggaggactggagcagtt

SEQ ID NO: 86915 - DNA, 600 bp, Chicken  19866894388035_1
agcttccttactcaaaatattactgcgaaagtgttataatgctgaaaccttttcagttgtctgaaatgtataatgaacatacttcagattgtgaagaggacttttctgcttctgtgtataaaaaaaaaaaaaatgtatatataaaattttctgtctcttaagcttatgttattcaaaaaccatcaagaaccacagaagtaatacagctttatccacagatagaaacaaagctgtaagactgttgtaaacctctttcatagcaattggttctgtatcagccccccactcaagggaatgcgygttgcygcttgccacagaggtcactgaatgacactsctgtgtctccagtacaatatggcaaatttcttaaactgttgagaactggaaattgtattactgttctgtatgtgctgttgaggtgctcagttgacatgcagaaggtgttattctgtgccttaaagtcccaaataataatggaagggttaatcaggattatagatctgatgtggttcaagtcgttgtgaataaggaataatgaaatgacttaaatggaaatctgtctcagttttttatatgtttcaaagtgaagatcatgaattt

SEQ ID NO: 86916 - DNA, 600 bp, Chicken  19866894388035_2
cttactcaaaatattactgcgaaagtgttataatgctgaaaccttttcagttgtctgaaatgtataatgaacatacttcagattgtgaagaggacttttctgcttctgtgtataaaaaaaaaaaaaatgtatatataaaattttctgtctcttaagcttatgttattcaaaaaccatcaagaaccacagaagtaatacagctttatccacagatagaaacaaagctgtaagactgttgtaaacctctttcatagcaattggttctgtatcagccccccactcaagggaatgcgygttgcygcttgccacagaggtcactgaatgacactsctgtgtctccagtacaatatggcaaatttcttaaactgttgagaactggaaattgtattactgttctgtatgtgctgttgaggtgctcagttgacatgcagaaggtgttattctgtgccttaaagtcccaaataataatggaagggttaatcaggattatagatctgatgtggttcaagtcgttgtgaataaggaataatgaaatgacttaaatggaaatctgtctcagttttttatatgtttcaaagtgaagatcatgaattttatatt

SEQ ID NO: 86917 - DNA, 600 bp, Chicken  19866894388035_3
taatgctgaaaccttttcagttgtctgaaatgtataatgaacatacttcagattgtgaagaggacttttctgcttctgtgtataaaaaaaaaaaaaatgtatatataaaattttctgtctcttaagcttatgttattcaaaaaccatcaagaaccacagaagtaatacagctttatccacagatagaaacaaagctgtaagactgttgtaaacctctttcatagcaattggttctgtatcagccccccactcaagggaatgcgygttgcygcttgccacagaggtcactgaatgacactsctgtgtctccagtacaatatggcaaatttcttaaactgttgagaactggaaattgtattactgttctgtatgtgctgttgaggtgctcagttgacatgcagaaggtgttattctgtgccttaaagtcccaaataataatggaagggttaatcaggattatagatctgatgtggttcaagtcgttgtgaataaggaataatgaaatgacttaaatggaaatctgtctcagttttttatatgtttcaaagtgaagatcatgaattttatattccttatgaaagaagataaactgtccatcct

SEQ ID NO: 86918 - DNA, 599 bp, Chicken  19866894388037_1
  misc_feature (1)..(8): n is any nucleotide
nnnnnnnntttcaaggtaagggtgaagtgcatggaaatgggcaatactgataatagaaggagaggtcaccaaggagggccattccccttgtggtggagctgtggcagtcaggtgtcctggggggagggggtgcaagaaaatgagcctgagtgaggtggctgggcactgctgtgggaaggttgagagcagtctgcagccgggtggtggggatcctgagaggctccacgtctgccgtaaggaccaaagtgatcaggggtgagtagcagctgcagcacgagctgtggtgcttgtatggggacygctcagaggcgaggagtgctgttggcttsagatttgtgcttcacctcgtgtcaggtcagcactcaaggagtgctggtgggcagctggtggggagggctcagggagctgtgagctgggctggggaaacaccggagatcggagcaaacacatttgcaccagcgagactccagggtgaccgctgaaagctgtagagtaatgccaacagaactgcaaacaggacttggctgtataatcagaaaagaagaaggtttggcatagggcctggaggggtgctgggcgctagcctctgcttgtataaa

SEQ ID NO: 86919 - DNA, 600 bp, Chicken  19866894388037_2
catggaaatgggcaatactgataatagaaggagaggtcaccaaggagggccattccccttgtggtggagctgtggcagtcaggtgtcctggggggagggggtgcaagaaaatgagcctgagtgaggtggctgggcactgctgtgggaaggttgagagcagtctgcagccgggtggtggggatcctgagaggctccacgtctgccgtaaggaccaaagtgatcaggggtgagtagcagctgcagcacgagctgtggtgcttgtatggggacygctcagaggcgaggagtgctgttggcttsagatttgtgcttcacctcgtgtcaggtcagcactcaaggagtgctggtgggcagctggtggggagggctcagggagctgtgagctgggctggggaaacaccggagatcggagcaaacacatttgcaccagcgagactccagggtgaccgctgaaagctgtagagtaatgccaacagaactgcaaacaggacttggctgtataatcagaaaagaagaaggtttggcatagggcctggaggggtgctgggcgctagcctctgcttgtataaacctatgtttctcraatatctgagctggttt

SEQ ID NO: 86920 - DNA, 467 bp, Chicken  19866894388037_3
ggagtgctgttggcttsagatttgtgcttcacctcgtgtcaggtcagcactcaaggagtgctggtgggcagctggtggggagggctcagggagctgtgagctgggctggggaaacaccggagatcggagcaaacacatttgcaccagcgagactccagggtgaccgctgaaagctgtagagtaatgccaacagaactgcaaacaggacttggctgtataatcagaaaagaagaaggtttggcatagggcctggaggggtgctgggcgctagcctctgcttgtataaacctatgtttctcraatatctgagctggtttctgaatgtgtgtctgaagcattctgagcctgtatcgtctttcatgtggaacaaggaaactgttgcacttcagacagccacccccctcaattatttaatgtaactaaatacctgccccactccgcagacttacgtactgtaaagctgcaaa

SEQ ID NO: 86921 - DNA, 600 bp, Chicken  19866894388038_1
ttctaggtacaaggcaggctagcaactatctgtagttcttcaaggatctgaggtgtcaggcactgttttaaatcagtggcggattgaacatatcctgtttgtgtctgttgtacatcatattaggagagttgagacctgcttgagtccatggccactttgtaatttgcatgtgaacatcaagtgccaagttaacattttgttgctgaattgaaataagaagggctaaaatacagtgtgtttccacgaagtgatagagagaaactgaaaggtgagatttgtaccagggaagtatgagtattyttgttttccttacagctcaagctttaagcaagctttggaagccttgcctcarctytcaagtggagctgacaaaaagtgagtatactgcatcttcttgtctttcttctgctttctggagccattgctatttactttcatatcagagctttactagaagagagttaacttttactgtatttgaccctttggatttacagtgtagaaggctcttcagcgttaaaaactatctaaatacttgtactttgtggtctattaatttatacagaggagccaatggctttgtagcatatgtcactttct

SEQ ID NO: 86922 - DNA, 600 bp, Chicken  19866894388038_2
gtgtcaggcactgttttaaatcagtggcggattgaacatatcctgtttgtgtctgttgtacatcatattaggagagttgagacctgcttgagtccatggccactttgtaatttgcatgtgaacatcaagtgccaagttaacattttgttgctgaattgaaataagaagggctaaaatacagtgtgtttccacgaagtgatagagagaaactgaaaggtgagatttgtaccagggaagtatgagtattyttgttttccttacagctcaagctttaagcaagctttggaagccttgcctcarctytcaagtggagctgacaaaaagtgagtatactgcatcttcttgtctttcttctgctttctggagccattgctatttactttcatatcagagctttactagaagagagttaacttttactgtatttgaccctttggatttacagtgtagaaggctcttcagcgttaaaaactatctaaatacttgtactttgtggtctattaatttatacagaggagccaatggctttgtagcatatgtcactttctcattctagtcttatcaactctctgtagttttatatttattgtataatttcag

SEQ ID NO: 86923 - DNA, 600 bp, Chicken  19866894388038_3
tcaggcactgttttaaatcagtggcggattgaacatatcctgtttgtgtctgttgtacatcatattaggagagttgagacctgcttgagtccatggccactttgtaatttgcatgtgaacatcaagtgccaagttaacattttgttgctgaattgaaataagaagggctaaaatacagtgtgtttccacgaagtgatagagagaaactgaaaggtgagatttgtaccagggaagtatgagtattyttgttttccttacagctcaagctttaagcaagctttggaagccttgcctcarctytcaagtggagctgacaaaaagtgagtatactgcatcttcttgtctttcttctgctttctggagccattgctatttactttcatatcagagctttactagaagagagttaacttttactgtatttgaccctttggatttacagtgtagaaggctcttcagcgttaaaaactatctaaatacttgtactttgtggtctattaatttatacagaggagccaatggctttgtagcatatgtcactttctcattctagtcttatcaactctctgtagttttatatttattgtataatttcagttc

SEQ ID NO: 86924 - DNA, 600 bp, Chicken  19866894388039_1
cactgttgtgtgagccgtgcagtgataagtcaagccacgtagcgctgtgtcacgctgtgccataccaggctgcactatgccatgccatttggtgccacgccatgctgtcccagtctcttctctaccatgccatgccataccatgctgtgccatactgcgtgatgccatgccatatcttgctgtgccatgccacgcgcatcaagcaatgccatgccgtgctgtatcaagcaatgccatgcagtgccactctgtgccatattattccataccatgcagtgtcacgccatgttgcaccaagcygtgccrtgccatgccatgccgtgccgtgcygcggtgccccgtgcagggtgggggtgccctgacrgcaacctccccaggcaccacgtggatgcaggagatcctgacgctgctgtacagccgtggggacacgcagccggccaagaccatccccaactgggagcgggcgccctggctggagcagatccacttccgcagctcgctgcgggacacggccacrcaccgcctcatcaccagccacctgcccgcccgcgtgctgggcccccggctgcagggcagcaaggccaaggtgaggggtcccaa

SEQ ID NO: 86925 - DNA, 600 bp, Chicken  19866894388039_2
tgtgtgagccgtgcagtgataagtcaagccacgtagcgctgtgtcacgctgtgccataccaggctgcactatgccatgccatttggtgccacgccatgctgtcccagtctcttctctaccatgccatgccataccatgctgtgccatactgcgtgatgccatgccatatcttgctgtgccatgccacgcgcatcaagcaatgccatgccgtgctgtatcaagcaatgccatgcagtgccactctgtgccatattattccataccatgcagtgtcacgccatgttgcaccaagcygtgccrtgccatgccatgccgtgccgtgcygcggtgccccgtgcagggtgggggtgccctgacrgcaacctccccaggcaccacgtggatgcaggagatcctgacgctgctgtacagccgtggggacacgcagccggccaagaccatccccaactgggagcgggcgccctggctggagcagatccacttccgcagctcgctgcgggacacggccacrcaccgcctcatcaccagccacctgcccgcccgcgtgctgggcccccggctgcagggcagcaaggccaaggtgaggggtcccaaaggtga

SEQ ID NO: 86926 - DNA, 600 bp, Chicken  19866894388039_3
caagccacgtagcgctgtgtcacgctgtgccataccaggctgcactatgccatgccatttggtgccacgccatgctgtcccagtctcttctctaccatgccatgccataccatgctgtgccatactgcgtgatgccatgccatatcttgctgtgccatgccacgcgcatcaagcaatgccatgccgtgctgtatcaagcaatgccatgcagtgccactctgtgccatattattccataccatgcagtgtcacgccatgttgcaccaagcygtgccrtgccatgccatgccgtgccgtgcygcggtgccccgtgcagggtgggggtgccctgacrgcaacctccccaggcaccacgtggatgcaggagatcctgacgctgctgtacagccgtggggacacgcagccggccaagaccatccccaactgggagcgggcgccctggctggagcagatccacttccgcagctcgctgcgggacacggccacrcaccgcctcatcaccagccacctgcccgcccgcgtgctgggcccccggctgcagggcagcaaggccaaggtgaggggtcccaaaggtgaggctctgtgggcgcaccccgatgt

SEQ ID NO: 86927 - DNA, 600 bp, Chicken  19866894388039_4
ccaggctgcactatgccatgccatttggtgccacgccatgctgtcccagtctcttctctaccatgccatgccataccatgctgtgccatactgcgtgatgccatgccatatcttgctgtgccatgccacgcgcatcaagcaatgccatgccgtgctgtatcaagcaatgccatgcagtgccactctgtgccatattattccataccatgcagtgtcacgccatgttgcaccaagcygtgccrtgccatgccatgccgtgccgtgcygcggtgccccgtgcagggtgggggtgccctgacrgcaacctccccaggcaccacgtggatgcaggagatcctgacgctgctgtacagccgtggggacacgcagccggccaagaccatccccaactgggagcgggcgccctggctggagcagatccacttccgcagctcgctgcgggacacggccacrcaccgcctcatcaccagccacctgcccgcccgcgtgctgggcccccggctgcagggcagcaaggccaaggtgaggggtcccaaaggtgaggctctgtgggcgcaccccgatgtctgtgggtccgatcagctcacggggcagctgagc

SEQ ID NO: 86928 - DNA, 600 bp, Chicken  19866894388039_5
gctgtatcaagcaatgccatgcagtgccactctgtgccatattattccataccatgcagtgtcacgccatgttgcaccaagcygtgccrtgccatgccatgccgtgccgtgcygcggtgccccgtgcagggtgggggtgccctgacrgcaacctccccaggcaccacgtggatgcaggagatcctgacgctgctgtacagccgtggggacacgcagccggccaagaccatccccaactgggagcgggcgccctggctggagcagatccacttccgcagctcgctgcgggacacggccacrcaccgcctcatcaccagccacctgcccgcccgcgtgctgggcccccggctgcagggcagcaaggccaaggtgaggggtcccaaaggtgaggctctgtgggcgcaccccgatgtctgtgggtccgatcagctcacggggcagctgagccaaggaaaacctgagcccgtgttctccccgcaccaggtgatctacgtggccaggaaccccaaggatgtggtggtctcctattaccacttccaccacctggccaagttcctgcctgaccccgtttccttcgatgccttcctccagcagttcctc

SEQ ID NO: 86929 - DNA, 599 bp, Chicken  19866894388040_1
  misc_feature (1)..(73): n is any nucleotide
nnnnnnnnnnnnnnnnnnnnnnnnnnnnnnnnnnnnnnnnnnnnnnnnnnnnnnnnnnnnnnnnnnnnnnnnnatttggttggaattcagaaagagttcacatgtaaagcctaaaatccagaataggttctgtataagattagccacttaaaagggaagtttttaaaaggttaagttatccaagacttattccctgaagctacaaacatatttgctcatgcataacttcactgaggaatccttaagtgaacaaaattatgtacttgcatgtttgtagaatcgagaccttaattagctctrggttaatttcccttcttcctaattaaaaacacagaggtcaattaaggatcaggtgagactttaccttcatgactgtcttccttgtcagaaataggtattctgatacatatttcaatataatctccaaccttttttccaacttaagtccttttattcttaccagtttgggacaaggaagtaattgcatttaaaatagactctgtaaaggtgaactgttgaagtacatgttgtttttttgggggggggaataccatgggaaaaataataggttttttcacattggactgataatgtgtatt

SEQ ID NO: 86930 - DNA, 569 bp, Chicken  19866894388041_1
ctatgacagtgttgctaccatgtaagcaaagaggtattaaatcagatacctcgggctaccttggtttggaatcacaagtcaaggcgtagtacagccactgtacgaactcctctcctgtatgcacaagcaagtaaactagtaaagcaacgaacatgcattttaagaggctcaaagcctaattgctactgaatactggggaaggtcaagaaaaatcagggtactctgccgcatctagcacaacgctaacaccaacatgtgtgcactagtgaaaatgagatgtccctcaacagttgtggagtwgagcagggaggcagaacggtaacagagagaaaaaccaaacacggccatgttactgtatattgtaatagcagagagagtctcttgcaaccttatttctaatcttgcagaatttgaggaaggacttctgccttcttccacgtctttaaaagaaaagctatccagtaagtgagcctcacaggacccatgggaagcacaggttgggtgtatttcacagatggaggatcaaccaccccacacagagaagcactgacttcttcctccaccgtcag

SEQ ID NO: 86931 - DNA, 600 bp, Chicken  19866894388053_1
agaaagtcatgtttgccatcacacagacttctgtctgctgtccaaagctagcatatagatttgaattgttggaaaaaaagctgcagcactcttctggagaaacacaaattgcaaacatgacataatgaaaggcaggaaacacagctgtctaaaccttcacagcaaacccaggcccgtcgagtagccattctactctgcctatatacccagatgaatgaaaaaagtaactcacagtgaactaggagcaagtcttcccccagctcagctgtacactgttagtgaagataacattgggaaggyagaacagctgtttgcactatgacaaagctaagctagatggtgccattcaatgaggaagcacagttaggactctagcagtgagttcattgtcacactgacagaaaacacaacttaagccagctcaccccacacctttcctttaaggaataataatgcctactataacctggccttggcaggctttgtaaatttgcacatagagtgaaatgcagatgattttaaatagccctgttgctatatgcacaaatagctttgtctcaaaactatggaaattcttgaagccacagttgtagttctttt

SEQ ID NO: 86932 - DNA, 600 bp, Chicken  19866894388056_1
actaaactgcataagagatacctgtattacctcagcccaggtacaagcgttaccttagagcaaaaggtgctgccgtcctgctccattaactccctagatgctacatctctagaaacgttggatgtgttatgtgttgttaagcacctgcattttttgctgctctgcagaaagtacaagtttgtgaatgctgtttctagattagtttttgtatgcatgtaaaaaaaatgtactgctagatttagaaaacagtaattggactttatcatcatcaacactttatattacataaactacttctcrcaaagtatcccacagctacagagtttaagaattttgaaggtgatatattttatcacaggggtaaaaaaatctttaaagaaagctgcacagtcacatgattgtgtaatttacactatcttagggttgatatataaaaggtgcttttgtttatggtatatatwgtcaggcaccagtaragaaccatgagcagattggacatggggaaatggtttcagacygaagaaagggagatttaaattggattttaggaagaagttttttaccataagggtggtgaagcactggaacaggttgtctgca

SEQ ID NO: 86933 - DNA, 600 bp, Chicken  19866894388056_2
ctgcagaaagtacaagtttgtgaatgctgtttctagattagtttttgtatgcatgtaaaaaaaatgtactgctagatttagaaaacagtaattggactttatcatcatcaacactttatattacataaactacttctcrcaaagtatcccacagctacagagtttaagaattttgaaggtgatatattttatcacaggggtaaaaaaatctttaaagaaagctgcacagtcacatgattgtgtaatttacactatcttagggttgatatataaaaggtgcttttgtttatggtatatatwgtcaggcaccagtaragaaccatgagcagattggacatggggaaatggtttcagacygaagaaagggagatttaaattggattttaggaagaagttttttaccataagggtggtgaagcactggaacaggttgtctgcagataatgtggatcccctgtccctggagacattcacggtcaggctggacagggctctgagcaacctgatgtagctatggtgtccctgttccctgcaggggagttggactaggtggcctctaagtgtcccttccaactcaaacaactctatgaaaaacttagt

SEQ ID NO: 86934 - DNA, 600 bp, Chicken  19866894388056_3
gtttgtgaatgctgtttctagattagtttttgtatgcatgtaaaaaaaatgtactgctagatttagaaaacagtaattggactttatcatcatcaacactttatattacataaactacttctcrcaaagtatcccacagctacagagtttaagaattttgaaggtgatatattttatcacaggggtaaaaaaatctttaaagaaagctgcacagtcacatgattgtgtaatttacactatcttagggttgatatataaaaggtgcttttgtttatggtatatatwgtcaggcaccagtaragaaccatgagcagattggacatggggaaatggtttcagacygaagaaagggagatttaaattggattttaggaagaagttttttaccataagggtggtgaagcactggaacaggttgtctgcagataatgtggatcccctgtccctggagacattcacggtcaggctggacagggctctgagcaacctgatgtagctatggtgtccctgttccctgcaggggagttggactaggtggcctctaagtgtcccttccaactcaaacaactctatgaaaaacttagtaaagaaggcattcca

SEQ ID NO: 86935 - DNA, 600 bp, Chicken  19866894388056_4
aaaaaaatgtactgctagatttagaaaacagtaattggactttatcatcatcaacactttatattacataaactacttctcrcaaagtatcccacagctacagagtttaagaattttgaaggtgatatattttatcacaggggtaaaaaaatctttaaagaaagctgcacagtcacatgattgtgtaatttacactatcttagggttgatatataaaaggtgcttttgtttatggtatatatwgtcaggcaccagtaragaaccatgagcagattggacatggggaaatggtttcagacygaagaaagggagatttaaattggattttaggaagaagttttttaccataagggtggtgaagcactggaacaggttgtctgcagataatgtggatcccctgtccctggagacattcacggtcaggctggacagggctctgagcaacctgatgtagctatggtgtccctgttccctgcaggggagttggactaggtggcctctaagtgtcccttccaactcaaacaactctatgaaaaacttagtaaagaaggcattccaagaaaattggtcctgaacaacaaatgagatttagcaagacat

SEQ ID NO: 86936 - DNA, 600 bp, Chicken  19866894388059_1
gggcgctgcagcgggagggatgcgggtgagcagcgcggagcagcgccgctgctgagaaatcatctcggaggaaacaaaacttgccagtcagcgctctgcctaatggcatacgggaattaagacagcagaaatgccccgcgctgccagcagctcgcaggcaggtgtgcctgctacaacttgtttcacaggcaaagcagctccgtggctgcgctccgccgctgggaaacacccaaactcggagagcagatggggctgagccaacagccctgggggtcccggggggcacagtggggtgtgggrcgcagtgggacgcagcgggccgtgcatggggcagctttgtgctygcaggatgcacgcagtgcggagcaggaaccgagcggcacggggcggtggcagcagtgcatatcccagcagtgggaatgctgcatggtgagggaggggagcagcaatgttccccagcacsgggcacgctgccctcctgctcccagcacagcgctggggcgttgagcccggccccggctgccttggctttgttatggggtcacacagaacggcggcggcgcggagatagggaagcggagttttaccatcagaaaaatc

SEQ ID NO: 86937 - DNA, 600 bp, Chicken  19866894388059_2
gccgctgctgagaaatcatctcggaggaaacaaaacttgccagtcagcgctctgcctaatggcatacgggaattaagacagcagaaatgccccgcgctgccagcagctcgcaggcaggtgtgcctgctacaacttgtttcacaggcaaagcagctccgtggctgcgctccgccgctgggaaacacccaaactcggagagcagatggggctgagccaacagccctgggggtcccggggggcacagtggggtgtgggrcgcagtgggacgcagcgggccgtgcatggggcagctttgtgctygcaggatgcacgcagtgcggagcaggaaccgagcggcacggggcggtggcagcagtgcatatcccagcagtgggaatgctgcatggtgagggaggggagcagcaatgttccccagcacsgggcacgctgccctcctgctcccagcacagcgctggggcgttgagcccggccccggctgccttggctttgttatggggtcacacagaacggcggcggcgcggagatagggaagcggagttttaccatcagaaaaatcagtcgcaatattaattaatcctcaaagcactttacgaacattaa

SEQ ID NO: 86938 - DNA, 600 bp, Chicken  19866894388059_3
gtgcctgctacaacttgtttcacaggcaaagcagctccgtggctgcgctccgccgctgggaaacacccaaactcggagagcagatggggctgagccaacagccctgggggtcccggggggcacagtggggtgtgggrcgcagtgggacgcagcgggccgtgcatggggcagctttgtgctygcaggatgcacgcagtgcggagcaggaaccgagcggcacggggcggtggcagcagtgcatatcccagcagtgggaatgctgcatggtgagggaggggagcagcaatgttccccagcacsgggcacgctgccctcctgctcccagcacagcgctggggcgttgagcccggccccggctgccttggctttgttatggggtcacacagaacggcggcggcgcggagatagggaagcggagttttaccatcagaaaaatcagtcgcaatattaattaatcctcaaagcactttacgaacattaactaattaagcctgccaagccctctgtgaggtgggaaaggtatcgctgccctcgttttacggctgcgcgcggaggtgatgcgatgcacccaaagtgactgcggggcgagcagaggtgggg

SEQ ID NO: 86939 - DNA, 599 bp, Chicken  19866894388062_1
  misc_feature (1)..(107): n is any nucleotide
nnnnnnnnnnnnnnnnnnnnnnnnnnnnnnnnnnnnnnnnnnnnnnnnnnnnnnnnnnnnnnnnnnnnnnnnnnnnnnnnnnnnnnnnnnnnnnnnnnnnnnnnnnntttctgcttctgatgcaacctatttgtaattcagaacaaggaggaaggcaattaactgacatctttctacataataatataagttaaggctctaaggctttgcctacactagggaaattcagacaagtttctcactgttgctgacactggcttggccaaaacactgttaagaatattaaaggtctaatgcagrtgaacacaccagcctcaaaaaatgctgtcagcaattaagactttcctggaaaaggagtggcattcagaagtatgaataactgaataatgccgtacaagcaacctgtccccgttgtttatcagtagttatcaaatatgttcccacataacgtcatcagccttctttcattcttctactttgctaaagcttctatttctttaaaagtattttaattttgaatagactgctactgaaccgtttcttaaaaataaatttaagaaaagatacttcataataaaaacagaaagttttgaattatt

SEQ ID NO: 86940 - DNA, 600 bp, Chicken  19866894388069_1
tggggtcaaagtctgttagttattactatttccaaccattctcggtcagggctctgagcacataatatgtcctgggctcagggccaacatggttgatgggtgcaggcacccagccatggggagagcctctgagatctgatctgtggtgagaagccacacaggggactccccctttcaccttcattccagatggcatggtgatgttctcagttgttgtcctcagtccaggataagctgaccccaactgttgtcctcactagcaggttttaccttgcagctgaagttcagaccagcctcatmaccatgcaatcatctgtagatcactgagctgtgtctggccctgggtgctgggatcaccagcctgatgctgacttgttgacttcagttccttaggcctgcctcttaaccaggaggtacctgctattcagggctcttggttggatccagccactgccaccaggtagcttctgctctctgtgctcctggctgtccttcatctgcagctcatggctgcagtctaacctaccagccctcctgaccatgattctgcaccctcaccccctatcaccctgacaatgcctttctccataattacttccc

SEQ ID NO: 86941 - DNA, 599 bp, Chicken  19866894388071_1
  misc_feature (1)..(134): n is any nucleotide
nnnnnnnnnnnnnnnnnnnnnnnnnnnnnnnnnnnnnnnnnnnnnnnnnnnnnnnnnnnnnnnnnnnnnnnnnnnnnnnnnnnnnnnnnnnnnnnnnnnnnnnnnnnnnnnnnnnnnnnnnnnnnnnnnnnnnnccagcgcacgtagcagagctgcagacctgaggtgttccttcagcaatgcacagcactcagcttccatgcacccgcaaggagaaggtttaagctcacacatacatagaggcaaagccccggcagcactcacctgcacgtgagttcctgaaggtgttgatggaagacrtctccatccgcatcaagtggtcagaagcgttctgctccggaggctccaggacttccttcaagatagcacccatcactgagcacgtggtgaagctgggaacgaaacatcctcaaaaggctgcagggctgaaaccttttctctctttctctctgaggagcaggcgggccagcagcagcttgctgtgctgccaacaaacatggggtttctatagagatgccacagcgcagcctcacagtgcccaggctgagcactgagcccaagtgtgcactgatggcaaagggtttgaacctgctcccatg

SEQ ID NO: 86942 - DNA, 600 bp, Chicken  19866894388080_1
caacaatttattacattcttcttcacattgaattcattcagtaacagtctgtaaagcatcaataggaaaaatagacaggaacgaatttctttcaaacatatgcagcctctctgaatctgaatggatctgaatgaaatttggcttatttatttgtttattttcagatatatctccggattaaaaataaaaaaagcttcttcatttgtactgcccttatgaactcatctgcagctgtgtgaaagcacgcagtattctaatatttaggcatggtgtttctatttaaagacaaaggtgaaagaraatgtggtagaaaaagaaattcccaaagtactgaattctgaaaggttaattccaagttctgaaggtgtagtgtccaaaatcgtaggatctttctgactttatctgatattatccttctttatagctgacaaatgtcaaatttaaagaaatgaaaatgcyctctagttctcttcctttgatcttaacactgtttcactacattaatacttgctctgactgttcttttgactcctttggtgatttgatccataaattkttcctctctggagcacaacaaaaatcatatatttatttttctac

SEQ ID NO: 86943 - DNA, 600 bp, Chicken  19866894388080_2
ttcagatatatctccggattaaaaataaaaaaagcttcttcatttgtactgcccttatgaactcatctgcagctgtgtgaaagcacgcagtattctaatatttaggcatggtgtttctatttaaagacaaaggtgaaagaraatgtggtagaaaaagaaattcccaaagtactgaattctgaaaggttaattccaagttctgaaggtgtagtgtccaaaatcgtaggatctttctgactttatctgatattatccttctttatagctgacaaatgtcaaatttaaagaaatgaaaatgcyctctagttctcttcctttgatcttaacactgtttcactacattaatacttgctctgactgttcttttgactcctttggtgatttgatccataaattkttcctctctggagcacaacaaaaatcatatatttatttttctaccaggagtttatgtttctgaattttcaatgttttcctgctattcagtgattcaatggttgtgttttacttagtgtcttatttcttgtatgcaaaacttcagcagtgatggatcatcatctcacatgggaaaaaaaatagttacatttccagtatgtatat

SEQ ID NO: 86944 - DNA, 600 bp, Chicken  19866894388080_3
atatttaggcatggtgtttctatttaaagacaaaggtgaaagaraatgtggtagaaaaagaaattcccaaagtactgaattctgaaaggttaattccaagttctgaaggtgtagtgtccaaaatcgtaggatctttctgactttatctgatattatccttctttatagctgacaaatgtcaaatttaaagaaatgaaaatgcyctctagttctcttcctttgatcttaacactgtttcactacattaatacttgctctgactgttcttttgactcctttggtgatttgatccataaattkttcctctctggagcacaacaaaaatcatatatttatttttctaccaggagtttatgtttctgaattttcaatgttttcctgctattcagtgattcaatggttgtgttttacttagtgtcttatttcttgtatgcaaaacttcagcagtgatggatcatcatctcacatgggaaaaaaaatagttacatttccagtatgtatattagaaacagttgaacatccaatttacagatttgttatggttgtgagacacatttgtttcagatatgctctattgacaggtcttctgcaaacccacaa

SEQ ID NO: 86945 - DNA, 552 bp, Chicken  19866894388081_1
agggtggtgacgtactggaacaggttgcccaaggaggttgtggatgcccatctctggaggcattcaaggccaggctggatgtggctctaggcagcctggtctagtggttggcaaccctgcacagttgggaagattaaactagatgatcattatagtccttatcaatccaggccattctatgattctatgattgcatcaggtaggcatgcagaaggccctgctcaatagtcatcagatttgatgtctgcatgatgaaatggcagttaagcgcctacagggggctgcaaggcattattaaaygaagaggaaataaaaactttttctcagtgctaactctgtttttgttttatgttccctttaggcagccagctccctgggttcttgaacatcaaggccgtggtgcgcgggcccggctggcctgggatctgggcagccacaaaggctgccttcacccccacagagagcgggcagccatgatccacactcctcccagacaccagcacaaagggaaaaggtaagtatcttcagcagaattcagatacccacaccaca

SEQ ID NO: 86946 - DNA, 599 bp, Chicken  19866894388106_1
  misc_feature (1)..(96): n is any nucleotide
nnnnnnnnnnnnnnnnnnnnnnnnnnnnnnnnnnnnnnnnnnnnnnnnnnnnnnnnnnnnnnnnnnnnnnnnnnnnnnnnnnnnnnnnnnnnnnnntggaaccacacagcaacatctcagtgattccttatgtgatcttctgttagttatgtccgctccagagagaatgggagcttatgcttccatctgctgctaagattgcaagtatgaaaaaatgctctttgctccagaggtctctggttcagtccctgatggcagccacatggacttgtatatataacaacacatatataagaaatrtatgtcataacatatgtaacagcaatttacaagggaaagttacaaatgaaaacaatagccaccaacacaggttttccagggctaccctaaggagaatataggggccattcttcccaggtcctcagaactcctaacaaacctcaccaaactacaaggaggactagtgttggaataaggtacagaaagatacacaaagygttggagaaggaaaagacagctgttaggatgagtggggaccatatcagaaatacagtaagacacagctccaaagagctaaaagatgcactcatgttatcctg

SEQ ID NO: 86947 - DNA, 600 bp, Chicken  19866894388106_2
attgcaagtatgaaaaaatgctctttgctccagaggtctctggttcagtccctgatggcagccacatggacttgtatatataacaacacatatataagaaatrtatgtcataacatatgtaacagcaatttacaagggaaagttacaaatgaaaacaatagccaccaacacaggttttccagggctaccctaaggagaatataggggccattcttcccaggtcctcagaactcctaacaaacctcaccaaactacaaggaggactagtgttggaataaggtacagaaagatacacaaagygttggagaaggaaaagacagctgttaggatgagtggggaccatatcagaaatacagtaagacacagctccaaagagctaaaagatgcactcatgttatcctgccaatccccctttggcacaatgtctctgtatgtgatcctcttagtctatcactgsttctctgtgatatgcgtctatctggtttctcatggccacaataaacccttctactgcgttaatctcatttaacagttccactgacttgaaaagaaccagagtaaaattgctgtgcaatttctgctggcattattatggctgta

SEQ ID NO: 86948 - DNA, 600 bp, Chicken  19866894388106_3
atagccaccaacacaggttttccagggctaccctaaggagaatataggggccattcttcccaggtcctcagaactcctaacaaacctcaccaaactacaaggaggactagtgttggaataaggtacagaaagatacacaaagygttggagaaggaaaagacagctgttaggatgagtggggaccatatcagaaatacagtaagacacagctccaaagagctaaaagatgcactcatgttatcctgccaatccccctttggcacaatgtctctgtatgtgatcctcttagtctatcactgsttctctgtgatatgcgtctatctggtttctcatggccacaataaacccttctactgcgttaatctcatttaacagttccactgacttgaaaagaaccagagtaaaattgctgtgcaatttctgctggcattattatggctgtatcacttgtcagctttcgtaaacaagataaatagagttaaacttaaggcatcagatatgaaaaaaattggcatgttatagcagcccatcagaaatactttttgacaggtaccacataaaaaaggaaacaagagcatgtcagagaggaaaataactgca

SEQ ID NO: 86949 - DNA, 600 bp, Chicken  19866894388110_1
gaacctgataggagcaaccttcaggtgtcttccgagagctggtccttcaagacccttgggtgtgcacggagccaagtgttatctgtggcttcccaacatcatgctgccggctggtgaaggtccttcaatgttgtcctctgattggaaggctgtagaaccatagaaaggtttggagttggaaggaatccttaaaggccatctggtttaacctccctgcaatcaacaggggagatgtaggaacagacgttgggtgataaccaagggacaggtgtctgcactcagatcagcgttgggtccacmattttgctgaaaatggcacttatcatcaaaactgattccctatccaaatcctcgtttcacctgaaacatccaaggaatgatgcttgcacagccatgttggtctgttcagacctcttggacttcatttgctctcgtgtgcaggaaacttcttatgttaagtaacgttcttttcagaaaatgactaattaaacaacagaacaggaaatgttagagacagtaaaatcccctcagctgtccagcacatttctacataaatacagtggtaaaatgatgaaaacaaaatcttccagagacaaaggc

SEQ ID NO: 86950 - DNA, 600 bp, Chicken  19866894388112_1
ttcctactattctgagaggagaaagaaattgtgatcgttactgtatactgctgctaccaccttcaactatctacagagtgcaactctcctgcaaaacagatgacagcttccacagcagtcttctgttcttttctattctttgacctacttatggccacctttatgctttcatctgtgtgaccacagccttagggtatgcaggattttagctgggctgactcctgaccacacagccagcagtaagccatgctccatctagaggtgggctccatgagatctgatcagtcctactcagagagrgggccgaaggaaaacctcttttccstttcatcaatgattgggatcagagcagcacagcrctatatatcatttatgtgatgtatatgccatgcagaccacctaggtcttgagccattatcagaccaaaccacaagtacagaagattatgtgcaagacagcaagccaaagcaayatcatacctcaaactattttgagcttggtcatgcatagtccaggaacayggtymtataagtctctcaatttatgcacacctgcaggaagcaggctggcatggcagatatccaaagactgataaaattt

SEQ ID NO: 86951 - DNA, 600 bp, Chicken  19866894388112_2
aaattgtgatcgttactgtatactgctgctaccaccttcaactatctacagagtgcaactctcctgcaaaacagatgacagcttccacagcagtcttctgttcttttctattctttgacctacttatggccacctttatgctttcatctgtgtgaccacagccttagggtatgcaggattttagctgggctgactcctgaccacacagccagcagtaagccatgctccatctagaggtgggctccatgagatctgatcagtcctactcagagagrgggccgaaggaaaacctcttttccstttcatcaatgattgggatcagagcagcacagcrctatatatcatttatgtgatgtatatgccatgcagaccacctaggtcttgagccattatcagaccaaaccacaagtacagaagattatgtgcaagacagcaagccaaagcaayatcatacctcaaactattttgagcttggtcatgcatagtccaggaacayggtymtataagtctctcaatttatgcacacctgcaggaagcaggctggcatggcagatatccaaagactgataaaattttcagacaagaataggatagaggccc

SEQ ID NO: 86952 - DNA, 600 bp, Chicken  19866894388112_3
ccttcaactatctacagagtgcaactctcctgcaaaacagatgacagcttccacagcagtcttctgttcttttctattctttgacctacttatggccacctttatgctttcatctgtgtgaccacagccttagggtatgcaggattttagctgggctgactcctgaccacacagccagcagtaagccatgctccatctagaggtgggctccatgagatctgatcagtcctactcagagagrgggccgaaggaaaacctcttttccstttcatcaatgattgggatcagagcagcacagcrctatatatcatttatgtgatgtatatgccatgcagaccacctaggtcttgagccattatcagaccaaaccacaagtacagaagattatgtgcaagacagcaagccaaagcaayatcatacctcaaactattttgagcttggtcatgcatagtccaggaacayggtymtataagtctctcaatttatgcacacctgcaggaagcaggctggcatggcagatatccaaagactgataaaattttcagacaagaataggatagaggcccagggcatggagaaggccacaggtcctgatatgca

SEQ ID NO: 86953 - DNA, 600 bp, Chicken  19866894388112_4
ctgtgtgaccacagccttagggtatgcaggattttagctgggctgactcctgaccacacagccagcagtaagccatgctccatctagaggtgggctccatgagatctgatcagtcctactcagagagrgggccgaaggaaaacctcttttccstttcatcaatgattgggatcagagcagcacagcrctatatatcatttatgtgatgtatatgccatgcagaccacctaggtcttgagccattatcagaccaaaccacaagtacagaagattatgtgcaagacagcaagccaaagcaayatcatacctcaaactattttgagcttggtcatgcatagtccaggaacayggtymtataagtctctcaatttatgcacacctgcaggaagcaggctggcatggcagatatccaaagactgataaaattttcagacaagaataggatagaggcccagggcatggagaaggccacaggtcctgatatgcaggacctctatatctctagagagatcaagggcagctcagaaacaaaggcagacaagagcattcattacaatctagatgactcagagcaaactctctgggcagaaacaggaaagg

SEQ ID NO: 86954 - DNA, 600 bp, Chicken  19866894388112_5
ctgaccacacagccagcagtaagccatgctccatctagaggtgggctccatgagatctgatcagtcctactcagagagrgggccgaaggaaaacctcttttccstttcatcaatgattgggatcagagcagcacagcrctatatatcatttatgtgatgtatatgccatgcagaccacctaggtcttgagccattatcagaccaaaccacaagtacagaagattatgtgcaagacagcaagccaaagcaayatcatacctcaaactattttgagcttggtcatgcatagtccaggaacayggtymtataagtctctcaatttatgcacacctgcaggaagcaggctggcatggcagatatccaaagactgataaaattttcagacaagaataggatagaggcccagggcatggagaaggccacaggtcctgatatgcaggacctctatatctctagagagatcaagggcagctcagaaacaaaggcagacaagagcattcattacaatctagatgactcagagcaaactctctgggcagaaacaggaaaggggacgtgtttacagggatgtgagtgtttatatcactcttatttgattct

SEQ ID NO: 86955 - DNA, 600 bp, Chicken  19866894388112_6
ccacacagccagcagtaagccatgctccatctagaggtgggctccatgagatctgatcagtcctactcagagagrgggccgaaggaaaacctcttttccstttcatcaatgattgggatcagagcagcacagcrctatatatcatttatgtgatgtatatgccatgcagaccacctaggtcttgagccattatcagaccaaaccacaagtacagaagattatgtgcaagacagcaagccaaagcaayatcatacctcaaactattttgagcttggtcatgcatagtccaggaacayggtymtataagtctctcaatttatgcacacctgcaggaagcaggctggcatggcagatatccaaagactgataaaattttcagacaagaataggatagaggcccagggcatggagaaggccacaggtcctgatatgcaggacctctatatctctagagagatcaagggcagctcagaaacaaaggcagacaagagcattcattacaatctagatgactcagagcaaactctctgggcagaaacaggaaaggggacgtgtttacagggatgtgagtgtttatatcactcttatttgattctgtgt

SEQ ID NO: 86956 - DNA, 600 bp, Chicken  19866894388112_7
cacacagccagcagtaagccatgctccatctagaggtgggctccatgagatctgatcagtcctactcagagagrgggccgaaggaaaacctcttttccstttcatcaatgattgggatcagagcagcacagcrctatatatcatttatgtgatgtatatgccatgcagaccacctaggtcttgagccattatcagaccaaaccacaagtacagaagattatgtgcaagacagcaagccaaagcaayatcatacctcaaactattttgagcttggtcatgcatagtccaggaacayggtymtataagtctctcaatttatgcacacctgcaggaagcaggctggcatggcagatatccaaagactgataaaattttcagacaagaataggatagaggcccagggcatggagaaggccacaggtcctgatatgcaggacctctatatctctagagagatcaagggcagctcagaaacaaaggcagacaagagcattcattacaatctagatgactcagagcaaactctctgggcagaaacaggaaaggggacgtgtttacagggatgtgagtgtttatatcactcttatttgattctgtgtt

SEQ ID NO: 86957 - DNA, 599 bp, Chicken  19866894388119_1
  misc_feature (1)..(117): n is any nucleotide
nnnnnnnnnnnnnnnnnnnnnnnnnnnnnnnnnnnnnnnnnnnnnnnnnnnnnnnnnnnnnnnnnnnnnnnnnnnnnnnnnnnnnnnnnnnnnnnnnnnnnnnnnnnnnnnnnnnnnttttaggagatcctgtgatcagtagaattctgtcaccatcacaaaaacatacttagcatggcatatatttctcatttcagctaataaacctaacatctttgtctggacaacatctcaagcctctttgctaaatgatattactggaagactccttatcattaaaggaattgagatggagtcagrtaatatgtaaattacatagctttttcccataaataagcaaattgatgtttcccagtgtagtaaaacacttcttattggtactgataataccacagtcttgaagaggttatctaaaaaagataaactgagaaaaattggatgcaacatattttcaagtggacatctacataaatgtcttcagatcaggactgtgtttctgaagttactctcctgattatctccacttactgtgctatgtttaacwcagtgttaatgtcttctcatgggcaagaactagctttcttttggagaacactaag

SEQ ID NO: 86958 - DNA, 600 bp, Chicken  19866894388119_2
ctaaatgatattactggaagactccttatcattaaaggaattgagatggagtcagrtaatatgtaaattacatagctttttcccataaataagcaaattgatgtttcccagtgtagtaaaacacttcttattggtactgataataccacagtcttgaagaggttatctaaaaaagataaactgagaaaaattggatgcaacatattttcaagtggacatctacataaatgtcttcagatcaggactgtgtttctgaagttactctcctgattatctccacttactgtgctatgtttaacwcagtgttaatgtcttctcatgggcaagaactagctttcttttggagaacactaagctgagatatattgtctggatactgacgtcagtactccattctcaaacagatattaggttcatggaaccatatgaagtgatcctgaagtgagggcagtaggacttcaacactaattctaaagagcctggtcatattctgtttgttacactacttgttattcctaaacacatttctcagatctgtaggaaatggtcatgggctctttctgagaaaggcttgagcagaggtagataccaccaagctag

SEQ ID NO: 86959 - DNA, 600 bp, Chicken  19866894388128_1
cttttccgtatgtttgaatatagctctgagaatgaatttggtttgttatatcttgtaaataattctctatgttcttgttagtaaagtagtttcatcccactggggagggaaaagacaattgatatatttggttatcatggtgtgccatacaagcctaagattgactagggaacgtttgaagagaaagatgtgatatctttctggggaagaagcagttcagagtgagaggctttgcctgtcaatggtgctgcagccatgtaggtttttagtggtgtgagctcctgttgcgtgtcttgtggytttgggggggttacagaacccctcagctctggggattctccagttttgtgrgaatatcagctttcatcagaaaagcattttcttttctttagtcctcataactgtagaaaaatggtcacaaatgtgaccctgcaggctcagaaacccaaccaaaagaactcaagttgactggaaatttgtctcgtgattaatattggagctgacttgccaatttatactacttgaaaggccgacttaaataacctgtagcatttatatactacccttcagatgtggattgaaaagccctttcagatgtgg

SEQ ID NO: 86960 - DNA, 600 bp, Chicken  19866894388128_2
cttgtaaataattctctatgttcttgttagtaaagtagtttcatcccactggggagggaaaagacaattgatatatttggttatcatggtgtgccatacaagcctaagattgactagggaacgtttgaagagaaagatgtgatatctttctggggaagaagcagttcagagtgagaggctttgcctgtcaatggtgctgcagccatgtaggtttttagtggtgtgagctcctgttgcgtgtcttgtggytttgggggggttacagaacccctcagctctggggattctccagttttgtgrgaatatcagctttcatcagaaaagcattttcttttctttagtcctcataactgtagaaaaatggtcacaaatgtgaccctgcaggctcagaaacccaaccaaaagaactcaagttgactggaaatttgtctcgtgattaatattggagctgacttgccaatttatactacttgaaaggccgacttaaataacctgtagcatttatatactacccttcagatgtggattgaaaagccctttcagatgtggaactctgtccctggcgatatacctgtgatagattgttactgtgaatttcag

SEQ ID NO: 86961 - DNA, 599 bp, Chicken  19866894388133_1
  misc_feature (1)..(93): n is any nucleotide
nnnnnnnnnnnnnnnnnnnnnnnnnnnnnnnnnnnnnnnnnnnnnnnnnnnnnnnnnnnnnnnnnnnnnnnnnnnnnnnnnnnnnnnnnnnnnataggcagtgctcagatcatacttcaaggatctcaaatccagcagtttgcagcagttatcataacagataggcttcacttggtctgtacgtgtcaaactaaaggtcaggattcaagtgcctgcctgcgaccaagctacctttgaaaagacagcccatgaaaagccggggatccccagccttcatacacacaaagctctccgaattawaacaccctccaggtggcaaagcaagctgagtgcctgtgtgccgcgagctctcrctccgcctgaccccagcagccctgcagggagggtctgggagacgctggaggcgtggggcagacatgaggttctggctggcgcttcataggatgaccacggtcctttgggtcaatgctccgcaacacataacctgacttcatctgtggtgtatggccaacaccatccggttacgtaaccatgtagaagttattcaatcttgtttgccttcggcctctgattccaatcaacctgatacgtttggtgtt

SEQ ID NO: 86962 - DNA, 599 bp, Chicken  19866894388133_2
  misc_feature (1)..(40): n is any nucleotide
nnnnnnnnnnnnnnnnnnnnnnnnnnnnnnnnnnnnnnnnataggcagtgctcagatcatacttcaaggatctcaaatccagcagtttgcagcagttatcataacagataggcttcacttggtctgtacgtgtcaaactaaaggtcaggattcaagtgcctgcctgcgaccaagctacctttgaaaagacagcccatgaaaagccggggatccccagccttcatacacacaaagctctccgaattawaacaccctccaggtggcaaagcaagctgagtgcctgtgtgccgcgagctctcrctccgcctgaccccagcagccctgcagggagggtctgggagacgctggaggcgtggggcagacatgaggttctggctggcgcttcataggatgaccacggtcctttgggtcaatgctccgcaacacataacctgacttcatctgtggtgtatggccaacaccatccggttacgtaaccatgtagaagttattcaatcttgtttgccttcggcctctgattccaatcaacctgatacgtttggtgtttgctcactgcagacagctttatgggtgtggaagcgggaagtctgcactctcaa

SEQ ID NO: 86963 - DNA, 599 bp, Chicken  19866894388144_1
  misc_feature (1)..(209): n is any nucleotide
nnnnnnnnnnnnnnnnnnnnnnnnnnnnnnnnnnnnnnnnnnnnnnnnnnnnnnnnnnnnnnnnnnnnnnnnnnnnnnnnnnnnnnnnnnnnnnnnnnnnnnnnnnnnnnnnnnnnnnnnnnnnnnnnnnnnnnnnnnnnnnnnnnnnnnnnnnnnnnnnnnnnnnnnnnnnnnnnnnnnnnnnnnnnnnnnnnnnnnnnnnnnnnnnntgtttgattgggatgaagctggtggtagatttctccagtactaaaagtatgtttaaaatgtggtgaaatggcaaagtaccttttgacagartrtaaagccaaccttacagatgccagaaaaaatgctgggtggactacatgaaatcttaccacactgctgcttgagatcagtgataaaatggttgaaagtgctataagggggaacatacagcaagtatgttgaagtatgtcatatatatrgtatatgataccaaaatcagttcactggtgacagctgcagacactgtcaggcaccatctctaaggatacagaaactgcattggggttaaagaaatgtgcatgacctcgggtactaacaaaatctatacaaagagcacagaacagactgca

SEQ ID NO: 86964 - DNA, 599 bp, Chicken  19866894388144_2
  misc_feature (1)..(207): n is any nucleotide
nnnnnnnnnnnnnnnnnnnnnnnnnnnnnnnnnnnnnnnnnnnnnnnnnnnnnnnnnnnnnnnnnnnnnnnnnnnnnnnnnnnnnnnnnnnnnnnnnnnnnnnnnnnnnnnnnnnnnnnnnnnnnnnnnnnnnnnnnnnnnnnnnnnnnnnnnnnnnnnnnnnnnnnnnnnnnnnnnnnnnnnnnnnnnnnnnnnnnnnnnnnnnnntgtttgattgggatgaagctggtggtagatttctccagtactaaaagtatgtttaaaatgtggtgaaatggcaaagtaccttttgacagartrtaaagccaaccttacagatgccagaaaaaatgctgggtggactacatgaaatcttaccacactgctgcttgagatcagtgataaaatggttgaaagtgctataagggggaacatacagcaagtatgttgaagtatgtcatatatatrgtatatgataccaaaatcagttcactggtgacagctgcagacactgtcaggcaccatctctaaggatacagaaactgcattggggttaaagaaatgtgcatgacctcgggtactaacaaaatctatacaaagagcacagaacagactgcacc

SEQ ID NO: 86965 - DNA, 599 bp, Chicken  19866894388144_3
  misc_feature (1)..(60): n is any nucleotide
nnnnnnnnnnnnnnnnnnnnnnnnnnnnnnnnnnnnnnnnnnnnnnnnnnnnnnnnnnnntgtttgattgggatgaagctggtggtagatttctccagtactaaaagtatgtttaaaatgtggtgaaatggcaaagtaccttttgacagartrtaaagccaaccttacagatgccagaaaaaatgctgggtggactacatgaaatcttaccacactgctgcttgagatcagtgataaaatggttgaaagtgctataagggggaacatacagcaagtatgttgaagtatgtcatatatatrgtatatgataccaaaatcagttcactggtgacagctgcagacactgtcaggcaccatctctaaggatacagaaactgcattggggttaaagaaatgtgcatgacctcgggtactaacaaaatctatacaaagagcacagaacagactgcaccagcttggcagctctgttcacaaaactatccctggtgtgttttccactttacargttcttatacacaacacacgctcagctgcacgtcatgaaaacagctctctgragagctgcaacaygttactggcctaggggtttatttctgtct

SEQ ID NO: 86966 - DNA, 600 bp, Chicken  19866894388144_4
cttaccacactgctgcttgagatcagtgataaaatggttgaaagtgctataagggggaacatacagcaagtatgttgaagtatgtcatatatatrgtatatgataccaaaatcagttcactggtgacagctgcagacactgtcaggcaccatctctaaggatacagaaactgcattggggttaaagaaatgtgcatgacctcgggtactaacaaaatctatacaaagagcacagaacagactgcaccagcttggcagctctgttcacaaaactatccctggtgtgttttccactttacargttcttatacacaacacacgctcagctgcacgtcatgaaaacagctctctgragagctgcaacaygttactggcctaggggtttatttctgtctgaaaagacatacaaaataataattaagtcctgacgtcagggggatgtgaggaggtcaggtaagctaatcagtgggctgccagttggatccttctgaatatatcactctgaaatgggaacaaattgaatggaggttatctaagagacttggataggaaatcaaaatcttatcagcatcagtgctgagataggcaggttttatactgc

SEQ ID NO: 86967 - DNA, 600 bp, Chicken  19866894388144_5
gggggaacatacagcaagtatgttgaagtatgtcatatatatrgtatatgataccaaaatcagttcactggtgacagctgcagacactgtcaggcaccatctctaaggatacagaaactgcattggggttaaagaaatgtgcatgacctcgggtactaacaaaatctatacaaagagcacagaacagactgcaccagcttggcagctctgttcacaaaactatccctggtgtgttttccactttacargttcttatacacaacacacgctcagctgcacgtcatgaaaacagctctctgragagctgcaacaygttactggcctaggggtttatttctgtctgaaaagacatacaaaataataattaagtcctgacgtcagggggatgtgaggaggtcaggtaagctaatcagtgggctgccagttggatccttctgaatatatcactctgaaatgggaacaaattgaatggaggttatctaagagacttggataggaaatcaaaatcttatcagcatcagtgctgagataggcaggttttatactgccaagagagaaatagctaaaaacaactgcagataccatccaaaatgagatgta

SEQ ID NO: 86968 - DNA, 600 bp, Chicken  19866894388144_6
gcaagtatgttgaagtatgtcatatatatrgtatatgataccaaaatcagttcactggtgacagctgcagacactgtcaggcaccatctctaaggatacagaaactgcattggggttaaagaaatgtgcatgacctcgggtactaacaaaatctatacaaagagcacagaacagactgcaccagcttggcagctctgttcacaaaactatccctggtgtgttttccactttacargttcttatacacaacacacgctcagctgcacgtcatgaaaacagctctctgragagctgcaacaygttactggcctaggggtttatttctgtctgaaaagacatacaaaataataattaagtcctgacgtcagggggatgtgaggaggtcaggtaagctaatcagtgggctgccagttggatccttctgaatatatcactctgaaatgggaacaaattgaatggaggttatctaagagacttggataggaaatcaaaatcttatcagcatcagtgctgagataggcaggttttatactgccaagagagaaatagctaaaaacaactgcagataccatccaaaatgagatgtatgtaatgacagct

SEQ ID NO: 86969 - DNA, 600 bp, Chicken  19866894388151_1
ttatatatacattttatttctaactattgattatcaggaaaaaagaaaaatcttttccctttgctcaggcacagaaagctttttttcagaccttttctgtcctaacatatacattagcatatctcttctagtaggagtttgaaattcctggaatttgattttctcactaaagattaagtgagggttccagggtctttgtggtgaaagaacagccatctctctcctctttgccaggaggctgattaggttatacatattttgatgctcagatcaacataagggttcctttagaactcatgyaattcttgactagctctcatataaaataatttcttagacaaggcatctttggcctgttctcatcctggcctcttttgtggcagagtttccttgactatggcacgtataatgtgaaatttgcttatggtgaaaaacacagttcagttctttctttgtttttccaaccaagcaagagaattttaagaaatttgtccaaatttcattctccacacatccctggaaactcaactcaatcacatattgtacagctatgactgtatttcctgataagtgtagtgggagaaacaccgtggttatata

SEQ ID NO: 86970 - DNA, 600 bp, Chicken  19866894388151_2
tatggtgaaaaacacagttcagttctttctttgtttttccaaccaagcaagagaattttaagaaatttgtccaaatttcattctccacacatccctggaaactcaactcaatcacatattgtacagctatgactgtatttcctgataagtgtagtgggagaaacaccgtggttatataaatcactattagttgtcttctaattctttaattatctttatagagcatttgattgcttcagtactgtgtctctaggaaacacaaagtactccaaattaaacactgtccaggatacccatcaytgcttgtaaaaagcagtagctgtgtaagggcaggatagaggatgtggcctaaagttctttgtaggtttcaacacttctaggtaatctgtgttttgtataagtccatactgaagtaattgtaaagctgtggcagcctgcaggtgtaacccatttgtgggtggctacaaacacttaagccagaagaatcaaccccttgctgtgcacatctctggaaatacccactccaggaaatgaaaataaaagtcttctgggcctctgaaatcacaatatcccttaacttttatcttctgaaagcttata

SEQ ID NO: 86971 - DNA, 600 bp, Chicken  19866894388151_3
tacaaacacttaagccagaagaatcaaccccttgctgtgcacatctctggaaatacccactccaggaaatgaaaataaaagtcttctgggcctctgaaatcacaatatcccttaacttttatcttctgaaagcttataagagtgacagtggatttatttcagtcgttagaagtagttttactcatttccacaaatcagcaatgtcagtggttttgctctagtcatttttctgcttggtaccgaactacagattatatatgctctgaatatttagcaagtcacatgtcctcagagccatcrtaatggaaacctttgcttgtacttcagtgaaggaaggaatttgtgtgcatgtgtttyggtattccagaggaggatgaaagatcacttaaacttttcccaagtgaaatctttcctgtatttgcttgctcgtgcaattctcgctatttatatcttattacaytggcacagtggatgtgcatagtcttctttcttattattttttttttctcaaacttgagtctgaaattccagtcctgaaaatgtctggagattttgaactgcttctgtgaagctgcttctttgactacatgaattatgcac

SEQ ID NO: 86972 - DNA, 600 bp, Chicken  19866894388151_4
cactccaggaaatgaaaataaaagtcttctgggcctctgaaatcacaatatcccttaacttttatcttctgaaagcttataagagtgacagtggatttatttcagtcgttagaagtagttttactcatttccacaaatcagcaatgtcagtggttttgctctagtcatttttctgcttggtaccgaactacagattatatatgctctgaatatttagcaagtcacatgtcctcagagccatcrtaatggaaacctttgcttgtacttcagtgaaggaaggaatttgtgtgcatgtgtttyggtattccagaggaggatgaaagatcacttaaacttttcccaagtgaaatctttcctgtatttgcttgctcgtgcaattctcgctatttatatcttattacaytggcacagtggatgtgcatagtcttctttcttattattttttttttctcaaacttgagtctgaaattccagtcctgaaaatgtctggagattttgaactgcttctgtgaagctgcttctttgactacatgaattatgcaccataccgtcactttttctttggtttattccatggttgcacaaaaaaaattggatgat

SEQ ID NO: 86973 - DNA, 600 bp, Chicken  19866894388151_5
agtcgttagaagtagttttactcatttccacaaatcagcaatgtcagtggttttgctctagtcatttttctgcttggtaccgaactacagattatatatgctctgaatatttagcaagtcacatgtcctcagagccatcrtaatggaaacctttgcttgtacttcagtgaaggaaggaatttgtgtgcatgtgtttyggtattccagaggaggatgaaagatcacttaaacttttcccaagtgaaatctttcctgtatttgcttgctcgtgcaattctcgctatttatatcttattacaytggcacagtggatgtgcatagtcttctttcttattattttttttttctcaaacttgagtctgaaattccagtcctgaaaatgtctggagattttgaactgcttctgtgaagctgcttctttgactacatgaattatgcaccataccgtcactttttctttggtttattccatggttgcacaaaaaaaattggatgatttggatgatttcacttgtttgcagacttcaggctgctcagttgccagtcctaagatctactgacatccttctggtttgctgaatgtcagcaggaaagatcttt

SEQ ID NO: 86974 - DNA, 600 bp, Chicken  19866894388170_1
atgtagaaattaataagcagcgcttattgaccatcagcagcacatatggctccacatacactgtgaactataaggctctgaagaagctctgtcacataaaacatgcatgggccagaactattcacacatttcaggtaagaaaacgaagcaaagcaaagctctcaggtggtaaaactttctcgtgctttttgtcttgacaaggcactttattttcacttgaaagtctcaaagcaactgaaattctttgaatgcaggataagtatctccaagttccccgttgttggaagctatcctttttaytttttttattccttactggagacgttcatttgctaaggcattcttaaatgcatttcagggttctgaggaaaaaacggttgtctatgtggttggcaacccaggccgtcagcactggcagcaygtgtacacagccgtgaccagaggacgctgccgtgtctacgttattgctgaagagatgcacctcaggaaagcagtcactaacaataacttccccagaaaaactcgcttacagaggtttttgagagaggcrattgcaaatacaaacagctgtctgacacaaacatcatctcctctgacaaa

SEQ ID NO: 86975 - DNA, 600 bp, Chicken  19866894388170_2
tcacacatttcaggtaagaaaacgaagcaaagcaaagctctcaggtggtaaaactttctcgtgctttttgtcttgacaaggcactttattttcacttgaaagtctcaaagcaactgaaattctttgaatgcaggataagtatctccaagttccccgttgttggaagctatcctttttattttttttattccttactggagacgttcatttgctaaggcattcttaaatgcatttcagggttctgaggaaaaaacggttgtctatgtggttggcaacccaggccgtcagcactggcagcaygtgtacacagccgtgaccagaggacgctgccgtgtctacgttattgctgaagagatgcacctcaggaaagcagtcactaacaataacttccccagaaaaactcgcttacagaggtttttgagagaggcrattgcaaatacaaacagctgtctgacacaaacatcatctcctctgacaaagagctggccaggtcaagagcgtgggactcagcctgtttctttaactcgagatgttcctgacccatcccaacctggaactgacaggattcagcaagaagggtcagcagatctcaataaagag

SEQ ID NO: 86976 - DNA, 568 bp, Chicken  19866894388170_3
gcaggataagtatctccaagttccccgttgttggaagctatcctttttattttttttattccttactggagacgttcatttgctaaggcattcttaaatgcatttcagggttctgaggaaaaaacggttgtctatgtggttggcaacccaggccgtcagcactggcagcaygtgtacacagccgtgaccagaggacgctgccgtgtctacgttattgctgaagagatgcacctcaggaaagcagtcactaacaataacttccccagaaaaactcgcttacagaggtttttgagagaggcrattgcaaatacaaacagctgtctgacacaaacatcatctcctctgacaaagagctggccaggtcaagagcgtgggactcagcctgtttctttaactcgagatgttcctgacccatcccaacctggaactgacaggattcagcaagaagggtcagcagatctcaataaagagcacacgggtcatttgcagcagataagtccatataaaagacaacaaagtcacgcagaggattctgagaatgtaagtatctccttcctttttaaagtat

SEQ ID NO: 86977 - DNA, 600 bp, Chicken  19866894388174_1
cgtcctgcagcgctaatactggcgtcactcaaatattaaaatgcattttgatggcgtggttggtgattcaacctgcaaattactcaagagaaatgggaaagctgacggacataaacacatttgtctggaaatagtcaccatctgtttgcaaaggttcgcatccagatcattgctgggaaagagagagcaccacaaagaaaaggtaacgaatctgagaccgtgggctgctttgggaacttgctctgcaaagaacacagtatgaaactggaagacccttctccttttggaggctccatttcratcaggatggaagcacagtgcaggagcagagcgctgcccccacccagctctccctgcctcccacaaaaccaaacgtgtcaaaacagcccttcaggatctgtcagggatggcccaggagtacgggatcacacaacaggttaaaccagaccatgcacaagtagcactgtacctccaccagggcagacccaagagcagcaactgctcccgcgtggttccggtgttgggacgtgcagcagcagcagaactccatcacaccaaacacactgctcctctggaaacgtgtcatctctcattggcttt

SEQ ID NO: 86978 - DNA, 600 bp, Chicken  19866894388174_2
ttggctttttgctctgttccaaagctgttttagatcaggccagctaagatgtgcagcatgcgggccagctggtggcccagcttttctgctgcagaatgaccatgcagaggatggccgtggctcggagctgcccgctgcccaacactcacattttagtgaagaaagaggcttccagcagggcctctcgctcacactgctggatctgataagcagcacacctgctgcagcgataaggagctctgctggcgcactgcaaagtcaacacggtaatatcatcgttttggaacagagagctgctgytttgtatggatacagagcactgatctactacagcctgagccctaactctgatcccagactccacagttttcatttcttctactgaaaagctacagagyggaaagaaaaagcaaaccaaacaaggaagaccttgattttctcccacagtaatggttgcgtccctgacgagtaagatttcagtatttcactttttaaagacaaaaaaaacctgaaaaccagttacygaggcattagaatataacacgttcccccctygttttgttgcagtgggggcaggctggctttgctctgcctttgctt

SEQ ID NO: 86979 - DNA, 600 bp, Chicken  19866894388174_3
accatgcagaggatggccgtggctcggagctgcccgctgcccaacactcacattttagtgaagaaagaggcttccagcagggcctctcgctcacactgctggatctgataagcagcacacctgctgcagcgataaggagctctgctggcgcactgcaaagtcaacacggtaatatcatcgttttggaacagagagctgctgytttgtatggatacagagcactgatctactacagcctgagccctaactctgatcccagactccacagttttcatttcttctactgaaaagctacagagyggaaagaaaaagcaaaccaaacaaggaagaccttgattttctcccacagtaatggttgcgtccctgacgagtaagatttcagtatttcactttttaaagacaaaaaaaacctgaaaaccagttacygaggcattagaatataacacgttcccccctygttttgttgcagtgggggcaggctggctttgctctgcctttgcttcccatggccatgacccttttagccactggagcgggtggagcctctccagaacccctgccctggctcaaggagtgacctcgttagggaagctgcagggc

SEQ ID NO: 86980 - DNA, 600 bp, Chicken  19866894388174_4
cagcgataaggagctctgctggcgcactgcaaagtcaacacggtaatatcatcgttttggaacagagagctgctgytttgtatggatacagagcactgatctactacagcctgagccctaactctgatcccagactccacagttttcatttcttctactgaaaagctacagagyggaaagaaaaagcaaaccaaacaaggaagaccttgattttctcccacagtaatggttgcgtccctgacgagtaagatttcagtatttcactttttaaagacaaaaaaaacctgaaaaccagttacygaggcattagaatataacacgttcccccctygttttgttgcagtgggggcaggctggctttgctctgcctttgcttcccatggccatgacccttttagccactggagcgggtggagcctctccagaacccctgccctggctcaaggagtgacctcgttagggaagctgcagggcttattttcccaactgactcgctttgttaataaatcagatccctaaaaaacaaaaacatgacattagaaaattaaattgccacgtttcctcatctccaaacaaacagatgcagcattactttaatgg

SEQ ID NO: 86981 - DNA, 600 bp, Chicken  19866894388174_5
aagtcaacacggtaatatcatcgttttggaacagagagctgctgytttgtatggatacagagcactgatctactacagcctgagccctaactctgatcccagactccacagttttcatttcttctactgaaaagctacagagyggaaagaaaaagcaaaccaaacaaggaagaccttgattttctcccacagtaatggttgcgtccctgacgagtaagatttcagtatttcactttttaaagacaaaaaaaacctgaaaaccagttacygaggcattagaatataacacgttcccccctygttttgttgcagtgggggcaggctggctttgctctgcctttgcttcccatggccatgacccttttagccactggagcgggtggagcctctccagaacccctgccctggctcaaggagtgacctcgttagggaagctgcagggcttattttcccaactgactcgctttgttaataaatcagatccctaaaaaacaaaaacatgacattagaaaattaaattgccacgtttcctcatctccaaacaaacagatgcagcattactttaatggtcctcctaagattaccaaatctcttctgcag

SEQ ID NO: 86982 - DNA, 600 bp, Chicken  19866894388176_1
caggaggacaagctcacatctagaggcctgtattgcatatgtctgttttaaggtgaaacaaatcccacacaaaagtaggagctcagtaaaaggtggtcctgtgtattaaacatggagttcatgttaaagggcatcttcattcttgttgtgactccaccaactgcttcttgtgcacttcatcccttctgttgcattttcactacctctagtgagagggcacctacactaagtggggttttaacccagcatgtttctgtataaactttataggaaacatgatataactaggtgcaaaatatratgagatactatctcttctgagatcagaggcccagctgccatttaacttcagcagttgtccgtagagaaacctgcttagtctgttttatttaggcagatttaggcagaagtaggtgaccatcatctctacagcactgagcattgcttagagaaatcagcctgtgaggcctccctcagacactctgcagaaaaggaacccattgatttaacctacagcaaatattggactggtgttcagagcgtttctcttcaacagaaaaaatgattatgactgcacagagcaaagggaacagcagcatt

SEQ ID NO: 86983 - DNA, 600 bp, Chicken  19866894388181_1
tttgtctggactgactgggagcttccacctcagctgtcagtgttcagcactgtccctggcaatgagagaaatttgtcttctcccatattgccttctgtgcaacagtatgcaatcagttagtcaaaatactgaatggtaaccccaaaaatatgcgcagcatgtgccacgctgcagcccatacagaatggaaattcctctgctgccctcacaagagcattatcccactatgtcggtgtgcccgtttaatctgttttattccctgtatggtttcaaggttggagaacaggctctggaattacwcccccagggacagtggctgacccccataacatgacaaccatctgtggaaattaaatctaggggcaataagcccatgcaatcccgaccaccaaaacgcacatcaaatataagcaattcaagcctaactggaacactggctgaggatccattgcatcaccttgctttacggtaaggactccgctatacagaactgcaataaaattctgattcctgatatgggaaacataaaacaacctgatattattcccagattttcattctgaaatgaaacaccacgctcacagggactgccagcccagc

SEQ ID NO: 86984 - DNA, 600 bp, Chicken  19866894388183_1
gtattcacagcctttttgtcaaagagtatattcccatttaaaatattttcagcagcaatatcagtgaattgctcagcactctttcacttgatgttaaacaaaaagctctgctcataacatgcatctcaaagggacagaacgtgaaaaatatttctctctcacaatcacagaatggcctgggttgaaaaggaccacaatgatcatccagtttcaacccccctgctatgtgcagggtcaccaaccactagaccaggctgcccggagccacatccagcctggccttgaatgcctccaggaacrtgatgatctactaggcttcagtttctctaagaactrtaggcctctcatacatgtaaaatcctccctattgcagttgaactagacagttgacatgcactaaccgttttgacatatcccagacacggatgcttttgtcttctgaattgctgaggatgagctcctgccgagggtgaaagacagcacacgagacattgttgtaatgcccccggcaagtgtcaacctcccaggccttygattctaaccaaaagagaaaaaaaagaggaaaacaacacttaaacacattgcatagcagatgcacag

SEQ ID NO: 86985 - DNA, 600 bp, Chicken  19866894388183_2
tttaaaatattttcagcagcaatatcagtgaattgctcagcactctttcacttgatgttaaacaaaaagctctgctcataacatgcatctcaaagggacagaacgtgaaaaatatttctctctcacaatcacagaatggcctgggttgaaaaggaccacaatgatcatccagtttcaacccccctgctatgtgcagggtcaccaaccactagaccaggctgcccggagccacatccagcctggccttgaatgcctccaggaacrtgatgatctactaggcttcagtttctctaagaactrtaggcctctcatacatgtaaaatcctccctattgcagttgaactagacagttgacatgcactaaccgttttgacatatcccagacacggatgcttttgtcttctgaattgctgaggatgagctcctgccgagggtgaaagacagcacacgagacattgttgtaatgcccccggcaagtgtcaacctcccaggccttygattctaaccaaaagagaaaaaaaagaggaaaacaacacttaaacacattgcatagcagatgcacagcgagcaccttaatgaagcaggctgtatcagctaatt

SEQ ID NO: 86986 - DNA, 600 bp, Chicken  19866894388183_3
gtcaccaaccactagaccaggctgcccggagccacatccagcctggccttgaatgcctccaggaacrtgatgatctactaggcttcagtttctctaagaactrtaggcctctcatacatgtaaaatcctccctattgcagttgaactagacagttgacatgcactaaccgttttgacatatcccagacacggatgcttttgtcttctgaattgctgaggatgagctcctgccgagggtgaaagacagcacacgagacattgttgtaatgcccccggcaagtgtcaacctcccaggccttygattctaaccaaaagagaaaaaaaagaggaaaacaacacttaaacacattgcatagcagatgcacagcgagcaccttaatgaagcaggctgtatcagctaattactagaccattctctgcaatttacatttgtgatctttaactgctagcaaaagcacatccatttttggtggagggcctctgattatggaatcatttccctttcttattccacacgcacatcttcaaaaaaaccccttcagagtggatcttttctattcctacaaaccactgctcagcagtgcatgcaaatcaaaagat

SEQ ID NO: 86987 - DNA, 600 bp, Chicken  19866894388185_1
aagggttaagagctagtaatttgttgcagaatttctgatgggaacagtagcttctactgtcaccacatgaagggtgaaaagaggagaatgaacagctgtgagatgcttaaacagctacagctagatatacaaatctggttcagttattttattgtcaaataagtcagctatatgctaaacagaaaatacagtgacaaaggcgtttactactcattcatatcatcaccaccacacacaaagttacagggagccatatctggttttgtttgtttgcttactactctttgttagatataaaargaaataattaggagaaatactgtattgaatccagacataagggggagtgcagagcctggtatcctacttgcacacataagcatgtactgcttctrtgtttcaagagaaaactctgagagagaaaaagaacagtagataatggaaagtttatttggatatcactatcagcatctgcacactgatgttgaagctgtacaaactatcagcatcctgaaaaacgtacacacaagtgtgcattccctttaacacaagatatatatattcacacaagtatgaatatgagatcagtatgaaggaaac

SEQ ID NO: 86988 - DNA, 600 bp, Chicken  19866894388185_2
ctgtgagatgcttaaacagctacagctagatatacaaatctggttcagttattttattgtcaaataagtcagctatatgctaaacagaaaatacagtgacaaaggcgtttactactcattcatatcatcaccaccacacacaaagttacagggagccatatctggttttgtttgtttgcttactactctttgttagatataaaargaaataattaggagaaatactgtattgaatccagacataagggggagtgcagagcctggtatcctacttgcacacataagcatgtactgcttctrtgtttcaagagaaaactctgagagagaaaaagaacagtagataatggaaagtttatttggatatcactatcagcatctgcacactgatgttgaagctgtacaaactatcagcatcctgaaaaacgtacacacaagtgtgcattccctttaacacaagatatatatattcacacaagtatgaatatgagatcagtatgaaggaaacactttgaaactacaggttttgaatgagtcagtcaaaaatggatagtactcatctgccacagcttccaaacaagcaagaaacaaatgtgtaggtca

SEQ ID NO: 86989 - DNA, 600 bp, Chicken  19866894388188_1
caaggggctgcaaaatgaaaagcccacatgtttttctgacttcctaaatccatatctgagaccacatccagcagcttcccagtgtgatgcctgtgactgacagcaagtgcctgggcagaggggacagggctgctctcccacccctccccagtgtgaatctgcagcgattacaagcagccccttggtgctgcagagccctaactcagaccagctctgacaggggctgcctcctcacagcaaactttgcagaggtaaaaatcagtcttgtatctccctctgaggcagcaagctgaatggcaygtggctggtctctccatcctttaaccccccctccaatgcccagcccaggactgtgctgagctgcaaacacaaaccttctgtgctatcatctttgctaccacatcccgagcgtgcacatcaatggtgcatatcgtcatgattttctgcctgtcacccttggagagctgcccaattagcatggtaacgagggtgttcagctgggtcacttgcttcttgtgatattccttcatggcattctcgtagccttcctccaccctggcgaaggcaatcccaacctcagtcgtccaccaaatctgggtg

SEQ ID NO: 86990 - DNA, 600 bp, Chicken  19866894388189_1
ccagatacagccagatacaaaagtgcaagtgagggtagccctttaattgagcacttcactaaaatagctagacttaatccctgaatggtatcaacagaaacaggttaataagctttgatttgttgcagcaagtctgtcagtacgtattgacagtcccaaacatttagtgtttgtcagtttcccaagaatctgacattcttttcccagtagcaatcatctaatctgctgtaagcttagtgttacataactattttccacttaaggaagataggaaaaaacccacttacaggcaactttacrccagagtattcacacatacagaactctcacaaacccaagaaaaaaagtcagtagttaactaactgtaagatttttctcactccttcagagattctcaggaaagcaggtcattttaatattaaaagaaaaatcttattaagtgcaaggtgttatcacacaatatgaagacatcacagtcacaaattaaaatatgccagatactgctgctgggaaaggactagattaggttcatcatacatccactcagtcatagacaaattgagcaagaacagaacatacagcctggcaagaccgcagtgg

SEQ ID NO: 86991 - DNA, 600 bp, Chicken  19866894388197_1
aatctatgtgaccatctgtacgcatcagccacgagatggaaatgttcaaaacgctaatgtttgacaaagctatcagcaagcgaaagctagaatctcatcatgaaaacccttcagaaatctcaactgtagacatcgcagtccatattacttaggatggtaaaaggactgatttcgacatcgttccgtatcacagagaaatttgagaacgatgatattccatttactcttcactccaccaaaactccctttcaaagcaaatcggtgttggctgaaagcaatattttaccacacagtgaaaarggggtggggggggaaggatctttgggtttgttcactcagccatgggcatcccaaatggcacaggtccacgctgtgtttggraacctcaccayaccasmgcccacctatgccctttgcagcactggggtatcacactgtgcttatgggatagcacctactggggctgtgccacacctgtgcagtggtaaccagaaacatccaagtattctggtcattccctgtgccaaaccctgtgccctcctgccaaactggcatttggggacagcaacgtcaagtggtttcaacaccrccaagtttatg

SEQ ID NO: 86992 - DNA, 600 bp, Chicken  19866894388197_10
ccacttgcagaaattgtccttcatctgagatcctggaatgcaaactcataacctcaggcattcccctccatcagagcatccccaagctgaagtgaagtcgccatccccggaggtgttcgagaaacatgtagatgtggcactgggggacatggatagtgggcacagtgggggtgggttggggttgkactagatgatcttacaggacttttccaaccttaatgattctacagttcaagtgcagctgggatttaatacctccctgtcagggtttgtgatgcccaaagccacagtgcctggcayggtgmgggatgctcagcaccaccggaccagccctgaagggcagctgggatgtggcagggacagttggtgcctgggtgggatatggtgggacacgatgggaacatggctggcacacagctggcacacaactgggacacagctgggacactccatgttggctccactgcctccactggccagagccagagactcaccgaggagttttgctctctgcctgtaaatacctcaaagcacttccctttgatggacgcatttgcagtataaatagtcatgtcctctttatttcactccaaggtttaa

SEQ ID NO: 86993 - DNA, 599 bp, Chicken  19866894388197_11
tgcagaaattgtccttcatctgagatcctggaatgcaaactcataacctcaggcattcccctccatcagagcatccccaagctgaagtgaagtcgccatccccggaggtgttcgagaaacatgtagatgtggcactgggggacatggatagtgggcacagtgggggtgggttggggttgkactagatgatcttacaggacttttccaaccttaatgattctacagttcaagtgcagctgggatttaatacctccctgtcagggtttgtgatgcccaaagccacagtgcctggcayggtgmgggatgctcagcaccaccggaccagccctgaagggcagctgggatgtggcagggacagttggtgcctgggtgggatatggtgggacacgatgggaacatggctggcacacagctggcacacaactgggacacagctgggacactccatgttggctccactgcctccactggccagagccagagactcaccgaggagttttgctctctgcctgtaaatacctcaaagcacttccctttgatggacgcatttgcagtataaatagtcatgtcctctttatttcactccaaggtttaattaa

SEQ ID NO: 86994 - DNA, 600 bp, Chicken  19866894388197_2
tgtgaccatctgtacgcatcagccacgagatggaaatgttcaaaacgctaatgtttgacaaagctatcagcaagcgaaagctagaatctcatcatgaaaacccttcagaaatctcaactgtagacatcgcagtccatattacttaggatggtaaaaggactgatttcgacatcgttccgtatcacagagaaatttgagaacgatgatattccatttactcttcactccaccaaaactccctttcaaagcaaatcggtgttggctgaaagcaatattttaccacacagtgaaaagggggtmgggggggaaggatctttgggtttgttcactcagccatgggcatcccaaatggcacaggtccacgctgtgtttggraacctcaccayaccasmgcccacctatgccctttgcagcactggggtatcacactgtgcttatgggatagcacctactggggctgtgccacacctgtgcagtggtaaccagaaacatccaagtattctggtcattccctgtgccaaaccctgtgccctcctgccaaactggcatttggggacagcaacgtcaagtggtttcaacaccrccaagtttatgcagcgt

SEQ ID NO: 86995 - DNA, 600 bp, Chicken  19866894388197_3
gaaagctagaatctcatcatgaaaacccttcagaaatctcaactgtagacatcgcagtccatattacttaggatggtaaaaggactgatttcgacatcgttccgtatcacagagaaatttgagaacgatgatattccatttactcttcactccaccaaaactccctttcaaagcaaatcggtgttggctgaaagcaatattttaccacacagtgaaaagggggtggggggggaaggatctttgggtttgttcactcagccatgggcatcccaaatggcacaggtccacgctgtgtttggraacctcaccayaccasmgcccacctatgccctttgcagcactggggtatcacactgtgcttatgggatagcacctactggggctgtgccacacctgtgcagtggtaaccagaaacatccaagtattctggtcattccctgtgccaaaccctgtgccctcctgccaaactggcatttggggacagcaacgtcaagtggtttcaacaccrccaagtttatgcagcgtctcagttatcttttaatggtgtgcttactttttctcagaagagagtggtgtctaatcacgtcaggattttcttaa

SEQ ID NO: 86996 - DNA, 600 bp, Chicken  19866894388197_4
tctcatcatgaaaacccttcagaaatctcaactgtagacatcgcagtccatattacttaggatggtaaaaggactgatttcgacatcgttccgtatcacagagaaatttgagaacgatgatattccatttactcttcactccaccaaaactccctttcaaagcaaatcggtgttggctgaaagcaatattttaccacacagtgaaaagggggtggggggggaaggatctttgggtttgttcactcagccatgggcatcccaaatggcacaggtccacgctgtgtttggraacctcaccayaccasmgcccacctatgccctttgcagcactggggtatcacactgtgcttatgggatagcacctactggggctgtgccacacctgtgcagtggtaaccagaaacatccaagtattctggtcattccctgtgccaaaccctgtgccctcctgccaaactggcatttggggacagcaacgtcaagtggtttcaacaccrccaagtttatgcagcgtctcagttatcttttaatggtgtgcttactttttctcagaagagagtggtgtctaatcacgtcaggattttcttaagcaattccgcc

SEQ ID NO: 86997 - DNA, 600 bp, Chicken  19866894388197_5
tcatgaaaacccttcagaaatctcaactgtagacatcgcagtccatattacttaggatggtaaaaggactgatttcgacatcgttccgtatcacagagaaatttgagaacgatgatattccatttactcttcactccaccaaaactccctttcaaagcaaatcggtgttggctgaaagcaatattttaccacacagtgaaaagggggtggggggggaaggatctttgggtttgttcactcagccatgggcatcccaaatggcacaggtccacgctgtgtttggraacctcaccayaccasmgcccacctatgccctttgcagcactggggtatcacactgtgcttatgggatagcacctactggggctgtgccacacctgtgcagtggtaaccagaaacatccaagtattctggtcattccctgtgccaaaccctgtgccctcctgccaaactggcatttggggacagcaacgtcaagtggtttcaacaccrccaagtttatgcagcgtctcagttatcttttaatggtgtgcttactttttctcagaagagagtggtgtctaatcacgtcaggattttcttaagcaattccgcctcggg

SEQ ID NO: 86998 - DNA, 600 bp, Chicken  19866894388197_6
catgaaaacccttcagaaatctcaactgtagacatcgcagtccatattacttaggatggtaaaaggactgatttcgacatcgttccgtatcacagagaaatttgagaacgatgatattccatttactcttcactccaccaaaactccctttcaaagcaaatcggtgttggctgaaagcaatattttaccacacagtgaaaagggggtggggggggaaggatctttgggtttgttcactcagccatgggcatcccaaatggcacaggtccacgctgtgtttggraacctcaccayaccasmgcccacctatgccctttgcagcactggggtatcacactgtgcttatgggatagcacctactggggctgtgccacacctgtgcagtggtaaccagaaacatccaagtattctggtcattccctgtgccaaaccctgtgccctcctgccaaactggcatttggggacagcaacgtcaagtggtttcaacaccrccaagtttatgcagcgtctcagttatcttttaatggtgtgcttactttttctcagaagagagtggtgtctaatcacgtcaggattttcttaagcaattccgcctcgggg

SEQ ID NO: 86999 - DNA, 600 bp, Chicken  19866894388197_7
acagtgaaaagggggtggggggggaaggatctttgggtttgttcactcagccatgggcatcccaaatggcacaggtccacgctgtgtttggraacctcaccayaccasmgcccacctatgccctttgcagcactggggtatcacactgtgcttatgggatagcacctactggggctgtgccacacctgtgcagtggtaaccagaaacatccaagtattctggtcattccctgtgccaaaccctgtgccctcctgccaaactggcatttggggacagcaacgtcaagtggtttcaacaccrccaagtttatgcagcgtctcagttatcttttaatggtgtgcttactttttctcagaagagagtggtgtctaatcacgtcaggattttcttaagcaattccgcctcggggtgaagactgtttttttgtaccgcagcaatggatctatatggctttaagaggcagattctcccaacactcagggcctggcttagaggaggctcctgaactgattctgtcaagaagggtttgcattttctccagggctagttaggaaaggggaaaaactaaatgcgttttgacatttgtatttcgagtgttat

SEQ ID NO: 87000 - DNA, 600 bp, Chicken  19866894388197_8
tgtgcagcaaggtgacaccgctctgtccaaccaggggggacgctgtcctcagctggtgtgtgctcatcccagggttgtccaaggatggtcagttccctgagccccgttgttaatactgtcagccatttaattaggcataattagccactgctgggggatcagcccctcatctcctctgagcatgtgtgggcagcaaaacccaatgttcccagcctgtgcggtgagctcctgggtagcttggatttcccataaggttcccctgcccgacgaaaaccttcacatcacatccaggtcttctcyctccttgtttaatcccaatcagtcccagcacctcccactccccagcctgtaatttaccctgcacacaagcactgagccgctgtgatccttcctccccaggggtcacggcattcatcactgccactgcgagcaggaggcattggccaccacaagattgatggagtccctggagtgtaggtgggacagcgaggtggcacacagcacgactccaaaaacactgctaacatccatttcatggcactgatggatctgaatactggctgtgttcctgttatgaatagtttactaaatttatgggac

SEQ ID NO: 87001 - DNA, 600 bp, Chicken  19866894388197_9
tagaatcaccaaggttggaagagcagtgaagtgccagctatggggtgtgtaccaacagactgaaagaaacttaaggctgagggtttgggactctcattgtcactgtatccaaacgccacttgcagaaattgtccttcatctgagatcctggaatgcaaactcataacctcaggcattcccctccatcagagcatccccaagctgaagtgaagtcgccatccccggaggtgttcgagaaacatgtagatgtggcactgggggacatggatagtgggcacagtgggggtgggttggggttgkactagatgatcttacaggacttttccaaccttaatgattctacagttcaagtgcagctgggatttaatacctccctgtcagggtttgtgatgcccaaagccacagtgcctggcayggtgmgggatgctcagcaccaccggaccagccctgaagggcagctgggatgtggcagggacagttggtgcctgggtgggatatggtgggacacgatgggaacatggctggcacacagctggcacacaactgggacacagctgggacactccatgttggctccactgcctccactggccagagcca

SEQ ID NO: 87002 - DNA, 600 bp, Chicken  19866894388199_1
accagcagttaaatttcagatgtcagatccttaatattttagaaattacatcggttttggtaatatggtgaattaaattgttctcttgtttttcaaatttgaccttattgctttaatgatgtagatttttttttttttccagaatctgcctagcaacaaaagatgctctctcgccctctagtggaagataataacatcgttgtttttcctttgcatctgtaaaccatcaggtaatgcaatcagaggctgaaaccttttcccagcaagaatatacgataatttgtttactgtacggcatamatgtaatatgaatactgttgtaatgggatattaatgttttttttctgcaagtgcactgtttttaaagtgatcctaaatgacatgaattagatatctacacacatttttaaataacaaaaaaggcccagtagctgatattaaaaagaagttctaatcacagaagtaatatacagcatcttttgaacatagaagcagcttgcatgttggtatttgccagtctgatcccagatacaaaaagcacgcgcccaaatgataaacttcattttaatccaaatgcttgcagtatttctgatgttcacc

SEQ ID NO: 87003 - DNA, 599 bp, Chicken  19866894388204_1
  misc_feature (1)..(101): n is any nucleotide
nnnnnnnnnnnnnnnnnnnnnnnnnnnnnnnnnnnnnnnnnnnnnnnnnnnnnnnnnnnnnnnnnnnnnnnnnnnnnnnnnnnnnnnnnnnnnnnnnnnnntcctgtcattgggcactgacaaaaatagcctgatccaatacctttttggaccctccctttagatatttataagcattaataagatcatctctcagtattctcttctcaaggctaatcagtctcaagtctttaaacctgtcctcataagagagatactccgggcccataatcacctttgtcctctgttgcactctctctrgaagttccctgtctttcttgaattgaggagcctagacacagtaccccttatgtggcctcaatagggcagaatagagggcaaggataaccttccttgacctgctttccataatctttttagagcaccccaagataccattggtcttctttgtcacaagggcatgctgctagctcatggtcaatctgctattactcaggtccttctccccatagatcctttctagcaggtcagtttgcatcagatttgaccaaacattctcagttacttacatatgtgactgaaaaattctcagggttttt

SEQ ID NO: 87004 - DNA, 600 bp, Chicken  19866894388207_1
agctgagtttatgggctgcatgtggactatttaagaacattgtattgaaagttcagagcaaatgcttaccttctatcaaaggcacttgaaaaagcgccagagaaagttggcatggcttaacagcaggataatgggtgtagttaaaagcaagaattagtccttaaaaagctgagatttgagtgagaaggcaaagataataaatacagacaagttgaacctaagagtacaataaagccgttcgaaaaagatgtttctcaaacttgccgcatgcacaaaacaattcctttttcagacttgccrgcagcaagaagccagccagagaaatctgtctggctggtaggtgatcaggttacaaaaggagttttcaaggaggtaaaaccataggagaaaacaaaactgtatcagcgttgactgtaatggctatgtcagaacgctgcttcctggggggcttgctggagagtgaatcacaatggggagctttgaagacatagttcaaatggcaacttattatcactcwtttttttttgctagcatcatagtctttcaaaaactctgtaagaagttatagtggagtagttagactttggactttgtgcagaa

SEQ ID NO: 87005 - DNA, 537 bp, Chicken  19866894388207_2
ctaagagtacaataaagccgttcgaaaaagatgtttctcaaacttgccgcatgcacaaaacaattcctttttcagacttgccrgcagcaagaagccagccagagaaatctgtctggctggtaggtgatcaggttacaaaaggagttttcaaggaggtaaaaccataggagaaaacaaaactgtatcagcgttgactgtaatggctatgtcagaacgctgcttcctggggggcttgctggagagtgaatcacaatggggagctttgaagacatagttcaaatggcaacttattatcactcwtttttttttgctagcatcatagtctttcaaaaactctgtaagaagttatagtggagtagttagactttggactttgtgcagaaaaaaagtatgctggaactctgtagctggaaggcaacaagtattggagtaacataaaggaaaaaaaaattccacatcagctacaagtctctgtgatcacagtaagcctgatattttctattgagtattagtttctgttaggaagaagggaaaaaa

SEQ ID NO: 87006 - DNA, 599 bp, Chicken  19866894388214_1
  misc_feature (1)..(29): n is any nucleotide
nnnnnnnnnnnnnnnnnnnnnnnnnnnnntatgttgacaaaagcagatttctatcaacaaagttttggagcacatctgaggtatgaaactcataacctcctggctcccagcttaatgcaccttccagcttaatgcactttcccttaggccaaagggcattccaatatgcacaagctttcctgtgtcctgacaggcttgagttccatgttttccaaataagcacagcacaggagtttgtgaagtgcaatagaaaagttcagaaaataataaacccatgtgcaagggcttttctctgtgaaragactgcatagcttttccctgagcatcaaagaccttacaagcattgttgtttgccctctgaataggaaaacaaagatggggcattgaataatctcaccctcyccatactgctcttgtcagtcagtctaggccagtttccctactccttgctgcatgtaaaagcagarttcacctgtggactaggagttacagtcttgctgtrtaagaaagcaagtaacaaacaagatgtttctgctttttcacccttttcttatgggagaaggaagacaacatgccccttcatataacactctgagaat

SEQ ID NO: 87007 - DNA, 600 bp, Chicken  19866894388214_2
gctcccagcttaatgcaccttccagcttaatgcactttcccttaggccaaagggcattccaatatgcacaagctttcctgtgtcctgacaggcttgagttccatgttttccaaataagcacagcacaggagtttgtgaagtgcaatagaaaagttcagaaaataataaacccatgtgcaagggcttttctctgtgaaragactgcatagcttttccctgagcatcaaagaccttacaagcattgttgtttgccctctgaataggaaaacaaagatggggcattgaataatctcaccctcyccatactgctcttgtcagtcagtctaggccagtttccctactccttgctgcatgtaaaagcagarttcacctgtggactaggagttacagtcttgctgtrtaagaaagcaagtaacaaacaagatgtttctgctttttcacccttttcttatgggagaaggaagacaacatgccccttcatataacactctgagaatcataagtttggagtatatactaaggtcaaagaacaaatgcaatgagagttgttaaaaatcctgtaaagatcttcacttagaaaaacaattggaatctgttctc

SEQ ID NO: 87008 - DNA, 600 bp, Chicken  19866894388214_3
gcacaagctttcctgtgtcctgacaggcttgagttccatgttttccaaataagcacagcacaggagtttgtgaagtgcaatagaaaagttcagaaaataataaacccatgtgcaagggcttttctctgtgaaragactgcatagcttttccctgagcatcaaagaccttacaagcattgttgtttgccctctgaataggaaaacaaagatggggcattgaataatctcaccctcyccatactgctcttgtcagtcagtctaggccagtttccctactccttgctgcatgtaaaagcagarttcacctgtggactaggagttacagtcttgctgtrtaagaaagcaagtaacaaacaagatgtttctgctttttcacccttttcttatgggagaaggaagacaacatgccccttcatataacactctgagaatcataagtttggagtatatactaaggtcaaagaacaaatgcaatgagagttgttaaaaatcctgtaaagatcttcacttagaaaaacaattggaatctgttctctgtatcttttcctacaaggtcaatccaagccttggctcaagctgcagttctgtagtcactgtgtg

SEQ ID NO: 87009 - DNA, 600 bp, Chicken  19866894388214_4
ccatgttttccaaataagcacagcacaggagtttgtgaagtgcaatagaaaagttcagaaaataataaacccatgtgcaagggcttttctctgtgaaragactgcatagcttttccctgagcatcaaagaccttacaagcattgttgtttgccctctgaataggaaaacaaagatggggcattgaataatctcaccctcyccatactgctcttgtcagtcagtctaggccagtttccctactccttgctgcatgtaaaagcagarttcacctgtggactaggagttacagtcttgctgtrtaagaaagcaagtaacaaacaagatgtttctgctttttcacccttttcttatgggagaaggaagacaacatgccccttcatataacactctgagaatcataagtttggagtatatactaaggtcaaagaacaaatgcaatgagagttgttaaaaatcctgtaaagatcttcacttagaaaaacaattggaatctgttctctgtatcttttcctacaaggtcaatccaagccttggctcaagctgcagttctgtagtcactgtgtgctaacctaggtgtgaactccaatcaagaggagtga

SEQ ID NO: 87010 - DNA, 600 bp, Chicken  19866894388216_1
tagtttctgggaaaatgacttttccaccatatgcagtctttgtattaaaattctgtgtggaaagagcagcatatgtagtctagtggctctagtcttggagaagcattagtagttcttccacaccacagtttagtcttgtgagaccactggattggagtagataaatgcaatgcctgctgcctcaaatagcacagtgagctcatggtagtgtactgtgggattagtgcagcaacctgggtgcttttgtccagtgtcacacctaccttctgttcccttctttacatttcatttcaaacagcwcctacagctatttaattttttcttagtacaagaagaaagtaattctgattcaggttaaktataactgatcttgagagctgaatcactgcagacctttccagagctagagcaggaggtgaatgggaaatcccatgtgccagggaacagcagtgagacaagtacaagaacaagtgagtggggcagaaaatgacttttgttctgtgataactagtgagagagtaaaaggaagtaaggagctgagagtattaaccttcattataatggaatatgtttgcagagagatcttccagtattttctgt

SEQ ID NO: 87011 - DNA, 600 bp, Chicken  19866894388216_2
gaaagagcagcatatgtagtctagtggctctagtcttggagaagcattagtagttcttccacaccacagtttagtcttgtgagaccactggattggagtagataaatgcaatgcctgctgcctcaaatagcacagtgagctcatggtagtgtactgtgggattagtgcagcaacctgggtgcttttgtccagtgtcacacctaccttctgttcccttctttacatttcatttcaaacagcwcctacagctatttaattttttcttagtacaagaagaaagtaattctgattcaggttaaktataactgatcttgagagctgaatcactgcagacctttccagagctagagcaggaggtgaatgggaaatcccatgtgccagggaacagcagtgagacaagtacaagaacaagtgagtggggcagaaaatgacttttgttctgtgataactagtgagagagtaaaaggaagtaaggagctgagagtattaaccttcattataatggaatatgtttgcagagagatcttccagtattttctgtgctgcaagaaacaacctatactcagtctctggataaaatggcatttggccatgcctgag

SEQ ID NO: 87012 - DNA, 571 bp, Chicken  19866894388218_1
cttttaagcttcacaatcaaccatagatcccctttggttatatttctgctatgttcgtgtggccaacagaaagagccagacacctaataggaccattaggatcacacaggcttgcctttttcaagccagtaaggctttacctagcattttctgcactgaggttataatttctatttgagtttaaagtgtatatttcagaacaaatacctacttatgacttaaaagcattaggtgtgagaaaatgcaccaaatccagatccaactttcttcaaagattatgtagtgttcctttaaaaaaawtgtgcctcatttttcatctgtttgtctcattccagctttcaacaatttgacctcaatattattttttttctggtaaatcagagtatgctggaacctgaaatatttttccatgtaagcatttctgggctggacttaattcacttctaaatctttgtctgaataaataaaatagactaacattcttaaatcttaatctgcaaggtctgttttacggacactgagtcatgcttataaacctttcctgaattgctccagtttcttaatgatcttt

SEQ ID NO: 87013 - DNA, 537 bp, Chicken  19866894388223_1
gctgtgactcaacaattcccatacaccatccctcacacctataggactgatgtctctttacaacctcggatgatgtgaccccagccatcaacttcagcagtcatcatcctcatggctgcaaggatttaactcacatctaatctgaactgatttttggccatttaagttcattacttgaagtccttcttcacacagactcaaagaacaggagattctcctctcctttcatcaggttttatgagactgtcatcatcccaacttcaggctttttttcctttagtctgaatagccataatccaytcaacattcccatgcagctcaattcttcttctagacctccctgaccattcgtctttggtttacccagttgcctcacgttttcctccaaatacagtgcccagaaacaatgcagtgctccagctttagtggtatcagtgctgaagagaaggaccactttgtatgtcttgcaaagatatatgcacagacagtgagagtaaaaagactttcactttgtgcactggcatacgtgaacgtatg

SEQ ID NO: 87014 - DNA, 600 bp, Chicken  19866894388224_1
gtgtcagatgaaactaataatgattacaatgccaaattattcttacattcaaacaagaggagctgtgataagaagcatagagaaagattaagtctacaaatccatttttctcttagttcagttgctgcaagatgggaataaatgcatgtatcctaaagaaaagttttgtctccaagatacctcctggccagatataggttttaagaccaactaacttgtttagtgtatagtatagtataatagaacccaactctgtcgtaacatcctgccaagcccattaaaggcatttcagacctaatwtgtcctccggaggagtacctaactgtaaagaccacaattaaaattgaagctgccactccctatttcctccagatttgaccagaaagtaatcttcctatgcaggtagttgtaatcagatgacaaaygtgtctgtgaaacatgtagatttatggtgaaattgtcagaagtttcacaaaactaagcaggaggaagttttccactctaaaattgtcacaagagtttttgtaggttttgtgtgcttgaactagtactgacacatgaaaaatatcacctgtaaggcctgggtcagcctcatatgtc

SEQ ID NO: 87015 - DNA, 600 bp, Chicken  19866894388224_2
tgcaagatgggaataaatgcatgtatcctaaagaaaagttttgtctccaagatacctcctggccagatataggttttaagaccaactaacttgtttagtgtatagtatagtataatagaacccaactctgtcgtaacatcctgccaagcccattaaaggcatttcagacctaatwtgtcctccggaggagtacctaactgtaaagaccacaattaaaattgaagctgccactccctatttcctccagatttgaccagaaagtaatcttcctatgcaggtagttgtaatcagatgacaaaygtgtctgtgaaacatgtagatttatggtgaaattgtcagaagtttcacaaaactaagcaggaggaagttttccactctaaaattgtcacaagagtttttgtaggttttgtgtgcttgaactagtactgacacatgaaaaatatcacctgtaaggcctgggtcagcctcatatgtctttgaaaaggagtgaataaagaagaacacaggggagagttccagggttttccttgaaaacaaaccttcttctccatcctcctgaacccaacaccaaacccaaaagatgaaaaaaaaaagccctac

SEQ ID NO: 87016 - DNA, 600 bp, Chicken  19866894388226_1
ggtaaaattggttgtaagatacacaccgaaggtcctggaagaaatggagtcaagatttgaaaaaatgagatcagcgaaacgcaggcagcaaaactaacattgaatgcagtaacttgaaagaaatgtatgccctttacattgtgtagtttggtttgactcagtcaatgcaatgcccagagtacataagttactgtcattttcataggattgcagaatgagttaggttgcaaaggactcttggggatgacatagcccaagtcccctgctcaggggacggtcagctactgcaggttgtttagrgctgtgacaagttgggcctygagcatctcgaaggatggaaactccacaagatctccgggcaacttgttctagtgttttgatctcccttgtgctaaaaagatatgtttttctgtttaaatggagctgcttacattatagtttacagctgttgcctcttgccctgtcactgggtactcctgagaagagtctgttttttcttcttttgttttacttctttcatatcaggcatttacatatgttgttaagaacacccttgagccttctcttctccaagctagacaatctcagttgtctcagcct

SEQ ID NO: 87017 - DNA, 600 bp, Chicken  19866894388226_2
acacaccgaaggtcctggaagaaatggagtcaagatttgaaaaaatgagatcagcgaaacgcaggcagcaaaactaacattgaatgcagtaacttgaaagaaatgtatgccctttacattgtgtagtttggtttgactcagtcaatgcaatgcccagagtacataagttactgtcattttcataggattgcagaatgagttaggttgcaaaggactcttggggatgacatagcccaagtcccctgctcaggggacggtcagctactgcaggttgtttagrgctgtgacaagttgggcctygagcatctcgaaggatggaaactccacaagatctccgggcaacttgttctagtgttttgatctcccttgtgctaaaaagatatgtttttctgtttaaatggagctgcttacattatagtttacagctgttgcctcttgccctgtcactgggtactcctgagaagagtctgttttttcttcttttgttttacttctttcatatcaggcatttacatatgttgttaagaacacccttgagccttctcttctccaagctagacaatctcagttgtctcagcctctccttgtttgtcgaatgtt

SEQ ID NO: 87018 - DNA, 600 bp, Chicken  19866894388226_3
ctcttgccctgtcactgggtactcctgagaagagtctgttttttcttcttttgttttacttctttcatatcaggcatttacatatgttgttaagaacacccttgagccttctcttctccaagctagacaatctcagttgtctcagcctctccttgtttgtcgaatgttccaatcacttaaatcaactttctggcccttctctggacatgatcttgtatgcctatgtctgtcttgcactggggaacctgaaggtggtcacatcaattatgtttcctaaaggctgagtggaagagaagcatyacttcccttgacttgctgcagaccagtaggccgttggccttctttgctccagtgatacatcagtgacttacaatcaatttggtatctttgtctgcaagactgttttccagctggtcagccaccagcctgtgctggtgtagattgtacctctccaggtgtaagacttgcactttcttttgttaaaacattgagcttcttgattgttcatttctgcagcctcctaaggtttgtcagaatggcatacaggaagtgtattctgtcccatcaccccattattaatctgttaaacactatggaccc

SEQ ID NO: 87019 - DNA, 600 bp, Chicken  19866894388232_1
ttctgtacttcagtgaaaatgaactgcaaaggcaattagcaggtcaagctaagccaacccatggaaacagaacagtcagctataagctgttaggtcattttgcagtttccttaggagtgatgcatacctcatgggtacctcattaccctcatgggtaagattttcaagaattaaatagctgaaaggaatttcagtataactgaaaggcttacatttgtctaggtttactatagggcttaatcagatagaggtaataaaaagattacttgcattttaattctactacgtgtctattattcygtgacagagtaatgaattgggacattctgattatgtaggcaaagtaggattcttcagtccttttcctgacaaagttcattacaagttctccaattcctaccccaagatctatgctatctttagttacttcatccaatgtacactctcattcctaagaagttttgtcatctaaggtatactgcagtcttttctgacagtgtttgtagaagtctttgagaggtgagtagtctcatgtgaccattatcagctcttttgactctgaacatcaccttctatctctgcctctacttttgacagtgc

SEQ ID NO: 87020 - DNA, 600 bp, Chicken  19866894388239_1
agaaatcagaaatatttacaaagcatgtagatccatcctgaacaaaagactgcatgttgttttaattggtaatactcgcactccaggacactccttatatttctagataacaaatatctagaagggaagtactattgctactactatttgatggtattgtgtccatttgttgactttcttgcaagtcccaaaggaaaaaaaaaatactcaatttgtaacagtttgtagtttctgaagatggaaagtatgttcaagagaaggttccaaagtagcagttgaaggaaacctcctcttgatatwcttgataatgggggatggaggaaaagtaaggtggaaataatgatgtctttagaaagacataaagatagaagattcttcatatgaatttaggaattaaaagcaggtgaaatcatctaaatgtaaagaaaaagcttaatatatactgagtgaaaagtgcagcaaatgagaaggactgaaccacattttatgaatacagtatcgaagctgataaaatttcaacttatctacctggaaggataaatcacgaggaagaaattcatttaataataagagaaaagactgtgataagacattctagat

SEQ ID NO: 87021 - DNA, 600 bp, Chicken  19866894388240_1
tagtaaaatagaaaatcaaaatgtcagtatttacaatcacttcctaagggtattcccattaaaaaaaaagtagaaaactaagacattatcatccttagagactcatccattattctgttaccactttgtttccacagttgcctaacatctgcataatacaacttgattttttcccaactttttcttttgaaatcaatgagaaaggtatgtgcattaatgccattaagacatcaaactctgtttgcattatatcatttggaaagtacaagctcatagaatcatagatccacttcacaaaayttaaaaattcataggaaataatcttggaagtctaacaatctaaaaggagtaaggagcagcctaaaatctgctctatgtacagaacatcaagggagtaagatgcttctcagaaaccatcagttacctaatgcaaaccaaagacaacaataaggacaatctacctgaattgctacataagggcaagtttatccttcatggaagaatttcagactggaaattcttacaaagaacatcctaaatgcaacagaaagtaatgtctgaaatgatgcataggcctgtcagctacatcaaaacagccaa

SEQ ID NO: 87022 - DNA, 600 bp, Chicken  19866894388244_1
ggtctccagctacagcatttaccagcaagaaacggttatctggctaaccacacataccagctctgagtttacgtaatgaaaaaaatcttcacagtccaacacagttttctttccttttcgacaagtcacaatcagagtggatgctgggagccccaccagaatccttaggcagggaagagaaaaacaaaaccaaagttgtcatcaagatgcgagtccgtgctctcggagcacatgactttgatatctggggcagtctgtgagcatgtcaaacacaacagatctcatacatctggacagaarccatacaaggaattttcccagttgctcagaaaagaatctgcatttcagtgagatgcgcagacctctttcaaaggtgttatcgatggctcaaaagtggaaatgcatgcttatcttagagcagcaagtcatataagcatgcttactgcaggcggtggcattaagagtgttgctggctgtaaacagagtccgcaaatgtgttggccatggaaatccagtccatctaaaggggtaactttaatcccaggatggcacacagaagcatttaaaccatgtgggtgcttgggaacaagcatctcttgc

SEQ ID NO: 87023 - DNA, 600 bp, Chicken  19866894388248_1
gaaataatactattacaaattttaaacctgaagctaaagaatattttaaggttcccatgatcaaataatcaaaaactaaaacaacgtggctggagttgcctgtgatcttttgagaggtgccaaaacagacagaattaatttctctacccagtatctatttctcacaaactaacagtctgtactaatcacagtgccttaagttagtctccaagatcatctacacatttgatcccctactgagactacaactgtgtgaaccagaaagacttttgtgtcctgctctgatactaggaaaccttyttaagatcttgtttttctcactgcttaggaacgacagctttagatttggtagtttcaagaaaaggacaggagacagaattacctgttcccttgtcaagtgtcttcatacctgaaatgtactttgtgcaaccattacagcttttagctgcaatgtcagtatagcttcttttgttgtcagggcttccaactcaaatgcagaggtgagctgttaagtactctcgctgatctgggttacaggctttacctttcctgctgtagtacctcgtctccgttcttaatttcttccatatatcagtctgt

SEQ ID NO: 87024 - DNA, 600 bp, Chicken  19866894388255_1
aaaaaatgcttttgatttcacagacaatgtgaaatgttccaggtttggggcgctaggagaagataaggcagaaagagtaccagaatcagagaaattaagatctcagcagctattttcatttctttctgcagagggcatgcatctgactgctgcttcctcatgaccgccgtgagaacgcaattcattaataacagctctttgggcagtggcttaacttaacttcccagttaagttcagggatatctgggctgcgaaagagttcagaacgaattgtgagactgcacatcaaaaataaggtgygctgctcttgtgaccgaaattaaacggatgtcttaagtgacaagaaagtctgcttttgctgatgctgttgccactcagctcctctgacaggtatagagccaagacagcccattttcccaagacatgggcaattagacaaaatgctgctcttagacctgcagattctctgttgcatacatagtactggcattttgttagcaagggagctctcctatcctacagcagcataaaatgtgtttctctcgcatcactgaggcagaagatgaaatgtggtagtttggtgaagacacgcaactaagc

SEQ ID NO: 87025 - DNA, 600 bp, Chicken  19866894388260_1
acatggacctgttggagcgtgtccagaggaggaccacaaaaatgatccaaggaacagagcacctctcctatgaggatgggctgagagaactggggctgttcagcctggacaagactccaaggtgacctgagaatggcctttcagtatctgaaggggacagacttcagcagggtctgtagtgataggacaaggggaaatggttcctaactgaaagagaggagatttagattggatataaggaagaagtttcctatagtaagggtagtaaggcactggcacaggttacccagagaggtggtsgatgccccatccctggagatattcaaggtcatgctggatggggctctgagcaacctgatggagctgtaggtgtccctgttcattgcgggggggttagactagatggcctttaggggtgccctccaactcaaacaattctgtgattctgtgtatatactgagtaacatctccaaaaacagtttgtgcttgtgtacatgccagtggcagctgctctgtgccgtgcacactggaggtttccaggctgggttggagcacgtggctgcacaggacacttgcttctccagtatgtgttggtcctgg

SEQ ID NO: 87026 - DNA, 523 bp, Chicken  19866894388288_1
cgtcctaaggcggagtgttgtaccgtgacctcccaggatggttcctgatttgtggtatctgtccctgcacatcctgcactcctccgactcagtctgccatttctgtgctgttctcttgggaatgggatatcccactgagctttaatagaaagcccgttttggatgaagccaaggcagtaggaagtgctgggctggaaagagctggagcagctctgtgctgctactggggagtgatggatgtcacagcacaccacagatggccctatcatttaagcaagagctcctttcctttcaccactsctttcattscagtgggactcaaaagcagtgctggaagcaaatgattgtgttcggcatatttctggtccccatgccagcctggcgacttgcctgcagcttgtctgaatctgctcttagttcctttcttcccccaagtgttcaaaaacacttgacttctaacaacagcattgcttgattccttctacagccatgggctattctttccaagtgcctgtgagcaaag

SEQ ID NO: 87027 - DNA, 514 bp, Chicken  19866894388288_2
gcggagtgttgtaccgtgacctcccaggatggttcctgatttgtggtatctgtccctgcacatcctgcactcctccgactcagtctgccatttctgtgctgttctcttgggaatgggatatcccactgagctttaatagaaagcccgttttggatgaagccaaggcagtaggaagtgctgggctggaaagagctggagcagctctgtgctgctactggggagtgatggatgtcacagcacaccacagatggccctatcatttaagcaagagctcctttcctttcaccactsctttcattscagtgggactcaaaagcagtgctggaagcaaatgattgtgttcggcatatttctggtccccatgccagcctggcgacttgcctgcagcttgtctgaatctgctcttagttcctttcttcccccaagtgttcaaaaacacttgacttctaacaacagcattgcttgattccttctacagccatgggctattctttccaagtgcctgtgagcaaag

SEQ ID NO: 87028 - DNA, 599 bp, Chicken  19866894388293_1
  misc_feature (1)..(130): n is any nucleotide
nnnnnnnnnnnnnnnnnnnnnnnnnnnnnnnnnnnnnnnnnnnnnnnnnnnnnnnnnnnnnnnnnnnnnnnnnnnnnnnnnnnnnnnnnnnnnnnnnnnnnnnnnnnnnnnnnnnnnnnnnnnnnnnnnntttggagaatttatgcacctgcttggtaaaaggaagatcttactaaccaaaatttaacagaatcagcagctacaattttaaaaagacagcttccagttttttaacatttgtctgtttgatatctatatttattggcaatattctcaggtcttattaagtctgcagtttartttactgtatttgatcagaaaaaaatattttcaaaaagctgccacatattaagagaagtaacataaaggtgctgcattcaaagtactgaagacatttctttcatgaacactgactgcactacttgytctgcacagcaaaagtatgaccaaatattacacaaatataactttgaaagtgttttttccatagccatatagatgcaaaattctctaaaatgatgattggccagaaaagaggccttatttctacaaatacttccatctgaaaataagtttttggtgcaaagttttgaacaatg

SEQ ID NO: 87029 - DNA, 599 bp, Chicken  19866894388293_2
  misc_feature (1)..(4): n is any nucleotide
nnnntttggagaatttatgcacctgcttggtaaaaggaagatcttactaaccaaaatttaacagaatcagcagctacaattttaaaaagacagcttccagttttttaacatttgtctgtttgatatctatatttattggcaatattctcaggtcttattaagtctgcagtttartttactgtatttgatcagaaaaaaatattttcaaaaagctgccacatattaagagaagtaacataaaggtgctgcattcaaagtactgaagacatttctttcatgaacactgactgcactacttgytctgcacagcaaaagtatgaccaaatattacacaaatataactttgaaagtgttttttccatagccatatagatgcaaaattctctaaaatgatgattggccagaaaagaggccttatttctacaaatacttccatctgaaaataagtttttggtgcaaagttttgaacaatggtggtgagatgaataagtaaagcatataatttacattgtgtataaaagatgcaggaacctggatcctttacaagcagtaagacattttctaaaggttgcgaggcatgttggagtcatatctctagt

SEQ ID NO: 87030 - DNA, 600 bp, Chicken  19866894388293_3
aaaaattaagtaaggaaaccaagatgaaacgacctgctcaaaaccataacaaagccaggagcagtaaccactcagcctactgcaggacaacttatttggatgtaaacactgcagcctttgaagggtttgtgttttcttaacacctgaacacttacaaaaaaaaggatcctctctatgtactcaaatttaaaagaatctgaacagccatggggaaagacatgtagaaaaaatatatcagtgttgtacatacctaagtagactgaagatatgtatgtactcctaaggagaaacaaatgcackcaacgtgatccctcccatctttactaattcaaaccataaaattagtctctgggatatagcctcccattcgtttgcaggtgcagctcccctgaatgctaatgtcaatcacatgtgcttacaaagcaaagcaaattcccctaaattccaataggctggacagaacaacatttcaaaaaagcagctgttgttggtactgttcaagtttattggcaatccttaaaaaactgcaccaaaaatacatactgtatctgatctcaagttaagaaggcttttctctaaagagtactgaatcactttaat

SEQ ID NO: 87031 - DNA, 600 bp, Chicken  19866894388327_1
caacaatctcaggcaccatttctcatggaacaccgaggaggagaaatcttccagctccttgaaaaggtaacatgtgccaggacaacccaggatacccttgaataacttctttgatccagaatacagcttagaaaataaaaaagggagtctccctactattgctttgccattcaagacagtgtcattttcacctttcagctatgtaagtgtaagagacggcagcagctgagctgtggtaattaggagggagagatgtgcaggccttgcctcgtgtctttcagttcagatgcagtttacacrttggcaggctttacaccctccaaagaaaacgtgccatctgcatctgctccagcagcccatcctcctttcggaactcttcaaatagctgtggaaaaagcagcactgcctcccttaccctgcgttctgtcaggtcgagacgcagccacaaaaccactcattctcttatctccaggcacactggctctgcacgggtttccaagatatctgctttgaaaagtcttccatcttgtttgagcacctaccaaattaaaagttgcgctgctctctccgctggcagtggggaatgggatgggactgagc

SEQ ID NO: 87032 - DNA, 600 bp, Chicken  19866894388335_1
aattttacttattttcataccttctgtatttaagatcttgactataaactttcattaacataaggatcttgtctcttattttctgttttcctccacaaaccacctacccatgcagcaggagaaaaacaggtcttcagggttttccgcttctgaatactttagagattctgcaggatctattgatttgccctttgtatacttactgaagataggagaaaggaccaccacttctccattatgaaaccactcacctcccctcatttcttatttgattagaaatgccactctgtcatttttccsatgcaacctcatggcaaatgcaaaacttccattcctgtatcctccaccactccaagtctgtccagctaaacctggagtggtttgctggactaagaaggaagctgtgaaaccaagcaagaaaacaaaatgaatattttctcagccatttggtggagttctgacactcttctaaaggtggcactttttttggatagaaaatgagacagtaagtgtggttacaatgctgcctgtgtggtcaagatagtggtttgataagtgtaccagcagaacaagtttgtgcccgaggaacctatcctctcc

SEQ ID NO: 87033 - DNA, 600 bp, Chicken  19866894388340_1
gtgtactgagtgatgttttacagcaaaagatgggtaccaacatgctcgtttgacctacagattcaaaccagcctgcccataacttcaaattcataaatagaaattaaagaaaactagcattttgcaacttcttagccattcctctggttacaaagggcttcacaaggggaacatttactagtaaatattctgtagtacaatataaacatgaatttaaatatcaaaatataaacagctatcagatttctaccattgtgtttgatgagtttgtacactgatcacagaatcacagaatatccyragttggaagggaygcgtaaggatcacyragtccaaccccggctccacacagcagcacccaaacccaaccctgtgtctcagagtggtgccccaatgctccatgagctctggcactcaggaccgtrcctgctgccctgggcagcccgttccatgcccacagccctctgggacacagcctttccctcacccccagctgccctcgcctgacagctctgtrccattcccctaggccctgtcattgcccctctgctcctgtgaggagctgcagctgccatgagccctactctcagcctgctctgc

SEQ ID NO: 87034 - DNA, 600 bp, Chicken  19866894388340_2
tgtactgagtgatgttttacagcaaaagatgggtaccaacatgctcgtttgacctacagattcaaaccagcctgcccataacttcaaattcataaatagaaattaaagaaaactagcattttgcaacttcttagccattcctctggttacaaagggcttcacaaggggaacatttactagtaaatattctgtagtacaatataaacatgaatttaaatatcaaaatataaacagctatcagatttctaccattgtgtttgatgagtttgtacactgatcacagaatcacagaatatccyragttggaagggaygcgtaaggatcacyragtccaaccccggctccacacagcagcacccaaacccaaccctgtgtctcagagtggtgccccaatgctccatgagctctggcactcaggaccgtrcctgctgccctgggcagcccgttccatgcccacagccctctgggacacagcctttccctcacccccagctgccctcgcctgacagctctgtrccattcccctaggccctgtcattgcccctctgctcctgtgaggagctgcagctgccatgagccctactctcagcctgctctgct

SEQ ID NO: 87035 - DNA, 600 bp, Chicken  19866894388340_3
gttttacagcaaaagatgggtaccaacatgctcgtttgacctacagattcaaaccagcctgcccataacttcaaattcataaatagaaattaaagaaaactagcattttgcaacttcttagccattcctctggttacaaagggcttcacaaggggaacatttactagtaaatattctgtagtacaatataaacatgaatttaaatatcaaaatataaacagctatcagatttctaccattgtgtttgatgagtttgtacactgatcacagaatcacagaatatccyragttggaagggaygcgtaaggatcacyragtccaaccccggctccacacagcagcacccaaacccaaccctgtgtctcagagtggtgccccaatgctccatgagctctggcactcaggaccgtrcctgctgccctgggcagcccgttccatgcccacagccctctgggacacagcctttccctcacccccagctgccctcgcctgacagctctgtrccattcccctaggccctgtcattgcccctctgctcctgtgaggagctgcagctgccatgagccctactctcagcctgctctgctctgtgcccaacaa

SEQ ID NO: 87036 - DNA, 600 bp, Chicken  19866894388340_4
gatgggtaccaacatgctcgtttgacctacagattcaaaccagcctgcccataacttcaaattcataaatagaaattaaagaaaactagcattttgcaacttcttagccattcctctggttacaaagggcttcacaaggggaacatttactagtaaatattctgtagtacaatataaacatgaatttaaatatcaaaatataaacagctatcagatttctaccattgtgtttgatgagtttgtacactgatcacagaatcacagaatatccyragttggaagggaygcgtaaggatcacyragtccaaccccggctccacacagcagcacccaaacccaaccctgtgtctcagagtggtgccccaatgctccatgagctctggcactcaggaccgtrcctgctgccctgggcagcccgttccatgcccacagccctctgggacacagcctttccctcacccccagctgccctcgcctgacagctctgtrccattcccctaggccctgtcattgcccctctgctcctgtgaggagctgcagctgccatgagccctactctcagcctgctctgctctgtgcccaacaaattcagggccctca

SEQ ID NO: 87037 - DNA, 600 bp, Chicken  19866894388340_5
atgggtaccaacatgctcgtttgacctacagattcaaaccagcctgcccataacttcaaattcataaatagaaattaaagaaaactagcattttgcaacttcttagccattcctctggttacaaagggcttcacaaggggaacatttactagtaaatattctgtagtacaatataaacatgaatttaaatatcaaaatataaacagctatcagatttctaccattgtgtttgatgagtttgtacactgatcacagaatcacagaatatccyragttggaagggaygcgtaaggatcacyragtccaaccccggctccacacagcagcacccaaacccaaccctgtgtctcagagtggtgccccaatgctccatgagctctggcactcaggaccgtrcctgctgccctgggcagcccgttccatgcccacagccctctgggacacagcctttccctcacccccagctgccctcgcctgacagctctgtrccattcccctaggccctgtcattgcccctctgctcctgtgaggagctgcagctgccatgagccctactctcagcctgctctgctctgtgcccaacaaattcagggccctcag

SEQ ID NO: 87038 - DNA, 566 bp, Chicken  19866894388340_6
aacttcttagccattcctctggttacaaagggcttcacaaggggaacatttactagtaaatattctgtagtacaatataaacatgaatttaaatatcaaaatataaacagctatcagatttctaccattgtgtttgatgagtttgtacactgatcacagaatcacagaatatccyragttggaagggaygcgtaaggatcacyragtccaaccccggctccacacagcagcacccaaacccaaccctgtgtctcagagtggtgccccaatgctccatgagctctggcactcaggaccgtrcctgctgccctgggcagcccgttccatgcccacagccctctgggacacagcctttccctcacccccagctgccctcgcctgacagctctgtrccattcccctaggccctgtcattgcccctctgctcctgtgaggagctgcagctgccatgagccctactctcagcctgctctgctctgtgcccaacaaattcagggccctcagccactcctcatgcaccttcccctctggaccctttcagcgatgaccctctgccccaccaggcc

SEQ ID NO: 87039 - DNA, 474 bp, Chicken  19866894388340_7
atatcaaaatataaacagctatcagatttctaccattgtgtttgatgagtttgtacactgatcacagaatcacagaatatccyragttggaagggaygcgtaaggatcacyragtccaaccccggctccacacagcagcacccaaacccaaccctgtgtctcagagtggtgccccaatgctccatgagctctggcactcaggaccgtrcctgctgccctgggcagcccgttccatgcccacagccctctgggacacagcctttccctcacccccagctgccctcgcctgacagctctgtrccattcccctaggccctgtcattgcccctctgctcctgtgaggagctgcagctgccatgagccctactctcagcctgctctgctctgtgcccaacaaattcagggccctcagccactcctcatgcaccttcccctctggaccctttcagcgatgaccctctgccccaccaggcc

SEQ ID NO: 87040 - DNA, 600 bp, Chicken  19866894388342_1
tccctgcgtgaacactcatcactcatcaacaaacaacagctagtgtgcaatgggcactgtctgggttgaaactaggaacaggggagaattcagtgccatgtcaattcaagttaacgtgaataattttatgcattttgatacactggctaaacatagtcctgggcaccggaaaaaatatatgtagtcttcctttctgttttgataaaggaatttgagaacaggtttaaaattgctgaaaaaatcaattttttttgtatatttgtgactccactttcagttgacataaatacattacttgtraattttcaaaccaaatgtatagaactgcaatcagagattcaactcaaagaaaaatctgatcacgtctcctactagacttttataagacctatctgatcagagaaaaatatcccttactaaactgttttcaagggtgaaggacagggagagtagaatttcatcaaaaatctctgatcaaaacataccttgagaaytcaccaagaactgcaaaaacttccaccgaaccagacacattagtttcacaaagaaaaggttaaacatctcactagttttatgttttagttgctctagttttaaatg

SEQ ID NO: 87041 - DNA, 600 bp, Chicken  19866894388342_2
tgttttgataaaggaatttgagaacaggtttaaaattgctgaaaaaatcaattttttttgtatatttgtgactccactttcagttgacataaatacattacttgtraattttcaaaccaaatgtatagaactgcaatcagagattcaactcaaagaaaaatctgatcacgtctcctactagacttttataagacctatctgatcagagaaaaatatcccttactaaactgttttcaagggtgaaggacagggagagtagaatttcatcaaaaatctctgatcaaaacataccttgagaaytcaccaagaactgcaaaaacttccaccgaaccagacacattagtttcacaaagaaaaggttaaacatctcactagttttatgttttagttgctctagttttaaatgcttccataaaaacacaaataaataaaaaaaggtttgttatatacttcaacaatatcatgtattttatatgaggctcaagataattctgcttcactcactgtggtccatgcaagccaaaaggttggacaaccaagcctttccccagcacagaaataatccaaactgtattgcccagtgtgttttttgtgtttgct

SEQ ID NO: 87042 - DNA, 594 bp, Chicken  19866894388370_1
tgcacctgctgtatgggcacatacgctgagactgccgctgcactcattagcagcgcattaaaggcaagtccttgcttcatagtgcacactgcagtagttttcaaaccaaaataaaacatatggagtacagggagaaagtaaacatacctgctaagagaaacagaaaactgttgtgctctaaatcctctccatgatggaacacagggtaagagaagagaaggaagggagaacaaccaaaaacctcataaaacgcctgaaatatatctttcttgtcccttgagatgaattttcatcacatgyataaacaaagttcaacagaaggttaaaastgagaataacaatttaaaaaaaaaatcaatcagaaaaaagtcatagaaaaacaaatcttggtcaccaaccaccactttgacattaaacaactgtaggactcagacagcaataaaaatcaataggtaattttcttactaaatgaccgctttttcttaatagcctgtatctgcagacactgagaataaagttgatttgcaagcaagtgccagacgtctagaaatcagatttatagatgtgaaagttctcgcataaacaggagccagc

SEQ ID NO: 87043 - DNA, 565 bp, Chicken  19866894388370_2
gactgccgctgcactcattagcagcgcattaaaggcaagtccttgcttcatagtgcacactgcagtagttttcaaaccaaaataaaacatatggagtacagggagaaagtaaacatacctgctaagagaaacagaaaactgttgtgctctaaatcctctccatgatggaacacagggtaagagaagagaaggaagggagaacaaccaaaaacctcataaaacgcctgaaatatatctttcttgtcccttgagatgaattttcatcacatgyataaacaaagttcaacagaaggttaaaastgagaataacaatttaaaaaaaaaatcaatcagaaaaaagtcatagaaaaacaaatcttggtcaccaaccaccactttgacattaaacaactgtaggactcagacagcaataaaaatcaataggtaattttcttactaaatgaccgctttttcttaatagcctgtatctgcagacactgagaataaagttgatttgcaagcaagtgccagacgtctagaaatcagatttatagatgtgaaagttctcgcataaacaggagccagc

SEQ ID NO: 87044 - DNA, 599 bp, Chicken  19866894388371_1
  misc_feature (1)..(85): n is any nucleotide
nnnnnnnnnnnnnnnnnnnnnnnnnnnnnnnnnnnnnnnnnnnnnnnnnnnnnnnnnnnnnnnnnnnnnnnnnnnnnnnnnnnnntttcattatctgcagtacgtggggaaaaaacccagtgggctggtctgatatggaaaagaatccaaaatttatagcttttttgagtggtgaaaaactctgccagttctgttttaatctgttgggtagtccagctagaacttgtacagttctgccatgaaccaagtagctcttctgatctttagtgggtaatttcagactctatagcttgtgcaggyatatagcagaatagcaggaaagaccaatcaaattggaagaatctgtgaaggaagtgaaggaagggaaagtctggggtgggggaagagaggtggatcagtagctgtattgaaacccrtatgaggaaagtttgtgctaattctgtgtcygggtaaaccagctctgtggtagttctttatgaatgtctatggtctgtaagttttaaaattaaaaaatattttgcaagaactcttccaagtggtttgaagctgagtagagcacccaagggatgtggtcaagatgtctgtgagaaragacacag

SEQ ID NO: 87045 - DNA, 600 bp, Chicken  19866894388371_2
ccagtgggctggtctgatatggaaaagaatccaaaatttatagcttttttgagtggtgaaaaactctgccagttctgttttaatctgttgggtagtccagctagaacttgtacagttctgccatgaaccaagtagctcttctgatctttagtgggtaatttcagactctatagcttgtgcaggyatatagcagaatagcaggaaagaccaatcaaattggaagaatctgtgaaggaagtgaaggaagggaaagtctggggtgggggaagagaggtggatcagtagctgtattgaaacccrtatgaggaaagtttgtgctaattctgtgtcygggtaaaccagctctgtggtagttctttatgaatgtctatggtctgtaagttttaaaattaaaaaatattttgcaagaactcttccaagtggtttgaagctgagtagagcacccaagggatgtggtcaagatgtctgtgagaaragacacagcacagtgaagccaaaggacagggcagcatcacagactttctgtttcccccttcagacagcgttaaatgggagtgactgaaattatcttactcatggtatttttagctagtgccatgt

SEQ ID NO: 87046 - DNA, 600 bp, Chicken  19866894388371_3
caaaatttatagcttttttgagtggtgaaaaactctgccagttctgttttaatctgttgggtagtccagctagaacttgtacagttctgccatgaaccaagtagctcttctgatctttagtgggtaatttcagactctatagcttgtgcaggyatatagcagaatagcaggaaagaccaatcaaattggaagaatctgtgaaggaagtgaaggaagggaaagtctggggtgggggaagagaggtggatcagtagctgtattgaaacccrtatgaggaaagtttgtgctaattctgtgtcygggtaaaccagctctgtggtagttctttatgaatgtctatggtctgtaagttttaaaattaaaaaatattttgcaagaactcttccaagtggtttgaagctgagtagagcacccaagggatgtggtcaagatgtctgtgagaaragacacagcacagtgaagccaaaggacagggcagcatcacagactttctgtttcccccttcagacagcgttaaatgggagtgactgaaattatcttactcatggtatttttagctagtgccatgtagcagataaaatgccgggggtgctrcgttct

SEQ ID NO: 87047 - DNA, 600 bp, Chicken  19866894388371_4
tgtgcaggyatatagcagaatagcaggaaagaccaatcaaattggaagaatctgtgaaggaagtgaaggaagggaaagtctggggtgggggaagagaggtggatcagtagctgtattgaaacccrtatgaggaaagtttgtgctaattctgtgtcygggtaaaccagctctgtggtagttctttatgaatgtctatggtctgtaagttttaaaattaaaaaatattttgcaagaactcttccaagtggtttgaagctgagtagagcacccaagggatgtggtcaagatgtctgtgagaaragacacagcacagtgaagccaaaggacagggcagcatcacagactttctgtttcccccttcagacagcgttaaatgggagtgactgaaattatcttactcatggtatttttagctagtgccatgtagcagataaaatgccgggggtgctrcgttctgtctcaagcacagcagctttcgtaggccatgcgagatggcccatataacacggaggggcctccaggctcaacccacatgctaaggcagcagagtgtaattagcctgaatttttctgcaaagaattcctcatagctgcctgcaaa

SEQ ID NO: 87048 - DNA, 535 bp, Chicken  19866894388371_5
gtgtcygggtaaaccagctctgtggtagttctttatgaatgtctatggtctgtaagttttaaaattaaaaaatattttgcaagaactcttccaagtggtttgaagctgagtagagcacccaagggatgtggtcaagatgtctgtgagaaragacacagcacagtgaagccaaaggacagggcagcatcacagactttctgtttcccccttcagacagcgttaaatgggagtgactgaaattatcttactcatggtatttttagctagtgccatgtagcagataaaatgccgggggtgctrcgttctgtctcaagcacagcagctttcgtaggccatgcgagatggcccatataacacggaggggcctccaggctcaacccacatgctaaggcagcagagtgtaattagcctgaatttttctgcaaagaattcctcatagctgcctgcaaatccctctggaagaagaggacagatttcttcctactctagaaaaggcttctcccagctcggtattgctgctgacagcctctcattg

SEQ ID NO: 87049 - DNA, 600 bp, Chicken  19866894388372_1
aggcgtccctgttcattgcaggtgagatggactggatgacctttaagcatcccttccagctcagacaattatatgactttaaggtcacattagttattctaattaccacttttacaacttccacatttttctttttctgctcaaaaacacagcaaaggaatcttcacaccatgttcactggaaccattcacaactctatccaaaagtcctcatatcggactccttacccccttcctcagcatatatttaaaacctgccaaagaagcagtattttattctacttattgcactgattacttyaaactgtagttcactttccaaaacaattagtgtcaytgaatagctatcatggtatatataacctatcagataatcactatgggctcaaatctgaccccattagagatactggctattaacaggggctgtaggaaactatgcaagacatactgtctgattaattaagraaaaatattccagtcatactgcatagaatgtttgtaaaatgatagcataattagcaattagtctcctaatcattgttkatacttgcaaaccaagagcattaattccactcaactcaactcattactcatattc

SEQ ID NO: 87050 - DNA, 600 bp, Chicken  19866894388372_2
tgacctttaagcatcccttccagctcagacaattatatgactttaaggtcacattagttattctaattaccacttttacaacttccacatttttctttttctgctcaaaaacacagcaaaggaatcttcacaccatgttcactggaaccattcacaactctatccaaaagtcctcatatcggactccttacccccttcctcagcatatatttaaaacctgccaaagaagcagtattttattctacttattgcactgattacttyaaactgtagttcactttccaaaacaattagtgtcaytgaatagctatcatggtatatataacctatcagataatcactatgggctcaaatctgaccccattagagatactggctattaacaggggctgtaggaaactatgcaagacatactgtctgattaattaagraaaaatattccagtcatactgcatagaatgtttgtaaaatgatagcataattagcaattagtctcctaatcattgttkatacttgcaaaccaagagcattaattccactcaactcaactcattactcatattcaccacagtggagagatttcagcatctctgcaattaa

SEQ ID NO: 87051 - DNA, 600 bp, Chicken  19866894388372_3
accatgttcactggaaccattcacaactctatccaaaagtcctcatatcggactccttacccccttcctcagcatatatttaaaacctgccaaagaagcagtattttattctacttattgcactgattacttyaaactgtagttcactttccaaaacaattagtgtcaytgaatagctatcatggtatatataacctatcagataatcactatgggctcaaatctgaccccattagagatactggctattaacaggggctgtaggaaactatgcaagacatactgtctgattaattaagraaaaatattccagtcatactgcatagaatgtttgtaaaatgatagcataattagcaattagtctcctaatcattgttkatacttgcaaaccaagagcattaattccactcaactcaactcattactcatattcaccacagtggagagatttcagcatctctgcaattaataattacactttcctaagacacggcacgaattaaaaacctacaatgtttaaaaaaaaaaaagtaaagaaaatatacctgccataatgtgaaagatgctacccgctccaatttctaccttaactaattagaa

SEQ ID NO: 87052 - DNA, 600 bp, Chicken  19866894388372_4
tttaaaacctgccaaagaagcagtattttattctacttattgcactgattacttyaaactgtagttcactttccaaaacaattagtgtcaytgaatagctatcatggtatatataacctatcagataatcactatgggctcaaatctgaccccattagagatactggctattaacaggggctgtaggaaactatgcaagacatactgtctgattaattaagraaaaatattccagtcatactgcatagaatgtttgtaaaatgatagcataattagcaattagtctcctaatcattgttkatacttgcaaaccaagagcattaattccactcaactcaactcattactcatattcaccacagtggagagatttcagcatctctgcaattaataattacactttcctaagacacggcacgaattaaaaacctacaatgtttaaaaaaaaaaaagtaaagaaaatatacctgccataatgtgaaagatgctacccgctccaatttctaccttaactaattagaatattttacagtaaattgcattgtaaaagaaattaaaaagttgtgttacgaaaatgtgttttaaggctgtttgaacagt

SEQ ID NO: 87053 - DNA, 600 bp, Chicken  19866894388373_1
aatctattaactcatctgcaatagcagtgaatgacagacacttcagctgactcttggaaaatgaattgatatcaactgtgaaactggagcccaagtatggagacatacaataggacctggctgtgagagattagttgggggccatgtggtttctcactctgctccatccccctcttggtgaagcaaacatgccccagcagcctgcatttgtttgagattcatatgggcatgtctggggagagcactgcgttgggccgacaggaatcttgttctctcctaacaaacaaccgatctgttaaygtctcctgacctgtcttcrtggaaaacactcatgcagggagaagctcttacgaacagattctcgtcttcatcctgcaaataagtcgctgttttttctcttcaccactctgcttttatctctcatctctcctgtttgacacatctctcctgctgactgctggtggggcgagcctgtgatttgttccaagcaaacacatgagcagtttccaccattgtgtggtcccatgctatgaacttacctgtgggtgtttactttgttggtatgacctggtattttgtagcactatatcttttttctcc

SEQ ID NO: 87054 - DNA, 600 bp, Chicken  19866894388373_2
aatagcagtgaatgacagacacttcagctgactcttggaaaatgaattgatatcaactgtgaaactggagcccaagtatggagacatacaataggacctggctgtgagagattagttgggggccatgtggtttctcactctgctccatccccctcttggtgaagcaaacatgccccagcagcctgcatttgtttgagattcatatgggcatgtctggggagagcactgcgttgggccgacaggaatcttgttctctcctaacaaacaaccgatctgttaaygtctcctgacctgtcttcrtggaaaacactcatgcagggagaagctcttacgaacagattctcgtcttcatcctgcaaataagtcgctgttttttctcttcaccactctgcttttatctctcatctctcctgtttgacacatctctcctgctgactgctggtggggcgagcctgtgatttgttccaagcaaacacatgagcagtttccaccattgtgtggtcccatgctatgaacttacctgtgggtgtttactttgttggtatgacctggtattttgtagcactatatcttttttctccttccttgatattttttccc

SEQ ID NO: 87055 - DNA, 599 bp, Chicken  19866894388374_1
  misc_feature (1)..(8): n is any nucleotide
nnnnnnnntttgctttggaagaacattgcccataggccttgtcggtcatgtctacagaaggagacacatgctttttggatacaatgcctgtatttaccaaacgtaaaattaaaaatgagtttacaggaaaccacgattgcagattgattacatcatttctattagccttgcacaattattccttccatgtggttgtgccacggaaaaatacctcagtctttgctgcagcaaatgatttttaatgttgaggattattatgtatgttaaaatgttaacctcaggtgtgaaaaccagtgctgrttttttggcttacatagcaccattcacttcgatgtctttgcccaatgatttccaatagcttctgtgttggttcagctccactgctaactgaagtaacagaagctcttgggcagacttgtctccgtgtctcttgtccttttaattactattacttaacctggcatagmatgagtatcttcratactgatctaaaaaacgccactaattcctctaccttaatgttcacagcagtattttcacagacgtttagattaacaggaaacatctaaaagagtttattctatgttaagatgtgacca

SEQ ID NO: 87056 - DNA, 562 bp, Chicken  19866894388374_2
ttgcacaattattccttccatgtggttgtgccacggaaaaatacctcagtctttgctgcagcaaatgatttttaatgttgaggattattatgtatgttaaaatgttaacctcaggtgtgaaaaccagtgctgtttttttggcttacatagcaccattcacttcgatgtctttgcccaatgatttccaatagcttctgtgttggttcagctccactgctaactgaagtaacagaagctcttgggcagacttgtctccgtgtctcttgtccttttaattactattacttaacctggcatagmatgagtatcttcratactgatctaaaaaacgccactaattcctctaccttaatgttcacagcagtattttcacagacgtttagattaacaggaaacatctaaaagagtttattctatgttaagatgtgaccagtgagcaaaatgcttgcacctgacagctagcaaacttcaaagtcagaatttgcattaagataagagagggacttggaaataattttgtcagaggacaaagagagaaaatgtgctaaatgtggtaaatgca

SEQ ID NO: 87057 - DNA, 549 bp, Chicken  19866894388374_3
ccttccatgtggttgtgccacggaaaaatacctcagtctttgctgcagcaaatgatttttaatgttgaggattattatgtatgttaaaatgttaacctcaggtgtgaaaaccagtgctgtttttttggcttacatagcaccattcacttcgatgtctttgcccaatgatttccaatagcttctgtgttggttcagctccactgctaactgaagtaacagaagctcttgggcagacttgtctccgtgtctcttgtccttttaattactattacttaacctggcatagmatgagtatcttcratactgatctaaaaaacgccactaattcctctaccttaatgttcacagcagtattttcacagacgtttagattaacaggaaacatctaaaagagtttattctatgttaagatgtgaccagtgagcaaaatgcttgcacctgacagctagcaaacttcaaagtcagaatttgcattaagataagagagggacttggaaataattttgtcagaggacaaagagagaaaatgtgctaaatgtggtaaatgca

SEQ ID NO: 87058 - DNA, 600 bp, Chicken  19866894388380_1
gtttttccacacaaagggtgatgacacatggaacgggttgcccaaggaggtcgcagatgccccctccctggaggcattcaaggccaggctggatgtggctctgggcagcctggtctgctggttggtgaccctgcacacagcagggggttgaaaccagatgatcattgtggtccttttcaacccaggctattccatgactctatgattagaaagcaaagcctcacacagaatcacaggggctggaaggggatcatttcattggatgactgttctttaacgagcaagataggacagcaagtraaaaacacttctgcgctaagccttgagaaaacagcacctgaattgctgttactcatttttatttgacaagtattataacccccaaaggttccctcaaaatcccagaaacacattaagaacaaatactccaggaaatcacgagggctataaatccccagcctaactaaaaacaaaacagaaaaccccatgaatttcagaggcaactcagaaaatgtggcgggatacgtggtgggatgttgtgtaacggatgtgtgcaataaccaacaaagttagctatgtcaggaactttaaaacaaactc

SEQ ID NO: 87059 - DNA, 600 bp, Chicken  19866894388380_2
aatccccagcctaactaaaaacaaaacagaaaaccccatgaatttcagaggcaactcagaaaatgtggcgggatacgtggtgggatgttgtgtaacggatgtgtgcaataaccaacaaagttagctatgtcaggaactttaaaacaaactcttttgttcaggaacctattatacacacgtacaagtacacaaaagggaaacgtaacccagggcactcttctccagtaacccaaagccacagcgtgtgctgcacatatcccaaaccgcccctccacctccacacgtaggcacagaagtgtstcccatgctcgctctgtgactgtgtttgtgctcctcattacccagaactcctgttgctgcactgtccaaagttccaccatgcccaattttcaaagcttgcctttttcttttcttatcttttgtttgcacaccggcttctgcaaacagaaacggaaagtaagcgttaggagacaacctcaggacccgggaaagggcacgcagatcccccagcacaaccgaccgtgccacggccacccaaaagctgcagcgcccgcctacctgccagcagcctctccttcagcaggttgagcacggcggccg

SEQ ID NO: 87060 - DNA, 600 bp, Chicken  19866894388387_1
ttatttcagcacttatacatctgcctctttataattgatgatactgacattttaataataatattttttttaaaaaaaggcttctctgtttataaacctgtaatgaaaattgcttactaacatgcctgtgctgtggccccaaggtgggctcgggtgagccaaagggggtgtacctgtctgcagcacaggcactgcccctcgtcagaccatgctaccagaccagacatcgcccttgcatttagcccaccaatttataggtgggcttttggttagatccctctgtaaattcaacaggaaaaycatgtaacacctcggtgctactcactataccaaaacacttagcacatttatttgttcattctttttatatcatcatagaagctatctctgttttgaagttggttttttttygtttgkttggttggttggtttttttttttttttttgrtgttctgatatcaataagagaagtataaaatgctattgttttacctctggtcattttccaagcaggtcagagtagcagcaacgttattcagagttctaaaaggcttcctgtactctgctagattgttttgagcaatctgtttagtctgctct

SEQ ID NO: 87061 - DNA, 600 bp, Chicken  19866894388387_2
gcttactaacatgcctgtgctgtggccccaaggtgggctcgggtgagccaaagggggtgtacctgtctgcagcacaggcactgcccctcgtcagaccatgctaccagaccagacatcgcccttgcatttagcccaccaatttataggtgggcttttggttagatccctctgtaaattcaacaggaaaaycatgtaacacctcggtgctactcactataccaaaacacttagcacatttatttgttcattctttttatatcatcatagaagctatctctgttttgaagttggttttttttygtttgkttggttggttggtttttttttttttttttgrtgttctgatatcaataagagaagtataaaatgctattgttttacctctggtcattttccaagcaggtcagagtagcagcaacgttattcagagttctaaaaggcttcctgtactctgctagattgttttgagcaatctgtttagtctgctctattccaataattttctgtatatcagacagtatattttttaggccacatttgactgcatcattgctttcttcagaaggaaatacagtaaactattatataagagattcaatc

SEQ ID NO: 87062 - DNA, 600 bp, Chicken  19866894388387_3
taacatgcctgtgctgtggccccaaggtgggctcgggtgagccaaagggggtgtacctgtctgcagcacaggcactgcccctcgtcagaccatgctaccagaccagacatcgcccttgcatttagcccaccaatttataggtgggcttttggttagatccctctgtaaattcaacaggaaaaycatgtaacacctcggtgctactcactataccaaaacacttagcacatttatttgttcattctttttatatcatcatagaagctatctctgttttgaagttggttttttttygtttgkttggttggttggtttttttttttttttttgrtgttctgatatcaataagagaagtataaaatgctattgttttacctctggtcattttccaagcaggtcagagtagcagcaacgttattcagagttctaaaaggcttcctgtactctgctagattgttttgagcaatctgtttagtctgctctattccaataattttctgtatatcagacagtatattttttaggccacatttgactgcatcattgctttcttcagaaggaaatacagtaaactattatataagagattcaatcatatct

SEQ ID NO: 87063 - DNA, 600 bp, Chicken  19866894388387_4
ctcgggtgagccaaagggggtgtacctgtctgcagcacaggcactgcccctcgtcagaccatgctaccagaccagacatcgcccttgcatttagcccaccaatttataggtgggcttttggttagatccctctgtaaattcaacaggaaaaycatgtaacacctcggtgctactcactataccaaaacacttagcacatttatttgttcattctttttatatcatcatagaagctatctctgttttgaagttggttttttttygtttgkttggttggttggtttttttttttttttttgrtgttctgatatcaataagagaagtataaaatgctattgttttacctctggtcattttccaagcaggtcagagtagcagcaacgttattcagagttctaaaaggcttcctgtactctgctagattgttttgagcaatctgtttagtctgctctattccaataattttctgtatatcagacagtatattttttaggccacatttgactgcatcattgctttcttcagaaggaaatacagtaaactattatataagagattcaatcatatctagtgcagttctacttatctaaacattttttc

SEQ ID NO: 87064 - DNA, 599 bp, Chicken  19866894388389_1
  misc_feature (1)..(18): n is any nucleotide
nnnnnnnnnnnnnnnnnncattgctttgataccttggcttgctttgtaccatgtgtacaaaccttgtaaacccacactttctggcagtctgatttccttcaagctatgtttattgctattcctgccctttaatgttgagctgttcgcattcagtgtcttatacatgggtcatcttgtttatactgtgagtcctggcatgatattgagttcttattcaaaagaagtatttgatgaatggatacactcatgatgtgccatgtgaatccagtttagttttgcagtgttcttggctgcagtacrtggaccacctcataatgctgtcaggtactacccttacatccagggtcagtctggatggatctcaagcacctgatcgagctgtagatgtctgttcattgcagggaagttggaccagatgacatttaagggccctttccaactcaaatgattctctgattcaccttggcccaacactgcaaccccatcctggatatgtgagccttcttttcctcttgcaggggactggtccctgctgcttattttccctgcccatcttgttgctcttggatttaattgtcagctctcgctccttctctcag

SEQ ID NO: 87065 - DNA, 600 bp, Chicken  19866894388391_1
agagaagattcttttttgcagaggaaaaatcctcagaataaaagaatttctgctgcaaagtcaagccctgcctttgaccaggagttaaaaccatccagtcaccatgacaagtgctgaagcattgacagtcactccgagcacttcagaactggctgccctcctttatttttgcagccattgtcagatgctccatctctgagctgtttattttccccttcattttgtctccgctgtttactagaagatgaatttcgagtttttcagttattttacaatggatggcatttttgctcggtgcayttctacagcataagtgcttctccttaaaaatacccagagataaatattgttcagagcatcagtttacactggggagctgtcagaaaatgggtgggaatgttacttggaagggtttcattacccaatcagctaatgaatcacagggaacgtgctggttgttctcctgctcacatgcaacagtggaggacttacttttgacattcactattacagttagagtggagggatgtcattctgcttctatatttttaatgctggccatatattgtttttgtaaaattgggttaaaaccgtctatca

SEQ ID NO: 87066 - DNA, 600 bp, Chicken  19866894388393_1
gaggccctgagttctctgtatttatgacaacagccttcagaggccgcagcacccgcagtcactgctggtcgtgcctcccttgttaggccacaaagtagcacgacacagagcctcctgtatttcacctgaaattccttcgtggcgaagtgactgaaattacatcagagttactttttttggtaccgtggcacagattttgactcagaaagcgagattgatatgtaaaagctgcttaccagtaaggctttacctcgttgagatgctccaactgggagcacagtcccactgagcagaggcctrcacatgcactgcctctctccccaaacccagatatgattccaaacttggtgaaggcagcaagaattatttcactgaagtgagcacaccrtgagccaggctgtgcttgtaaacatttacacaatgaataagcatatgaccccattccaaatctggctaccataacttcatgtgtgtgtgtgtcagtttaggagcctgctggtgcagatgcattgcamagcgaggacttcctcagacacagaagaaaatcactaccattaacattcatccctttacctaaactttcatacttttatcttctta

SEQ ID NO: 87067 - DNA, 600 bp, Chicken  19866894388393_2
cacaaagtagcacgacacagagcctcctgtatttcacctgaaattccttcgtggcgaagtgactgaaattacatcagagttactttttttggtaccgtggcacagattttgactcagaaagcgagattgatatgtaaaagctgcttaccagtaaggctttacctcgttgagatgctccaactgggagcacagtcccactgagcagaggcctrcacatgcactgcctctctccccaaacccagatatgattccaaacttggtgaaggcagcaagaattatttcactgaagtgagcacaccrtgagccaggctgtgcttgtaaacatttacacaatgaataagcatatgaccccattccaaatctggctaccataacttcatgtgtgtgtgtgtcagtttaggagcctgctggtgcagatgcattgcamagcgaggacttcctcagacacagaagaaaatcactaccattaacattcatccctttacctaaactttcatacttttatcttcttaattcctttttcttcttattttaactaatcatatgcatctttctcaaaagtactgtgtggtcccttcagtctttttcactgctaactcc

SEQ ID NO: 87068 - DNA, 532 bp, Chicken  19866894388393_3
tgatatgtaaaagctgcttaccagtaaggctttacctcgttgagatgctccaactgggagcacagtcccactgagcagaggcctrcacatgcactgcctctctccccaaacccagatatgattccaaacttggtgaaggcagcaagaattatttcactgaagtgagcacaccrtgagccaggctgtgcttgtaaacatttacacaatgaataagcatatgaccccattccaaatctggctaccataacttcatgtgtgtgtgtgtcagtttaggagcctgctggtgcagatgcattgcamagcgaggacttcctcagacacagaagaaaatcactaccattaacattcatccctttacctaaactttcatacttttatcttcttaattcctttttcttcttattttaactaatcatatgcatctttctcaaaagtactgtgtggtcccttcagtctttttcactgctaactcccatcccagctttactttacacaacaaaattgttgtccccacatgcctctctaaataatt

SEQ ID NO: 87069 - DNA, 600 bp, Chicken  19866894388400_1
ggtggacagatggagggatggacagatggagggatggacagatggagggatgggtggatgatgaccaaataatagctgtcctttataacagctgaactggccatgattagggtggatggattacgctggggaaatacaagatgcattcatgacagatagagcagagaagaaggtggattaaggggaaggaaggtggtaagggatagagaagagcatggacttggtagaggtgaaagctgacaaaggtggtgtaaatggattggaaagatgatgtatatagaggacagagttagaaatgayacattctaacagacatgaacagaaaaaggagaataagtctcktgaaaggagtaagagaagagtgaggtctttgtggtgatacttccagcatgataaatagayttctacagagtgattgtgagaatacttcccctgggaaaaactgagaggcggcagtggcaggaaraccccagccgcagtgaaacaagattaattccttcacaccccggtggaagcagtctttatctctacatcacttgcacgtcatcaccaggcacaagtccttcccccaactaagagacatccaaaacaaagctaaay

SEQ ID NO: 87070 - DNA, 600 bp, Chicken  19866894388400_2
tggagggatgggtggatgatgaccaaataatagctgtcctttataacagctgaactggccatgattagggtggatggattacgctggggaaatacaagatgcattcatgacagatagagcagagaagaaggtggattaaggggaaggaaggtggtaagggatagagaagagcatggacttggtagaggtgaaagctgacaaaggtggtgtaaatggattggaaagatgatgtatatagaggacagagttagaaatgayacattctaacagacatgaacagaaaaaggagaataagtctcktgaaaggagtaagagaagagtgaggtctttgtggtgatacttccagcatgataaatagayttctacagagtgattgtgagaatacttcccctgggaaaaactgagaggcggcagtggcaggaaraccccagccgcagtgaaacaagattaattccttcacaccccggtggaagcagtctttatctctacatcacttgcacgtcatcaccaggcacaagtccttcccccaactaagagacatccaaaacaaagctaaayctgggaagaaataggytttgggcactctccatccagttccac

SEQ ID NO: 87071 - DNA, 600 bp, Chicken  19866894388400_3
atgattagggtggatggattacgctggggaaatacaagatgcattcatgacagatagagcagagaagaaggtggattaaggggaaggaaggtggtaagggatagagaagagcatggacttggtagaggtgaaagctgacaaaggtggtgtaaatggattggaaagatgatgtatatagaggacagagttagaaatgayacattctaacagacatgaacagaaaaaggagaataagtctcktgaaaggagtaagagaagagtgaggtctttgtggtgatacttccagcatgataaatagayttctacagagtgattgtgagaatacttcccctgggaaaaactgagaggcggcagtggcaggaaraccccagccgcagtgaaacaagattaattccttcacaccccggtggaagcagtctttatctctacatcacttgcacgtcatcaccaggcacaagtccttcccccaactaagagacatccaaaacaaagctaaayctgggaagaaataggytttgggcactctccatccagttccacacggtagcaggatgctgagcaccaatagtcctgggctagcagcatgcaatggctgcagca

SEQ ID NO: 87072 - DNA, 600 bp, Chicken  19866894388400_4
aagaaggtggattaaggggaaggaaggtggtaagggatagagaagagcatggacttggtagaggtgaaagctgacaaaggtggtgtaaatggattggaaagatgatgtatatagaggacagagttagaaatgayacattctaacagacatgaacagaaaaaggagaataagtctcktgaaaggagtaagagaagagtgaggtctttgtggtgatacttccagcatgataaatagayttctacagagtgattgtgagaatacttcccctgggaaaaactgagaggcggcagtggcaggaaraccccagccgcagtgaaacaagattaattccttcacaccccggtggaagcagtctttatctctacatcacttgcacgtcatcaccaggcacaagtccttcccccaactaagagacatccaaaacaaagctaaayctgggaagaaataggytttgggcactctccatccagttccacacggtagcaggatgctgagcaccaatagtcctgggctagcagcatgcaatggctgcagcagcacatgactttgagtcctatttgacacaaccctccccgtcccagatgtcccaactgcaggaag

SEQ ID NO: 87073 - DNA, 600 bp, Chicken  19866894388400_5
acattctaacagacatgaacagaaaaaggagaataagtctcktgaaaggagtaagagaagagtgaggtctttgtggtgatacttccagcatgataaatagayttctacagagtgattgtgagaatacttcccctgggaaaaactgagaggcggcagtggcaggaaraccccagccgcagtgaaacaagattaattccttcacaccccggtggaagcagtctttatctctacatcacttgcacgtcatcaccaggcacaagtccttcccccaactaagagacatccaaaacaaagctaaayctgggaagaaataggytttgggcactctccatccagttccacacggtagcaggatgctgagcaccaatagtcctgggctagcagcatgcaatggctgcagcagcacatgactttgagtcctatttgacacaaccctccccgtcccagatgtcccaactgcaggaaggctgtggccactgcagtagcaatcacagctctgcaaaatgcaaagccaaagagcaggacctcagcctccagcacagcaggagccatcacgtgcttcccttcagtggctgttgaagtgaaaagaaagcctgcgtg

SEQ ID NO: 87074 - DNA, 600 bp, Chicken  19866894388400_6
gaacagaaaaaggagaataagtctcktgaaaggagtaagagaagagtgaggtctttgtggtgatacttccagcatgataaatagayttctacagagtgattgtgagaatacttcccctgggaaaaactgagaggcggcagtggcaggaaraccccagccgcagtgaaacaagattaattccttcacaccccggtggaagcagtctttatctctacatcacttgcacgtcatcaccaggcacaagtccttcccccaactaagagacatccaaaacaaagctaaayctgggaagaaataggytttgggcactctccatccagttccacacggtagcaggatgctgagcaccaatagtcctgggctagcagcatgcaatggctgcagcagcacatgactttgagtcctatttgacacaaccctccccgtcccagatgtcccaactgcaggaaggctgtggccactgcagtagcaatcacagctctgcaaaatgcaaagccaaagagcaggacctcagcctccagcacagcaggagccatcacgtgcttcccttcagtggctgttgaagtgaaaagaaagcctgcgtgaatgtatagtgaatga

SEQ ID NO: 87075 - DNA, 600 bp, Chicken  19866894388411_1
tccagctgggtctgtgctgaataagaatggtatcgaaaactcctcccctgtcagtgcataagatcaaaacaaaaatgtctctagatacaagaccagcccagccttttgttcttgtagtcagcatccagttcagtaaacagagtagttaacacttgaataagtcttgatgaacttaatgaaaattaccttaagtgttagccagcaaataaaacaagtctggatgggctggaaaagctggagtttgaaagggctcagcagataaaagtgtctttctcaagactcaatgtacatgcaaaaaarccccaaaccctgacatttatcactactactgaaaaagaatttctgagagagtaatggtgagatcttaatcttctcaaagaaattatcaatacagtatgcatgtgagaaactaaaggcaaaatagagagggaaaacttagcaaggcaggaggaagaaaatgaaatgagattttggatgttgcccttgattcaattaattctacagtttaggattttttacatattgtgtttccagtagaaatgatgatggttcctttcccactgaaactggtccactatgttataagctgcaatatttttt

SEQ ID NO: 87076 - DNA, 599 bp, Chicken  19866894388415_1
  misc_feature (1)..(34): n is any nucleotide
nnnnnnnnnnnnnnnnnnnnnnnnnnnnnnnnnntatttgttgatttgaatgcttatggaagtcagctagctgtctttcttcagaagcagaggctttgtaggagtatcccatccataccaaacaagcccttcaataagatcatacgtatttaatcagacaggactgttctgcctcaaactgtaaatgtaaatcaccttatactgatgaactgtttatcaggaacatatcagcatgatgctctgaagcattttcagctgtttctcttgagtttttgtagtatgtttggagtgaaagcaatktgttgcatgrgtctctgaatcaggtaggatgtctttagctttcttccatttgaacatctgtctccaagtaaagtttgaagctttctaattacaggaatgatcagtacctagtggaaatggcaacaaagttttggatgaatggttgataaaagctgtatgttgcagaggtgatgtcaaaaaggagacatgctttatrtaacaattctgaaatggttcagtatctgacaagcgctctggtttgaattaattycctatctcaggaataaatcaaatgttcagcacattaattatttggaggc

SEQ ID NO: 87077 - DNA, 599 bp, Chicken  19866894388415_2
  misc_feature (1)..(24): n is any nucleotide
nnnnnnnnnnnnnnnnnnnnnnnntatttgttgatttgaatgcttatggaagtcagctagctgtctttcttcagaagcagaggctttgtaggagtatcccatccataccaaacaagcccttcaataagatcatacgtatttaatcagacaggactgttctgcctcaaactgtaaatgtaaatcaccttatactgatgaactgtttatcaggaacatatcagcatgatgctctgaagcattttcagctgtttctcttgagtttttgtagtatgtttggagtgaaagcaatktgttgcatgrgtctctgaatcaggtaggatgtctttagctttcttccatttgaacatctgtctccaagtaaagtttgaagctttctaattacaggaatgatcagtacctagtggaaatggcaacaaagttttggatgaatggttgataaaagctgtatgttgcagaggtgatgtcaaaaaggagacatgctttatrtaacaattctgaaatggttcagtatctgacaagcgctctggtttgaattaattycctatctcaggaataaatcaaatgttcagcacattaattatttggaggcccctgctcct

SEQ ID NO: 87078 - DNA, 600 bp, Chicken  19866894388415_3
ttatactgatgaactgtttatcaggaacatatcagcatgatgctctgaagcattttcagctgtttctcttgagtttttgtagtatgtttggagtgaaagcaatktgttgcatgrgtctctgaatcaggtaggatgtctttagctttcttccatttgaacatctgtctccaagtaaagtttgaagctttctaattacaggaatgatcagtacctagtggaaatggcaacaaagttttggatgaatggttgataaaagctgtatgttgcagaggtgatgtcaaaaaggagacatgctttatrtaacaattctgaaatggttcagtatctgacaagcgctctggtttgaattaattycctatctcaggaataaatcaaatgttcagcacattaattatttggaggcccctgctcctttgtagctaaggtcgactctgaggtctgctgtattcttctgttcataaagtcgctttaggttttgtgagctcttttgagaaaatgaaacagttgtaaaaagttaacctgttttttgttcagatataaataccctgtagataacttcagaacttactgctcgtgctattattacagttattaatttat

SEQ ID NO: 87079 - DNA, 548 bp, Chicken  19866894388415_4
ttcagctgtttctcttgagtttttgtagtatgtttggagtgaaagcaatktgttgcatgrgtctctgaatcaggtaggatgtctttagctttcttccatttgaacatctgtctccaagtaaagtttgaagctttctaattacaggaatgatcagtacctagtggaaatggcaacaaagttttggatgaatggttgataaaagctgtatgttgcagaggtgatgtcaaaaaggagacatgctttatrtaacaattctgaaatggttcagtatctgacaagcgctctggtttgaattaattycctatctcaggaataaatcaaatgttcagcacattaattatttggaggcccctgctcctttgtagctaaggtcgactctgaggtctgctgtattcttctgttcataaagtcgctttaggttttgtgagctcttttgagaaaatgaaacagttgtaaaaagttaacctgttttttgttcagatataaataccctgtagataacttcagaacttactgctcgtgctattattacagttattaatttatag

SEQ ID NO: 87080 - DNA, 600 bp, Chicken  19866894388420_1
ttactgtggcaatccttcatgtttctgaattaacattcttagtctgagttcatatgcttgttaccagtttctaagaatgattaaacgctggtggtaaatgtaattgtgaagaaagctctaagaacctgattccatctgctttcctaatttaattaagaaataaatttctccatgtaatctgtatgcatcaaagaaattgagcttttaagtaaaaaaataaaaaaaaattgttatagaaattcttggcagctaaatttgttgcaagcagcgtacagttttgtatatgtcacagtgctcacrtagccatcattgtccttccaactttgtattactactgcctgtttggaccgtgactatttctatgttaaatcatacctgagtattactgagatcctcagggaggcgttccctggctaggatgttctgtgagcatctgtactgcaggtcatcagaatgtctctagaccactaaaggtagtgagcattaatttaaattgtatgctgtaaaagatgaccttgaacccctattccacagatctgtgctcttgttgagatggtttttgtgccctccaatttgtgatagaatttatgactttaagag

SEQ ID NO: 87081 - DNA, 600 bp, Chicken  19866894388422_1
gctttattttggtttttaataaaatcctaaaatttatgggttacattgagtgtatactatagaagatgctctgtttgacatgtcagcaggagaaaagctcaccattgagactgctaatttgagaataactaactgtatatagagcttgtctaattatacattgaaaggaacagtggtagcagaacatagttatctttctcccatttttagcacgtaaattattgattttgagggatccggaggtagctgagctagcttaattcagtcattgcaaaaagctgggccctgaaattctgcacytttcctttttccttccctctctaattctakgtgacttccattggagattgaataaagtgtgagcttgcgttcattagtctgtaaagtctgaagaaaattagatttaatgatggattttccagcaggactgggagaaaggtttcaactgagtgtgttgtattgacttccctctacttctgggaagcaatccaatttggatctatttagtaataggcacactactgatggtggagtttttttttttacagtcttgcaaatgaactaataatcagtgcaaggagtagtcagaaaggggtgcat

SEQ ID NO: 87082 - DNA, 600 bp, Chicken  19866894388422_2
aatttatgggttacattgagtgtatactatagaagatgctctgtttgacatgtcagcaggagaaaagctcaccattgagactgctaatttgagaataactaactgtatatagagcttgtctaattatacattgaaaggaacagtggtagcagaacatagttatctttctcccatttttagcacgtaaattattgattttgagggatccggaggtagctgagctagcttaattcagtcattgcaaaaagctgggccctgaaattctgcacytttcctttttccttccctctctaattctakgtgacttccattggagattgaataaagtgtgagcttgcgttcattagtctgtaaagtctgaagaaaattagatttaatgatggattttccagcaggactgggagaaaggtttcaactgagtgtgttgtattgacttccctctacttctgggaagcaatccaatttggatctatttagtaataggcacactactgatggtggagtttttttttttacagtcttgcaaatgaactaataatcagtgcaaggagtagtcagaaaggggtgcattgcacttacgtaatattcagagatatgctt

SEQ ID NO: 87083 - DNA, 600 bp, Chicken  19866894388423_1
gtgagttagttgtgaggaaactggaagaactgtcttttaaaccaggatttaactagtgttggaagacattccacatcttcagtattgatgctaaaaatgacaaaatctgaaagtagctgtagttaaagctttctcacacttggccagaaatactgagcttcttgtttaaatcctgttttatcaatatataataacggtagaggcacagcctttaaagaactaacacacagatttgtactgtaatctgagacttgcagaacactcatcagctttgtggcattatgcagaatggaatattgygaataaattcttccttaagtctggccaacgcaaatgcacttctagcagttggtagttgtgcaatgttttaaattaaggcattattaatgtggctgcatgccaaaacagttagtttgggatttgaacaccattccaaacattccttctgcatattcaaatgaagtacttggtgatgtaattgtttaaagcacaaatgttgcctttttgaacttctactttttatgctatttygtgttaaatgatggtgctctgtaccaacgcacttagtttactacatctaatagaacagctttcagattt

SEQ ID NO: 87084 - DNA, 600 bp, Chicken  19866894388423_2
tttgtactgtaatctgagacttgcagaacactcatcagctttgtggcattatgcagaatggaatattgygaataaattcttccttaagtctggccaacgcaaatgcacttctagcagttggtagttgtgcaatgttttaaattaaggcattattaatgtggctgcatgccaaaacagttagtttgggatttgaacaccattccaaacattccttctgcatattcaaatgaagtacttggtgatgtaattgtttaaagcacaaatgttgcctttttgaacttctactttttatgctatttygtgttaaatgatggtgctctgtaccaacgcacttagtttactacatctaatagaacagctttcagattttctttttcccgacaaagttcctaggatctttctgaggaaagtaattttcttaggaggaataatagtcttgatgaactttgctagtacagacttctttgtgaacataaggaaacacttctctgttatgggggccattgaaccctggaacaggttgccctgggaggttgtggagtccatccttggaaatgctctgaagccatctggatatggtcatgtgtaactggctttagg

SEQ ID NO: 87085 - DNA, 495 bp, Chicken  19866894388423_3
taatagaacagctttcagattttctttttcccgacaaagttcctaggatctttctgaggaaagtaattttcttaggaggaataatagtcttgatgaactttgctagtacagacttctttgtgaacataaggaaacacttctctgttatgggggccattgaaccctggaacaggttgccctgggaggttgtggagtccatccttggaaatgctctgaagccatctggatatggtcatgtgtaactggctttaggtgaccctgcttgagcaggggattggaccagattaccaacagggactycttccagccccaagagttctgtaacttgcagtttgcatggtggctaaaacaaatgcttatagcaagcctacagaggttgagatgaaattagatttattagatcagatcttaaaagtgggtaaaaatcaacttcttagcacatggagggtctgttgaaaacattgggcattttcctctgtcttctacaggagaatt

SEQ ID NO: 87086 - DNA, 599 bp, Chicken  19866894388424_1
  misc_feature (1)..(95): n is any nucleotide
nnnnnnnnnnnnnnnnnnnnnnnnnnnnnnnnnnnnnnnnnnnnnnnnnnnnnnnnnnnnnnnnnnnnnnnnnnnnnnnnnnnnnnnnnnnnnnnacatgacaggtttaaatcttatgcactctaacccctgaattctaactgcctcttcagacactgaggtacatcccaggtggctctgtttgggatggaggtgccccgtgggctgtgctgggcagggtggggacaaaccccagtgacccaccctcaccacacgtgccaagaaggatggtacaaacatgacctgttctacacagtagayattatttgtgctttgggattgggacaggaggttgttgggtctgcttgtcagaggaacaccacagacagtgttacacacagccatataattctgcatccacagctcctaatactgaatcactgctgtaggattgtacacagtggatatttcctgaaccaaggagacagtgcagctcctcttgaccaaagttacgatgagctgtgcattctgtgttcaccaaactgagctccttgctggaagtcccaccagcaggcagacagcaaagctgtcagcagaaggaggaggacrcagagcacacy

SEQ ID NO: 87087 - DNA, 600 bp, Chicken  19866894388424_2
tacacagtagayattatttgtgctttgggattgggacaggaggttgttgggtctgcttgtcagaggaacaccacagacagtgttacacacagccatataattctgcatccacagctcctaatactgaatcactgctgtaggattgtacacagtggatatttcctgaaccaaggagacagtgcagctcctcttgaccaaagttacgatgagctgtgcattctgtgttcaccaaactgagctccttgctggaagtcccaccagcaggcagacagcaaagctgtcagcagaaggaggaggacrcagagcacacygcccagccagctcctaccrccygggagcaccactttgccccagttccactttccatactgaagcatcttcctccaataccaaacagcacagcactaaagcccagcttaggtgatgtttttttccctcctgagttyttctctgaattagaacyggacatatctgcagtgaaactctttttgcagatctggcctccatggcacgaagccactgatgggagcctctcaactttacttaacctctgtgtagagaatcacatgaactcatcgcaaggggacctctcagcaccgg

SEQ ID NO: 87088 - DNA, 600 bp, Chicken  19866894388424_3
yattatttgtgctttgggattgggacaggaggttgttgggtctgcttgtcagaggaacaccacagacagtgttacacacagccatataattctgcatccacagctcctaatactgaatcactgctgtaggattgtacacagtggatatttcctgaaccaaggagacagtgcagctcctcttgaccaaagttacgatgagctgtgcattctgtgttcaccaaactgagctccttgctggaagtcccaccagcaggcagacagcaaagctgtcagcagaaggaggaggacrcagagcacacygcccagccagctcctaccrccygggagcaccactttgccccagttccactttccatactgaagcatcttcctccaataccaaacagcacagcactaaagcccagcttaggtgatgtttttttccctcctgagttyttctctgaattagaacyggacatatctgcagtgaaactctttttgcagatctggcctccatggcacgaagccactgatgggagcctctcaactttacttaacctctgtgtagagaatcacatgaactcatcgcaaggggacctctcagcaccgggggaacagatg

SEQ ID NO: 87089 - DNA, 600 bp, Chicken  19866894388424_4
ttgggacaggaggttgttgggtctgcttgtcagaggaacaccacagacagtgttacacacagccatataattctgcatccacagctcctaatactgaatcactgctgtaggattgtacacagtggatatttcctgaaccaaggagacagtgcagctcctcttgaccaaagttacgatgagctgtgcattctgtgttcaccaaactgagctccttgctggaagtcccaccagcaggcagacagcaaagctgtcagcagaaggaggaggacrcagagcacacygcccagccagctcctaccrccygggagcaccactttgccccagttccactttccatactgaagcatcttcctccaataccaaacagcacagcactaaagcccagcttaggtgatgtttttttccctcctgagttyttctctgaattagaacyggacatatctgcagtgaaactctttttgcagatctggcctccatggcacgaagccactgatgggagcctctcaactttacttaacctctgtgtagagaatcacatgaactcatcgcaaggggacctctcagcaccgggggaacagatgtttgggcaggagctacacc

SEQ ID NO: 87090 - DNA, 600 bp, Chicken  19866894388424_5
ggacaggaggttgttgggtctgcttgtcagaggaacaccacagacagtgttacacacagccatataattctgcatccacagctcctaatactgaatcactgctgtaggattgtacacagtggatatttcctgaaccaaggagacagtgcagctcctcttgaccaaagttacgatgagctgtgcattctgtgttcaccaaactgagctccttgctggaagtcccaccagcaggcagacagcaaagctgtcagcagaaggaggaggacrcagagcacacygcccagccagctcctaccrccygggagcaccactttgccccagttccactttccatactgaagcatcttcctccaataccaaacagcacagcactaaagcccagcttaggtgatgtttttttccctcctgagttyttctctgaattagaacyggacatatctgcagtgaaactctttttgcagatctggcctccatggcacgaagccactgatgggagcctctcaactttacttaacctctgtgtagagaatcacatgaactcatcgcaaggggacctctcagcaccgggggaacagatgtttgggcaggagctacaccatg

SEQ ID NO: 87091 - DNA, 565 bp, Chicken  19866894388424_6
acacagtggatatttcctgaaccaaggagacagtgcagctcctcttgaccaaagttacgatgagctgtgcattctgtgttcaccaaactgagctccttgctggaagtcccaccagcaggcagacagcaaagctgtcagcagaaggaggaggacrcagagcacacygcccagccagctcctaccrccygggagcaccactttgccccagttccactttccatactgaagcatcttcctccaataccaaacagcacagcactaaagcccagcttaggtgatgtttttttccctcctgagttyttctctgaattagaacyggacatatctgcagtgaaactctttttgcagatctggcctccatggcacgaagccactgatgggagcctctcaactttacttaacctctgtgtagagaatcacatgaactcatcgcaaggggacctctcagcaccgggggaacagatgtttgggcaggagctacaccatgctgagtccgtggtgttcactgggggggtctgcggttggtttgggtttggttctttttaaaagctgcccattagtagga

SEQ ID NO: 87092 - DNA, 548 bp, Chicken  19866894388424_7
tgaaccaaggagacagtgcagctcctcttgaccaaagttacgatgagctgtgcattctgtgttcaccaaactgagctccttgctggaagtcccaccagcaggcagacagcaaagctgtcagcagaaggaggaggacrcagagcacacygcccagccagctcctaccrccygggagcaccactttgccccagttccactttccatactgaagcatcttcctccaataccaaacagcacagcactaaagcccagcttaggtgatgtttttttccctcctgagttyttctctgaattagaacyggacatatctgcagtgaaactctttttgcagatctggcctccatggcacgaagccactgatgggagcctctcaactttacttaacctctgtgtagagaatcacatgaactcatcgcaaggggacctctcagcaccgggggaacagatgtttgggcaggagctacaccatgctgagtccgtggtgttcactgggggggtctgcggttggtttgggtttggttctttttaaaagctgcccattagtagga

SEQ ID NO: 87093 - DNA, 600 bp, Chicken  19866894388430_1
gcagctcaaggagtgctacctgatggcccccggcatggagccgctgctgctggtgcagggcaacaaggcgcagagctccagcgtggccatgctggaggagccccccagcaaccgggccaggaaggtctggcgcttccgcttcacctacaccgtccccgagggcaggcacgtccccttctccgccaccctcaagtgcaaggctgggctgcaggtcagcatcacccccttctggcaccacggtccccctaggcatatcaatgggcttataaccaagctgggaacagcatccctggtccccaragtccttgggcacagggcactgagccacatccccacgggatggtggcactggggctggaatatctccatgctcaccccaaccctctgcctggcagaacaacaccatcttcgagaaggttttggaagtgaaggtgaaggacgtctggcggctgcccaacagtgagctggggacacggggcagggtggggggacactgctgggtctgaggaaggtaccccctcactgacggcctcatcccactgcagaccaagggctggggctgtccgccgtgctgggcatcacctttggagccttcctcat

SEQ ID NO: 87094 - DNA, 600 bp, Chicken  19866894388431_1
ctcatacataagtctctgccgttcaagtgcagatctcttctcctcttcgtgctgctgctccaggctttgcaagatcgactgcataggatctaggcagacgttgaaaaataaagaaactagaacttctggggtcgaatatctagtaagcatgaaattaaacagtcaagtaatgagtaagtgacagagtaagtgacagacttggcaatatgagctctgtcccaggttctgtatggatgttctgtattgccttgggcaaggcacaaatgactatgccttcacactttgcttcgtatagacctkcagatatctacaccaggggctgcagcaaccagtgagatccaytgtgaagaatgtactagacagtaaacatagsactatatcacataaatggaggaagagatcgtatttctttataaggcatatttaaaaaatgctgctgaactgtggagcaaaataaagacccacagaacaaagtgggtgaatgatttaagagagtttggaaaagatcagtcctaaaaaaaactacttctgtcccaaaataatgccaatctggggcagccatgtaagaccacaataactaaagaacataattgcagagac

SEQ ID NO: 87095 - DNA, 600 bp, Chicken  19866894388431_2
ctcttcgtgctgctgctccaggctttgcaagatcgactgcataggatctaggcagacgttgaaaaataaagaaactagaacttctggggtcgaatatctagtaagcatgaaattaaacagtcaagtaatgagtaagtgacagagtaagtgacagacttggcaatatgagctctgtcccaggttctgtatggatgttctgtattgccttgggcaaggcacaaatgactatgccttcacactttgcttcgtatagacctkcagatatctacaccaggggctgcagcaaccagtgagatccaytgtgaagaatgtactagacagtaaacatagsactatatcacataaatggaggaagagatcgtatttctttataaggcatatttaaaaaatgctgctgaactgtggagcaaaataaagacccacagaacaaagtgggtgaatgatttaagagagtttggaaaagatcagtcctaaaaaaaactacttctgtcccaaaataatgccaatctggggcagccatgtaagaccacaataactaaagaacataattgcagagacagaaatcactacagttaatgctggagtgagacataacacacg

SEQ ID NO: 87096 - DNA, 600 bp, Chicken  19866894388431_3
atcgactgcataggatctaggcagacgttgaaaaataaagaaactagaacttctggggtcgaatatctagtaagcatgaaattaaacagtcaagtaatgagtaagtgacagagtaagtgacagacttggcaatatgagctctgtcccaggttctgtatggatgttctgtattgccttgggcaaggcacaaatgactatgccttcacactttgcttcgtatagacctkcagatatctacaccaggggctgcagcaaccagtgagatccaytgtgaagaatgtactagacagtaaacatagsactatatcacataaatggaggaagagatcgtatttctttataaggcatatttaaaaaatgctgctgaactgtggagcaaaataaagacccacagaacaaagtgggtgaatgatttaagagagtttggaaaagatcagtcctaaaaaaaactacttctgtcccaaaataatgccaatctggggcagccatgtaagaccacaataactaaagaacataattgcagagacagaaatcactacagttaatgctggagtgagacataacacacgaaaaataaacagcaaagcaaaaacattctga

SEQ ID NO: 87097 - DNA, 600 bp, Chicken  19866894388439_1
actctttttttttttttttttaagcttagcagagttgcttttacactgcccttatttgcacttttatttcagcatctgttttgaattttgatggtttctgacaacgtgcagacgccagggactcacacagcctgattacatacattgggtgttttgtattctgcattgcattaccatctaatcaggttagaggggtaaagatttactaatgtgaacatcctgttgccctggattttgtcttaaatgtattaagttatttcactataagatttgatccactttgatatcattcaatctggratgaaaatagcacgttacattcaactgatactctaaattattcttaattagaagggattttcttgaaacacattcagtaaaccacgattcaacatttcatatctgctcatgtttattcattgtccacaatgaacgccacaaaagaaaagaaaatgtattccataagctctgaaatagtttagtagaatgaaacatgaagaactcctatctaaactgagggtttaatctcagtcagaagcatgaggcaatgttctttctctacttcccaaaagcttccaaaaagcaaagtgaaaggaattt

SEQ ID NO: 87098 - DNA, 600 bp, Chicken  19866894388451_1
gcttatacttttgggtttctcaagtagaggcagtttggtctgtgttgtagtcacattagaaggaaatgtattgatatgtcaaatagatgatgcttcttgtttttggatgttatatttcaacaccgtttttgaccataatcatagaatcataaaatggcccttctgccgctgcatctcccatctctttgcaccttgcttttcctgcaccattggtgcagtgcaccctgctgcctcgctgctcatgcagtgctgtgctggtgccagaggtgtgcatagaggtgtgcatggagctgtgcagcygtacctctcagrcagccacgtcattttaaagcaagagagcrcagtttgtgccccacgagcagagaggaaaagtagaaatggtaagccatctatcttaccttgggacttgggttttgtttcatttccagtttgatggtgcacgagcatgaacttgtttgaaagggtgttttatatgccgctgtgttttctctccrtgcaacttgatttgaagcagcatggctaaatgatgtaatctcctaaaatcacacattgtgcagggatagcagcacacaggaggaactgagcgtgctgcccttcttc

SEQ ID NO: 87099 - DNA, 600 bp, Chicken  19866894388451_2
gggtttctcaagtagaggcagtttggtctgtgttgtagtcacattagaaggaaatgtattgatatgtcaaatagatgatgcttcttgtttttggatgttatatttcaacaccgtttttgaccataatcatagaatcataaaatggcccttctgccgctgcatctcccatctctttgcaccttgcttttcctgcaccattggtgcagtgcaccctgctgcctcgctgctcatgcagtgctgtgctggtgccagaggtgtgcatagaggtgtgcatggagctgtgcagcygtacctctcagrcagccacgtcattttaaagcaagagagcrcagtttgtgccccacgagcagagaggaaaagtagaaatggtaagccatctatcttaccttgggacttgggttttgtttcatttccagtttgatggtgcacgagcatgaacttgtttgaaagggtgttttatatgccgctgtgttttctctccrtgcaacttgatttgaagcagcatggctaaatgatgtaatctcctaaaatcacacattgtgcagggatagcagcacacaggaggaactgagcgtgctgcccttcttcataggcagagaa

SEQ ID NO: 87100 - DNA, 600 bp, Chicken  19866894388451_3
gtgttgtagtcacattagaaggaaatgtattgatatgtcaaatagatgatgcttcttgtttttggatgttatatttcaacaccgtttttgaccataatcatagaatcataaaatggcccttctgccgctgcatctcccatctctttgcaccttgcttttcctgcaccattggtgcagtgcaccctgctgcctcgctgctcatgcagtgctgtgctggtgccagaggtgtgcatagaggtgtgcatggagctgtgcagcygtacctctcagrcagccacgtcattttaaagcaagagagcrcagtttgtgccccacgagcagagaggaaaagtagaaatggtaagccatctatcttaccttgggacttgggttttgtttcatttccagtttgatggtgcacgagcatgaacttgtttgaaagggtgttttatatgccgctgtgttttctctccrtgcaacttgatttgaagcagcatggctaaatgatgtaatctcctaaaatcacacattgtgcagggatagcagcacacaggaggaactgagcgtgctgcccttcttcataggcagagaataagagacctcagctcacagagcagtcag

SEQ ID NO: 87101 - DNA, 600 bp, Chicken  19866894388451_4
gcttttcctgcaccattggtgcagtgcaccctgctgcctcgctgctcatgcagtgctgtgctggtgccagaggtgtgcatagaggtgtgcatggagctgtgcagcygtacctctcagrcagccacgtcattttaaagcaagagagcrcagtttgtgccccacgagcagagaggaaaagtagaaatggtaagccatctatcttaccttgggacttgggttttgtttcatttccagtttgatggtgcacgagcatgaacttgtttgaaagggtgttttatatgccgctgtgttttctctccrtgcaacttgatttgaagcagcatggctaaatgatgtaatctcctaaaatcacacattgtgcagggatagcagcacacaggaggaactgagcgtgctgcccttcttcataggcagagaataagagacctcagctcacagagcagtcagcctctgacgtgcagagtcatcagagatgagaaggtgaatggagtttaaaatgcgtatggcattatgtgtttccgtgcctcccatttctcttatgtgatatttcttctttggccgtgggtgcagtttcatagagatggagaagttactgtttgt

SEQ ID NO: 87102 - DNA, 600 bp, Chicken  19866894388452_1
aacattgagacagacttctctgtgcagtttaaaatggtaggttttgtttggttattaacttcatagctgaagatggaaaagtaacataacattgttaatgatgctgatgcttccagttggcaatgcatgctttatcactggggcttctgagccaatctgaacaaaaagaatgacagcataaaaggaatgatttatcactactgcacagacaccaatgggcatactgtctcaaaggctgatgctgtcttagaacatttcattgcactgactaagaaggccataaagaaacattatagagcsaggaccattcctcatgtaattcaggactcctttctcaaaggttttgttgtcatagcaggagaaccaggatgcagctggagggaaggaagaacatccatgacagtgctgtttccctgcaccttttatagccacaaatagaggctcagagcctgcgtacatcacttgctgctgagttcttcagaactgccagcagaccattaggttagaaaagaagttaagctaaatgctatttaggcaaaatacctcctaaatccagtccccaggttctagtcagctgaggttaaatgaaggattgcaatt

SEQ ID NO: 87103 - DNA, 600 bp, Chicken  19866894388453_1
aaaggagaaaggggaaaagggaagtggaaagggggaaagggggaaagataggaaaggagaaagagatggggagaaagagatggggaaggagaaaaggaaaaatatgaagattaaaaagccaggatcatattactgcaacactgcctggtgttcacattactgcaacactgcacagcatccctgccttgcctttaaggcatgttccatcctctgtcagcagtgtgagggagagatgaggcttccaacacacctaggaatgaaatggggacatcttcccacaacagtgagaaattcacacarcaggagccctctctgcccaaagctcccccaggaagtgtgttcccaagggctgggagctttgggcagcttcctgctttttactgctcctttcgggggaactgccatactccagtccctggaacacacagcgtgggcacagcctgacgctggggggaggcagcccagctctgtgctgtcagagcaccgggcagtgaggggctcagccactggcagcacctggccctgtgtggacagacctgacctcagcagttgccccatcccaagcagtgggtttgtcagtgctgctgagccatccacctt

SEQ ID NO: 87104 - DNA, 600 bp, Chicken  19866894388455_1
ggtgaagctcttaggccttcaccactgtttataactagaggcacctcttgaatctgcattatccatcctctcaggacattaaatgcgttggacttacaaaagttaatggtatgagaaaaatttcaacacagtttcataaagagcaaccaagcatactcccaggttgtctcacatctggagatttctgggctcttttagctgcatcctacatgcattcagaaaaacagaggattaaataaaatcttttcctgttgcttttctctctttggaataaaaccaagctctgtagcacacaacgckttgctcatcagagtgctttcctgccagagcactttacaaactcaacttatacatcacaacacccttgcaggatggaaagaaaagttaaaaagctggtaacaaactgttactagttggagcaatctcatggaggtcaaagactatgggtgggccaaagaaattcgagtaataggatgtgaaagcrctaaggacaggatctccatacttcacagcgtgaagagatatggaagccattcagtgcttgcagacctcagttttctttgtttgaaaaccaagcacttttgagaaatcggactcaat

SEQ ID NO: 87105 - DNA, 492 bp, Chicken  19866894388455_2
ctgggctcttttagctgcatcctacatgcattcagaaaaacagaggattaaataaaatcttttcctgttgcttttctctctttggaataaaaccaagctctgtagcacacaacgckttgctcatcagagtgctttcctgccagagcactttacaaactcaacttatacatcacaacacccttgcaggatggaaagaaaagttaaaaagctggtaacaaactgttactagttggagcaatctcatggaggtcaaagactatgggtgggccaaagaaattcgagtaataggatgtgaaagcrctaaggacaggatctccatacttcacagcgtgaagagatatggaagccattcagtgcttgcagacctcagttttctttgtttgaaaaccaagcacttttgagaaatcggactcaataaaacagactcctaccatgtttaaagcagcagaacagtaactaagaaggtcttaaaagcatctagatacctagctc

SEQ ID NO: 87106 - DNA, 600 bp, Chicken  19866894388466_1
aaataaacatgtagaaagtttttaaaactcaaagaaatgctcttgggaggaagttataataaggaggaaggagctaaacaggacttagtgatttattttcctggccatcccactgacttcattttagtttccactggcttgtttttctttaccaggagcattccttcagcacttgtttctcccattgctctagagttgctgttaatgtttaaataatattatacttattatataacgttatctattacatataattagctgtcaagattcaatcatgttgctttgcctcctatatgaaamctctaatagtgctctcggagcacagaggttgggagcacaatcagtttccactgtatttgacaagccacgctgatatctcctcactttggtgctcttcactatgctctcagggacctgctcagtggttttgcctaggtcttctccatgcaaaacatccaaamcaaaatttccaatagtttgggtgttgtcccggtgtctgtcctttgaatacttctgctaagaacaaggcaaaaatayttactcactgttacaggctcagatcacgggttctgtgtacagagtagtcctactgaaaaaatc

SEQ ID NO: 87107 - DNA, 600 bp, Chicken  19866894388466_2
tccttcagcacttgtttctcccattgctctagagttgctgttaatgtttaaataatattatacttattatataacgttatctattacatataattagctgtcaagattcaatcatgttgctttgcctcctatatgaaamctctaatagtgctctcggagcacagaggttgggagcacaatcagtttccactgtatttgacaagccacgctgatatctcctcactttggtgctcttcactatgctctcagggacctgctcagtggttttgcctaggtcttctccatgcaaaacatccaaamcaaaatttccaatagtttgggtgttgtcccggtgtctgtcctttgaatacttctgctaagaacaaggcaaaaatayttactcactgttacaggctcagatcacgggttctgtgtacagagtagtcctactgaaaaaatctttcttcaccctattcaattcattaatatggaaaaaaaarwaagaaaagaaaagaagaaattatttaaagttacttttaatcaaatacaagaaactttaactcctcatatgtgtctacttttttatatttcatgcagtcccctacttattatgttttttat

SEQ ID NO: 87108 - DNA, 582 bp, Chicken  19866894388466_3
ttatctattacatataattagctgtcaagattcaatcatgttgctttgcctcctatatgaaamctctaatagtgctctcggagcacagaggttgggagcacaatcagtttccactgtatttgacaagccacgctgatatctcctcactttggtgctcttcactatgctctcagggacctgctcagtggttttgcctaggtcttctccatgcaaaacatccaaamcaaaatttccaatagtttgggtgttgtcccggtgtctgtcctttgaatacttctgctaagaacaaggcaaaaatayttactcactgttacaggctcagatcacgggttctgtgtacagagtagtcctactgaaaaaatctttcttcaccctattcaattcattaatatggaaaaaaaarwaagaaaagaaaagaagaaattatttaaagttacttttaatcaaatacaagaaactttaactcctcatatgtgtctacttttttatatttcatgcagtcccctacttattatgttttttattgatatctgtcggctaggttatgaacctcttctctatattctttactcctccagtgta

SEQ ID NO: 87109 - DNA, 479 bp, Chicken  19866894388466_4
tcagtttccactgtatttgacaagccacgctgatatctcctcactttggtgctcttcactatgctctcagggacctgctcagtggttttgcctaggtcttctccatgcaaaacatccaaamcaaaatttccaatagtttgggtgttgtcccggtgtctgtcctttgaatacttctgctaagaacaaggcaaaaatayttactcactgttacaggctcagatcacgggttctgtgtacagagtagtcctactgaaaaaatctttcttcaccctattcaattcattaatatggaaaaaaaarwaagaaaagaaaagaagaaattatttaaagttacttttaatcaaatacaagaaactttaactcctcatatgtgtctacttttttatatttcatgcagtcccctacttattatgttttttattgatatctgtcggctaggttatgaacctcttctctatattctttactcctccagtgta

SEQ ID NO: 87110 - DNA, 478 bp, Chicken  19866894388466_5
cagtttccactgtatttgacaagccacgctgatatctcctcactttggtgctcttcactatgctctcagggacctgctcagtggttttgcctaggtcttctccatgcaaaacatccaaamcaaaatttccaatagtttgggtgttgtcccggtgtctgtcctttgaatacttctgctaagaacaaggcaaaaatayttactcactgttacaggctcagatcacgggttctgtgtacagagtagtcctactgaaaaaatctttcttcaccctattcaattcattaatatggaaaaaaaarwaagaaaagaaaagaagaaattatttaaagttacttttaatcaaatacaagaaactttaactcctcatatgtgtctacttttttatatttcatgcagtcccctacttattatgttttttattgatatctgtcggctaggttatgaacctcttctctatattctttactcctccagtgta

SEQ ID NO: 87111 - DNA, 599 bp, Chicken  19866894388468_1
  misc_feature (1)..(261): n is any nucleotide
nnnnnnnnnnnnnnnnnnnnnnnnnnnnnnnnnnnnnnnnnnnnnnnnnnnnnnnnnnnnnnnnnnnnnnnnnnnnnnnnnnnnnnnnnnnnnnnnnnnnnnnnnnnnnnnnnnnnnnnnnnnnnnnnnnnnnnnnnnnnnnnnnnnnnnnnnnnnnnnnnnnnnnnnnnnnnnnnnnnnnnnnnnnnnnnnnnnnnnnnnnnnnnnnnnnnnnnnnnnnnnnnnnnnnnnnnnnnnnnnnnnnnnnnnnnnnnnnnnnnngagaggaacagtcccatcactgactttctcatggcctgragggccgsactcctgtatgtgttatggactacacatccacagttgtaaagacgtgacccttgtctctagctatgggttaggtagtaagttttcttccctctttttctgtcctgtgagagcaatacgtctgtcatctctcatttatgagaaagtacaacwatccatttcagtcatggttgcaatagtcatttattaaatatgcaaaactttttcagtggaaaaacagttgcaaatgtcttccctgtagcattaaaaggtaggacatttcaggaattttttttgtgctcatccacatgact

SEQ ID NO: 87112 - DNA, 599 bp, Chicken  19866894388468_2
  misc_feature (1)..(253): n is any nucleotide
nnnnnnnnnnnnnnnnnnnnnnnnnnnnnnnnnnnnnnnnnnnnnnnnnnnnnnnnnnnnnnnnnnnnnnnnnnnnnnnnnnnnnnnnnnnnnnnnnnnnnnnnnnnnnnnnnnnnnnnnnnnnnnnnnnnnnnnnnnnnnnnnnnnnnnnnnnnnnnnnnnnnnnnnnnnnnnnnnnnnnnnnnnnnnnnnnnnnnnnnnnnnnnnnnnnnnnnnnnnnnnnnnnnnnnnnnnnnnnnnnnnnnnnnnnnnngagaggaacagtcccatcactgactttctcatggcctgragggccgsactcctgtatgtgttatggactacacatccacagttgtaaagacgtgacccttgtctctagctatgggttaggtagtaagttttcttccctctttttctgtcctgtgagagcaatacgtctgtcatctctcatttatgagaaagtacaacwatccatttcagtcatggttgcaatagtcatttattaaatatgcaaaactttttcagtggaaaaacagttgcaaatgtcttccctgtagcattaaaaggtaggacatttcaggaattttttttgtgctcatccacatgactcattttga

SEQ ID NO: 87113 - DNA, 599 bp, Chicken  19866894388468_3
  misc_feature (1)..(102): n is any nucleotide
nnnnnnnnnnnnnnnnnnnnnnnnnnnnnnnnnnnnnnnnnnnnnnnnnnnnnnnnnnnnnnnnnnnnnnnnnnnnnnnnnnnnnnnnnnnnnnnnnnnnnngagaggaacagtcccatcactgactttctcatggcctgragggccgsactcctgtatgtgttatggactacacatccacagttgtaaagacgtgacccttgtctctagctatgggttaggtagtaagttttcttccctctttttctgtcctgtgagagcaatacgtctgtcatctctcatttatgagaaagtacaacwatccatttcagtcatggttgcaatagtcatttattaaatatgcaaaactttttcagtggaaaaacagttgcaaatgtcttccctgtagcattaaaaggtaggacatttcaggaattttttttgtgctcatccacatgactcattttgattcatgtgtctcattttacacttttgaacagtggcatatatttcaaatgatcagttgctgtaccatggcaccttgcaatttccccattatgcacaggcaaagcaatccaggtgctggtattactcacagacatcaagtgccttacttgatc

SEQ ID NO: 87114 - DNA, 600 bp, Chicken  19866894388469_1
ggcttaccccctccagtaagaggaaagcttttcagccaatcctgtctaatgcttccacctcagactatgctttgttttgtttgtatgtgtaaggaggtttgagggcaggagggcacaattttaaatcccaattcacgattccataacacccatcattatctgtctatgtgcagtgattattgccttgcttacaaagcccactgttcaaatacattcgatactgcagaagagaccatgttcaactgggttgttccattgctgaaatctttctgactttttcacccactgacacacttaggsttataggaaagatcagtactcttaccttaggctgggattatctgaaccatctccaaaactgagaatgtaaaaccaactaaaatgtggtaggaaataggcatgcagtgtctcaactgaataaccctctcctcaatttctcacagaccaaaactcaccctcttatttgcatcagatttggagttggtgctaatgagaggaaactgactataagaaccatgatccactccctagctggaaaccttaagggatggataggcagacaggcacagacaaacactaacctttccccctcactctttt

SEQ ID NO: 87115 - DNA, 599 bp, Chicken  19866894388475_1
  misc_feature (1)..(45): n is any nucleotide
nnnnnnnnnnnnnnnnnnnnnnnnnnnnnnnnnnnnnnnnnnnnnaattggggaacatccaaagctcaccttcctctcgtgaaaactgatctcagccccaagggacggagggggcatttacagtaaggtacagctttggagcagctctgatgagttatacagcccagtgctgagccctggggaagtgcatcgtcagcaaaacgccttctgatgtccagaaacacacaaaaagggattgtttgagccatggatgggtgccacagggctccagtcatgcagagctaataggtcagctgctcyctcgtttgtccacacgctcagctgaggttacagtttctcactaatttctttttttgtttgaagatagttatcctataacaggagccagaactgtcacgcaacatttacagcagtgaaatgacatgggctgggagaagtggttccagctacatctgggacagtcactttcctttttccaaatcaaagcatcattgttttctttcacaagtcccacatcttggcagcccgcagtttcctcaggttctctctcccagtaaccttactgcaaatgatttattgcaaccccaactattgacagc

SEQ ID NO: 87116 - DNA, 600 bp, Chicken  19866894388475_2
tgaggttacagtttctcactaatttctttttttgtttgaagatagttatcctataacaggagccagaactgtcacgcaacatttacagcagtgaaatgacatgggctgggagaagtggttccagctacatctgggacagtcactttcctttttccaaatcaaagcatcattgttttctttcacaagtcccacatcttggcagcccgcagtttcctcaggttctctctcccagtaaccttactgcaaatgatttattgcaaccccaactattgacagcctccaatgaccacaagttcttcwcccttatggaaggaagtcagtatatggtctggaatctctttccaaaagcycatagtaacaacacagatcgccactaagtgtaggttatcagcgtgaccttgcaccaggacaaggctacttcccatttaataacactttcaccacgcagagagatttattatggcattaaaaggtcagtaagactcctcctttcctatcagcctccatgagatgacaaaacagagcctggcaaaataaacagagcgtggcaaaaaacttggaggggggagacaataataatttggttttcctggtccacat

SEQ ID NO: 87117 - DNA, 600 bp, Chicken  19866894388475_3
ctataacaggagccagaactgtcacgcaacatttacagcagtgaaatgacatgggctgggagaagtggttccagctacatctgggacagtcactttcctttttccaaatcaaagcatcattgttttctttcacaagtcccacatcttggcagcccgcagtttcctcaggttctctctcccagtaaccttactgcaaatgatttattgcaaccccaactattgacagcctccaatgaccacaagttcttcwcccttatggaaggaagtcagtatatggtctggaatctctttccaaaagcycatagtaacaacacagatcgccactaagtgtaggttatcagcgtgaccttgcaccaggacaaggctacttcccatttaataacactttcaccacgcagagagatttattatggcattaaaaggtcagtaagactcctcctttcctatcagcctccatgagatgacaaaacagagcctggcaaaataaacagagcgtggcaaaaaacttggaggggggagacaataataatttggttttcctggtccacattgtattaactctcccagcagccatgacatgctctatttctgatatgccca

SEQ ID NO: 87118 - DNA, 600 bp, Chicken  19866894388476_1
gaactcctctacaataaaactggacactgtttcagcagtatgcctctggagaaattgtatttggattgctgacatatgctgcttagttcagagctgagttaatgctacaaataccttgcagatgaatcacagtaaagccccagcgtagcctcaagggacttgacatgttctgtctagagatggacttcccttggtctatttcagggagaatttttgtactacaacattttaaataactctgtactcctataaataactatgaacaccaagaaaaaaacatttttaaaactacatgtgttmgtaaatttgaatctttgatgccccctagttatgtgtcattttaacatttgatttcaggagggaaagacagcaaatatcccataaggataagtcagtatgaattatggataacacagcrcttttcaataacaaggaaaagrtctggttaaaaaaaaaatcaccaaatgtataatcataaaatgaattcttgatacactaaactagctgagccattttatacacttaagaagccaagctccagtcagacagataccgatcccttyggcatgaattcacctataggattttctatttctatga

SEQ ID NO: 87119 - DNA, 600 bp, Chicken  19866894388476_2
cagatgaatcacagtaaagccccagcgtagcctcaagggacttgacatgttctgtctagagatggacttcccttggtctatttcagggagaatttttgtactacaacattttaaataactctgtactcctataaataactatgaacaccaagaaaaaaacatttttaaaactacatgtgttmgtaaatttgaatctttgatgccccctagttatgtgtcattttaacatttgatttcaggagggaaagacagcaaatatcccataaggataagtcagtatgaattatggataacacagcrcttttcaataacaaggaaaagrtctggttaaaaaaaaaatcaccaaatgtataatcataaaatgaattcttgatacactaaactagctgagccattttatacacttaagaagccaagctccagtcagacagataccgatcccttyggcatgaattcacctataggattttctatttctatgaaagaaactggggaaaaaatatttacaacatatttgactacatatattagaaagcaataaaagcacacaagctttgcaacaacagttcccctttttttcttttttaaaccacatagttg

SEQ ID NO: 87120 - DNA, 591 bp, Chicken  19866894388476_3
cagcgtagcctcaagggacttgacatgttctgtctagagatggacttcccttggtctatttcagggagaatttttgtactacaacattttaaataactctgtactcctataaataactatgaacaccaagaaaaaaacatttttaaaactacatgtgttmgtaaatttgaatctttgatgccccctagttatgtgtcattttaacatttgatttcaggagggaaagacagcaaatatcccataaggataagtcagtatgaattatggataacacagcrcttttcaataacaaggaaaagrtctggttaaaaaaaaaatcaccaaatgtataatcataaaatgaattcttgatacactaaactagctgagccattttatacacttaagaagccaagctccagtcagacagataccgatcccttyggcatgaattcacctataggattttctatttctatgaaagaaactggggaaaaaatatttacaacatatttgactacatatattagaaagcaataaaagcacacaagctttgcaacaacagttcccctttttttcttttttaaaccacatagttgagaaaaggattgg

SEQ ID NO: 87121 - DNA, 468 bp, Chicken  19866894388476_4
caccaagaaaaaaacatttttaaaactacatgtgttmgtaaatttgaatctttgatgccccctagttatgtgtcattttaacatttgatttcaggagggaaagacagcaaatatcccataaggataagtcagtatgaattatggataacacagcrcttttcaataacaaggaaaagrtctggttaaaaaaaaaatcaccaaatgtataatcataaaatgaattcttgatacactaaactagctgagccattttatacacttaagaagccaagctccagtcagacagataccgatcccttyggcatgaattcacctataggattttctatttctatgaaagaaactggggaaaaaatatttacaacatatttgactacatatattagaaagcaataaaagcacacaagctttgcaacaacagttcccctttttttcttttttaaaccacatagttgagaaaaggattgg

SEQ ID NO: 87122 - DNA, 600 bp, Chicken  19866894388479_1
gactttgcaagtctttacaaatactatcagtgagtaacagtccacagctgtgtgataaagattgcagaagcactggtggagcaagggctatagttttaggctgggaaatgcagcctttagaaagaaactcatctatgtgttttacacattaattttacagggagaatttaaaaaatgctctaattactttcagttccatttcctttggttggaatttgttctccccagctgatgcgtccagcaagaatgcaggatagtacaattacatttataagaaacagaagaaaaagcagcctcaarcaaaaagggcattcagtgaacactgccacctgtgtgtgaaatgtgccactatttaaatgctcactcctatgagtataagctttaagggctttcttaataaggactttccttcccagccttgattctgyaagttacttaaaacccaggaaggctgagccagccaatgtcttttatgacctctatacacattatatatgttgaatctaacctatatacacaaatacttaattttatcaggaaaggtggaactggaaagtgattggggccagcccagtcacatttaaaaaagtctgccctgaa

SEQ ID NO: 87123 - DNA, 600 bp, Chicken  19866894388479_2
tcatctatgtgttttacacattaattttacagggagaatttaaaaaatgctctaattactttcagttccatttcctttggttggaatttgttctccccagctgatgcgtccagcaagaatgcaggatagtacaattacatttataagaaacagaagaaaaagcagcctcaarcaaaaagggcattcagtgaacactgccacctgtgtgtgaaatgtgccactatttaaatgctcactcctatgagtataagctttaagggctttcttaataaggactttccttcccagccttgattctgyaagttacttaaaacccaggaaggctgagccagccaatgtcttttatgacctctatacacattatatatgttgaatctaacctatatacacaaatacttaattttatcaggaaaggtggaactggaaagtgattggggccagcccagtcacatttaaaaaagtctgccctgaaatacaaattcctttaatcagcatggttaatctagttaacaaaatggtttcccccacagttaacaatggagggggggggggggaggggaacataaacaaaacaacaacaacaacaaagagggcctggag

SEQ ID NO: 87124 - DNA, 600 bp, Chicken  19866894388483_1
tggctcactttaacagttgttgaactgaacagaaaagttaagaagcaactgaagccttaacttgcagccaaagatgactataaatcatacagtgaacaagtgtgcacctgggagggaattctgttttaacaacatgcaaaattgattaagtggtagcactttccctgaatacatctgcaaacctcagaggaaaaaaaaaatacattgtctaatactctcacacactccttatatcaccactaaccattaagcgtgtacagaattgagtaaggaaaaaagctaaataagcaaaaaaaaaastatcagtaaatacaatggcttgaaaatccccatattgacacatgcagtattaagtcgatcctgacccaataaactctgcatggaaaacatatgtcaagacttgacgcagtmtcatgaagctaaaaaggttatgttctgttacaccagggccaagttctggttcctcartgcacattactgtgtgggaattacagaccgtgaattgtcctccagacagaaatgtcctcaacactctgaaagacaaagatctcaaagccattgggcagctaattgctttcacatggtgtaacaggatcagag

SEQ ID NO: 87125 - DNA, 600 bp, Chicken  19866894388483_2
gagggaattctgttttaacaacatgcaaaattgattaagtggtagcactttccctgaatacatctgcaaacctcagaggaaaaaaaaaatacattgtctaatactctcacacactccttatatcaccactaaccattaagcgtgtacagaattgagtaaggaaaaaagctaaataagcaaaaaaaaaastatcagtaaatacaatggcttgaaaatccccatattgacacatgcagtattaagtcgatcctgacccaataaactctgcatggaaaacatatgtcaagacttgacgcagtmtcatgaagctaaaaaggttatgttctgttacaccagggccaagttctggttcctcartgcacattactgtgtgggaattacagaccgtgaattgtcctccagacagaaatgtcctcaacactctgaaagacaaagatctcaaagccattgggcagctaattgctttcacatggtgtaacaggatcagagtcagaccatctacctttctcaaatatccaggttggaatttcacattaactacgtatctgttgaatttttaaatggatcagcttgtgaacaggataaacaagaatccttcta

SEQ ID NO: 87126 - DNA, 600 bp, Chicken  19866894388483_3
atacatctgcaaacctcagaggaaaaaaaaaatacattgtctaatactctcacacactccttatatcaccactaaccattaagcgtgtacagaattgagtaaggaaaaaagctaaataagcaaaaaaaaaastatcagtaaatacaatggcttgaaaatccccatattgacacatgcagtattaagtcgatcctgacccaataaactctgcatggaaaacatatgtcaagacttgacgcagtmtcatgaagctaaaaaggttatgttctgttacaccagggccaagttctggttcctcartgcacattactgtgtgggaattacagaccgtgaattgtcctccagacagaaatgtcctcaacactctgaaagacaaagatctcaaagccattgggcagctaattgctttcacatggtgtaacaggatcagagtcagaccatctacctttctcaaatatccaggttggaatttcacattaactacgtatctgttgaatttttaaatggatcagcttgtgaacaggataaacaagaatccttctatctcaattttcatactgtagagtaataccagctttaccttgcttacccaggaagctc

SEQ ID NO: 87127 - DNA, 600 bp, Chicken  19866894388483_4
ttacataggaaggacagactagaacatacacaataatgtgtaatattttatataaataaaagctttggtgtttacaagcaagaaaaggtcttcattgtctgcatgactccacagctgccaagatgtcctgcaaaatgttgttcctgttctccttacttacctagaaaaagagaaattagaacggatgtaattggataagtaacctctatatcatggtttacttcaaaaacaaagcagaaattcaaatgcatttcattcttggtggggaaatgctgagtatcaaacactttctttcttgtsctaccaacaacacatgaaactaaacccacaaaaccgcacatgatataattactcatggatacccattgcttggatactcagagcttgaataactaacaggaagtgctcaaagaaccactgagtacttttgccattactagaaatcccttccaattactaaacctcatttttctacaataaagtggaggtcttaaatcatcagcgcttggaaggactgtatttctgtggatgataggccaagtgaaaagcatcttcaatgaaagaattagaacatgcttaacaacggcacaaagccttagc

SEQ ID NO: 87128 - DNA, 600 bp, Chicken  19866894388495_1
tatatgcagtcgatgaattgttggaaagtccttattatagaaacatagaatagaagaagagtgtacgccctctgataaatgaaaagggagagcaggcctcctcaggcatgaagaaagctaagatacttaatgatttttttgccttgggcttcatggcagtcaagattctcacgccttctgtgtccctgaacttcgaagcgagggctgggggagcaaaatccctccaagtgaaagagtggagcaaatccaagatcacctcgtagttctgactgtgtgcaagtctatggagccagatgacaygtatcccagggttctgaagaaactcatggttgccaagctgatctctgtcatacttgaaataattgtggctttcaggtgaagtccctggttactgaaaaaagggaartatcactcccatattcaagaaagggagaaaggaagacctagggaactaccagccgttgagcttccagtatgttcctggggagatcacagagagaattctcttgaaagagatgttaaggcatatgttaaatgagtaagtgaacagaggcaggtagcactgcttctccaagggctgatcatgcttcactaatttgg

SEQ ID NO: 87129 - DNA, 600 bp, Chicken  19866894388495_2
catgaagaaagctaagatacttaatgatttttttgccttgggcttcatggcagtcaagattctcacgccttctgtgtccctgaacttcgaagcgagggctgggggagcaaaatccctccaagtgaaagagtggagcaaatccaagatcacctcgtagttctgactgtgtgcaagtctatggagccagatgacaygtatcccagggttctgaagaaactcatggttgccaagctgatctctgtcatacttgaaataattgtggctttcaggtgaagtccctggttactgaaaaaagggaartatcactcccatattcaagaaagggagaaaggaagacctagggaactaccagccgttgagcttccagtatgttcctggggagatcacagagagaattctcttgaaagagatgttaaggcatatgttaaatgagtaagtgaacagaggcaggtagcactgcttctccaagggctgatcatgcttcactaatttggtggccttctatgatggagtgacagtatcagcggacaaaggaagggcagctggtgtcatctacatggacttgtgcaaggcctttgatgtggtccagcaccacatgct

SEQ ID NO: 87130 - DNA, 600 bp, Chicken  19866894388502_1
tcccaatcttctgtctgttcttgctatatccaagtttgacaatgggttgttgtataaatggagactaatctccctctgcaatttttttttttttacaattgtagcttcccagcaatttgcactccttaacatatttatcctccaaatactcctacgaagtagagaaggctgttatctcagccttacacattggaagtgatttgtgcaaggtcacatgggcagtttatggcagagcggagcactgagcgcacttctcgatccccaagcttagaggggtgcctgctggacagcctttcttaygcgagagttcaggtgaaaatttatttctagttaaactgagtaagactgcattcattatggaaataaacattatttctatgtagttctaactacagctcagattattatatgacaggacattttgtatctgttttttgtttgctttaaaaaggaaagtgataccaaaatgaatattgctgcataccaccaaaattatctaatgaacaacaatcatccaaattgaatagaaaataaatattgacagctgcatgtgtttgtaggtacacacataatattctaattggaacattgactttttct

SEQ ID NO: 87131 - DNA, 600 bp, Chicken  19866894388502_2
ttcaaatgcatttttgttggaatcattttgatacaggtcacaatttttcacttattttagatattataactgttgaattagcctcaaacataaaaaaaagtagctttgttgtttagatggctgccacagaacaattggattgcgtgctgaaagttgtgctaatgcagtctatttcacaaaatgaaggtaaataaattcacctctaattttaaactgcattcaatattactgcagtgctatttgtaacagcattttagactgcttgatccagaaaacatccttatggaaaataattgtgcrctggctcactgtatctgcttaatttaatcaggagtctggaaaggctttaaagatcccttttttctcatctgtgagagttatctgaaactaaagcccttgaaatgctgtctaggttgtctttttagaaacccttcttggctttagctgacaaattatgatagatgaaatatgatatgtcaaccagcaactttcttcccttccctaggtagctagtggttacccttacaaaaatcagcatttggcattggctgccatccagtcatgcttgaaatactgggaaatagaaaataactgccatgg

SEQ ID NO: 87132 - DNA, 600 bp, Chicken  19866894388508_1
gtagagggtgtactgtaatccttttatgttacttcttcagtgcagattacgcagcaagaaataattaggagattaattttcacctgtcactgccaataatagataaccttgatacagtgacagggctaggaatttggggaatggaaaagcgtttaaccctgtaggggctgctgcagggagcaggcagaaaatggttgccaggacgtgacctccctgctggccgcacgctctgcctcgctgctccgccaggacaccccgcagccccggctggtaattcacctgcggttctgtcgcttgccrtgatttcaattcccagtctgagtggcattcctaggctgctcggggaaggagccggctaatgaagatggcttcattaggcggcgtgcagtttcgcctccctgcaacaaatgcagctgaaaaaacatcccagaagaaactgtgcttctggccttcggagaaagcatggcggaggtgcttctgctccctttcagcattaattatgggctggcagaaggtgtgcctaaaatgccgcctgtgctccaggacggggcaggtaaatgggaagggagaatgcagcccttccccctccgctgcgtttct

SEQ ID NO: 87133 - DNA, 600 bp, Chicken  19866894388538_1
agacagagttccagctgtaaagtttacttcggaaaacaaatctgataggcaagctacttgtgtcattgagtttgatacgttcataaatatttaagatattttatgcaatatgcccatcaagtgacaggccaaaatagctcctaagactttaccatgaattaaaaatgtgaaaataatggattttctgggttactagctgaagtgaaaattgtaagaaaaactgctcatgtttgaggtgaacatttttgttttgttatttcttcaaaaaggaaaatgggaatggtaaattaatcatactayatcaatcaaaacactgcatttgatttgaaaccagatgttctgattttatgatatttttgttccctgaaaaagtaagaaatgaataggggaattctgaaaygaaggcattctttcacattaaaattttcaaacacttgactctgaaattttggaattacctcctccaccatttctcagtgtgagatttttgttgttgtttgtttctccagttaaagctgttacttctgtttgcctctgtatcaactgctttgaagaatctgttactcacagcaggacaattaacctagctctaccaaaaac

SEQ ID NO: 87134 - DNA, 600 bp, Chicken  19866894388538_2
ttatgcaatatgcccatcaagtgacaggccaaaatagctcctaagactttaccatgaattaaaaatgtgaaaataatggattttctgggttactagctgaagtgaaaattgtaagaaaaactgctcatgtttgaggtgaacatttttgttttgttatttcttcaaaaaggaaaatgggaatggtaaattaatcatactayatcaatcaaaacactgcatttgatttgaaaccagatgttctgattttatgatatttttgttccctgaaaaagtaagaaatgaataggggaattctgaaaygaaggcattctttcacattaaaattttcaaacacttgactctgaaattttggaattacctcctccaccatttctcagtgtgagatttttgttgttgtttgtttctccagttaaagctgttacttctgtttgcctctgtatcaactgctttgaagaatctgttactcacagcaggacaattaacctagctctaccaaaaacatggcaagctaaaaaaaaacgtgatgtgaaaaatttacctttgcctccaatggagccaagttctcctacagtttttatctacatattacagataatgttc

SEQ ID NO: 87135 - DNA, 600 bp, Chicken  19866894388541_1
aaaatttgtcaagataaagaatatttcatcatccacttaaaataaatgaaccaaccacaagcagtcacactcctctctcttttcctctcaccccacaaaaaccacacactcccttactatcttagctacaataagcacaaattttattgaaagttccactgttggttcacttgcttctgacagcaagcaccagaaattcatcttctctgagcattctaactgtttctggttcttttcaaatgcatctttgtgatgaacaagttcgatcttcatcatccaagggtagacactttccagctmcttgctagtawacagtactccaggtaaatttcagctttgtattcttgtcaggaactgaagcagaggacacaagacagccaagtctgtagtacaaaggcaagactacatggctgtaagctgtaagtaactcaagttttgtttcaggcacagaaaggatgcaacaagtacttcatcactgggmtattagatgtatatggatgatgcaagtctttactgttctactgctgaagcactgtcaaagtgtattaaaatgcattcctgacttcacactcctgtcagctttctctccagataaattct

SEQ ID NO: 87136 - DNA, 600 bp, Chicken  19866894388541_2
agataaagaatatttcatcatccacttaaaataaatgaaccaaccacaagcagtcacactcctctctcttttcctctcaccccacaaaaaccacacactcccttactatcttagctacaataagcacaaattttattgaaagttccactgttggttcacttgcttctgacagcaagcaccagaaattcatcttctctgagcattctaactgtttctggttcttttcaaatgcatctttgtgatgaacaagttcgatcttcatcatccaagggtagacactttccagctmcttgctagtawacagtactccaggtaaatttcagctttgtattcttgtcaggaactgaagcagaggacacaagacagccaagtctgtagtacaaaggcaagactacatggctgtaagctgtaagtaactcaagttttgtttcaggcacagaaaggatgcaacaagtacttcatcactgggmtattagatgtatatggatgatgcaagtctttactgttctactgctgaagcactgtcaaagtgtattaaaatgcattcctgacttcacactcctgtcagctttctctccagataaattctcccttaaggtt

SEQ ID NO: 87137 - DNA, 600 bp, Chicken  19866894388541_3
agcaagcaccagaaattcatcttctctgagcattctaactgtttctggttcttttcaaatgcatctttgtgatgaacaagttcgatcttcatcatccaagggtagacactttccagctmcttgctagtawacagtactccaggtaaatttcagctttgtattcttgtcaggaactgaagcagaggacacaagacagccaagtctgtagtacaaaggcaagactacatggctgtaagctgtaagtaactcaagttttgtttcaggcacagaaaggatgcaacaagtacttcatcactgggmtattagatgtatatggatgatgcaagtctttactgttctactgctgaagcactgtcaaagtgtattaaaatgcattcctgacttcacactcctgtcagctttctctccagataaattctcccttaaggttgcatgggaagatgtgttatgtcctaaaatacaactgcaatattctttttattgaataaggatcacttgtttgagaacagcacctctgactactaacatccccaaattatatcattttaacctttttaaaaaaattgagaacagcattaaaaaaaaatcagcagtagaaac

SEQ ID NO: 87138 - DNA, 600 bp, Chicken  19866894388542_1
agcaaataaatgcatcatcctgttctgtatgaagtacttgacttgttgaacgtcagagttgatcattttgtgggataacagattttattccacatttccataaaactggatatgagaccacaggataaacatatatacataaaagcagaatgaaagtgcactattacatgttcagatattttcttgctgctcaatgtttttgattgagccagtgattctacacacacaggcatccataaataagcacagaatggaagctggtgtctttagaattataaactcaagcaatatacattatasatatttgtataatccacttccagtaggtttagagttgcactaaactagatgattattcagaggatttacacagctgattatgaaagcaaaacaasgagttaatgcattttgtttttagaacatcattttcacaatgtgattgtgaaaaytgaggaaacaattttgtatagcagaaaactaatccaaagcaacagttaaaaggcaaacatctacttggctagaaataaaaaagaaaaaaaagtgatttacttttgatacactgtattatagctgaggtaattatctctagttcaccttttt

SEQ ID NO: 87139 - DNA, 567 bp, Chicken  19866894388542_2
ttccataaaactggatatgagaccacaggataaacatatatacataaaagcagaatgaaagtgcactattacatgttcagatattttcttgctgctcaatgtttttgattgagccagtgattctacacacacaggcatccataaataagcacagaatggaagctggtgtctttagaattataaactcaagcaatatacattatasatatttgtataatccacttccagtaggtttagagttgcactaaactagatgattattcagaggatttacacagctgattatgaaagcaaaacaasgagttaatgcattttgtttttagaacatcattttcacaatgtgattgtgaaaaytgaggaaacaattttgtatagcagaaaactaatccaaagcaacagttaaaaggcaaacatctacttggctagaaataaaaaagaaaaaaaagtgatttacttttgatacactgtattatagctgaggtaattatctctagttcacctttttgtcttaagaaatgggaagcaatcctttcatctttctgtgaaataattatttctaaaaagcaa

SEQ ID NO: 87140 - DNA, 513 bp, Chicken  19866894388542_3
atgaaagtgcactattacatgttcagatattttcttgctgctcaatgtttttgattgagccagtgattctacacacacaggcatccataaataagcacagaatggaagctggtgtctttagaattataaactcaagcaatatacattatasatatttgtataatccacttccagtaggtttagagttgcactaaactagatgattattcagaggatttacacagctgattatgaaagcaaaacaasgagttaatgcattttgtttttagaacatcattttcacaatgtgattgtgaaaaytgaggaaacaattttgtatagcagaaaactaatccaaagcaacagttaaaaggcaaacatctacttggctagaaataaaaaagaaaaaaaagtgatttacttttgatacactgtattatagctgaggtaattatctctagttcacctttttgtcttaagaaatgggaagcaatcctttcatctttctgtgaaataattatttctaaaaagcaa

SEQ ID NO: 87141 - DNA, 600 bp, Chicken  19866894388551_1
ctaaattgaaattttacacaagaaatccaagtttgatagaagactgaatcacaacacctcttcttacattggtccatgtcttaaaatccagttgtcagcctgttcttccctcaagcactgcatatactatgcagtttcaattaagcttcagtttttgcagtaaaaaagcacacagagaaaacaattcttaaaaccaagtgtgaatacttgatcagaggagaatagtcattttagcccaaaggccttctgcaacatggacactaagaaatcatatctattgatgtcatttctcacatacargytccactactaaaagaaaatatcttacacttgtaatatcaggtcacatttgcaagagagagacatatccaagttcacaaggcagaactcagcaatgccatttacactacagrtttatggataacaatggactgagcttacctgactgtagttctgatggtgttatctttattgtgattgtgctctttgctcaccttttctgtggaggaatgtacatttttttgtgattataggatatatcatattttccctatcaaattttattcagcagaactattttaatgctttctgataacagca

SEQ ID NO: 87142 - DNA, 600 bp, Chicken  19866894388551_2
aaattgaaattttacacaagaaatccaagtttgatagaagactgaatcacaacacctcttcttacattggtccatgtcttaaaatccagttgtcagcctgttcttccctcaagcactgcatatactatgcagtttcaattaagcttcagtttttgcagtaaaaaagcacacagagaaaacaattcttaaaaccaagtgtgaatacttgatcagaggagaatagtcattttagcccaaaggccttctgcaacatggacactaagaaatcatatctattgatgtcatttctcacatacargytccactactaaaagaaaatatcttacacttgtaatatcaggtcacatttgcaagagagagacatatccaagttcacaaggcagaactcagcaatgccatttacactacagrtttatggataacaatggactgagcttacctgactgtagttctgatggtgttatctttattgtgattgtgctctttgctcaccttttctgtggaggaatgtacatttttttgtgattataggatatatcatattttccctatcaaattttattcagcagaactattttaatgctttctgataacagcata

SEQ ID NO: 87143 - DNA, 600 bp, Chicken  19866894388551_3
agcactgcatatactatgcagtttcaattaagcttcagtttttgcagtaaaaaagcacacagagaaaacaattcttaaaaccaagtgtgaatacttgatcagaggagaatagtcattttagcccaaaggccttctgcaacatggacactaagaaatcatatctattgatgtcatttctcacatacargytccactactaaaagaaaatatcttacacttgtaatatcaggtcacatttgcaagagagagacatatccaagttcacaaggcagaactcagcaatgccatttacactacagrtttatggataacaatggactgagcttacctgactgtagttctgatggtgttatctttattgtgattgtgctctttgctcaccttttctgtggaggaatgtacatttttttgtgattataggatatatcatattttccctatcaaattttattcagcagaactattttaatgctttctgataacagcataatccagaataatttaaggggaaatggttacaatatgactgcagaataagcacagcttttttaaaaatgtaactcatcaatttttttctccctcacatttcattgtcagtgc

SEQ ID NO: 87144 - DNA, 398 bp, Chicken  19866894388551_4
gtccatttatgacagtaactacctacgtgttctcctatattccaaagcctcaatcaaccagttgtcactaatcatttaatgagccttcaaaaatacaagagttgaactctggcatttccaattcagttcaaacattatgaacctgctcagactgtcacagtgctctaaaacatatgttaactatggagaacatttggcaagacttttgtatttcacttgcaagggtagaagggctctacctcctattacgcttcagccttagcaatctcatactttcgtagcaccttaatgattatacaygatctccttttgctctttaaattctgctttcagctatttccactgcttttacctgataactggaagagcagctcagatgccatcttcactgatatatc

SEQ ID NO: 87145 - DNA, 600 bp, Chicken  19866894388562_1
atgctttttttccctgatacttccagaatatgaagagcacaaagtagcattttagtgatgtttttctagaaactgtcccttgtgatgctggattgacacttcagttcttatacacacaatgatgttgtcacagagtaacttaaaatattaacttcattccactgtattttttcagataaatgtgactccttagttgagaatgggttagtgttcctatcagccttagcatagtttgtataacaattccctgtagagctatttccttttagacaccagtttcaaaatgaatccaagctagcrgtgacatctaatgactgctacacaggcctcagtygcaatggaattttctctgtggctgacctcacgtggcattgagttgttactaattacttttttcagtagtttggagttcgaagtagatcctgcaggccagattaattttcatttgtagctgtcagaaggtttcactgggctttgaatggaaccttgcatgagttcataatagcatgcagaatttagagtgaaatcataaacaagtggtcatcctttgcttagtgaggaagtgtaagagaagaaggagctggtaaggaattactaatt

SEQ ID NO: 87146 - DNA, 600 bp, Chicken  19866894388562_2
gagcacaaagtagcattttagtgatgtttttctagaaactgtcccttgtgatgctggattgacacttcagttcttatacacacaatgatgttgtcacagagtaacttaaaatattaacttcattccactgtattttttcagataaatgtgactccttagttgagaatgggttagtgttcctatcagccttagcatagtttgtataacaattccctgtagagctatttccttttagacaccagtttcaaaatgaatccaagctagcrgtgacatctaatgactgctacacaggcctcagtygcaatggaattttctctgtggctgacctcacgtggcattgagttgttactaattacttttttcagtagtttggagttcgaagtagatcctgcaggccagattaattttcatttgtagctgtcagaaggtttcactgggctttgaatggaaccttgcatgagttcataatagcatgcagaatttagagtgaaatcataaacaagtggtcatcctttgcttagtgaggaagtgtaagagaagaaggagctggtaaggaattactaattactaaagaagtgagtaggagaggtctcagcagct

SEQ ID NO: 87147 - DNA, 600 bp, Chicken  19866894388572_1
taggcagttgctttttatgctatctttatttctttggctattatatgactacataaagtaaggacctcatagcagtgctgctcatgtgcacatatgttgatgagacttcgaatgaatgattttatttgggaatctccatgacaatactactactagtagtagccccttcctgaatggtgctcgaaggaagggtactttctttaccatggtatatgcttgccccagactgggttaaaatccaacatctttcctcaggtgcatttcaaactgaatcaccatggggaatcttttcctttccckgacaggtacagttccacagtgtaacaacasttcattgcacctttactggcatatggagtatagcaatttcctttttcattggttctggatgtaatttctgcctcctttctgataaagaygctaaaagtctcattagcaccacatgtacatccagcatctccagcacagcttttactcagtcaatgcctttcacaagcacctgaagcctcctctcccctttgcccatgatgtatgtaactgcagtggcagcatttcattctcagtcagttactgttgtcactgatagcagacaaacagcaa

SEQ ID NO: 87148 - DNA, 600 bp, Chicken  19866894388572_2
tctttggctattatatgactacataaagtaaggacctcatagcagtgctgctcatgtgcacatatgttgatgagacttcgaatgaatgattttatttgggaatctccatgacaatactactactagtagtagccccttcctgaatggtgctcgaaggaagggtactttctttaccatggtatatgcttgccccagactgggttaaaatccaacatctttcctcaggtgcatttcaaactgaatcaccatggggaatcttttcctttccckgacaggtacagttccacagtgtaacaacasttcattgcacctttactggcatatggagtatagcaatttcctttttcattggttctggatgtaatttctgcctcctttctgataaagaygctaaaagtctcattagcaccacatgtacatccagcatctccagcacagcttttactcagtcaatgcctttcacaagcacctgaagcctcctctcccctttgcccatgatgtatgtaactgcagtggcagcatttcattctcagtcagttactgttgtcactgatagcagacaaacagcaaatttcttcccttttcttaactcatttccat

SEQ ID NO: 87149 - DNA, 600 bp, Chicken  19866894388572_3
ttttatttgggaatctccatgacaatactactactagtagtagccccttcctgaatggtgctcgaaggaagggtactttctttaccatggtatatgcttgccccagactgggttaaaatccaacatctttcctcaggtgcatttcaaactgaatcaccatggggaatcttttcctttccckgacaggtacagttccacagtgtaacaacasttcattgcacctttactggcatatggagtatagcaatttcctttttcattggttctggatgtaatttctgcctcctttctgataaagaygctaaaagtctcattagcaccacatgtacatccagcatctccagcacagcttttactcagtcaatgcctttcacaagcacctgaagcctcctctcccctttgcccatgatgtatgtaactgcagtggcagcatttcattctcagtcagttactgttgtcactgatagcagacaaacagcaaatttcttcccttttcttaactcatttccattgatgatattaagattcactttctacataacttacatcaaaactatcctggctgcaggttacctgcaggctgttttctctatgtcaaat

SEQ ID NO: 87150 - DNA, 600 bp, Chicken  19866894388577_1
aaaaatccctttgtttcttttgagcttggcaacagtacttccagctggtgacactacttgtttcacataaaagccttctctatcaaaagctggactaagatgaacaggacattccttttatgcagctaaatcaaaattgctgctaactcagctgaatttcaaccatctgcctaaaggtgagttttacacagtaattctggtccctccatctagccattcttgctgctatacaggcaactcagtgctttctgcagagcaccccagagccaccagtatatcctgatattcaatttctatttwwaaaaaaagcaaaaacaaactttatttacatatgccaatttttaagaatttggacctcatacagtttcatgcacaatgcttgatttactacatttctgcaccacactgctgaactgcacttgttaccaacatagagacctcctccaccttgtagattagtcaccaaattgaatttcactacagggtagccctcaggccatctgggcaattaaattagatgcaggctagactggaggtcttatctgaatctacagcagcaatgagtcagaacaggatctcccttcttcaaactatactgct

SEQ ID NO: 87151 - DNA, 600 bp, Chicken  19866894388577_2
aaaatccctttgtttcttttgagcttggcaacagtacttccagctggtgacactacttgtttcacataaaagccttctctatcaaaagctggactaagatgaacaggacattccttttatgcagctaaatcaaaattgctgctaactcagctgaatttcaaccatctgcctaaaggtgagttttacacagtaattctggtccctccatctagccattcttgctgctatacaggcaactcagtgctttctgcagagcaccccagagccaccagtatatcctgatattcaatttctatttwwaaaaaaagcaaaaacaaactttatttacatatgccaatttttaagaatttggacctcatacagtttcatgcacaatgcttgatttactacatttctgcaccacactgctgaactgcacttgttaccaacatagagacctcctccaccttgtagattagtcaccaaattgaatttcactacagggtagccctcaggccatctgggcaattaaattagatgcaggctagactggaggtcttatctgaatctacagcagcaatgagtcagaacaggatctcccttcttcaaactatactgctg

SEQ ID NO: 87152 - DNA, 599 bp, Chicken  19866894388579_1
  misc_feature (1)..(184): n is any nucleotide
nnnnnnnnnnnnnnnnnnnnnnnnnnnnnnnnnnnnnnnnnnnnnnnnnnnnnnnnnnnnnnnnnnnnnnnnnnnnnnnnnnnnnnnnnnnnnnnnnnnnnnnnnnnnnnnnnnnnnnnnnnnnnnnnnnnnnnnnnnnnnnnnnnnnnnnnnnnnnnnnnnnnnnnnnnnnnnnnnnnnnnnntccatgctcagcccggagctagatctagcatcatagagtcaaagaatcatagagtcagagaatcatagactggtttggattggaagggaccttaaacctgctgctgtgcagggttsccaaccactaaatcaggcagcagatcaggctgctcagggctccatccaaccttgaccttggccacctccagggatggggcrcccatgcttctgtgggcagcagtgccagggcctcactgtcctctcagtgaaaaaatttcctgatatctaatctaaatttcccttcttttagtttaaaaccactcctccttgycctatcactatctatccacacaagaagttgatttccctcctgcttttaagctccatttaagtattggraggctattatcaggtttcccctgagctttctcagtgga

SEQ ID NO: 87153 - DNA, 599 bp, Chicken  19866894388579_2
  misc_feature (1)..(103): n is any nucleotide
nnnnnnnnnnnnnnnnnnnnnnnnnnnnnnnnnnnnnnnnnnnnnnnnnnnnnnnnnnnnnnnnnnnnnnnnnnnnnnnnnnnnnnnnnnnnnnnnnnnnnnntccatgctcagcccggagctagatctagcatcatagagtcaaagaatcatagagtcagagaatcatagactggtttggattggaagggaccttaaacctgctgctgtgcagggttsccaaccactaaatcaggcagcagatcaggctgctcagggctccatccaaccttgaccttggccacctccagggatggggcrcccatgcttctgtgggcagcagtgccagggcctcactgtcctctcagtgaaaaaatttcctgatatctaatctaaatttcccttcttttagtttaaaaccactcctccttgycctatcactatctatccacacaagaagttgatttccctcctgcttttaagctccatttaagtattggraggctattatcaggtttcccctgagctttctcagtggagacctgatagtgtccttacagtagataaaggtgacaaatgcatttctgcctggtcagccactgtggaagtgtcctggcaga

SEQ ID NO: 87154 - DNA, 600 bp, Chicken  19866894388579_3
agcccggagctagatctagcatcatagagtcaaagaatcatagagtcagagaatcatagactggtttggattggaagggaccttaaacctgctgctgtgcagggttsccaaccactaaatcaggcagcagatcaggctgctcagggctccatccaaccttgaccttggccacctccagggatggggcrcccatgcttctgtgggcagcagtgccagggcctcactgtcctctcagtgaaaaaatttcctgatatctaatctaaatttcccttcttttagtttaaaaccactcctccttgycctatcactatctatccacacaagaagttgatttccctcctgcttttaagctccatttaagtattggraggctattatcaggtttcccctgagctttctcagtggagacctgatagtgtccttacagtagataaaggtgacaaatgcatttctgcctggtcagccactgtggaagtgtcctggcagatgtgtggcatcctccaacaacaaaatgctgtgtatttagttggatgcttaatagaaaagacaccacagacttaattacagatccttcttacttacagaaacacaggagtactc

SEQ ID NO: 87155 - DNA, 600 bp, Chicken  19866894388579_4
gattggaagggaccttaaacctgctgctgtgcagggttsccaaccactaaatcaggcagcagatcaggctgctcagggctccatccaaccttgaccttggccacctccagggatggggcrcccatgcttctgtgggcagcagtgccagggcctcactgtcctctcagtgaaaaaatttcctgatatctaatctaaatttcccttcttttagtttaaaaccactcctccttgycctatcactatctatccacacaagaagttgatttccctcctgcttttaagctccatttaagtattggraggctattatcaggtttcccctgagctttctcagtggagacctgatagtgtccttacagtagataaaggtgacaaatgcatttctgcctggtcagccactgtggaagtgtcctggcagatgtgtggcatcctccaacaacaaaatgctgtgtatttagttggatgcttaatagaaaagacaccacagacttaattacagatccttcttacttacagaaacacaggagtactcagggctactgttacttggacagacctctttgtaatgatcttgctttgaaactaggcacaacctttgtg

SEQ ID NO: 87156 - DNA, 600 bp, Chicken  19866894388580_1
aacttcactttgaaagtagtattttaagtgttaaaagtgaaggaaattaaccttttgagtactgtttcatgaaacgtattgccttctccatcacttaaactatctgcatgaaattttagactcaccgaagtcagtggcaaacctatcagtgacttcaatgaaaggaaaaggttgaagggtcagaatttcagctggaactcaagatcatttatattgttaaaacattcatatttctacagactaatggcttcagcaagaaattagcaggcaatattatgtaactaatttagtagctagacwaaatgctccgaatactctttcaagctctgaaagtttagagctgagctgttcatttgctatttttccagttccttctgaagttctccattagccttctctgaagtcagcaaacacctttctgcatcatctgcaaataattttgctacctttgatgacttagaacataaattaatggaagctcatttagccatgaggatacacagtcatttacatgcagaaacaaagcttcccttgcttatggttagttatccagttgcgtgtgataatatagagatctgtagtagtacagctagttagaaa

SEQ ID NO: 87157 - DNA, 599 bp, Chicken  19866894388584_1
  misc_feature (1)..(19): n is any nucleotide
nnnnnnnnnnnnnnnnnnntttccttttataagaatcccttagattaaagaagttcataggatctttggcattatctttggatatataagctgtgtatctgccaatttgttttactggaaacaatgttacccactaatcactaagagtcctgttgatactatgcagccacaaggaggcagggaggaaaaattgtaaatgtttttggcattctttccatttcagatgaaacaatgtgccctatctcttttctgtaccatttctgttgtatgattcacttaaagcaagcagtgggggaatgygtatggaggggtagctcatcttctgttgcatttcttttggaaatggcaaaatgttatttatccccatttaaaaactgttttgtaaacagattggtgttggrtctttcaaatagtgtggcatagtatcagtgtaacatttcttcttaactttgcatgtgtggaatttatttgtttgttacagctttcttctcttctkatgagcagtgtcttgatcttagcctttaaagaaaaaatttcaaaaaaacatttctcctcttttgcttcttgaagttcttttagatttctaggaaagattaggt

SEQ ID NO: 87158 - DNA, 600 bp, Chicken  19866894388584_2
ccaatttgttttactggaaacaatgttacccactaatcactaagagtcctgttgatactatgcagccacaaggaggcagggaggaaaaattgtaaatgtttttggcattctttccatttcagatgaaacaatgtgccctatctcttttctgtaccatttctgttgtatgattcacttaaagcaagcagtgggggaatgygtatggaggggtagctcatcttctgttgcatttcttttggaaatggcaaaatgttatttatccccatttaaaaactgttttgtaaacagattggtgttggrtctttcaaatagtgtggcatagtatcagtgtaacatttcttcttaactttgcatgtgtggaatttatttgtttgttacagctttcttctcttctkatgagcagtgtcttgatcttagcctttaaagaaaaaatttcaaaaaaacatttctcctcttttgcttcttgaagttcttttagatttctaggaaagattaggttagatgcaaagttcactactccacaatagcatacttagatgactttaccatccttcagaataatgcacaaaattgaacatgaagtacccattaagtgtgtga

SEQ ID NO: 87159 - DNA, 591 bp, Chicken  19866894388584_3
atgtttttggcattctttccatttcagatgaaacaatgtgccctatctcttttctgtaccatttctgttgtatgattcacttaaagcaagcagtgggggaatgygtatggaggggtagctcatcttctgttgcatttcttttggaaatggcaaaatgttatttatccccatttaaaaactgttttgtaaacagattggtgttggrtctttcaaatagtgtggcatagtatcagtgtaacatttcttcttaactttgcatgtgtggaatttatttgtttgttacagctttcttctcttctkatgagcagtgtcttgatcttagcctttaaagaaaaaatttcaaaaaaacatttctcctcttttgcttcttgaagttcttttagatttctaggaaagattaggttagatgcaaagttcactactccacaatagcatacttagatgactttaccatccttcagaataatgcacaaaattgaacatgaagtacccattaagtgtgtgactttatcctatgctttcatcttgatttttaacttgaaagcagtaacttactgtcagtaaaaacaaaattgtgtttccttcagatat

SEQ ID NO: 87160 - DNA, 600 bp, Chicken  19866894388585_1
aatgaccaggctttcataaagacaggatcacagtggtctcagtgaagcgattcactatacaaatgctttgtaagggccaaatgtctggtgtgtttgtggcacaagatgctgtaacaccaagtgaatcaggattacagagagaaagactggaagcctattcaacaagttaaagtagatctgaggggttaaaaaagaaagaaagaaagaaagaaaagtaatagatacgcttgaaaagatcatagcccttgatgttacagtaatgtattttagtaaacctgtcatttggcaattttcttttcyataggtgtaattggagaagggcactattgcagtaagcgaggattttcagaacctgtaaaagaaacagtagccaagctagtgccactgactcgcaggttgtggcaggttaccaagctgaaaatgctgcccacacccgccaagttccattatgtcttcaaccttcgagatctctcaagaatttggcaaggaatgctgaacactacatcagaagtgatcagtgaaccaaaggtaagtgcagcacatcagtggttttgtcatagcgcataattaggtactgtagaattagatggcattaaaatt

SEQ ID NO: 87161 - DNA, 578 bp, Chicken  19866894388586_1
ttttcaagacatgacagcatcaagccctgagaaagttggtctgatgccaaagctgtcctgctttgggaaggagaacaaaacttcctgaggtcctttccagcctgagtgatcctgtgatcctatgaaatctgatcctgataagtataggaggaggaattatgtagacttctacatttgcattttgtaattcagctctgggaaatgagtgaggaggaattgtagatctcatagaaaatggagaattagaacagagagaagagagaacataggtgtcctatctagcctctgagaagaatcagstgtactggtgcagagtctaccaatcttgcctctgagtacttgaagatctcagaagtcatctggtgtgtttgctgattcaacaggcagtgtaaagatacccaaatgccacactcaccctgtccttccagtgctgtggttgagacaatattttcttttgttaaaataatcctcttttgtccttacctttatattcagtagaaaataataatgtgacactgtgccacaatggagtgggaagattacatactatgggtgaattttcaggcaataagatgctg

SEQ ID NO: 87162 - DNA, 599 bp, Chicken  19866894388602_1
  misc_feature (1)..(217): n is any nucleotide
nnnnnnnnnnnnnnnnnnnnnnnnnnnnnnnnnnnnnnnnnnnnnnnnnnnnnnnnnnnnnnnnnnnnnnnnnnnnnnnnnnnnnnnnnnnnnnnnnnnnnnnnnnnnnnnnnnnnnnnnnnnnnnnnnnnnnnnnnnnnnnnnnnnnnnnnnnnnnnnnnnnnnnnnnnnnnnnnnnnnnnnnnnnnnnnnnnnnnnnnnnnnnnnnnnnnnnnnnatctacagcttttctggctcaggatattcttggttcatttaccaaaacaaccaacaaacattttaggcagatacttaagcacraagctcaaaacaaagctatactaaaaccaggtaatgatactcagcttcagtagtacaaagtgccatttgttgtaacgatgggctgggaggctgtaagagggagatgtgctcccctagctacagggatgcatccaagaacattcatttgtatggtgctgacaccagaggttgtgacctgtgattggagttccttggtactactctaaaattactattttgaattgatgatggcaaagataattcttgtgctagtgttaattctttagtaaaatgaaaatctttaatcaggtatatgcaca

SEQ ID NO: 87163 - DNA, 600 bp, Chicken  19866894388603_1
gttattcacttatgatcaaagccactgtggagtgtgaagatttgtgaaatcatgaatgctttagtcatacagttacagtgtaagttatactttgcttatatagctcaaacctaaacaatttaagtagagaaacagaactaaactgacaagcgtacaagagaactgcaacatgaagacaaaagtgactaactacaatttgggaaccaaatgcttaacatttatagcattattacttagtgtaagatactttttcaacactacaattgtttcattttgggcattaaagccagcaataacaartaaayctgaaacaatatttgaacctctttgggggaaaacaaacaaacaaacaaacaaaccccaccacagaaagatgttacaatttgcatgttaataaattttgacttaataactcagctgaatagtttggagaagaagaagatgtacagaactgacaaatgttagcctatttcactggacactaccatatttattttaaatgttttggtgataacattattttgaaataacatcatgtactttctatgttcattgctttttatttgagaactggcatacccatttacttcttgaaaggaa

SEQ ID NO: 87164 - DNA, 600 bp, Chicken  19866894388603_2
tcacttatgatcaaagccactgtggagtgtgaagatttgtgaaatcatgaatgctttagtcatacagttacagtgtaagttatactttgcttatatagctcaaacctaaacaatttaagtagagaaacagaactaaactgacaagcgtacaagagaactgcaacatgaagacaaaagtgactaactacaatttgggaaccaaatgcttaacatttatagcattattacttagtgtaagatactttttcaacactacaattgtttcattttgggcattaaagccagcaataacaartaaayctgaaacaatatttgaacctctttgggggaaaacaaacaaacaaacaaacaaaccccaccacagaaagatgttacaatttgcatgttaataaattttgacttaataactcagctgaatagtttggagaagaagaagatgtacagaactgacaaatgttagcctatttcactggacactaccatatttattttaaatgttttggtgataacattattttgaaataacatcatgtactttctatgttcattgctttttatttgagaactggcatacccatttacttcttgaaaggaactgca

SEQ ID NO: 87165 - DNA, 600 bp, Chicken  19866894388605_1
aagcagataccatcacaaagcagaccaatcccattcagaaaacactgagaaacttgattcccctcccatgacaaagcactgagttcctacacattatggaaaccttccagttccctcctcacatccatctttttatgtgtttggtttttttctttcctgccactcaaaaaaatgtagtgatttgatcagcttgatgatcaaataagttatttaggctgaagtagtagaagtcaagtggggagcataaccaagtgacctccagaggtcatttctaagctagtttattctattattcattasaaaaaggctttcttggatcaactgaaggcagctgtgacttagaaaaaaatcagatactacatcwcacttgttcagtactgaagtccagtatcaggccaccctgatgaacactttgttgaatcacactcaacttttccagtttttcctatatcacagtcttctcctaaaaagcaggctatcgctcacatacacagcagttttctaccatgtttgtcctgtacatattcatgagtcaactaagattggcaacagtcagtacattacaagacaagccttgttacaggcagagtagaatcagtt

SEQ ID NO: 87166 - DNA, 600 bp, Chicken  19866894388605_2
cccatgacaaagcactgagttcctacacattatggaaaccttccagttccctcctcacatccatctttttatgtgtttggtttttttctttcctgccactcaaaaaaatgtagtgatttgatcagcttgatgatcaaataagttatttaggctgaagtagtagaagtcaagtggggagcataaccaagtgacctccagaggtcatttctaagctagtttattctattattcattasaaaaaggctttcttggatcaactgaaggcagctgtgacttagaaaaaaatcagatactacatcwcacttgttcagtactgaagtccagtatcaggccaccctgatgaacactttgttgaatcacactcaacttttccagtttttcctatatcacagtcttctcctaaaaagcaggctatcgctcacatacacagcagttttctaccatgtttgtcctgtacatattcatgagtcaactaagattggcaacagtcagtacattacaagacaagccttgttacaggcagagtagaatcagttgtgtgtggttgaaccctggctgccagacagaattaaaggaccaatgtgcattgccacagttaga

SEQ ID NO: 87167 - DNA, 599 bp, Chicken  19866894388606_1
  misc_feature (1)..(166): n is any nucleotide
nnnnnnnnnnnnnnnnnnnnnnnnnnnnnnnnnnnnnnnnnnnnnnnnnnnnnnnnnnnnnnnnnnnnnnnnnnnnnnnnnnnnnnnnnnnnnnnnnnnnnnnnnnnnnnnnnnnnnnnnnnnnnnnnnnnnnnnnnnnnnnnnnnnnnnnnnnnnnnnnnnnnnnaatgcaccagtagaagagtattgatgggacaaggggaaatggtttcaaactaggagaaggtagatttagccaggacataagaaagaagtattatacaacaaggctggtgaggcactggcacaggttgcccagakaggcagtagataccccatctctggaaactgccaaggtcgggcttggaggggctctgtgcacctgatggagctgtaggtgtcattgcaggggatttagaccagacatcccttccaactcaaacagtgctatgagtctatgactctatttaagtttcttctataaagacctctgcaaaccctctacatcatggtcagcaagaaactaaacagcagaattcaatattcaagttaattaatgtctatttacaaagcaaatactcatctcctaacrtttttggtttttgttttcttctggaaag

SEQ ID NO: 87168 - DNA, 600 bp, Chicken  19866894388606_2
ggtgaggcactggcacaggttgcccagakaggcagtagataccccatctctggaaactgccaaggtcgggcttggaggggctctgtgcacctgatggagctgtaggtgtcattgcaggggatttagaccagacatcccttccaactcaaacagtgctatgagtctatgactctatttaagtttcttctataaagacctctgcaaaccctctacatcatggtcagcaagaaactaaacagcagaattcaatattcaagttaattaatgtctatttacaaagcaaatactcatctcctaacrtttttggtttttgttttcttctggaaagaactgaaatctagcttcagcaattaagttgctttgctaactcctaagcaaaattccaccaagagtattttyacatgcactatcatgctccccccacctactgctgcctgtggttcccctagctgttttcttgtgtacatttttagcagcagaagtgaaggcaccagttatgaagccctgctggaggacatgcactacccaamtgacacaaaaagggaccactagaagaaagtccatcagcaacaacgaaagcaaaaccaaagaaaaaagacc

SEQ ID NO: 87169 - DNA, 600 bp, Chicken  19866894388606_3
ctgtaggtgtcattgcaggggatttagaccagacatcccttccaactcaaacagtgctatgagtctatgactctatttaagtttcttctataaagacctctgcaaaccctctacatcatggtcagcaagaaactaaacagcagaattcaatattcaagttaattaatgtctatttacaaagcaaatactcatctcctaacrtttttggtttttgttttcttctggaaagaactgaaatctagcttcagcaattaagttgctttgctaactcctaagcaaaattccaccaagagtattttyacatgcactatcatgctccccccacctactgctgcctgtggttcccctagctgttttcttgtgtacatttttagcagcagaagtgaaggcaccagttatgaagccctgctggaggacatgcactacccaamtgacacaaaaagggaccactagaagaaagtccatcagcaacaacgaaagcaaaaccaaagaaaaaagaccatgacaaccaaagtgattgttcctcatcccacttcctaccaacatttcactatgaagaggacactcgatagatgtcaccagctcaagccacttgcaaac

SEQ ID NO: 87170 - DNA, 600 bp, Chicken  19866894388606_4
actaaacagcagaattcaatattcaagttaattaatgtctatttacaaagcaaatactcatctcctaacrtttttggtttttgttttcttctggaaagaactgaaatctagcttcagcaattaagttgctttgctaactcctaagcaaaattccaccaagagtattttyacatgcactatcatgctccccccacctactgctgcctgtggttcccctagctgttttcttgtgtacatttttagcagcagaagtgaaggcaccagttatgaagccctgctggaggacatgcactacccaamtgacacaaaaagggaccactagaagaaagtccatcagcaacaacgaaagcaaaaccaaagaaaaaagaccatgacaaccaaagtgattgttcctcatcccacttcctaccaacatttcactatgaagaggacactcgatagatgtcaccagctcaagccacttgcaaaccacacactgcttttggtgtcgtgtcagcataatgcaggactttccgcgtggccggcagaaaggctcacaggcagcagagagagcagctcccacgctctcatgcctccccagccagcactggaaaagtggtt

SEQ ID NO: 87171 - DNA, 600 bp, Chicken  19866894388617_1
gccccgtgagtcccacctgtgtcgtgtggataggcgcgttctttttcatgtctatttttttttttcctcaatggggaaagacctttttctgcctgaaggaaaatagtttgactgttttgttagtgtttgtttctcctttttgtttctttattaaaatacagactagtgacatcctgaaaagatctagttctttttttttttatcacaacagatcttatgtggccttgcaggaaacagaatcttaaacttgtgtggttcttggtctgttctgcttgagaggactgcagacgagtctttatwtttatttatttatttatttrtttgtgaagtagcaaggcactgctactagtattgcatcagcatttaccaaaggtggctcagaacagcttgggtagggaagcactggctggtttctgccttctcctgtggaggagctgctttgcaaacagtgattcacatttctcactcctgactcttgatgttcccttatatttagaaatgtcccagccttgtttgtcttttgggaacagtcaatagcaaagttaagatggaaggccatttattttactgacaagatcctaatacgaatgagcttaatat

SEQ ID NO: 87172 - DNA, 600 bp, Chicken  19866894388617_2
gtcgtgtggataggcgcgttctttttcatgtctatttttttttttcctcaatggggaaagacctttttctgcctgaaggaaaatagtttgactgttttgttagtgtttgtttctcctttttgtttctttattaaaatacagactagtgacatcctgaaaagatctagttctttttttttttatcacaacagatcttatgtggccttgcaggaaacagaatcttaaacttgtgtggttcttggtctgttctgcttgagaggactgcagacgagtctttatwtttatttatttatttatttrtttgtgaagtagcaaggcactgctactagtattgcatcagcatttaccaaaggtggctcagaacagcttgggtagggaagcactggctggtttctgccttctcctgtggaggagctgctttgcaaacagtgattcacatttctcactcctgactcttgatgttcccttatatttagaaatgtcccagccttgtttgtcttttgggaacagtcaatagcaaagttaagatggaaggccatttattttactgacaagatcctaatacgaatgagcttaatatgacagaattaaaaatgaaat

SEQ ID NO: 87173 - DNA, 600 bp, Chicken  19866894388629_1
agatcatagcacttatgcagagacaatgggaacattgtagtaagaaccaggatgtgaaccagtctgcaccagcactgtggtctcaaaaaccaccgagagagccaaaggtgagaaggacaccaggaaaccttcatgaggaagacttagagaagacctctgcccaggacgaccagagagcagcacgcacgtgcacagaggtgggatgtagtataataatttccccaactaattgaaatattatgatgagttctctggactctttaagcaagcccaacccaccttttgtgtaatcctatccawgattttgtgtattaaataggtgactgataggtggtttggtgtgcaagtaggaggarcaatccccccttgcacctggtgctgtaataaacatacctgctttataaccttatgtgggttatagagtttgattccacacatcaattttggggagccaggcaggaggcactctgttcagctgtgggaccggctggagagaggggaccccattggcacaccccaagatttttcagaagtactccctccccttacctgaamactgtaggaacagacaagaactatcagcagaccaggtaggtttag

SEQ ID NO: 87174 - DNA, 600 bp, Chicken  19866894388629_2
aaccagtctgcaccagcactgtggtctcaaaaaccaccgagagagccaaaggtgagaaggacaccaggaaaccttcatgaggaagacttagagaagacctctgcccaggacgaccagagagcagcacgcacgtgcacagaggtgggatgtagtataataatttccccaactaattgaaatattatgatgagttctctggactctttaagcaagcccaacccaccttttgtgtaatcctatccawgattttgtgtattaaataggtgactgataggtggtttggtgtgcaagtaggaggarcaatccccccttgcacctggtgctgtaataaacatacctgctttataaccttatgtgggttatagagtttgattccacacatcaattttggggagccaggcaggaggcactctgttcagctgtgggaccggctggagagaggggaccccattggcacaccccaagatttttcagaagtactccctccccttacctgaamactgtaggaacagacaagaactatcagcagaccaggtaggtttagattggctgggaacctgtaagtcatgaagagatgtcctacacaaggagtagaagagc

SEQ ID NO: 87175 - DNA, 495 bp, Chicken  19866894388629_3
actctttaagcaagcccaacccaccttttgtgtaatcctatccawgattttgtgtattaaataggtgactgataggtggtttggtgtgcaagtaggaggarcaatccccccttgcacctggtgctgtaataaacatacctgctttataaccttatgtgggttatagagtttgattccacacatcaattttggggagccaggcaggaggcactctgttcagctgtgggaccggctggagagaggggaccccattggcacaccccaagatttttcagaagtactccctccccttacctgaamactgtaggaacagacaagaactatcagcagaccaggtaggtttagattggctgggaacctgtaagtcatgaagagatgtcctacacaaggagtagaagagcagggtatattgaataagaaaccaggaatataaatgaagtaatgggaccagttatcataattgagtaattctaattgacagaccaaatgctgaat

SEQ ID NO: 87176 - DNA, 600 bp, Chicken  19866894388633_1
tggattgttttgtttatgcctggagcttaagtctttaaaaattatgcaagtaaggacacccaggcttaaccttcaacttttgtgcttagaagagtggccttcttaattttaaattcctccacaacagcagttcattttcaattgttctttaagatttttgaaaataccgtcgctataacacatactgtgtagtaagaatgtcttctacagggttaaatatatttcagaacactaagtggacacatagcaatgtgtcaacagtacataggagaaggaaagaaaagagcaatctcctctccycagkgagagttaaaacacaacacattccttctactcatcacataaatgcagttccctccattttagaaagttcatgggcaaccatgtacagccttaatacatattatatgaatcctatgcaaaaactacaacacacagttacctcgaacttcacacagcaaagatactatgatcagctttgtccctctccacctttgctggggctaaccacagaacrgcacggaactcatcttttttcagcatccaaacagtaaagtcaaaactgaaagagcctaaagatgaaagtttccgctctagtag

SEQ ID NO: 87177 - DNA, 600 bp, Chicken  19866894388633_2
ttgttttgtttatgcctggagcttaagtctttaaaaattatgcaagtaaggacacccaggcttaaccttcaacttttgtgcttagaagagtggccttcttaattttaaattcctccacaacagcagttcattttcaattgttctttaagatttttgaaaataccgtcgctataacacatactgtgtagtaagaatgtcttctacagggttaaatatatttcagaacactaagtggacacatagcaatgtgtcaacagtacataggagaaggaaagaaaagagcaatctcctctccycagkgagagttaaaacacaacacattccttctactcatcacataaatgcagttccctccattttagaaagttcatgggcaaccatgtacagccttaatacatattatatgaatcctatgcaaaaactacaacacacagttacctcgaacttcacacagcaaagatactatgatcagctttgtccctctccacctttgctggggctaaccacagaacrgcacggaactcatcttttttcagcatccaaacagtaaagtcaaaactgaaagagcctaaagatgaaagtttccgctctagtagagct

SEQ ID NO: 87178 - DNA, 600 bp, Chicken  19866894388633_3
tatatttcagaacactaagtggacacatagcaatgtgtcaacagtacataggagaaggaaagaaaagagcaatctcctctccycagkgagagttaaaacacaacacattccttctactcatcacataaatgcagttccctccattttagaaagttcatgggcaaccatgtacagccttaatacatattatatgaatcctatgcaaaaactacaacacacagttacctcgaacttcacacagcaaagatactatgatcagctttgtccctctccacctttgctggggctaaccacagaacrgcacggaactcatcttttttcagcatccaaacagtaaagtcaaaactgaaagagcctaaagatgaaagtttccgctctagtagagctgaagtcacgttcccataattagagaataactgcacaggttcaatgtagaactaactataggctgtaatatgtggattggatggtatgctgcaggagatgtaggaggacactcactgaaaaaggtaccatgtaaatatttacacatttatttttaagaaggctcaagttagaagcctgtgagaattcagcaactgttagaaatacaggcaaact

SEQ ID NO: 87179 - DNA, 600 bp, Chicken  19866894388638_1
gactgaaggactggtgatatataagggatcagactaacaggtacagccacttagtttgacgtgtatcagtctaccagttaactgggaaaggctcatcatgaaggctttcacaccaagcctgtgggctgaccaaagagggtaagtactactgagcattgtggccatgaggtttgtgatggtgacaaattatttttgggtctccaagtttactatccgcaagccttggttagctgtgtcagggactccaaggagcacgctgatccaaagtggcacattctcattctaataaccacgacataycaggctgtgcagtttggctgccttacaggtaatggcagctctgctcccttgggaggcttcccagagatcaagcatcccccgcagtgtgcatcacacatatttcttgttctgaaatgtaatcttagacaaaagcattaccaagtgcatgttacaagcagtgtgcttgtaataagcttcccagcctctgttacgctccttttttctaccatcttgatggatgatataagtgtgccagatctctgttcccctgtcagactcacgtgggctactggaagtgagtgggatgaatttcccaataca

SEQ ID NO: 87180 - DNA, 600 bp, Chicken  19866894388641_1
gccgtaagatctattcttgaagtctgcagtaaccaaaatgtgttttgaagctggttcaaagtttgctgaaattgctatgagccatcccctggtctccctctatgcaacacacacagtttctccaggcttttaatctgtccttttctgtgtagcttggctttacgcatggagacttccaaagcacaggaaaagcaaaataccaagcaaatgggagtagcagaaaatgccttttccaaacgcaaacactgatcagtcaatctaacatcccacattagccaaaccagtgaagctgataaataytgtaatgggtttgtccctgcagcagaatacacgtctagccccagttgtctgaggctgattagaaaagcagatgagctgaacactggttggcttagagcgaaatttcaacctgggctcacctagggactgaaataagagttgctattcagctagacatccagttctaacaccttctctgtgatgattattcaaaggatttaacccagtttagccagtcacagaaacaagcacagcttattacagctgtttggttctacagagcagccagctgaacaaactccagacctccatcattcagaa

SEQ ID NO: 87181 - DNA, 600 bp, Chicken  19866894388646_1
gaatgggatgctgtgggtcatgttttgtagccaacagtgagcaaacaagcaggcttatatatctggacaaactaagctaccttgcagaataacaagcagatgaatagaatacctttgctacgcatgaatcacagctacagtggttctcattcatttatttggctatgttttctcgcaagcacatctgtgctatggccatttttcacttctgtttatttgccagcataaggtgtatatactatatttcacttgctcaagaagaaacactgaaaacctttctttcatgtagcagaatatacsgactgctttgaaggtccgtcagtgagacagttgtagtgatctaagatttcaaggcacactcagtgctcaaggacacagggctgaaattctgctgctagccttgagctttgcttttatgtgtttgagtaggctgcatttttgcttcttttcagttttgaagttgctgatacaagatggccatgtcttctacagtctctctgtagttccaaaccttgccagtcttaccagaaaggaaataaaggcaacactaaaaagaccaaaataaaaagaactgattcggccttcagaaagatctttggg

SEQ ID NO: 87182 - DNA, 599 bp, Chicken  19866894388651_1
  misc_feature (1)..(14): n is any nucleotide
nnnnnnnnnnnnnnttaaatccttagctattggaacttctgttttgggtcttcactggcttttggcattttgttttttctccctgtatttatattttacagttgttgtgtggggaaactaagactgaatagagggaacactgagcagagtgttctgaatttcattgtcgtagtggaaagtgagtgagcattcagggatagctaaatctttattaggaatttaaagcaaggcaaacaatattgcggttatcagagtaacttgtaaaagtgcagtgctaattaactgtctctaaaagcagasccacgcagagctaacttggaattataagctgtcatagagtaaacactgtttaataggtagattttagtgttacagacctatacatgagcaaactgcagatgggaattaatgcatttagttgagaacttttgtctttgtgcaagtttagcctaatgactgaatcctacattgagatacatgaatgcacaatgccatgtaccttgtaaaaatcagtggcactgctttctgtgtacgtttgcagtagctggttttacaagataggcagtgacaagccaccacatagctgaatgggatcaagc

SEQ ID NO: 87183 - DNA, 600 bp, Chicken  19866894388651_2
taaacactgtttaataggtagattttagtgttacagacctatacatgagcaaactgcagatgggaattaatgcatttagttgagaacttttgtctttgtgcaagtttagcctaatgactgaatcctacattgagatacatgaatgcacaatgccatgtaccttgtaaaaatcagtggcactgctttctgtgtacgtttgcagtagctggttttacaagataggcagtgacaagccaccacatagctgaatgggatcaagcccctggggaagcctactctcccatcagtgtgcagggactytgtgctgctacttttaccttcagtgtcaattactcatgtatattcatccttataaaaaggcacaggtttggtttttttttttttttttttttgaacccttatgtttagacaaaaaaaaagtaaatatttcacagatttatagtggatattttaattttggaactccagttttgctgagtgagctgacattgccattacacttttttttcctcgttacaaatttgttctgtctgtccttcccagctcctttcgtgtctcaggtctgttgaaccgcgtgttggaccaaaatgaaatttggta

SEQ ID NO: 87184 - DNA, 418 bp, Chicken  19866894388653_1
aactctgattatcttaccataggaagactcccagttgtttgttgctacaggccactcagataaatttgccagcaggctgattaaaggcattccacctctgctatcaatggttgcttttggagaaaataaaatgaattaatgtggtgttttagaacatccagatggcatactgtagtaatgagatcagaattctgaacctgagaactcttgtcaccatcagcacaacagagttatgttctgatgtacgcctcttctttaagatttaatgtttaaaatacgtttcagtcacgactgcaagcrgcttatgcagatccctaggaccatggcattgaagaactaccgtatttcagctataaatagaacttaaaataatagctttgagaagtattcataattgcatggaaaatataaaacaata

SEQ ID NO: 87185 - DNA, 600 bp, Chicken  19866894388657_1
ttgggaggggagggaggaaagtagtactggaaacttttgcttaggtatgtggtcttcaaatcagaaactttctgtgtaaaatattcagtattcctcttcaaggtcgcagtttacaaataggaaaaaaaaaaagtgccatagtagttttcttagtagcagctatttctgtaacagaaaataacacaatgggaaggaggtcttcctggctgacttcctctgacatctgtaaagagacaaagaagcgaatgaataaacaaaaacccactttagtagacactgtctgtatgtgcactaaggccyactaaacaactctgcattttatttatttctttatgcataacwwcattacctctgaaagtttgcaatactgtaacaacctrtagagaattcatataaaaggctgcatttagaatttcctattcttttctgtgtttttaaccatatatacatatatggttaaaatatacccctttaccctgcggtgtttcaaggaatttctttgtatgtcacttcgtagatcagcttcaatttcagcatgtaggaatttgctgttgatgaatcctgtaaaactatgatgtttgccttttctgctttcttttc

SEQ ID NO: 87186 - DNA, 600 bp, Chicken  19866894388657_2
aggtatgtggtcttcaaatcagaaactttctgtgtaaaatattcagtattcctcttcaaggtcgcagtttacaaataggaaaaaaaaaaagtgccatagtagttttcttagtagcagctatttctgtaacagaaaataacacaatgggaaggaggtcttcctggctgacttcctctgacatctgtaaagagacaaagaagcgaatgaataaacaaaaacccactttagtagacactgtctgtatgtgcactaaggccyactaaacaactctgcattttatttatttctttatgcataacwwcattacctctgaaagtttgcaatactgtaacaacctrtagagaattcatataaaaggctgcatttagaatttcctattcttttctgtgtttttaaccatatatacatatatggttaaaatatacccctttaccctgcggtgtttcaaggaatttctttgtatgtcacttcgtagatcagcttcaatttcagcatgtaggaatttgctgttgatgaatcctgtaaaactatgatgtttgccttttctgctttcttttcaataactcaattttccattgttaccttggaaatcctgttgaa

SEQ ID NO: 87187 - DNA, 600 bp, Chicken  19866894388657_3
ggtatgtggtcttcaaatcagaaactttctgtgtaaaatattcagtattcctcttcaaggtcgcagtttacaaataggaaaaaaaaaaagtgccatagtagttttcttagtagcagctatttctgtaacagaaaataacacaatgggaaggaggtcttcctggctgacttcctctgacatctgtaaagagacaaagaagcgaatgaataaacaaaaacccactttagtagacactgtctgtatgtgcactaaggccyactaaacaactctgcattttatttatttctttatgcataacwwcattacctctgaaagtttgcaatactgtaacaacctrtagagaattcatataaaaggctgcatttagaatttcctattcttttctgtgtttttaaccatatatacatatatggttaaaatatacccctttaccctgcggtgtttcaaggaatttctttgtatgtcacttcgtagatcagcttcaatttcagcatgtaggaatttgctgttgatgaatcctgtaaaactatgatgtttgccttttctgctttcttttcaataactcaattttccattgttaccttggaaatcctgttgaag

SEQ ID NO: 87188 - DNA, 600 bp, Chicken  19866894388657_4
atattcagtattcctcttcaaggtcgcagtttacaaataggaaaaaaaaaaagtgccatagtagttttcttagtagcagctatttctgtaacagaaaataacacaatgggaaggaggtcttcctggctgacttcctctgacatctgtaaagagacaaagaagcgaatgaataaacaaaaacccactttagtagacactgtctgtatgtgcactaaggccyactaaacaactctgcattttatttatttctttatgcataacwwcattacctctgaaagtttgcaatactgtaacaacctrtagagaattcatataaaaggctgcatttagaatttcctattcttttctgtgtttttaaccatatatacatatatggttaaaatatacccctttaccctgcggtgtttcaaggaatttctttgtatgtcacttcgtagatcagcttcaatttcagcatgtaggaatttgctgttgatgaatcctgtaaaactatgatgtttgccttttctgctttcttttcaataactcaattttccattgttaccttggaaatcctgttgaagtcaatggagcttctctgaacttctcatagcgaagata

SEQ ID NO: 87189 - DNA, 600 bp, Chicken  19866894388660_1
tccctgggcaaccaatgcagtaccactgtttcaaaggagaaattattcctaatctccaagctgaacattcacttcttgatcgccttagtacaggctcagcaagctcctccatgccagtacaggtacatgaggtggaagacacagcccccacaatgattctctcatggcttcatctctatctgtccccagactccagaaatcctaacataacagcaggaatcccctagttttgagcaaatccccatacatgtagggggaagatgcaacatctgtgcagcatctgtctgaaggtgcctgtcrgagctggatgcaagggtaaatatcccctgctgatgccattggctttgcagtttcccaacagagagcagtaccaaaacataaaaggttgaaattcttccctgggaatctttgggtcccattttgtttggctacttggaggcagcatgatgtcaggagcagcagcaatgagaaaaggcagcagaaagctgaggttggatcaaaaygctagtgagcaccaggatgtgagtaatggattgtccagcayaactacgcatgcaagggagacagcagagctctggagtgmctttaggctgggcygac

SEQ ID NO: 87190 - DNA, 600 bp, Chicken  19866894388660_2
aacataacagcaggaatcccctagttttgagcaaatccccatacatgtagggggaagatgcaacatctgtgcagcatctgtctgaaggtgcctgtcrgagctggatgcaagggtaaatatcccctgctgatgccattggctttgcagtttcccaacagagagcagtaccaaaacataaaaggttgaaattcttccctgggaatctttgggtcccattttgtttggctacttggaggcagcatgatgtcaggagcagcagcaatgagaaaaggcagcagaaagctgaggttggatcaaaaygctagtgagcaccaggatgtgagtaatggattgtccagcayaactacgcatgcaagggagacagcagagctctggagtgmctttaggctgggcygacagggaagggctgtgagtggcacaggacttgcctttgttgccttaggtgcttggatccatctcctgtgaggtgtggatgggccatgactgcagtccaagtcatccatttgggcttctcaccagtctgcagagaagcctaactctaaccctaatcctaacctgaccctaacccagcatctcccaacatgactccgccaccttaac

SEQ ID NO: 87191 - DNA, 600 bp, Chicken  19866894388660_3
tacatgtagggggaagatgcaacatctgtgcagcatctgtctgaaggtgcctgtcrgagctggatgcaagggtaaatatcccctgctgatgccattggctttgcagtttcccaacagagagcagtaccaaaacataaaaggttgaaattcttccctgggaatctttgggtcccattttgtttggctacttggaggcagcatgatgtcaggagcagcagcaatgagaaaaggcagcagaaagctgaggttggatcaaaaygctagtgagcaccaggatgtgagtaatggattgtccagcayaactacgcatgcaagggagacagcagagctctggagtgmctttaggctgggcygacagggaagggctgtgagtggcacaggacttgcctttgttgccttaggtgcttggatccatctcctgtgaggtgtggatgggccatgactgcagtccaagtcatccatttgggcttctcaccagtctgcagagaagcctaactctaaccctaatcctaacctgaccctaacccagcatctcccaacatgactccgccaccttaactgctgccagacccttaccccagacaccagcattgccatgct

SEQ ID NO: 87192 - DNA, 600 bp, Chicken  19866894388660_4
tctgaaggtgcctgtcrgagctggatgcaagggtaaatatcccctgctgatgccattggctttgcagtttcccaacagagagcagtaccaaaacataaaaggttgaaattcttccctgggaatctttgggtcccattttgtttggctacttggaggcagcatgatgtcaggagcagcagcaatgagaaaaggcagcagaaagctgaggttggatcaaaaygctagtgagcaccaggatgtgagtaatggattgtccagcayaactacgcatgcaagggagacagcagagctctggagtgmctttaggctgggcygacagggaagggctgtgagtggcacaggacttgcctttgttgccttaggtgcttggatccatctcctgtgaggtgtggatgggccatgactgcagtccaagtcatccatttgggcttctcaccagtctgcagagaagcctaactctaaccctaatcctaacctgaccctaacccagcatctcccaacatgactccgccaccttaactgctgccagacccttaccccagacaccagcattgccatgctccacatgtgcaagacaagaatgctgaaaggtgcactttg

SEQ ID NO: 87193 - DNA, 600 bp, Chicken  19866894388660_5
tcrgagctggatgcaagggtaaatatcccctgctgatgccattggctttgcagtttcccaacagagagcagtaccaaaacataaaaggttgaaattcttccctgggaatctttgggtcccattttgtttggctacttggaggcagcatgatgtcaggagcagcagcaatgagaaaaggcagcagaaagctgaggttggatcaaaaygctagtgagcaccaggatgtgagtaatggattgtccagcayaactacgcatgcaagggagacagcagagctctggagtgmctttaggctgggcygacagggaagggctgtgagtggcacaggacttgcctttgttgccttaggtgcttggatccatctcctgtgaggtgtggatgggccatgactgcagtccaagtcatccatttgggcttctcaccagtctgcagagaagcctaactctaaccctaatcctaacctgaccctaacccagcatctcccaacatgactccgccaccttaactgctgccagacccttaccccagacaccagcattgccatgctccacatgtgcaagacaagaatgctgaaaggtgcactttggtttgtacagtgca

SEQ ID NO: 87194 - DNA, 600 bp, Chicken  19866894388664_1
aaaaatatctttcttttccactcccgctaagaaggaaggtatgtttcccattaagatatgaagtgaatttgtttttcacttttgccttttatatagggatactgaatataaaggactacagctctccttggatcaggtcacagctaccaagccggcattctcatacgcaaattcaactccgaccataacggataatagaaagggaagcaaatctcgcctctcgagcacaaagtcaaaatcaaggacatccccccatacccacaggtagttgtctttggaaaacaaaattaaatctttttkaatatcttgattttgactgcttttttaacccgcacaattagaatgggccaaagagtgtgttactcaaagggaataaaagataacaggttataagatgttgagacaggaataaatttcttcaaactgttcctaaaaagctggaagcagttatgtttcagcatgcataataaatcataatcaacaacaataacagcacagggctctgagttaataaagagagaacagaagaatgagtgaaaatgttgyttttgaaatacttggtttgagaggactgggagaattgcagtttgaggaaacttg

SEQ ID NO: 87195 - DNA, 600 bp, Chicken  19866894388664_2
atccccccatacccacaggtagttgtctttggaaaacaaaattaaatctttttkaatatcttgattttgactgcttttttaacccgcacaattagaatgggccaaagagtgtgttactcaaagggaataaaagataacaggttataagatgttgagacaggaataaatttcttcaaactgttcctaaaaagctggaagcagttatgtttcagcatgcataataaatcataatcaacaacaataacagcacagggctctgagttaataaagagagaacagaagaatgagtgaaaatgttgyttttgaaatacttggtttgagaggactgggagaattgcagtttgaggaaacttgctttaccttactttttgataattccaacatatctagaaatttgccagatatctgacagcagtttaactctgaaacgttagtcaaaagggctctgctttttgagtagggaaagaaacaagcttgctagttgaattgaaacaagacggctttggaagggagaaagcactggtaggtggccactgctatcagcagactttaatttctcagatttcattttcattcttcatgttttagacacatgcccct

SEQ ID NO: 87196 - DNA, 600 bp, Chicken  19866894388672_1
cctgctggttttgatagttgctgagtgcttttgaagatctgacacttcatttaactgactagacagtgtttgaggagtactagaaaaatatctagctgtcaaaaaaaaaaaaaaaaaaaaaaggaaaaaaaaaagaaaaagatgtccaggagttgttttgaataatctagttcttcttttctatgtagaacactagtttactctaaaaagtttcattagtttaaagtctattacctggaaatagagaagtaggccagcccaaacacaccctcaataaccactagatctgcatgacgtacsagagaaaaactgtgtgaaaggattgcagaaactttcaaattcttttttgcagaatttctttcttatttctccctcaagaattcaaagtaattagtgagaaaatttccgtagcccaagactaagggtaattttggaaaattctaaaataacttccatgaattttcatgttttgaaggctgtaagaccctcagatcttgataaatgtccctaaacaatagggaaaatgccctgtttccacttacgttgccatttgaatctcataaacaaaagcgtgaaataaaaatctactttttacaagag

SEQ ID NO: 87197 - DNA, 600 bp, Chicken  19866894388676_1
acctccctttcttttctctgaacctatatcatatttgattcagtaggaagagatgaggatctgtcagatcctattccttctcctcctaatactcgtgagtatatacatgtcactgctatttccctcttctcccaagacattattttcccatgataatgtatcccagccaatagaatggaagctatttcatactcattttcatttgctttgcttttctaagggccttttccggtcctgtaatatattagttgtaagatgaagggacaagaatggcaaattaagttgatgatcctctccctytactctgccttggtgaactcacatctggaatactgtgcccagtatggtggactcttcagctgaaaaaagagagatctcatacaagaagttcagtggactacagtggtctccagcaacaaagatgataaaatacctgcagtatctcccatacaaggaaaggctgagagccttgggtctgtttggcttaaagaagactgagtggggatctgatgtttataatttctaaaagtacaggaggcaactggatgagaccaaacttttttcagtggcgtgtgaacaaggagcaatggccaaaaactg

SEQ ID NO: 87198 - DNA, 600 bp, Chicken  19866894388688_1
aaacaggacaagagcccgtgaatgcaatgcctcctgtagccggaggaagaaggcttcatcagcaggctccgcttgatcaggaggcctgtagtagacccaaggcacaaggttccctttgttgcctctgtctctaactctcaccaataggctttcaactcgctcatatccattctttgggcacagcccttcacactctattccttcattgatgtagagggcaacacctcctcccctccctcctcacctgtcccttctgtacagtttgtagccatcaattgccatattcaagttgtgggaatyatcccaccaggtttggtgacgacaacagcattatagttttccagtagcacaggggcttccaactcctcctgtttgtttccgaagttgcatgcttacgaggtggagaagcacttcagctrggcagctggtcttgccaccttcttggaggataactccttaattcctttgaactatttatctttggtctccctattgccttcatcatcatacaatgcagcatgctgagggttcccccagcaccttatccctctaactgatttatgctactccaaaccttttcatgggacaggcttgtgtcac

SEQ ID NO: 87199 - DNA, 600 bp, Chicken  19866894388688_2
tgcctctgtctctaactctcaccaataggctttcaactcgctcatatccattctttgggcacagcccttcacactctattccttcattgatgtagagggcaacacctcctcccctccctcctcacctgtcccttctgtacagtttgtagccatcaattgccatattcaagttgtgggaatyatcccaccaggtttggtgacgacaacagcattatagttttccagtagcacaggggcttccaactcctcctgtttgtttccgaagttgcatgcttacgaggtggagaagcacttcagctrggcagctggtcttgccaccttcttggaggataactccttaattcctttgaactatttatctttggtctccctattgccttcatcatcatacaatgcagcatgctgagggttcccccagcaccttatccctctaactgatttatgctactccaaaccttttcatgggacaggcttgtgtcacctctttctcccttcaaacctagtttaaagccctgtcaatgaacacagacagctcctgggccagaatccttttccccttttccctactatttttcccctgtgttagatttcttattgtct

SEQ ID NO: 87200 - DNA, 600 bp, Chicken  19866894388689_1
accatgcctatagtcctgaaatccgcattatcatggtaaggtcataaaagtttaattctacataaaagagtaactttttggtatatagaaaaacctgtaattatgccgaaagtttatgcagatacaaggaaatataatcaatataaacaaaattataacaaattaggcaatagctacctaataattagggaaaaaaatgcagctaaacaagctaaatcaaaactgcaggcaggcaggcaaaattcaaacaaagcctaggaagttgaaaattcttaccaagctggtaggagattggtagcrtgttacttgaaatggcaagacaggcttacagagttacaaaaacagcagaacaaacattcttgtattgctttatatctctttgtcttactattacttttaattagcaagttgactgcttaggaaktctagattaaaaatggttgtaaaggccttttcttttgtttctgcrctgccctttctcaggctacattctgtgctgcattgtttcaatgttgttacagaatttggaatcttggctgttttagctggattctaatcaccagaggttcaakgagaagaaaaaagcaaagagaaacttgt

SEQ ID NO: 87201 - DNA, 600 bp, Chicken  19866894388689_2
caaggaaatataatcaatataaacaaaattataacaaattaggcaatagctacctaataattagggaaaaaaatgcagctaaacaagctaaatcaaaactgcaggcaggcaggcaaaattcaaacaaagcctaggaagttgaaaattcttaccaagctggtaggagattggtagcrtgttacttgaaatggcaagacaggcttacagagttacaaaaacagcagaacaaacattcttgtattgctttatatctctttgtcttactattacttttaattagcaagttgactgcttaggaaktctagattaaaaatggttgtaaaggccttttcttttgtttctgcrctgccctttctcaggctacattctgtgctgcattgtttcaatgttgttacagaatttggaatcttggctgttttagctggattctaatcaccagaggttcaakgagaagaaaaaagcaaagagaaacttgtgaagaatcctcctgacctaaagtgattttgcaactaagttcaggagtagctcaaatacctatttttcctttcttgcactagccatattgtcctctaacttaggtttatgggtgggatatttctt

SEQ ID NO: 87202 - DNA, 586 bp, Chicken  19866894388689_3
atagctacctaataattagggaaaaaaatgcagctaaacaagctaaatcaaaactgcaggcaggcaggcaaaattcaaacaaagcctaggaagttgaaaattcttaccaagctggtaggagattggtagcrtgttacttgaaatggcaagacaggcttacagagttacaaaaacagcagaacaaacattcttgtattgctttatatctctttgtcttactattacttttaattagcaagttgactgcttaggaaktctagattaaaaatggttgtaaaggccttttcttttgtttctgcrctgccctttctcaggctacattctgtgctgcattgtttcaatgttgttacagaatttggaatcttggctgttttagctggattctaatcaccagaggttcaakgagaagaaaaaagcaaagagaaacttgtgaagaatcctcctgacctaaagtgattttgcaactaagttcaggagtagctcaaatacctatttttcctttcttgcactagccatattgtcctctaacttaggtttatgggtgggatatttctttattagtttcaaatccaatgatggtcaacag

SEQ ID NO: 87203 - DNA, 483 bp, Chicken  19866894388689_4
ttaccaagctggtaggagattggtagcrtgttacttgaaatggcaagacaggcttacagagttacaaaaacagcagaacaaacattcttgtattgctttatatctctttgtcttactattacttttaattagcaagttgactgcttaggaaktctagattaaaaatggttgtaaaggccttttcttttgtttctgcrctgccctttctcaggctacattctgtgctgcattgtttcaatgttgttacagaatttggaatcttggctgttttagctggattctaatcaccagaggttcaakgagaagaaaaaagcaaagagaaacttgtgaagaatcctcctgacctaaagtgattttgcaactaagttcaggagtagctcaaatacctatttttcctttcttgcactagccatattgtcctctaacttaggtttatgggtgggatatttctttattagtttcaaatccaatgatggtcaacag

SEQ ID NO: 87204 - DNA, 600 bp, Chicken  19866894388701_1
gaggttggtgaaggatgggggagatgggatgctaaggacggatggaaggggtgaggtgggagcccactcaccagccacgctgagtgtccgcagcctgaagtccatcccatagaggatgatgaagcacatagtgaagtcgagcttgcgagcatcctcggggtaacgctcaaagtcccgtgagttcttccccaggcggatctccttgatctcccgaatgtcaactgcagagacagagggacgcaggactgtcccgtgtcaccctgacaccacagagccacgtgtagggcttggagagggtgyaggaggtgggactgcatggagaccatggagccttgtccccaggatgggacatcccattgggctgtgatggttattatggccacaggttcctccaaggcgatatgtcgttgctggtgggatggcatggccttcacggatctctgtccccaacatgaggcatcctggtggcactgcccatcggtacatgatggcattatgagtgccatgtgtcctccagggactgtgtcccaaagataagatgtccctgcaggtgtctgagagcaccttgggtgccacatatcaacaggatgaggcatcctg

SEQ ID NO: 87205 - DNA, 539 bp, Chicken  19866894388711_1
aggttaaaaagcaggaagtcagggaagaaagcaaagaaaattgccactgtcctggtatcatttgtatgctgatatacgttaatctgagcactggaaaaatgtcttctctaacgacaacacaccacagtcctgtcctgttacctataatgacttgctataaactataaaaatatcctgtgttttatgaaaatgtagagtggtttattattacaccacctcaggatgttaaataagtctgaaatgattgtttttaatctgcaaagtggcttaaatttgcataaggatttagcctattttatrtgcaattccagttatcctaaaattatctttatagaccctattttttttcagctgggttatctctaaatccatcctgatcatatgtctcttatgtgagatctgtagctacacagccacctgcttctctgcatgctcagattacagctctgaagtagatgactgtaaaggatggaaccagaggctcatgaatacatagctcatctagacttttacaaggaagctatagctttagctttcta

SEQ ID NO: 87206 - DNA, 599 bp, Chicken  19866894388716_1
  misc_feature (1)..(158): n is any nucleotide
nnnnnnnnnnnnnnnnnnnnnnnnnnnnnnnnnnnnnnnnnnnnnnnnnnnnnnnnnnnnnnnnnnnnnnnnnnnnnnnnnnnnnnnnnnnnnnnnnnnnnnnnnnnnnnnnnnnnnnnnnnnnnnnnnnnnnnnnnnnnnnnnnnnnnnnnnnnnnnctttcgtgttctctggagacaggatcagtatgtggtgtgtgtataccagtatatacccttatgctgaacactgaagcacagctacaggctgtacacagaagtgggatgatgtcttttccttttcccatagcacaaaacctgyccactcattaatctatcatgatagcatctctgaaaaaggccacatcatccttaaattgtttcagacttaattcggtataatcatgcaattaattttcatgaaattgtgttctggagtgacagcttccattgttggagcacatggcaatcagagagcagcttgtggcagatgtgatggttattcactattgctagtttttggtctaactatgtcattccaatcaaagtaagcactgcatgtatttgacatctaaggagatcttcaggccaccatcacatttaagctgtttctgtcaagta

SEQ ID NO: 87207 - DNA, 600 bp, Chicken  19866894388716_2
gttctggagtgacagcttccattgttggagcacatggcaatcagagagcagcttgtggcagatgtgatggttattcactattgctagtttttggtctaactatgtcattccaatcaaagtaagcactgcatgtatttgacatctaaggagatcttcaggccaccatcacatttaagctgtttctgtcaagtaggaactccacagctccaaatcagtaactcatatttaacaagtaatgatgctgtttactggagatctgtgttcccagattctatgtttctagtatggattgtgatcccwcagcagaccacaaggacaacctattacaataaatgagctcattaagcatgcagctctttagtcttgcaagctgttgcagagggtgaaaagttgaattatcaacttggaaagcacattagtgatccagctgggctcagaaagaaagtatgtgagcaacatccctattactgttgagtatacctttgactacagtacatgagcaaagcatcagtggtactgcagtgacatgcttccccacccagtaagccagacactcctaaaaattaaatgccaaaaatttattatgaaagcttccatagc

SEQ ID NO: 87208 - DNA, 600 bp, Chicken  19866894388718_1
aatatagggaagaaacttcaacccatggcacagagggaacaagtatgacctgtacaatcactgcagatgggtattgtgacggagcagactccagagctgtacttttacttggaattatgtctgtgattctggacagacctgaaaacgagtagcccaggattccccctgaggagaaacaggaggtaacagaagcacagatggtgccctgggtgtcagagatgcttccaccccccacgggcagctctgagaggtgacctttcccctggctgtcacatccatgctgtcagactgtgcccagcycgggggctttccagaacaaactcaacttagaagacttcacttaactttccttttgttcatttaaacactcaccacttacatcagctgaatgaaatagccagtgcagacagcaaagatgcagaggtatggcacagcactaagaatagcaatgttgaaatgacttttcctcccacagttgttttcttctccactttaccttgcggtgatgcacagcaacagcctccagcctgattcagctctgggaaaacttggttcagcttcagtaaaagtaggcttgttttgtccagaaaagcaaagagg

SEQ ID NO: 87209 - DNA, 599 bp, Chicken  19866894388726_1
  misc_feature (1)..(12): n is any nucleotide
nnnnnnnnnnnnttctgctgttagcataattgcactctgttgtcaggatagttatccacattaaactggtgactactggcttgctaggactgcctgtgacatctagtcaatagaaactggcttagattatgaaaacatgtcagagttcaggtaaaacagaactctggcactacctgggccagagaggaaagaatccatgacttagggtaactttttcattaaaaagtctcttaagattgaattttttttttttttttgatagcaggtttgcatggaatgtgctggattaaggtggttatraatcacagcactttaacccctcaggagcaataggtcacaatttttctttgaccttgtatctgagagatgtttggtcaagactacctcagccttatctcaatttctattcctagctgaatctactagttaactgcagtcctccttcaatgttccttcagtgaaaggctctctcctccatacaaactgtccatacaacacatgactcctattctacaataacattacaaatccctaccagagttacaataggcttcattgcccttttccataagagaatcctccagcagtatgagacatac

SEQ ID NO: 87210 - DNA, 600 bp, Chicken  19866894388730_1
ccaggttctttccccatgtactttttgaaatacttcacccccagtttcctttttgtggctctccaatggctggttgctcaaaagccagtcatttttcccttcaatgacaccaattgttctaatagaagctattacctctccctgcaaaccttgtctccatggaatcctttgaccatcatggtcaaagcgctgctaccattttccactcttgcacatccatctcattaccactcttccatcattcaggcgccttaccacaccgtcctccagactttcagcagcccttaccacagacccatycrcccccactttctgctggctcataatccacatcattctctgtcacatttctctcctcagtagcctacatcaatacttacatggataaccccttttgtaattctgcgtgcaagagtccattcctgcacctcaagtcttctgacttcccctctgcagccccactgcctccccttccccccagtctcctgcccagaggtgagcaagcaggctgctctccaaacctggaagccccacatgtggctgcattcctttgcttctgtaatgttctttaacctcatatcagaaaagaacacactttta

SEQ ID NO: 87211 - DNA, 600 bp, Chicken  19866894388730_2
aggttctttccccatgtactttttgaaatacttcacccccagtttcctttttgtggctctccaatggctggttgctcaaaagccagtcatttttcccttcaatgacaccaattgttctaatagaagctattacctctccctgcaaaccttgtctccatggaatcctttgaccatcatggtcaaagcgctgctaccattttccactcttgcacatccatctcattaccactcttccatcattcaggcgccttaccacaccgtcctccagactttcagcagcccttaccacagacccatycrcccccactttctgctggctcataatccacatcattctctgtcacatttctctcctcagtagcctacatcaatacttacatggataaccccttttgtaattctgcgtgcaagagtccattcctgcacctcaagtcttctgacttcccctctgcagccccactgcctccccttccccccagtctcctgcccagaggtgagcaagcaggctgctctccaaacctggaagccccacatgtggctgcattcctttgcttctgtaatgttctttaacctcatatcagaaaagaacacacttttaga

SEQ ID NO: 87212 - DNA, 600 bp, Chicken  19866894388732_1
aaatatttatagagtcttatctaaactactgattggttattagtgccttgaattgaggcagggatgtgtgaatccctagagcttcgtggccctatcccatctgaatgaatccaaaccgttaatgcggaattggtgctctaagtcttcctgcagctatatccttctttccaccctgcactgcctttgtatttatttccttctcttgggttgttccgttaatgatctagaatgttataatagcacaaaagaaagtttaggaatccttcctcttagaaatatttggctttaaagctatgtctstatcttttttcagctgcacaggcttacagtctttcttgccggttcaatagcagaatgacttcgttagcacggtgctaccttgttgctgtattgggtttagcagtcttccctgctgactcacgggcttttgaggagagaggttaacagatattctggattacttcttcctgacaaattcctggcccatttggagactcaagaaagctattggatacgtttattggtgttgcaaatccacattttttcctgtcagttgcgaatagctacagcttttgacaactgtaatgaggcctttgataa

SEQ ID NO: 87213 - DNA, 600 bp, Chicken  19866894388733_1
tctaaaactatccaaagggaggttgtggtgaggtgggagtcggcctcttctcctctgtgactagtgatagcactagagggaatggcctcaagctgtgccagggaagattcaggttggacgttaggattctctgagagagtggtcaggcactggaatgggctgcccagagaggtggtggagtcactgtccctgaaggtgtacatgaaacatttagatgttgtaccgaaggacatggtttagtgggaaatactggtgataggttggactggatgatcttagaggtcttttccaaccttaatrattctatgattctaagatcagcactcagcttctccaaacctctgtgccctatctcctttctttgtaagaagctctctgaaagacttcgtggtagataaaggccactgctgaaaggatagaaaggagcccacagagtggaaggtatgcacactccttccttctacaacttctctattatcagtagagaacaaagaaaacacagatgtatatctgatgtgtttacatgaaaactgcagtatttactgatgcttttaaggtcatatttcgcttcagtcaagcaatgaaaaaaatgtcaagaat

SEQ ID NO: 87214 - DNA, 599 bp, Chicken  19866894388737_1
  misc_feature (1)..(118): n is any nucleotide
nnnnnnnnnnnnnnnnnnnnnnnnnnnnnnnnnnnnnnnnnnnnnnnnnnnnnnnnnnnnnnnnnnnnnnnnnnnnnnnnnnnnnnnnnnnnnnnnnnnnnnnnnnnnnnnnnnnnnntgtgaccccggggtaattcaattatctgcctcgtccacttcccctgtacagctaattgaccatctcaacgctttgcgtgcaggaaccctttggcaaaaatacctccatgacactacctgatattcttttcattatgagctgggtgttctgggcttctgctccaccctgggaacccaaatctktyggatgagagctaggagcgcggtgartgtgcagggagagggaggagaatgggcgcgtgctctgcaggcatggcctgctcccttcacggaccggggcatgatggaagggaaaactgctattggtgccattcataaatcccatcctgcctttcataaatgagtattgctggagttcatagcagttagaatgaggagaacccagctaaataaatgagtctttaatttggatggctctctgaaccgtgaaagctgcttcacttagctactgcttgtaatcttcatcagctgaagttttgtac

SEQ ID NO: 87215 - DNA, 599 bp, Chicken  19866894388737_2
  misc_feature (1)..(116): n is any nucleotide
nnnnnnnnnnnnnnnnnnnnnnnnnnnnnnnnnnnnnnnnnnnnnnnnnnnnnnnnnnnnnnnnnnnnnnnnnnnnnnnnnnnnnnnnnnnnnnnnnnnnnnnnnnnnnnnnnnnntgtgaccccggggtaattcaattatctgcctcgtccacttcccctgtacagctaattgaccatctcaacgctttgcgtgcaggaaccctttggcaaaaatacctccatgacactacctgatattcttttcattatgagctgggtgttctgggcttctgctccaccctgggaacccaaatctktyggatgagagctaggagcgcggtgartgtgcagggagagggaggagaatgggcgcgtgctctgcaggcatggcctgctcccttcacggaccggggcatgatggaagggaaaactgctattggtgccattcataaatcccatcctgcctttcataaatgagtattgctggagttcatagcagttagaatgaggagaacccagctaaataaatgagtctttaatttggatggctctctgaaccgtgaaagctgcttcacttagctactgcttgtaatcttcatcagctgaagttttgtacct

SEQ ID NO: 87216 - DNA, 599 bp, Chicken  19866894388737_3
  misc_feature (1)..(91): n is any nucleotide
nnnnnnnnnnnnnnnnnnnnnnnnnnnnnnnnnnnnnnnnnnnnnnnnnnnnnnnnnnnnnnnnnnnnnnnnnnnnnnnnnnnnnnnnnnntgtgaccccggggtaattcaattatctgcctcgtccacttcccctgtacagctaattgaccatctcaacgctttgcgtgcaggaaccctttggcaaaaatacctccatgacactacctgatattcttttcattatgagctgggtgttctgggcttctgctccaccctgggaacccaaatctktyggatgagagctaggagcgcggtgartgtgcagggagagggaggagaatgggcgcgtgctctgcaggcatggcctgctcccttcacggaccggggcatgatggaagggaaaactgctattggtgccattcataaatcccatcctgcctttcataaatgagtattgctggagttcatagcagttagaatgaggagaacccagctaaataaatgagtctttaatttggatggctctctgaaccgtgaaagctgcttcacttagctactgcttgtaatcttcatcagctgaagttttgtacctcagccttaaaaacatttttcagtca

SEQ ID NO: 87217 - DNA, 600 bp, Chicken  19866894388746_1
agggctatgcccacctggctgccctgtgggaagacttgggccccaccgtgcccacagctgagttgccccagcccaggggacatcccaagctcccatctcagtcagggcttccctaggaactacagacagggaacccctccagcccatcctgcccccagccccatgctggtggcaccgtgatgccccaaatttccgagccatggggtgctgcagccccacctgctcactggccaggaagaggaggacatggccgggctcctgccgccggtggatgtccagcacagcctggcaggctgctgygacgcggccgtgggctgggatgtccctgtagagcagctgtgggggcagccctggtccgggcacccgaaccacggggggatccccgcagaaggcgcgcagccgctcctccatggccggtgaggtcaccaccaccaccttcagctccgggcgctggtgcaggacgtccttcagcagccccagcagcacatccgtgggcaccgtgcgctcctgcgcctcgtccagcaccaccaccccgtactgccgcagcagggggtccgacgtcatctcccgcagcagcatctcgtccgagcagtacctgcg

SEQ ID NO: 87218 - DNA, 599 bp, Chicken  19866894388749_1
  misc_feature (1)..(132): n is any nucleotide
nnnnnnnnnnnnnnnnnnnnnnnnnnnnnnnnnnnnnnnnnnnnnnnnnnnnnnnnnnnnnnnnnnnnnnnnnnnnnnnnnnnnnnnnnnnnnnnnnnnnnnnnnnnnnnnnnnnnnnnnnnnnnnnnnnnncatcccaactcacggatccttctaactttgttatccttttaatcacagggatttattcctctgatttttattaatttacaaccttatctaacattgctcacatcccactcagtcctgaacaaacaagagttttaccaattaccttgtagtttgtcttaaattatcctstgagagatttttaagacagtgctctttgcatgtagccatgattggtatttgaattacagtatcaagcttaattccaagagaaaacctccatgtataaaagagcctaggcttcaggtccaggcagcgcacaccaaggctaactctgcactgtccactaattggtatgacagtaacagtagttattaacagctggtttatatccagtctccaaagctacaccatacagtttggcttgtatgaaccacgctgagggaagaggaattgtctgaggccacataaaaatatatataatayagtca

SEQ ID NO: 87219 - DNA, 600 bp, Chicken  19866894388749_2
atcctstgagagatttttaagacagtgctctttgcatgtagccatgattggtatttgaattacagtatcaagcttaattccaagagaaaacctccatgtataaaagagcctaggcttcaggtccaggcagcgcacaccaaggctaactctgcactgtccactaattggtatgacagtaacagtagttattaacagctggtttatatccagtctccaaagctacaccatacagtttggcttgtatgaaccacgctgagggaagaggaattgtctgaggccacataaaaatatatataatayagtcaatgyatataaaagtaacaaaacttattttatttgtaatattttttattttaaaaaagtacaaaaaagggcaacaaaatgtaaaactagcagggtggacatgtacagtctagaggactgcactggactaagcttaatcttgtcccctgaagcaaacagctccacagcacgtggttgaaaggtgtctaaagccagtctggttcaaatgtttacaaccctcttacagagcacatggtatcagatgtgcacgtggagcttctagtgcagttctcagcttccagagcagtttctagctat

SEQ ID NO: 87220 - DNA, 600 bp, Chicken  19866894388749_3
gagatttttaagacagtgctctttgcatgtagccatgattggtatttgaattacagtatcaagcttaattccaagagaaaacctccatgtataaaagagcctaggcttcaggtccaggcagcgcacaccaaggctaactctgcactgtccactaattggtatgacagtaacagtagttattaacagctggtttatatccagtctccaaagctacaccatacagtttggcttgtatgaaccacgctgagggaagaggaattgtctgaggccacataaaaatatatataatayagtcaatgyatataaaagtaacaaaacttattttatttgtaatattttttattttaaaaaagtacaaaaaagggcaacaaaatgtaaaactagcagggtggacatgtacagtctagaggactgcactggactaagcttaatcttgtcccctgaagcaaacagctccacagcacgtggttgaaaggtgtctaaagccagtctggttcaaatgtttacaaccctcttacagagcacatggtatcagatgtgcacgtggagcttctagtgcagttctcagcttccagagcagtttctagctatctgaatcta

SEQ ID NO: 87221 - DNA, 599 bp, Chicken  19866894388755_1
  misc_feature (1)..(49): n is any nucleotide
nnnnnnnnnnnnnnnnnnnnnnnnnnnnnnnnnnnnnnnnnnnnnnnnntctctgaactgttgaatgccatggaggagccaccccgccttccatgctcggttgtatttcggggctgtcaggaaagcagcccttgcaaggcaggactcttctgctaatgcatccaggcagcaggacctccgtaccagttcggatctgatcccaagaacaggagtttcacatttgtaaattagttttcatttgcataaaccttgggggatctttcaagatcggagttattcctgagctgcagctgatattayttgttatttctaaatagaagctcctatgttaatttgttggcagattctgtctgatgtgataattgttctgtgctagsttagattagtgaagtacctctggaatctgcagaggggctcaagagaaagatgaggcaatgcccaccgtactgcagggcttcccgatgctggtcacacacaagttggtattttcatacacagcacagatcaaattctgtagtctttgcttcaaaaagctctgtgtgggctcatgtatgttcatctatacataactgagcctgttaactgagacaggagaggtt

SEQ ID NO: 87222 - DNA, 600 bp, Chicken  19866894388755_2
gccaccccgccttccatgctcggttgtatttcggggctgtcaggaaagcagcccttgcaaggcaggactcttctgctaatgcatccaggcagcaggacctccgtaccagttcggatctgatcccaagaacaggagtttcacatttgtaaattagttttcatttgcataaaccttgggggatctttcaagatcggagttattcctgagctgcagctgatattayttgttatttctaaatagaagctcctatgttaatttgttggcagattctgtctgatgtgataattgttctgtgctagsttagattagtgaagtacctctggaatctgcagaggggctcaagagaaagatgaggcaatgcccaccgtactgcagggcttcccgatgctggtcacacacaagttggtattttcatacacagcacagatcaaattctgtagtctttgcttcaaaaagctctgtgtgggctcatgtatgttcatctatacataactgagcctgttaactgagacaggagaggtttaggttagatattaggaggaagtttttcacagagagggtggtgacacagtgaacaggttgcccaaggaggctgtggat

SEQ ID NO: 87223 - DNA, 600 bp, Chicken  19866894388758_1
ttaagcccacttaggcctacatccacaagggagttaggcaccaaagtctcactttctagggttttcagttcactctggcacagaacaagtgtgcaaatgcaagtaccatacaaaccacaagagatacagaacagagttatctaaatgaaggaattgaaggaaattcgcagagaaaggaatgagctgtccacttgcttaaatgtgaactatttgcaagaaatcatatcagttatatgcagatatgccctaaaatatctatttgcccttcctcctttaaaagtagtccacaaagcactacayctctcacattcagcccattcagtgctttctrcacacagtgatccttctcccattccatcctgcagtgccggccccactaatcactgacatatgctccagcgcagcgcgtttcctctggcatgctgtaaaaagcagtgctgtcaccagagcaatgaacacgctggcaaatatggtctgtcaggttttgttttcaaggactataaaaatagacctcacttgagaactcataccctctagagataatttaaagaaaaaaaccaaacaagttttcagatggcttgctaaatgaaaaacaaaact

SEQ ID NO: 87224 - DNA, 600 bp, Chicken  19866894388758_2
agttaggcaccaaagtctcactttctagggttttcagttcactctggcacagaacaagtgtgcaaatgcaagtaccatacaaaccacaagagatacagaacagagttatctaaatgaaggaattgaaggaaattcgcagagaaaggaatgagctgtccacttgcttaaatgtgaactatttgcaagaaatcatatcagttatatgcagatatgccctaaaatatctatttgcccttcctcctttaaaagtagtccacaaagcactacayctctcacattcagcccattcagtgctttctrcacacagtgatccttctcccattccatcctgcagtgccggccccactaatcactgacatatgctccagcgcagcgcgtttcctctggcatgctgtaaaaagcagtgctgtcaccagagcaatgaacacgctggcaaatatggtctgtcaggttttgttttcaaggactataaaaatagacctcacttgagaactcataccctctagagataatttaaagaaaaaaaccaaacaagttttcagatggcttgctaaatgaaaaacaaaactatgctttctctctctggatgtttgaaaacaa

SEQ ID NO: 87225 - DNA, 600 bp, Chicken  19866894388758_3
cagtgatccttctcccattccatcctgcagtgccggccccactaatcactgacatatgctccagcgcagcgcgtttcctctggcatgctgtaaaaagcagtgctgtcaccagagcaatgaacacgctggcaaatatggtctgtcaggttttgttttcaaggactataaaaatagacctcacttgagaactcataccctctagagataatttaaagaaaaaaaccaaacaagttttcagatggcttgctaaatgaaaaacaaaactatgctttctctctctggatgtttgaaaacaataaygttttcaggttaagccaatatttgaagttttattgcackactgacaattctcagctaatttacctgcaaacaccagtgctccatcctcgtgtgcaacaatttacagctgctcctcagacatttcaacaaggagcagcttcttattacaaaagttacctgaaaggcacaagcacttcacttgtttccagagctgaaatctttcccctttggtaaccggtgttactctgtgcccataacatctctggctaaaaagcaaggaaaaggatcttggcatagattgaagtttaagacaccttcttg

SEQ ID NO: 87226 - DNA, 600 bp, Chicken  19866894388758_4
cactaatcactgacatatgctccagcgcagcgcgtttcctctggcatgctgtaaaaagcagtgctgtcaccagagcaatgaacacgctggcaaatatggtctgtcaggttttgttttcaaggactataaaaatagacctcacttgagaactcataccctctagagataatttaaagaaaaaaaccaaacaagttttcagatggcttgctaaatgaaaaacaaaactatgctttctctctctggatgtttgaaaacaataaygttttcaggttaagccaatatttgaagttttattgcackactgacaattctcagctaatttacctgcaaacaccagtgctccatcctcgtgtgcaacaatttacagctgctcctcagacatttcaacaaggagcagcttcttattacaaaagttacctgaaaggcacaagcacttcacttgtttccagagctgaaatctttcccctttggtaaccggtgttactctgtgcccataacatctctggctaaaaagcaaggaaaaggatcttggcatagattgaagtttaagacaccttcttgttagtctgtatgtaattggccttgccaaggactcttgtt

SEQ ID NO: 87227 - DNA, 585 bp, Chicken  19866894388758_5
acagctgctcctcagacatttcaacaaggagcagcttcttattacaaaagttacctgaaaggcacaagcacttcacttgtttccagagctgaaatctttcccctttggtaaccggtgttactctgtgcccataacatctctggctaaaaagcaaggaaaaggatcttggcatagattgaagtttaagacaccttcttgttagtctgtatgtaattggccttgccaaggactcttgttctctaatcagatggcccaagctcgtatttgcagaaaatatgcaactatggaggaagaaaatcyattatcttctacacacagacactccacagcaattgaaatcaaggacaactcaagtagcaccctccacgtttcagataagacttttctaatctttcacatccccattcacagagcacaaaccacatctgcgatcacaaacagctcgaggcagcacgagacagcctctcctcggggtcatttaagagactgctgctggaagagaacagctatagatcgtacatttctattagatctggacttctgaattcaagaattagtttaggtgatggtgcatgtgacattctg

SEQ ID NO: 87228 - DNA, 599 bp, Chicken  19866894388761_1
  misc_feature (1)..(38): n is any nucleotide
nnnnnnnnnnnnnnnnnnnnnnnnnnnnnnnnnnnnnnctccttcttgggaaaaaaaaaaaaaaatagcagattctgcttaaatatagacacagatacagtaagaagtgaagttagaaatctatcatcaggataacactaggactggaggaagttacaaacaggaacttataggacttcacatcatgaagaaaacactacatattgtgcagtgctgtataaaagtaaattgaaactaaatacaactaaataagaagcagattcaagaatccaaacagaagaggcagataggtgtaccacrgttgtaaaaagtgagcacgcccatggagcaacacacaaaacaacaagcaggccagcatgaacatttaaacacttcacacactgcagccccactaccagcatgcagtgcagataaatgtctaagtttgttactacagcccaaacctcctctattccatcaaagttcagctttactgttccaaaaattctcccaaattcttttcatcttttttttttgctctagcttcctaatgtctattcttcaaattcttcaatgcatctcagccttccagtgacctccttcagtggatctccagtccc

SEQ ID NO: 87229 - DNA, 600 bp, Chicken  19866894388762_1
cagtgcatgtactcaatttttgacacttgctatggaggtaaatggcctgcctgtctttaaggagctcggcagctttgctgtgccatcaggagtgttgtaaattggcaaaggacagttggcgtttgctaaggatgctgctagtttagtttctctgcagcacagccttgagtagacaggtgtgttacaaagagcttttgctgcaaagctgttgcctggcagtaagctttatcccttccagtgtgatggtaatcccgtggcaatgtatactggagatatactatctagaaagggctacatacrttaggatatccagcagcccagaaatttgaagctatacaatgcagagttccccttgtaggcaaaaataattgcactggagtcaaaaggcacaagcaaagggagggctgagaggtgagagctggagccatacgctccttcccacaggtggaatccgctgtccttgttcccatggccacctgccagcgccccactgggtggttgggaaaagattaattaggtggaggagctggcctatggtgatttgcatggctgggcactgacttgctgtaaagcagttctacttgttgtgagtgaaggagc

SEQ ID NO: 87230 - DNA, 600 bp, Chicken  19866894388762_2
cctcagcttcctagtgcaggccttaccaagtaaactgcctcttgtcccctcactgcttttctgctgcttttgagctgctaggctccctgactgagcatggacccagaatgctgagctgggcttgggttgaggtacctgcagttcagcagggctccaccccccactgctgttgccttgaattatgcactgaccaagcagaagtagcaactgttgcacagcatcttccttgtgcttgaagaaacagggctcaaatggcaggcagcaattctgactctgctcattcctgacatctctctgggraaaaaaacaaarggagagaagggggctgccttgatgttcccaacaaggctgagctcttctttgcgtttaggtctctgtctctcrcaagttttctacagacactgcacacaataactgaggagccaatccctctgagttgtgcagtaaatctatgcattcccttaggaatctcttttaattagggaagatttcagctctgaggcagttgtgcagcacttgacgtttgcagagcagggtgttgtggagcagcaccaaggtttcctgtagcactactgtggggcccgaggtgctgctgctgaa

SEQ ID NO: 87231 - DNA, 600 bp, Chicken  19866894388762_3
agtgcaggccttaccaagtaaactgcctcttgtcccctcactgcttttctgctgcttttgagctgctaggctccctgactgagcatggacccagaatgctgagctgggcttgggttgaggtacctgcagttcagcagggctccaccccccactgctgttgccttgaattatgcactgaccaagcagaagtagcaactgttgcacagcatcttccttgtgcttgaagaaacagggctcaaatggcaggcagcaattctgactctgctcattcctgacatctctctgggraaaaaaacaaarggagagaagggggctgccttgatgttcccaacaaggctgagctcttctttgcgtttaggtctctgtctctcrcaagttttctacagacactgcacacaataactgaggagccaatccctctgagttgtgcagtaaatctatgcattcccttaggaatctcttttaattagggaagatttcagctctgaggcagttgtgcagcacttgacgtttgcagagcagggtgttgtggagcagcaccaaggtttcctgtagcactactgtggggcccgaggtgctgctgctgaaggtgcatgggaa

SEQ ID NO: 87232 - DNA, 600 bp, Chicken  19866894388762_4
ccctgactgagcatggacccagaatgctgagctgggcttgggttgaggtacctgcagttcagcagggctccaccccccactgctgttgccttgaattatgcactgaccaagcagaagtagcaactgttgcacagcatcttccttgtgcttgaagaaacagggctcaaatggcaggcagcaattctgactctgctcattcctgacatctctctgggraaaaaaacaaarggagagaagggggctgccttgatgttcccaacaaggctgagctcttctttgcgtttaggtctctgtctctcrcaagttttctacagacactgcacacaataactgaggagccaatccctctgagttgtgcagtaaatctatgcattcccttaggaatctcttttaattagggaagatttcagctctgaggcagttgtgcagcacttgacgtttgcagagcagggtgttgtggagcagcaccaaggtttcctgtagcactactgtggggcccgaggtgctgctgctgaaggtgcatgggaacttctgtatgctgaaaggggcatcaagccagctgctgcctcgacacaagaggctatttcaagtgggggctat

SEQ ID NO: 87233 - DNA, 600 bp, Chicken  19866894388762_5
cagatgggaagcttcttgcaaacccagctgtcagctcccagcaagacctagtgaagtgtatacaactagatggctgtgcatccggcgttgtcccacaggagtctaaacagctgctctctgtcactatggggtgtttgctgtcaggggagacagccgctgaggtggtgtgtgagctctatctgggccagcctgttgcaggggcggtcacggtgcctctcacctgcagcctgatctgatgccagcatctctctggagagcatcgtcgcccaagttctgctcttgtggtggattgtcttcccrccaggagcctcctgcccaaggagaaagaccactggcctttccatcccattgaagcattacttcccctaaagcccactccctgaagggagtagaacatggtggggcagagaaaagtattataaataaataaatctctgcagctctattaaaaagtaatgataagctgcatcatagtctgctgattaaagatgaaacagagccctgcttttttttttttctttgtccttcaaaaatgggagcatttatctcttcattaaagtaaaaaaactcagaagtgctgttttccatccttctaacttt

SEQ ID NO: 87234 - DNA, 600 bp, Chicken  19866894388769_1
aattacaatgcaaagcacagagaactgtaagaaagaaggctgacgaaaggctacagagaatccttgggaactgggatgtcatttcaaaaatggctacatctgtgcaaattttattttagagcattactttactttttcttccgttaccaacagctttcacatggagatacatagaaaaactcctcaggaaggaattgcctatctctgattcccttgtttcaaagctttgcatgaagaaaaggaaaaaaaaaatcatttaccagaaactgttttcatttctgcctaagagatttttacagygtgagcctttggtgctgttactatttgtgctgatcactcttacagagcctctaggagttacccgtttttacctccaacacacattaggggtgattaagatctctgggaggctgaggtgcacactcagcagccctgctggcctgtgtaggagctaggtttgctgtgttagcactgggatgccaccatcggccaccacatgtccaggcccctcgtaccaccactgcccgagaactgcccagccaccacccagcaggagcacaggtaagggaaagataagtacaggagtatccagcaggtgtc

SEQ ID NO: 87235 - DNA, 598 bp, Chicken  19866894388776_1
aatttattgaatgctttcacttctttagttagaaagatgaaagaaaccatatttcctcccatttgtagttatattactctgaaatcaacagaaaatagagaacaaaatgtgtttgctcattcaagaaataagcttcattctgcaagacagagcaaatatagacaaaatatcttctcaaacactaaaatcggtaatagttttctggaattaagtagcaatttgattttaataacaattatgtcaggttctgaaaaagtggtacttctcttcaggaagacatgtaaatttcaagctgatccsaaagagaatttttctgccatcttgacatttacttggtctgaaatttgattctacatttctttggtcaatgatcaaagaaaagaagactgaatttgtttgtgaagaatttcattgtctcctcagtatgggggacagtaaaacccaatgtttaattgaggaatgaataaacatgattctgggtccattgttgaagacatttaagtggaaaatgctatttgaatgtttatttttattggagtgttaaattaaaatcatatgattacgaccgagtgacaggaaaataggaatgataggaaaa

SEQ ID NO: 87236 - DNA, 600 bp, Chicken  19866894388784_1
gggaaagaatgaaatggagcaagaatttttgtcactgaggaagttaagaacgggccacattcttacctggtgtggcaagagtcagtatgactgatgtttgctattgcagggtagttccaaatagtgtggctttgcaagaagttagagttattttccttttgaaagcaaatattaatgtaggacatcttggatgaagatggctttagtgaaagtttgggtttctgtgagaaaatgagactgagactagaaatctttgcagcttttttttgtgtttttccatataaggtggggagagggctkggggcaaaacactattggatttatgttcctttctaaataagtagttaagaaacttactagaggtaaaagctggtcatgttgcttgatggtcatgtttccartgttgtatgcattaattcatgttgaaaaaaggatgtgacatttgcagggcttgaatgagctggggagttcttgatgtttcatgggagattagagaaggtgtaaaaggtgtaaataaccatgacaaatgtcacagttcaatatacagacctaatgtgaataactgaaggtcttgatctgatgcataggaacttaaaatgt

SEQ ID NO: 87237 - DNA, 600 bp, Chicken  19866894388784_2
tattgcagggtagttccaaatagtgtggctttgcaagaagttagagttattttccttttgaaagcaaatattaatgtaggacatcttggatgaagatggctttagtgaaagtttgggtttctgtgagaaaatgagactgagactagaaatctttgcagcttttttttgtgtttttccatataaggtggggagagggctkggggcaaaacactattggatttatgttcctttctaaataagtagttaagaaacttactagaggtaaaagctggtcatgttgcttgatggtcatgtttccartgttgtatgcattaattcatgttgaaaaaaggatgtgacatttgcagggcttgaatgagctggggagttcttgatgtttcatgggagattagagaaggtgtaaaaggtgtaaataaccatgacaaatgtcacagttcaatatacagacctaatgtgaataactgaaggtcttgatctgatgcataggaacttaaaatgttcagaatcttgtggaaacgcaaggaatattgcagaatgtttctgaagtaaagtataaggctcacaatcattgccagcattttaagtggtttcagattgaat

SEQ ID NO: 87238 - DNA, 600 bp, Chicken  19866894388792_1
aaattagaatggctgaataaaactttcattttcatctgtgtttcttgtaaccaaaggctccctcaatgcagtgaatatatgtaaaaaaaatgatttcccgtgttaatacagaacagaatgttctattactgtgaatggttacttcctggataccatatttgacaaacatataacacttgcttcaggtgggagtgttgcaataatggtaagccctatttctgaaaagctgattaaatattagcaacaagcaagtgctgcgacacaaaaagagtgaattgatggatgtgtatgttattcatwtctctctcagtaagcactgtagaagagaaacactgctgagtttaacttcctaaaatctttttgctgtgttgggattaaaattattgtaatggctagagagtgaaatgaatggtgtgcactgtaaagcacattttccaactcaccgcagcaagctgttccactccacttgcagttcgtgccaatgttatgaggtcctcttgcatcttatctacccatgactttatcctaccgaaataaaagaaaaaacgagttcagtcagttcaatgcaaatatctatgaagatctcaaacacaaaaaaaa

SEQ ID NO: 87239 - DNA, 600 bp, Chicken  19866894388796_1
attcacatcagtgtcaaaactcccactgatttcaacatgactgacatttttctttgagactaagtgagaaggtaaagtgctgtcttctagaactactgcctccgaattttaatccacatgctattcacctttctctgcccatgtgtaactactagcacttatcttcttggttaaggtcagaatgaaagccctggaaatctttctgtcaacatctaaggctttaaattgagtgcagtgttaatattgcatcattcaatgggttccaaaaacttttgctatttggagttgggaactaggtcygtgtaaagaaataaagtggaagttattgaatgtagttttgrtactttctatctaattaccataaattgacgattttatattatggccaaaattaacgattgagatttggaagttatgtctgttaaaatcataggctgattctcagaaaatttatggaatcgtagaattgtagtgtggtttggattggaagggaccttcaagatcatctagttccaaagagtggtggtcaatggctcagtgttcagatggagatcagtgatgagtgrtgtccccagagaccagtactgtgactggtgcttt

SEQ ID NO: 87240 - DNA, 600 bp, Chicken  19866894388796_2
tgacatttttctttgagactaagtgagaaggtaaagtgctgtcttctagaactactgcctccgaattttaatccacatgctattcacctttctctgcccatgtgtaactactagcacttatcttcttggttaaggtcagaatgaaagccctggaaatctttctgtcaacatctaaggctttaaattgagtgcagtgttaatattgcatcattcaatgggttccaaaaacttttgctatttggagttgggaactaggtcygtgtaaagaaataaagtggaagttattgaatgtagttttgrtactttctatctaattaccataaattgacgattttatattatggccaaaattaacgattgagatttggaagttatgtctgttaaaatcataggctgattctcagaaaatttatggaatcgtagaattgtagtgtggtttggattggaagggaccttcaagatcatctagttccaaagagtggtggtcaatggctcagtgttcagatggagatcagtgatgagtgrtgtccccagagaccagtactgtgactggtgctttttaaaattttcatcagtgatagctatagtgagatggaatgc

SEQ ID NO: 87241 - DNA, 551 bp, Chicken  19866894388796_3
aaacttttgctatttggagttgggaactaggtcygtgtaaagaaataaagtggaagttattgaatgtagttttgrtactttctatctaattaccataaattgacgattttatattatggccaaaattaacgattgagatttggaagttatgtctgttaaaatcataggctgattctcagaaaatttatggaatcgtagaattgtagtgtggtttggattggaagggaccttcaagatcatctagttccaaagagtggtggtcaatggctcagtgttcagatggagatcagtgatgagtgrtgtccccagagaccagtactgtgactggtgctttttaaaattttcatcagtgatagctatagtgagatggaatgcaccctcagcagtttgcagatgatcctaagctgtgtggtattgtcaacatgcttgagggacaggataccatccagagagatctagacagacttgagcagtgggcccaggtgaatctcatgaggttcagcaagtccaagttcagagtcttggacctgagtcatagaaacccccgctat

SEQ ID NO: 87242 - DNA, 599 bp, Chicken  19866894388798_1
  misc_feature (1)..(106): n is any nucleotide
nnnnnnnnnnnnnnnnnnnnnnnnnnnnnnnnnnnnnnnnnnnnnnnnnnnnnnnnnnnnnnnnnnnnnnnnnnnnnnnnnnnnnnnnnnnnnnnnnnnnnnnnnngtcacagctgcctcaacctcccacccaaacctattgcagcaccatctcctaagttgcttggcacattgctctgctctgtgtttgcatggtttgtcttgttccttctgactggagatgactgggctgtccgtggtaaccttcagcagctgctgttcctcgtgctgaccagaggcaatctccagaggctgtgctgrgaagagtagccctcgacagcctggctcccaacctgcacagtgcttgtgcacacagaagcgggcttaagcaccttcttggtttctctgactgtagtgccatttagaaatcatcctgagaaacaaagcagaacagagagagggaaagaaagcagtgtttcacacttcattctctggcccaactgtggtgctcccacataggacagaagtattggtgggacagacctggcatcctgtcatggtccacactgcccattgccatccagcagccgttgtgttcttcctgtgctggggctcttttc

SEQ ID NO: 87243 - DNA, 600 bp, Chicken  19866894388798_2
gagagggaaagaaagcagtgtttcacacttcattctctggcccaactgtggtgctcccacataggacagaagtattggtgggacagacctggcatcctgtcatggtccacactgcccattgccatccagcagccgttgtgttcttcctgtgctggggctcttttcctcctcttcttcatcagaggatctttccacagtaagctctcttgtgtgtgaagtttccatgcctcccctggtaaagctgcacagaatctctccccacagccttgtctttcctgcagcagcgttctcctgtacagygctgyagtagtgaaaggctgcagtgctaagcctgctccctactggcaactgaaggccaaacacagctgtatgagagaggaggtgagggcagcaggggcgagcaaggcctgcactgtrcttgctcaattgccgtggcatgacttcaggctgctcctctgtcacaccacaggtgcaatcctgctattctgtctgggaagtgcttgcakcttccccatcccctgggaaggttccatcccactatggactggtggtcctggcccaacagtcacctcctgctgcagcatttcatccccagggcac

SEQ ID NO: 87244 - DNA, 600 bp, Chicken  19866894388798_3
ggaaagaaagcagtgtttcacacttcattctctggcccaactgtggtgctcccacataggacagaagtattggtgggacagacctggcatcctgtcatggtccacactgcccattgccatccagcagccgttgtgttcttcctgtgctggggctcttttcctcctcttcttcatcagaggatctttccacagtaagctctcttgtgtgtgaagtttccatgcctcccctggtaaagctgcacagaatctctccccacagccttgtctttcctgcagcagcgttctcctgtacagygctgyagtagtgaaaggctgcagtgctaagcctgctccctactggcaactgaaggccaaacacagctgtatgagagaggaggtgagggcagcaggggcgagcaaggcctgcactgtrcttgctcaattgccgtggcatgacttcaggctgctcctctgtcacaccacaggtgcaatcctgctattctgtctgggaagtgcttgcakcttccccatcccctgggaaggttccatcccactatggactggtggtcctggcccaacagtcacctcctgctgcagcatttcatccccagggcactgggt

SEQ ID NO: 87245 - DNA, 600 bp, Chicken  19866894388798_4
attgccatccagcagccgttgtgttcttcctgtgctggggctcttttcctcctcttcttcatcagaggatctttccacagtaagctctcttgtgtgtgaagtttccatgcctcccctggtaaagctgcacagaatctctccccacagccttgtctttcctgcagcagcgttctcctgtacagygctgyagtagtgaaaggctgcagtgctaagcctgctccctactggcaactgaaggccaaacacagctgtatgagagaggaggtgagggcagcaggggcgagcaaggcctgcactgtrcttgctcaattgccgtggcatgacttcaggctgctcctctgtcacaccacaggtgcaatcctgctattctgtctgggaagtgcttgcakcttccccatcccctgggaaggttccatcccactatggactggtggtcctggcccaacagtcacctcctgctgcagcatttcatccccagggcactgggtagagggcagtgwatgccacactgtawcatgtgtcacaggacatcacatttgacactaaagccagccctggtttgtctcctcaagctgctgcaatggcaaggcaccttgaaaa

SEQ ID NO: 87246 - DNA, 600 bp, Chicken  19866894388798_5
ttgtgtgtgaagtttccatgcctcccctggtaaagctgcacagaatctctccccacagccttgtctttcctgcagcagcgttctcctgtacagygctgyagtagtgaaaggctgcagtgctaagcctgctccctactggcaactgaaggccaaacacagctgtatgagagaggaggtgagggcagcaggggcgagcaaggcctgcactgtrcttgctcaattgccgtggcatgacttcaggctgctcctctgtcacaccacaggtgcaatcctgctattctgtctgggaagtgcttgcakcttccccatcccctgggaaggttccatcccactatggactggtggtcctggcccaacagtcacctcctgctgcagcatttcatccccagggcactgggtagagggcagtgwatgccacactgtawcatgtgtcacaggacatcacatttgacactaaagccagccctggtttgtctcctcaagctgctgcaatggcaaggcaccttgaaaaccatgcacccctgactctgccctgcacatgcatcagctgcagcatcagcctgctcctctgggaacaagatcctggcagcaaaaagtcac

SEQ ID NO: 87247 - DNA, 600 bp, Chicken  19866894388798_6
ctgcagtgctaagcctgctccctactggcaactgaaggccaaacacagctgtatgagagaggaggtgagggcagcaggggcgagcaaggcctgcactgtrcttgctcaattgccgtggcatgacttcaggctgctcctctgtcacaccacaggtgcaatcctgctattctgtctgggaagtgcttgcakcttccccatcccctgggaaggttccatcccactatggactggtggtcctggcccaacagtcacctcctgctgcagcatttcatccccagggcactgggtagagggcagtgwatgccacactgtawcatgtgtcacaggacatcacatttgacactaaagccagccctggtttgtctcctcaagctgctgcaatggcaaggcaccttgaaaaccatgcacccctgactctgccctgcacatgcatcagctgcagcatcagcctgctcctctgggaacaagatcctggcagcaaaaagtcactgctcagatgtgtcaaagcatattcgtctgtcaaggcatattcctctttcccccaaaagatggcactaggattcaccaaaagcgagccacttggcaccataaatattttaa

SEQ ID NO: 87248 - DNA, 600 bp, Chicken  19866894388798_7
ctgctccctactggcaactgaaggccaaacacagctgtatgagagaggaggtgagggcagcaggggcgagcaaggcctgcactgtrcttgctcaattgccgtggcatgacttcaggctgctcctctgtcacaccacaggtgcaatcctgctattctgtctgggaagtgcttgcakcttccccatcccctgggaaggttccatcccactatggactggtggtcctggcccaacagtcacctcctgctgcagcatttcatccccagggcactgggtagagggcagtgwatgccacactgtawcatgtgtcacaggacatcacatttgacactaaagccagccctggtttgtctcctcaagctgctgcaatggcaaggcaccttgaaaaccatgcacccctgactctgccctgcacatgcatcagctgcagcatcagcctgctcctctgggaacaagatcctggcagcaaaaagtcactgctcagatgtgtcaaagcatattcgtctgtcaaggcatattcctctttcccccaaaagatggcactaggattcaccaaaagcgagccacttggcaccataaatattttaatgtctgtgaaaaat

SEQ ID NO: 87249 - DNA, 600 bp, Chicken  19866894388799_1
agagtcaacaggagattacttattcagtaatgtgaataagctgtttattgggcttacttaaaatgaagtatcaaataatgacaacaacgtgatggtaatgttaacttctatttttatgttgaacttgggaagtaaaggaagagtaaggtttttcctctttaaattttcagctacgtaccatcagttacaatgttttttgagggtttttttggggtatgtgatacaaatgttgtttaagtggtagttagggaaagcagtccaaaccaagttctgctgttctcgtggtttaatacagtctcyttttttaacttccttcagcagcttgctgtatagggaagttattccaatggaggaggaaaaattcatagcattttaaaaaaccatgaaagacaaatgacacacagctgtgcgcttgtactgctgctgatgtttagtgatcatgaggacttcatcattcctgttcgtagtgaactgagataggccctcagactcygtggctgggtggtatcctgaccatccaygttagcactgttataaaggaaagaggttcctggagacattttcagtatctaaaaaggagctacaggaaagaaggagaca

SEQ ID NO: 87250 - DNA, 600 bp, Chicken  19866894388799_2
tttttgagggtttttttggggtatgtgatacaaatgttgtttaagtggtagttagggaaagcagtccaaaccaagttctgctgttctcgtggtttaatacagtctcyttttttaacttccttcagcagcttgctgtatagggaagttattccaatggaggaggaaaaattcatagcattttaaaaaaccatgaaagacaaatgacacacagctgtgcgcttgtactgctgctgatgtttagtgatcatgaggacttcatcattcctgttcgtagtgaactgagataggccctcagactcygtggctgggtggtatcctgaccatccaygttagcactgttataaaggaaagaggttcctggagacattttcagtatctaaaaaggagctacaggaaagaaggagacagactcttcagcagagtctgtggtgaaaggacaagaggaaatggtttcatgcagaaaaaggagagatttaagttagatgtaaggaaaaagtcttttacagtgagagtggtgaggcagtggaactggttacccagagaggtgctggatgctccctccatggatactgtcaaggctgggtaggaccaggcgctagg

SEQ ID NO: 87251 - DNA, 600 bp, Chicken  19866894388799_3
tacaaatgttgtttaagtggtagttagggaaagcagtccaaaccaagttctgctgttctcgtggtttaatacagtctcyttttttaacttccttcagcagcttgctgtatagggaagttattccaatggaggaggaaaaattcatagcattttaaaaaaccatgaaagacaaatgacacacagctgtgcgcttgtactgctgctgatgtttagtgatcatgaggacttcatcattcctgttcgtagtgaactgagataggccctcagactcygtggctgggtggtatcctgaccatccaygttagcactgttataaaggaaagaggttcctggagacattttcagtatctaaaaaggagctacaggaaagaaggagacagactcttcagcagagtctgtggtgaaaggacaagaggaaatggtttcatgcagaaaaaggagagatttaagttagatgtaaggaaaaagtcttttacagtgagagtggtgaggcagtggaactggttacccagagaggtgctggatgctccctccatggatactgtcaaggctgggtaggaccaggcgctaggcaccctgatctagctgttgtgtccctgt

SEQ ID NO: 87252 - DNA, 600 bp, Chicken  19866894388799_4
tgttataaaggaaagaggttcctggagacattttcagtatctaaaaaggagctacaggaaagaaggagacagactcttcagcagagtctgtggtgaaaggacaagaggaaatggtttcatgcagaaaaaggagagatttaagttagatgtaaggaaaaagtcttttacagtgagagtggtgaggcagtggaactggttacccagagaggtgctggatgctccctccatggatactgtcaaggctgggtaggaccaggcgctaggcaccctgatctagctgttgtgtccctgttcattgcrggggagttggactgggtggtctwtagaagtcccttccagctccaaggattctaggattctattctatgatttattctaaatcataaatgtgaatttagtgattcacagtgtttacagacaagaaaagcaaccatttgcctctacttccttgcctgtgttgtacgttcaatgatgttgttgtgctcattgacattgcacagtcttccagtatttctaagtcgttattttggcctctccctttggtatgaggagcacagctttgttcagaacttctgagttcaaaatagaattgaagtgttc

SEQ ID NO: 87253 - DNA, 600 bp, Chicken  19866894388799_5
ggagacattttcagtatctaaaaaggagctacaggaaagaaggagacagactcttcagcagagtctgtggtgaaaggacaagaggaaatggtttcatgcagaaaaaggagagatttaagttagatgtaaggaaaaagtcttttacagtgagagtggtgaggcagtggaactggttacccagagaggtgctggatgctccctccatggatactgtcaaggctgggtaggaccaggcgctaggcaccctgatctagctgttgtgtccctgttcattgcrggggagttggactgggtggtctwtagaagtcccttccagctccaaggattctaggattctattctatgatttattctaaatcataaatgtgaatttagtgattcacagtgtttacagacaagaaaagcaaccatttgcctctacttccttgcctgtgttgtacgttcaatgatgttgttgtgctcattgacattgcacagtcttccagtatttctaagtcgttattttggcctctccctttggtatgaggagcacagctttgttcagaacttctgagttcaaaatagaattgaagtgttcaaaatagaatttgttgtctatgg

SEQ ID NO: 87254 - DNA, 599 bp, Chicken  19866894388802_1
  misc_feature (1)..(7): n is any nucleotide
nnnnnnnatgtctgtttttattacttactctcttacttgaaggaaaaaacattagcaaagggaggtaagtagttatcctcatgaaaagaaagtatgccaaaataaacgctacaacttgagattacctttccttgtgagccagaagactgccagcactgctcactgccatcaataagacgtgaagcctgattcacagaggaagagacattcagattcttcactattcttgaccaatcatccagtaacattcccctctggctactgtgccgtctcttcagctgttttccagaacgcccacaraacactggagattgacctgcattrttaaatgaaagaaaattggttttattaaacccatagacagggtgaaaggaaatagaagaaatcaaagacctcagacacacagtctcaaggtagaaaatgtaagaatgccagcagagtttgaaattgattcctttttaaaacgagatgcaagtacttcacctgaatacacatttacatgcctgtcacctgtggtgtcgtatttttggttcttatgattgatttgtaaaccaagcatgattcagtaagtaaaataaataagtattacaaaattgtgg

SEQ ID NO: 87255 - DNA, 600 bp, Chicken  19866894388802_2
ttactctcttacttgaaggaaaaaacattagcaaagggaggtaagtagttatcctcatgaaaagaaagtatgccaaaataaacgctacaacttgagattacctttccttgtgagccagaagactgccagcactgctcactgccatcaataagacgtgaagcctgattcacagaggaagagacattcagattcttcactattcttgaccaatcatccagtaacattcccctctggctactgtgccgtctcttcagctgttttccagaacgcccacaraacactggagattgacctgcattrttaaatgaaagaaaattggttttattaaacccatagacagggtgaaaggaaatagaagaaatcaaagacctcagacacacagtctcaaggtagaaaatgtaagaatgccagcagagtttgaaattgattcctttttaaaacgagatgcaagtacttcacctgaatacacatttacatgcctgtcacctgtggtgtcgtatttttggttcttatgattgatttgtaaaccaagcatgattcagtaagtaaaataaataagtattacaaaattgtggaaaattactctaatatctttaggaa

SEQ ID NO: 87256 - DNA, 487 bp, Chicken  19866894388802_3
ggttttattaaacccatagacagggtgaaaggaaatagaagaaatcaaagacctcagacacacagtctcaaggtagaaaatgtaagaatgccagcagagtttgaaattgattcctttttaaaacgagatgcaagtacttcacctgaatacacatttacatgcctgtcacctgtggtgtcgtatttttggttcttatgattgatttgtaaaccaagcatgattcagtaagtaaaataaataagtattacaaaattgtggaaaattactctaatatctttaggaattaccaagagcaattastaaaatcatagagtaattcctaaaatattccttcaatttgaaatgtgaatcaaaatttatggccatgcatacatacagttcaaaaaacaggcccacaacgtatgaattctgtacaccagcagggaacatgaaaactacagagccaactctcaacagaaatcccttataggacaatagacatagctac

SEQ ID NO: 87257 - DNA, 600 bp, Chicken  19866894388804_1
aggacagatttcacaacccctaagttacattacattacaagcacctgattatccatttaactttaagattaaaatctaagaagggaaaattattctgtttttatggtatgcattctgcaaaatactaagtgtaagtcactacaaggaaaatctgaaaagaccagccctgctgtcaagcaatgaaaggtaatggttggactttatgtccttggactaaaccacaattctaatcgcacaaatacaactcactgtaagaatcttaccccagatacacatgtacaaatacaccaaaaacctggrttatgtgatcagtatcatctttgtgtatgttctgttataatcagggacaaaaatgacacaatgtctaaagaacaggcgaaataactatgaacaactatgagatctggattcaatagaggattcagttactttagagaatgcacctgccctgcsaactcacagcccaacggttaccttcrtacatcagcwttaggtattaattcataaatctaattcattcttgtgcwctgtaatgtacccttttatgtattaacttaaaattgaatgaaaaaagacatcaatggaagracatgaaagaaa

SEQ ID NO: 87258 - DNA, 600 bp, Chicken  19866894388804_2
gaaaagaccagccctgctgtcaagcaatgaaaggtaatggttggactttatgtccttggactaaaccacaattctaatcgcacaaatacaactcactgtaagaatcttaccccagatacacatgtacaaatacaccaaaaacctggrttatgtgatcagtatcatctttgtgtatgttctgttataatcagggacaaaaatgacacaatgtctaaagaacaggcgaaataactatgaacaactatgagatctggattcaatagaggattcagttactttagagaatgcacctgccctgcsaactcacagcccaacggttaccttcrtacatcagcwttaggtattaattcataaatctaattcattcttgtgcwctgtaatgtacccttttatgtattaacttaaaattgaatgaaaaaagacatcaatggaagracatgaaagaaacaatatttcttacacaacaaaagcaatgagaaagcactatggcatctaataaagacagaagaaacactgtcagactgtccactttctggaaagtgcaaatctatggaaataacaaaataacacacatatttagataataaaatatatatatat

SEQ ID NO: 87259 - DNA, 600 bp, Chicken  19866894388804_3
atgaaaggtaatggttggactttatgtccttggactaaaccacaattctaatcgcacaaatacaactcactgtaagaatcttaccccagatacacatgtacaaatacaccaaaaacctggrttatgtgatcagtatcatctttgtgtatgttctgttataatcagggacaaaaatgacacaatgtctaaagaacaggcgaaataactatgaacaactatgagatctggattcaatagaggattcagttactttagagaatgcacctgccctgcsaactcacagcccaacggttaccttcrtacatcagcwttaggtattaattcataaatctaattcattcttgtgcwctgtaatgtacccttttatgtattaacttaaaattgaatgaaaaaagacatcaatggaagracatgaaagaaacaatatttcttacacaacaaaagcaatgagaaagcactatggcatctaataaagacagaagaaacactgtcagactgtccactttctggaaagtgcaaatctatggaaataacaaaataacacacatatttagataataaaatatatatatattaatttattgataatcctaaatattc

SEQ ID NO: 87260 - DNA, 600 bp, Chicken  19866894388804_4
atggttggactttatgtccttggactaaaccacaattctaatcgcacaaatacaactcactgtaagaatcttaccccagatacacatgtacaaatacaccaaaaacctggrttatgtgatcagtatcatctttgtgtatgttctgttataatcagggacaaaaatgacacaatgtctaaagaacaggcgaaataactatgaacaactatgagatctggattcaatagaggattcagttactttagagaatgcacctgccctgcsaactcacagcccaacggttaccttcrtacatcagcwttaggtattaattcataaatctaattcattcttgtgcwctgtaatgtacccttttatgtattaacttaaaattgaatgaaaaaagacatcaatggaagracatgaaagaaacaatatttcttacacaacaaaagcaatgagaaagcactatggcatctaataaagacagaagaaacactgtcagactgtccactttctggaaagtgcaaatctatggaaataacaaaataacacacatatttagataataaaatatatatatattaatttattgataatcctaaatattctaaattgctc

SEQ ID NO: 87261 - DNA, 594 bp, Chicken  19866894388804_5
taatcgcacaaatacaactcactgtaagaatcttaccccagatacacatgtacaaatacaccaaaaacctggrttatgtgatcagtatcatctttgtgtatgttctgttataatcagggacaaaaatgacacaatgtctaaagaacaggcgaaataactatgaacaactatgagatctggattcaatagaggattcagttactttagagaatgcacctgccctgcsaactcacagcccaacggttaccttcrtacatcagcwttaggtattaattcataaatctaattcattcttgtgcwctgtaatgtacccttttatgtattaacttaaaattgaatgaaaaaagacatcaatggaagracatgaaagaaacaatatttcttacacaacaaaagcaatgagaaagcactatggcatctaataaagacagaagaaacactgtcagactgtccactttctggaaagtgcaaatctatggaaataacaaaataacacacatatttagataataaaatatatatatattaatttattgataatcctaaatattctaaattgctcagtttctatttcaatccaatcctagtcccatc

SEQ ID NO: 87262 - DNA, 533 bp, Chicken  19866894388804_6
caaaaacctggrttatgtgatcagtatcatctttgtgtatgttctgttataatcagggacaaaaatgacacaatgtctaaagaacaggcgaaataactatgaacaactatgagatctggattcaatagaggattcagttactttagagaatgcacctgccctgcsaactcacagcccaacggttaccttcrtacatcagcwttaggtattaattcataaatctaattcattcttgtgcwctgtaatgtacccttttatgtattaacttaaaattgaatgaaaaaagacatcaatggaagracatgaaagaaacaatatttcttacacaacaaaagcaatgagaaagcactatggcatctaataaagacagaagaaacactgtcagactgtccactttctggaaagtgcaaatctatggaaataacaaaataacacacatatttagataataaaatatatatatattaatttattgataatcctaaatattctaaattgctcagtttctatttcaatccaatcctagtcccatc

SEQ ID NO: 87263 - DNA, 599 bp, Chicken  19866894388805_1
  misc_feature (1)..(36): n is any nucleotide
nnnnnnnnnnnnnnnnnnnnnnnnnnnnnnnnnnnnagttgtatttgtgcgattagaattgtggtttagtccaaggacataaagtccacccattccctttcattgcttgacagcagggctggtcttttcagattttccttgtagtgacttacacttagtattttgcagaatgcataccataaaaacagaataattttcccttcttagattttaatcttaaagttaaatggataatcaggtgcttgtaatgtaatgtaacttaggggttgtgaaatctgtccttgaaacagggcttcaatkctgtatgttaattgcccttcttgggatctgttctaacttggcaaggtgtacctctttagtcactaagcaaaacwagcagtttagataaaccaatttaatgttattcaaaataatgatataccaaattcaagctattttttagccatattgaattaaattgtatcactggaattatagattatatataaatttctgttttttctttctctaatcagatgcagaatgaatgttacttggatatacattcatttttattcttagcgtaggaataatgataattatgagaacgttctcgtgaa

SEQ ID NO: 87264 - DNA, 600 bp, Chicken  19866894388805_2
ggacataaagtccacccattccctttcattgcttgacagcagggctggtcttttcagattttccttgtagtgacttacacttagtattttgcagaatgcataccataaaaacagaataattttcccttcttagattttaatcttaaagttaaatggataatcaggtgcttgtaatgtaatgtaacttaggggttgtgaaatctgtccttgaaacagggcttcaatkctgtatgttaattgcccttcttgggatctgttctaacttggcaaggtgtacctctttagtcactaagcaaaacwagcagtttagataaaccaatttaatgttattcaaaataatgatataccaaattcaagctattttttagccatattgaattaaattgtatcactggaattatagattatatataaatttctgttttttctttctctaatcagatgcagaatgaatgttacttggatatacattcatttttattcttagcgtaggaataatgataattatgagaacgttctcgtgaaaggtaataagaagcagactcactggcaactccattctggacactggccttaattgtttttctgaggtgtggacaa

SEQ ID NO: 87265 - DNA, 600 bp, Chicken  19866894388814_1
agtgtacagtatgtactgtgcattttttaaatttaacttggcttttactattactcagtaggagggacgcagatactgagagccctggatagcaaccataagaagcatgtttaaagatgcgtgttttcaggacaactatgagtatgagaaggaaaggattatagtctctctgatcttttctcatgtcgacttttacctgggagaattgatttcaggtaaaataatttgaaaaaaataacttccaaggttcatgctgcacagtattgcagcacatattaaaataataataataataataawaaaacatttgtgtcactctatacttgagtgaagaaacaatgagcggttcacttttcacagtggaaatactgatcatataaagagttataaataaacacaaagtcaggcctctgtatgggaaagcccccattctctttgttgatttcagtcaggaagtgtgcagctagcacagtctctcattctgctaaagagctctagaagaaatagcagtattcctggcagctcatattcatcatgagtttaacaatgctttgaatgtacacatatacatttctctgtgtgtatgtgctcttatgtgga

SEQ ID NO: 87266 - DNA, 600 bp, Chicken  19866894388815_1
aggtggtatcagagtgcctatgcctactttaattacttcccttacttcaaacaatagcaaaaaatggctattgtgtattgaaaaacattagcgctgaccaaaagtgggtgttgttatttcagcaatctgggataatgttccatctttgcaattcagccagtttactcaggataatatataacagcccgagtctctcttaagtgatggaaaaagatttcaacttttgcttagaagctttaaaaaaatgttaatattatcaataggacattttcattgcattcagttgagctgatcacatartaactgttcatttgggttttgtgtcttacttgcattacccctattgtgtatatatatttgtgtctcttttcttgcttatgaagccatagtagggtcttttaccacatatttaattatgtcactaagacttaggatttttcagaacttcacgtttggatggcaacaggcacggcattacatattgtgctttgaatgccttagcgcttcattgtacacatctctatctatctttgcactgttgaagacgagtctggtagctcttcctctttattgaacatcccttagctcagtcagtgaatt

SEQ ID NO: 87267 - DNA, 600 bp, Chicken  19866894388827_1
agcagcaaagcgacaaagaaaaggacagtgtgtttctggtttgcatttttagcctctcatatggaggatttctacaatttctggagggaagaaaatgcatcattcagagaaaaaccttcctggactgcccagcaagaaggggaagtgaatttgtaaacatttctggtgcagaatgataatacctcttaaaataagtgttctgaagcactcacgtgggtcagacacccacagctatgacagcacatgcagtgtacttacattgggcaaagaactggcttggaggtcccgctggggcagaaygctccagcagggcaggcagtgcagtcttccactctgctgttccccagcctggtgccatacgttcctgcagggcaggggtgctgtgtgcctctccacgtaccttcccaacaagagagccaagaatcaccttaattcttattaaagctttgaaaagagaaagcaaaataaagcccttgggttctctgttgctgctaagtacttamrtgagttatatgtaattgtatacttacatatatgcaagcatatgtgtgtgtatatatatatgtctatatatatacacacacacatatatactgaagt

SEQ ID NO: 87268 - DNA, 561 bp, Chicken  19866894388827_2
agcactcacgtgggtcagacacccacagctatgacagcacatgcagtgtacttacattgggcaaagaactggcttggaggtcccgctggggcagaaygctccagcagggcaggcagtgcagtcttccactctgctgttccccagcctggtgccatacgttcctgcagggcaggggtgctgtgtgcctctccacgtaccttcccaacaagagagccaagaatcaccttaattcttattaaagctttgaaaagagaaagcaaaataaagcccttgggttctctgttgctgctaagtacttamrtgagttatatgtaattgtatacttacatatatgcaagcatatgtgtgtgtatatatatatgtctatatatatacacacacacatatatactgaagtatacacatacatatatttgtgtatatatacacatacaaacacacatatgtatgtgtatatatcactgaccacaaaccaggaaatatgatgttcaatctttgcaggaaggatttgggattgtattcataccagtcactttattgggcaaatgcccagaattaaaa

SEQ ID NO: 87269 - DNA, 560 bp, Chicken  19866894388827_3
gcactcacgtgggtcagacacccacagctatgacagcacatgcagtgtacttacattgggcaaagaactggcttggaggtcccgctggggcagaaygctccagcagggcaggcagtgcagtcttccactctgctgttccccagcctggtgccatacgttcctgcagggcaggggtgctgtgtgcctctccacgtaccttcccaacaagagagccaagaatcaccttaattcttattaaagctttgaaaagagaaagcaaaataaagcccttgggttctctgttgctgctaagtacttamrtgagttatatgtaattgtatacttacatatatgcaagcatatgtgtgtgtatatatatatgtctatatatatacacacacacatatatactgaagtatacacatacatatatttgtgtatatatacacatacaaacacacatatgtatgtgtatatatcactgaccacaaaccaggaaatatgatgttcaatctttgcaggaaggatttgggattgtattcataccagtcactttattgggcaaatgcccagaattaaaa

SEQ ID NO: 87270 - DNA, 599 bp, Chicken  19866894388840_1
  misc_feature (1)..(77): n is any nucleotide
nnnnnnnnnnnnnnnnnnnnnnnnnnnnnnnnnnnnnnnnnnnnnnnnnnnnnnnnnnnnnnnnnnnnnnnnnnnnnctcctattacattttctctcgaaaagagcggtgccctgggagtgacagggatccagtgctgaggaagtgagggagtggagggagggagctgcccgagggctgtggggaagttctgcaagctgtggctgtcgagcggtcgtctggaagagttatggccgaatcagtgggataataggttctcctgagcctgaaacgcttctctatgcaggataagaggtgatayggggcagctggtttactttcaaccaattctgtattcaaatgaagtcatgctgcacgtgtcagataaaagatgatttatcttgcgtgtctctatcactgtctgataaaatgcagtttgagaggctggggaagaaatctgcattttggacrtactgagacaaattcatcaatgggaaaaatgtttaattgcagtaagctaaatagtgttcctcctttattgtggttgaaattatcctccccaccagactgctgtttctgtttgctaatagcatggagctacttgcaaaatgtgataaatac

SEQ ID NO: 87271 - DNA, 600 bp, Chicken  19866894388840_2
gagtggagggagggagctgcccgagggctgtggggaagttctgcaagctgtggctgtcgagcggtcgtctggaagagttatggccgaatcagtgggataataggttctcctgagcctgaaacgcttctctatgcaggataagaggtgatayggggcagctggtttactttcaaccaattctgtattcaaatgaagtcatgctgcacgtgtcagataaaagatgatttatcttgcgtgtctctatcactgtctgataaaatgcagtttgagaggctggggaagaaatctgcattttggacrtactgagacaaattcatcaatgggaaaaatgtttaattgcagtaagctaaatagtgttcctcctttattgtggttgaaattatcctccccaccagactgctgtttctgtttgctaatagcatggagctacttgcaaaatgtgataaatactgcatattacttacaaatttcaaaccatttctctaactgtggaaatgtctttgcaatatacatctgaatagcaaaatgcctgcaggtagctaagcaggtaggtagatggacacctgctcagtgtgcattagatgcttgtgccagcgttgc

SEQ ID NO: 87272 - DNA, 600 bp, Chicken  19866894388851_1
gccatgatatctttcaaatacttagatttattgttgagcttatcatggctctgtggattcacaatgcacaagaaaatctgtgcatgaaatcctcatgcatttgatgggaaaaggctgactgagcaaacataatctgttttccatctctctgtcaaataaaactattccagatattactagcccttgtacttttaggcatagaaaagctgttactgacagagtgtctttttggacagacgtaatttaggagaaaattctatactagttgacaatgatggacaagagatatctgaaggtgarcaagatttgagatgttgcagtgactcttaaatgagcaaagaaatctgacaggataaaaagtttacgatgtggctgtatgtatagagagctactagcaaataatagttttctcagcctttcctatggtgcycagagtgagtaatcttctatraacccagaggatgtaagcatgggtgaggatacatatcattagtttagcaaagtcctaaatccaaacttaaataaatgcaggagatctgaatgccaaagcaatacagaaagagtgtataagtcatatatattaattgcagtacgttatgt

SEQ ID NO: 87273 - DNA, 600 bp, Chicken  19866894388851_2
aatctgttttccatctctctgtcaaataaaactattccagatattactagcccttgtacttttaggcatagaaaagctgttactgacagagtgtctttttggacagacgtaatttaggagaaaattctatactagttgacaatgatggacaagagatatctgaaggtgarcaagatttgagatgttgcagtgactcttaaatgagcaaagaaatctgacaggataaaaagtttacgatgtggctgtatgtatagagagctactagcaaataatagttttctcagcctttcctatggtgcycagagtgagtaatcttctatraacccagaggatgtaagcatgggtgaggatacatatcattagtttagcaaagtcctaaatccaaacttaaataaatgcaggagatctgaatgccaaagcaatacagaaagagtgtataagtcatatatattaattgcagtacgttatgtctcataaagctggaagagtcttaatttctagaccatcagactgaaggcaggacagaaattcattagaaattatccccatggatccccatcagaaagaatccccatgaatttttgaccaagttaattactg

SEQ ID NO: 87274 - DNA, 600 bp, Chicken  19866894388851_3
tcaaataaaactattccagatattactagcccttgtacttttaggcatagaaaagctgttactgacagagtgtctttttggacagacgtaatttaggagaaaattctatactagttgacaatgatggacaagagatatctgaaggtgarcaagatttgagatgttgcagtgactcttaaatgagcaaagaaatctgacaggataaaaagtttacgatgtggctgtatgtatagagagctactagcaaataatagttttctcagcctttcctatggtgcycagagtgagtaatcttctatraacccagaggatgtaagcatgggtgaggatacatatcattagtttagcaaagtcctaaatccaaacttaaataaatgcaggagatctgaatgccaaagcaatacagaaagagtgtataagtcatatatattaattgcagtacgttatgtctcataaagctggaagagtcttaatttctagaccatcagactgaaggcaggacagaaattcattagaaattatccccatggatccccatcagaaagaatccccatgaatttttgaccaagttaattactggttgctcacagaagacataac

SEQ ID NO: 87275 - DNA, 600 bp, Chicken  19866894388852_1
caaagcactcggtgggagcgatgagatgctcctgcagacattgcagtcagtgggtgaacctctgaagtggcagaagcagaagaaagaggagtggcttagcagtgagcaagggatggagccttcttccacctggcgtccaaacttctgggggaaagatctggagaaagaactaacacagtactggacagcccagattccccactttatccccactggtgacacagatgagactgcactaaaacagcatctgagtcagctggaaacaacattcctccccaagctggagcacagaagtggttycttcaaggaggcaggactgctcatcccctacgcccggtgctgccatgcctctttgtcttctcacttttccgcccttactgacagtgagcactgcaccttcagccaagggcttttagtttatgagtggtgcctaaaagcatacagaaggtatgtctggaggacattctgcggactgctgttgtctgcttggccctctcactgcttatctggcttgcagtttgacaaactgtttccstatttccttcattagttttcaggccgtggaaaaaaatatagcagctaattgaattcctatccaag

SEQ ID NO: 87276 - DNA, 600 bp, Chicken  19866894388852_2
ctaaaacagcatctgagtcagctggaaacaacattcctccccaagctggagcacagaagtggttycttcaaggaggcaggactgctcatcccctacgcccggtgctgccatgcctctttgtcttctcacttttccgcccttactgacagtgagcactgcaccttcagccaagggcttttagtttatgagtggtgcctaaaagcatacagaaggtatgtctggaggacattctgcggactgctgttgtctgcttggccctctcactgcttatctggcttgcagtttgacaaactgtttccstatttccttcattagttttcaggccgtggaaaaaaatatagcagctaattgaattcctatccaagtttgggaaaacaggtgttgcttgccccatgatctgaagagcagcatacctggacccagtgtgaactcaaagccttgccctgagaatgctttgtagctgtcattgaagcctgaacctactttgctttcttgtgatttctttgtgtatggtgatggtagatgagatgtttgactctctgtattcatgtttactttgctacttaatagcattagtctggagtcataatcacagaatgg

SEQ ID NO: 87277 - DNA, 468 bp, Chicken  19866894388852_3
agagcagcatacctggacccagtgtgaactcaaagccttgccctgagaatgctttgtagctgtcattgaagcctgaacctactttgctttcttgtgatttctttgtgtatggtgatggtagatgagatgtttgactctctgtattcatgtttactttgctacttaatagcattagtctggagtcataatcacagaatggattgggttggaagggagcttaaagcccacccagtcccaaccccctgccatgggctggctgccccccaccagctcaggctgcccagggccccatccaacccygctttgggcacctccaggaatggggcatccacagaatctacttatgtcctgctcgttttcagaccttttggcttatttggttgcttccatgcaagcctagagcttctctgttctttgcataattgcactcataatggtcagctgattatcagttcctcagctgggttc

SEQ ID NO: 87278 - DNA, 599 bp, Chicken  19866894388853_1
  misc_feature (1)..(126): n is any nucleotide
nnnnnnnnnnnnnnnnnnnnnnnnnnnnnnnnnnnnnnnnnnnnnnnnnnnnnnnnnnnnnnnnnnnnnnnnnnnnnnnnnnnnnnnnnnnnnnnnnnnnnnnnnnnnnnnnnnnnnnnnnnnnnntgctggagttggatgtctgtgaactggctaatactgctgagattgcgttaatttaattgaatgcagtgtatgattactgtttttaggtcacctagagcctcaggtggacagccttgttatttaatttctttaaaatagaaaggtattcttggagagggagttcagttttgcttytgtagacaaatttggtcttgggtaacacctacaaattacayttgcagcattttctttttattttacagcactctttatatgtatggctacttttcaaaatagattacttgaattctcaagcacacgtaattcatgtgttccrtgttagccagaagatatcaatatgaaaagtgttgtgttagatctcagagttaccttcctatttgccagtgacttatcagacaactaaacattgctgtttgccatgaacgcttctcttgggggtaatgttatcaatcatctggattctttcacagtta

SEQ ID NO: 87279 - DNA, 599 bp, Chicken  19866894388853_2
  misc_feature (1)..(85): n is any nucleotide
nnnnnnnnnnnnnnnnnnnnnnnnnnnnnnnnnnnnnnnnnnnnnnnnnnnnnnnnnnnnnnnnnnnnnnnnnnnnnnnnnnnnntgctggagttggatgtctgtgaactggctaatactgctgagattgcgttaatttaattgaatgcagtgtatgattactgtttttaggtcacctagagcctcaggtggacagccttgttatttaatttctttaaaatagaaaggtattcttggagagggagttcagttttgcttytgtagacaaatttggtcttgggtaacacctacaaattacayttgcagcattttctttttattttacagcactctttatatgtatggctacttttcaaaatagattacttgaattctcaagcacacgtaattcatgtgttccrtgttagccagaagatatcaatatgaaaagtgttgtgttagatctcagagttaccttcctatttgccagtgacttatcagacaactaaacattgctgtttgccatgaacgcttctcttgggggtaatgttatcaatcatctggattctttcacagttaggatggaggctgaactggaattgaactcctttagtttttag

SEQ ID NO: 87280 - DNA, 600 bp, Chicken  19866894388853_3
ctgtgaactggctaatactgctgagattgcgttaatttaattgaatgcagtgtatgattactgtttttaggtcacctagagcctcaggtggacagccttgttatttaatttctttaaaatagaaaggtattcttggagagggagttcagttttgcttytgtagacaaatttggtcttgggtaacacctacaaattacayttgcagcattttctttttattttacagcactctttatatgtatggctacttttcaaaatagattacttgaattctcaagcacacgtaattcatgtgttccrtgttagccagaagatatcaatatgaaaagtgttgtgttagatctcagagttaccttcctatttgccagtgacttatcagacaactaaacattgctgtttgccatgaacgcttctcttgggggtaatgttatcaatcatctggattctttcacagttaggatggaggctgaactggaattgaactcctttagtttttagtgtgaactttacttattcctaaactgataggatttcaaatttggacagattgccaacttgttgtgtccaaaaccatttattttcaataatgtgctgaaatta

SEQ ID NO: 87281 - DNA, 492 bp, Chicken  19866894388869_1
tccaaaatgtattgtttctggtttttaaataaaccctgcagaaaatcaaccacagtgtcttttccaacatgaaaagtgtgcatttgttccagatccacttaacttaaaacccacagcaatcacagcatcccagctgcttttcatagacagcaccaattgtatggcatggcctctaaagagacgacactcctttctgcacatcttcatcaaccaacacatcagcatagaagcaaacaaccaaaagaggaattcaagacaacagtgaatcagacctgggcagtcctcagagttcctcggaawgcgtaatgccccattgctcagcaatgcagatgtaagttcactagatacaagttctttttacttttttttttttttggtgtgcaaagatttcaaatgtagcagtacaattaactttattacaggaacataaacaggtacagtattacaatacttcaatccacagtcatatgttaggttagacagcaccagcaa

SEQ ID NO: 87282 - DNA, 600 bp, Chicken  19866894388883_1
acactagagatagtgtattaatattttcaccatacattttctacaatatatacagacttacacaaggtagcaatggcaaacagaatgcacagattaacttaatcaactcaaaacccaactgtagaaatgcaaggtcttgggaaagggccgctgtgtccttgcacgcgcgctcgaagctttgcaaagggctgcagggagctttgctgacacctcccattggctccaatggtcactgtgagggtaaggccaaaaaataacccagccacccaaaccccatccccccatgctacgaatcacacrctccgcaactgtctgcaaatacaccccatcatagctccgtgtcctttaaatataagtaagtaagttgtgctaacaacactgaagtagaatggctaaaaaattagctatgtggaatacaagtgggtttttaacatggtttctgtgctgtgtcctttaggtgccctctgtatgacaaggggaactgggtggctcctttacagccctcccgcgcttgggttttgctccagctcgcctcaacacaagcaatgaacaccatgctgaaccctcaaccctgacagcagcacagcaaaaacctcacac

SEQ ID NO: 87283 - DNA, 600 bp, Chicken  19866894388885_1
agcaactttgtggaagcccagttagaacacaggccttcaaaggtgtgtgctaattctcttatctgatgcttagccagtagatggggctagtaaggtcacatgaatgaaggagagaaagagtgtaatttgaaaaacaaatgaaggactctaagtagcaagtgaaagaagtttacttcacagcttagaagagatttggatgcgtttaaaaatacaacaatctattgtattttttaaaaccaacgtgcatgtggtggagagtgaactaaaggtattgaacgtatttcttttgtaaggtgcttstctttctaattgtatttcttggaatagatctctcccaaacaattagtctcatttatgtcagtgtcatactttaaaagtaaaatctcctacgaaaaaaaagaaataaagaaagaaaaactaaagttatcgtgattgaacactcaatactaaatcagtataatttctgtgttttgaattgccatgagaatagctgagttcccatcaagttaagtcttgcatagatagcagtcgtgcctctcatttcctaatggtgctgccatcattcccttccctcttgactattgttcaggtataattaga

SEQ ID NO: 87284 - DNA, 573 bp, Chicken  19866894388888_1
tactccagcaatataatttgggtaaggtctggagcaattcaagaaaacttgaggtccttaacagcattctttgggatttgtgcctgagccaaatgtgcagttgaatgacctgtctcctgtgcccttaataaataaattgctcactggctgtgttgcttacaaaccgacagccttcaggcaatgctcacttgtcctttgtttgaaaggcaggtttgtgggagctggagaaaagggccaaaatctccattttaagtaactgaagtggcagctatctttgttatttttatttactgaaaaatwatattgtcacgccttagctttttattcagaattcttctatgaatttttaacacacgaatcaattcataagctttacaatgcatataatttacaaacagaagctaggcattcaatggaatatctgcaggcacattctaattatacctgaacaawagtcaagagggaagggaatgatggcagcaccattaggaaatgagaggcacgactgctatctatgcaagacttaacttgatggggaactcagctattctcatggcaattcaaaacacagaa

SEQ ID NO: 87285 - DNA, 420 bp, Chicken  19866894388888_2
tgcttacaaaccgacagccttcaggcaatgctcacttgtcctttgtttgaaaggcaggtttgtgggagctggagaaaagggccaaaatctccattttaagtaactgaagtggcagctatctttgttatttttatttactgaaaaatwatattgtcacgccttagctttttattcagaattcttctatgaatttttaacacacgaatcaattcataagctttacaatgcatataatttacaaacagaagctaggcattcaatggaatatctgcaggcacattctaattatacctgaacaawagtcaagagggaagggaatgatggcagcaccattaggaaatgagaggcacgactgctatctatgcaagacttaacttgatggggaactcagctattctcatggcaattcaaaacacagaa

SEQ ID NO: 87286 - DNA, 600 bp, Chicken  19866894388900_1
aaagcattacacaccttttctagctttcatttactttcctctcagagaaacacaatcagcttgcttagtttcctaatgagtataatagacaatcatgtaaagtagactattgcttggtaaaaatgcagcgtagaactgcaggcagtctattagatgtaaacttgcttaattctttaattatgtgtctttgatcaaaagcagctcacttggaaagagtttttaaaaagcgaagtaacaagtactcacctttcatgtacagcactgactgttaggccaacctgatataactgtggaatcacygattgtacgtcaagaacaccactaaaaattgagataataaatgytacttacagctattaaagcttttcttttttggagacacaggccagtaagagctgttctgcactttcagcttttctttccatctctgtcaagaatctcagtgaatttttaaaggagataattgaggccatttatcattttttctctgctttgtcctcaacttctttcctttcctcattaacctcaaaaatctgtattgaaaatcttcttcctattacttccagcaccttatactgttctttggacttcgtcttttga

SEQ ID NO: 87287 - DNA, 600 bp, Chicken  19866894388900_2
gagaaacacaatcagcttgcttagtttcctaatgagtataatagacaatcatgtaaagtagactattgcttggtaaaaatgcagcgtagaactgcaggcagtctattagatgtaaacttgcttaattctttaattatgtgtctttgatcaaaagcagctcacttggaaagagtttttaaaaagcgaagtaacaagtactcacctttcatgtacagcactgactgttaggccaacctgatataactgtggaatcacygattgtacgtcaagaacaccactaaaaattgagataataaatgytacttacagctattaaagcttttcttttttggagacacaggccagtaagagctgttctgcactttcagcttttctttccatctctgtcaagaatctcagtgaatttttaaaggagataattgaggccatttatcattttttctctgctttgtcctcaacttctttcctttcctcattaacctcaaaaatctgtattgaaaatcttcttcctattacttccagcaccttatactgttctttggacttcgtcttttgacaacccttaatctagacacaatctcttccagcctctcctaccca

SEQ ID NO: 87288 - DNA, 599 bp, Chicken  19866894388921_1
  misc_feature (1)..(44): n is any nucleotide
nnnnnnnnnnnnnnnnnnnnnnnnnnnnnnnnnnnnnnnnnnnnagtgactgaactgttgaacttgtaacacaggaacaggaacatgattatcatttgtagtttggttttcataaagaacctagtaaaagcgatatttaccccattgcctattgtcgccaactaacatgcttgtgctcaacattgaagggactctttccattcacacagctcacacattaagttttttctcttgcacaagtgaagtactcttgacaggtagtaatgttctcagtaataatgctgttgtttaagttttctrttgctgttccagtgggctctcttagaggtaccatcagtgtctgactttgggttcacaccctctgaggtcatggcacataataaccacatttagaataatttgtcctaggcataatttgagtgttctgcaataacaaagagtccttgccaaaagctattatcctaaggaaatatacaaatgcaaaaccaaacaagcaattgcaggaagagtttattttcagaagggttctctggcccagttatatgccattagtatcagtgaatgagtacacaggagaataagtgagggaaatagcataa

SEQ ID NO: 87289 - DNA, 600 bp, Chicken  19866894388921_2
tcttagaggtaccatcagtgtctgactttgggttcacaccctctgaggtcatggcacataataaccacatttagaataatttgtcctaggcataatttgagtgttctgcaataacaaagagtccttgccaaaagctattatcctaaggaaatatacaaatgcaaaaccaaacaagcaattgcaggaagagtttattttcagaagggttctctggcccagttatatgccattagtatcagtgaatgagtacacaggagaataagtgagggaaatagcataacatgggaacatgcaacaaawctaaagggcattccagagaactgatcatgctggctcacctcacctggctatgatgaaagctacagcgcaaatcytgacctttatgtcaartagcctyggtgctaatgcctttgtgaatgatgtgaaagatgcaaattcatcttctaatttgaggaagaggtttgagtctagacatttcatctttagctcgctgtcttgattctgaaagtacagcatattccaatacttttcttcaaataccaatttttgaaactgcacataaaatatttaaaaactcaacagagcacgagctgaaaccca

SEQ ID NO: 87290 - DNA, 579 bp, Chicken  19866894388921_3
aataatttgtcctaggcataatttgagtgttctgcaataacaaagagtccttgccaaaagctattatcctaaggaaatatacaaatgcaaaaccaaacaagcaattgcaggaagagtttattttcagaagggttctctggcccagttatatgccattagtatcagtgaatgagtacacaggagaataagtgagggaaatagcataacatgggaacatgcaacaaawctaaagggcattccagagaactgatcatgctggctcacctcacctggctatgatgaaagctacagcgcaaatcytgacctttatgtcaartagcctyggtgctaatgcctttgtgaatgatgtgaaagatgcaaattcatcttctaatttgaggaagaggtttgagtctagacatttcatctttagctcgctgtcttgattctgaaagtacagcatattccaatacttttcttcaaataccaatttttgaaactgcacataaaatatttaaaaactcaacagagcacgagctgaaacccagttcctctggggactgctgtagccattaggatatcatgtatttttcatttact

SEQ ID NO: 87291 - DNA, 563 bp, Chicken  19866894388921_4
cataatttgagtgttctgcaataacaaagagtccttgccaaaagctattatcctaaggaaatatacaaatgcaaaaccaaacaagcaattgcaggaagagtttattttcagaagggttctctggcccagttatatgccattagtatcagtgaatgagtacacaggagaataagtgagggaaatagcataacatgggaacatgcaacaaawctaaagggcattccagagaactgatcatgctggctcacctcacctggctatgatgaaagctacagcgcaaatcytgacctttatgtcaartagcctyggtgctaatgcctttgtgaatgatgtgaaagatgcaaattcatcttctaatttgaggaagaggtttgagtctagacatttcatctttagctcgctgtcttgattctgaaagtacagcatattccaatacttttcttcaaataccaatttttgaaactgcacataaaatatttaaaaactcaacagagcacgagctgaaacccagttcctctggggactgctgtagccattaggatatcatgtatttttcatttact

SEQ ID NO: 87292 - DNA, 556 bp, Chicken  19866894388921_5
tgagtgttctgcaataacaaagagtccttgccaaaagctattatcctaaggaaatatacaaatgcaaaaccaaacaagcaattgcaggaagagtttattttcagaagggttctctggcccagttatatgccattagtatcagtgaatgagtacacaggagaataagtgagggaaatagcataacatgggaacatgcaacaaawctaaagggcattccagagaactgatcatgctggctcacctcacctggctatgatgaaagctacagcgcaaatcytgacctttatgtcaartagcctyggtgctaatgcctttgtgaatgatgtgaaagatgcaaattcatcttctaatttgaggaagaggtttgagtctagacatttcatctttagctcgctgtcttgattctgaaagtacagcatattccaatacttttcttcaaataccaatttttgaaactgcacataaaatatttaaaaactcaacagagcacgagctgaaacccagttcctctggggactgctgtagccattaggatatcatgtatttttcatttact

SEQ ID NO: 87293 - DNA, 599 bp, Chicken  19866894388928_1
  misc_feature (1)..(35): n is any nucleotide
nnnnnnnnnnnnnnnnnnnnnnnnnnnnnnnnnnnaaggtaaattgcaatatcagttgggaaaaaactaagccttattaaagcttcattgaaaagttatgctgcatgactgctgcatgactcactccttaaatcactgggttttattatgctgtgcgtggtgagaaaccaacaagcagttccaatttgtattattttaaagcaaatggttcagactatttgtataataatgctgcaggtttcttcatttgaaaatccttagtttctcagtgaagagaggggacattcagacactggctgraaagaygtcrctgagtaaatgatgtttcatttttatgaaattgtgagtcttcttcrtgtgaaatacagaatacaaacctagttttctaggagcctgttattctcaggtggtaagatgatataccaggaaaattatatgttcaatcatcagataaagaggaaacagaacaagtgagatgaaccatatggcctcgtactctgaaattttgatagaattgaataatgtaatgaatgacttactacagaaatttccatttttcggcgatgtcaaagctaccctaatggaactgtggagagttt

SEQ ID NO: 87294 - DNA, 599 bp, Chicken  19866894388928_2
  misc_feature (1)..(29): n is any nucleotide
nnnnnnnnnnnnnnnnnnnnnnnnnnnnnaaggtaaattgcaatatcagttgggaaaaaactaagccttattaaagcttcattgaaaagttatgctgcatgactgctgcatgactcactccttaaatcactgggttttattatgctgtgcgtggtgagaaaccaacaagcagttccaatttgtattattttaaagcaaatggttcagactatttgtataataatgctgcaggtttcttcatttgaaaatccttagtttctcagtgaagagaggggacattcagacactggctgraaagaygtcrctgagtaaatgatgtttcatttttatgaaattgtgagtcttcttcrtgtgaaatacagaatacaaacctagttttctaggagcctgttattctcaggtggtaagatgatataccaggaaaattatatgttcaatcatcagataaagaggaaacagaacaagtgagatgaaccatatggcctcgtactctgaaattttgatagaattgaataatgtaatgaatgacttactacagaaatttccatttttcggcgatgtcaaagctaccctaatggaactgtggagagttttaaata

SEQ ID NO: 87295 - DNA, 599 bp, Chicken  19866894388928_3
  misc_feature (1)..(25): n is any nucleotide
nnnnnnnnnnnnnnnnnnnnnnnnnaaggtaaattgcaatatcagttgggaaaaaactaagccttattaaagcttcattgaaaagttatgctgcatgactgctgcatgactcactccttaaatcactgggttttattatgctgtgcgtggtgagaaaccaacaagcagttccaatttgtattattttaaagcaaatggttcagactatttgtataataatgctgcaggtttcttcatttgaaaatccttagtttctcagtgaagagaggggacattcagacactggctgraaagaygtcrctgagtaaatgatgtttcatttttatgaaattgtgagtcttcttcrtgtgaaatacagaatacaaacctagttttctaggagcctgttattctcaggtggtaagatgatataccaggaaaattatatgttcaatcatcagataaagaggaaacagaacaagtgagatgaaccatatggcctcgtactctgaaattttgatagaattgaataatgtaatgaatgacttactacagaaatttccatttttcggcgatgtcaaagctaccctaatggaactgtggagagttttaaatataca

SEQ ID NO: 87296 - DNA, 600 bp, Chicken  19866894388928_4
tgggaaaaaactaagccttattaaagcttcattgaaaagttatgctgcatgactgctgcatgactcactccttaaatcactgggttttattatgctgtgcgtggtgagaaaccaacaagcagttccaatttgtattattttaaagcaaatggttcagactatttgtataataatgctgcaggtttcttcatttgaaaatccttagtttctcagtgaagagaggggacattcagacactggctgraaagaygtcrctgagtaaatgatgtttcatttttatgaaattgtgagtcttcttcrtgtgaaatacagaatacaaacctagttttctaggagcctgttattctcaggtggtaagatgatataccaggaaaattatatgttcaatcatcagataaagaggaaacagaacaagtgagatgaaccatatggcctcgtactctgaaattttgatagaattgaataatgtaatgaatgacttactacagaaatttccatttttcggcgatgtcaaagctaccctaatggaactgtggagagttttaaatatacatctatcttccaaaaatgaaaataagaacattatttaccagcatctat

SEQ ID NO: 87297 - DNA, 600 bp, Chicken  19866894388930_1
gccaaatcaggcctctgaaccgtgtcatttatcagaaatgacagaacatgaagtaaccacatgaagtaccacatcagcctgagctcggattagtgtttactgtcttccagtcacactttctaaggataaacacaaggccaaatggagcaggaaggtaacactgcacacaagcagtcaggagagcatgcttcaaaatattaagaccacgactatcagaatttagtctgggccttgcaaactgttcaaggaagcaagatgagtgaaggactaaagctctggagagatgcagaatagggtgcragaaagtacttatgaaaggaagataaacagcaaggaggaatatttcaaagccaacttgagcacgcatctgcaatgtgctctagaaaacatctcacagcactgacattacatttgcccatctgtcctgtgacagatgcccagtatccaggaattggtgtttccttgtctatgttattaataagaagtttagcagttatatttgcccagaattctagcagttaaaaagaaaatcaaaaacatttcacgatccttttcccatagattctcctatggaaattggaaattcaatctcagaaagtg

SEQ ID NO: 87298 - DNA, 600 bp, Chicken  19866894388934_1
ttaaggaaaagattttttgtctcaaatgggaaggcaaaatgcagttggtaagtacggtttctgttaggagtaagcttgtgtgagtaaggtgtaatgatgtgaacttaagatggaaatgatgccccgatcttattacaacatgatcttttttcatttttcattctgaagtaatctcagataaaacagacctgatggcagattatgttttctatgtaattgttgtcaatttgtctaaactcttgaaaaattacccacagtgaagtattttttctactattaatctatggccatagatcaaascctaccattaaaacattgtttattacaattaaatgcactggcctaaaattacaatgtggaagcccaataataataataggtaggagaaggaatgaaagtgactgtatagggtttgcagtttgcaaaactaaagcgtgcyrcttaactattgcagaaaatacaaaactaaatttaatttttaaaactccagtwtaaaaaatgaaagattacattctgggatattgaactcaatttacaacagatacatattttgacatcaagtttgcagcaagaatatatatttggaagtgtaatacattc

SEQ ID NO: 87299 - DNA, 600 bp, Chicken  19866894388934_2
atgatcttttttcatttttcattctgaagtaatctcagataaaacagacctgatggcagattatgttttctatgtaattgttgtcaatttgtctaaactcttgaaaaattacccacagtgaagtattttttctactattaatctatggccatagatcaaascctaccattaaaacattgtttattacaattaaatgcactggcctaaaattacaatgtggaagcccaataataataataggtaggagaaggaatgaaagtgactgtatagggtttgcagtttgcaaaactaaagcgtgcyrcttaactattgcagaaaatacaaaactaaatttaatttttaaaactccagtwtaaaaaatgaaagattacattctgggatattgaactcaatttacaacagatacatattttgacatcaagtttgcagcaagaatatatatttggaagtgtaatacattcagtctctgcaccacaggcgggtgaatgttccagagagacgtcagcaggtgcttgccctggtcatatagcctgtgatattatgcatgtctgcatgcgtaatactgagcttgatgactcagtacagccaatggttattttt

SEQ ID NO: 87300 - DNA, 600 bp, Chicken  19866894388934_3
tgatcttttttcatttttcattctgaagtaatctcagataaaacagacctgatggcagattatgttttctatgtaattgttgtcaatttgtctaaactcttgaaaaattacccacagtgaagtattttttctactattaatctatggccatagatcaaascctaccattaaaacattgtttattacaattaaatgcactggcctaaaattacaatgtggaagcccaataataataataggtaggagaaggaatgaaagtgactgtatagggtttgcagtttgcaaaactaaagcgtgcyrcttaactattgcagaaaatacaaaactaaatttaatttttaaaactccagtwtaaaaaatgaaagattacattctgggatattgaactcaatttacaacagatacatattttgacatcaagtttgcagcaagaatatatatttggaagtgtaatacattcagtctctgcaccacaggcgggtgaatgttccagagagacgtcagcaggtgcttgccctggtcatatagcctgtgatattatgcatgtctgcatgcgtaatactgagcttgatgactcagtacagccaatggttattttta

SEQ ID NO: 87301 - DNA, 600 bp, Chicken  19866894388934_4
tggcagattatgttttctatgtaattgttgtcaatttgtctaaactcttgaaaaattacccacagtgaagtattttttctactattaatctatggccatagatcaaascctaccattaaaacattgtttattacaattaaatgcactggcctaaaattacaatgtggaagcccaataataataataggtaggagaaggaatgaaagtgactgtatagggtttgcagtttgcaaaactaaagcgtgcyrcttaactattgcagaaaatacaaaactaaatttaatttttaaaactccagtwtaaaaaatgaaagattacattctgggatattgaactcaatttacaacagatacatattttgacatcaagtttgcagcaagaatatatatttggaagtgtaatacattcagtctctgcaccacaggcgggtgaatgttccagagagacgtcagcaggtgcttgccctggtcatatagcctgtgatattatgcatgtctgcatgcgtaatactgagcttgatgactcagtacagccaatggttatttttatgttaaatatttttgaaaactggtatttttataccaaacgtacgggtttcaa

SEQ ID NO: 87302 - DNA, 600 bp, Chicken  19866894388934_5
caacagatacatattttgacatcaagtttgcagcaagaatatatatttggaagtgtaatacattcagtctctgcaccacaggcgggtgaatgttccagagagacgtcagcaggtgcttgccctggtcatatagcctgtgatattatgcatgtctgcatgcgtaatactgagcttgatgactcagtacagccaatggttatttttatgttaaatatttttgaaaactggtatttttataccaaacgtacgggtttcaagctcccagtttcatggatggccctgagttcacagggagatgtrtagattgcaattagtcgttgggtttattttcattgttaaaatgcaattaatttttatttccatgctgggatttgttttttaaactcagtactttaattcacaatggctttaaataatcatttggttttagcagtctaacagttatagttcagaacaggcctttggtttttgttttcattttagttctagacatcaatgtgtcagagacacagctttgcatcagtgtggaggcttgctcagttcggttgccaccccccgaggtataacacagttatattttctatggctgtatttatctta

SEQ ID NO: 87303 - DNA, 599 bp, Chicken  19866894388939_1
  misc_feature (1)..(11): n is any nucleotide
nnnnnnnnnnncgtgcccgtctgtggctccacggtgacacctaccaaaatgagtgctacctgaagcaggctgcctgcaagcagcagagcgagatactgctcgtctccgaaggatcgtgcgcaaccggtatgtagcagagagctgcctctgccgagggctggagccctgttaatccctccttcgtgttcactgggggttaattcattgcagtcttgattgtgagcagatgctgctgccatcctttccttctaaataggtttaggttgacagggtgcaatgcagaagttggtgattcttggrtttttttttttttttaatctgtatcttgtgttgctggtcagtcagcccagtgtatgcttagggggcagcaygacaagtcattgggagcagataaccctagcaagcagatgccagataaatggatgggcgtctggctcatagcaaccccctctgcaatctgcaaagagtggggctggagcagcgctgcccctaaggcaccctctttggttgttccttgcagggccaggttcccagctggtggagctcagcagaattctgctgtctgtagtgagccacaccagctcccaccagctgaggat

SEQ ID NO: 87304 - DNA, 600 bp, Chicken  19866894388939_2
gcctgcaagcagcagagcgagatactgctcgtctccgaaggatcgtgcgcaaccggtatgtagcagagagctgcctctgccgagggctggagccctgttaatccctccttcgtgttcactgggggttaattcattgcagtcttgattgtgagcagatgctgctgccatcctttccttctaaataggtttaggttgacagggtgcaatgcagaagttggtgattcttggttttttttttttttttaatctgtatcttgtgttgctggtcagtcagcccagtgtatgcttagggggcagcaygacaagtcattgggagcagataaccctagcaagcagatgccagataaatggatgggcgtctggctcatagcaaccccctctgcaatctgcaaagagtggggctggagcagcgctgcccctaaggcaccctctttggttgttccttgcagggccaggttcccagctggtggagctcagcagaattctgctgtctgtagtgagccacaccagctcccaccagctgaggatttagcaccaccacacttaacgaacaggtccatgcaatcagttattttcctggatacgttggaagaattcatt

SEQ ID NO: 87305 - DNA, 600 bp, Chicken  19866894388940_1
gtctccatttgtcactgggcagattcttcgttttggatgaaggatttatcatctcacatcagtttgtctgcagttcggctttgctgctctgtacgaagcagaacatggcagagagaaatggcatttattcagtgcataagaggagatttggatcttctgagatgcagaaaacaaaatatcagagtctctttcctgctgagtggtcttgaaagcagttaaaagattgcccaggatgtcagaggtagccttgcaagatgttctagaaagcagaaacaccctgggaatgtgagaggttggatyattatcacttctttgaccgatcaccccaactttttgaggaaacacttgaaatgctctgaaggaatacaagcatagaagtttatcataccctgtaaaatggctgagcattccatgagcaatgctctccctaaggtttgttctactggtccttctctcctacctcttatcacagcaaaaactgttcttatgccagagctgcatcaggacgtggcagagctgcatgctcagggtgggcaggagttagtgccatgcagccagcactggatggggctcagggtggagcaaggggagggcactggc

SEQ ID NO: 87306 - DNA, 567 bp, Chicken  19866894388940_2
ctctgacagctgttgcacaaatcgatcagttttgtcatttagtcctagacacctttaagccaaaatagttgtgtgctatggttgcttcctcttagcaatcaagagctctgccatctgtcacttacattcacagagcagcatggcacctggaaagatgggataggtttgttcttaagaagtaagtagcaaaactgtttccaagcctgaaatgtcactctcacatgtaagctagtctaaaattagtgattgctgcctgtgcaggaaggaaattgtaagagaacagccacatacaatcagcasccaaaatgtgaggtgtagaaggtatttttttcaatgtccacatcctgagacttgagctgcctgtgttacctgagctaccacaatacatggggtgttcgctgctgcacggaaatgctcatcctttcaaataccaggactgaaagtgtggtcttaccttgcaggttgctggctgaaggctgtcacactaggagagatacctgtgagtatgtcagtgctcaggaggaggtcagctcctgccctgctgaacctatcgcacactggtttggg

SEQ ID NO: 87307 - DNA, 600 bp, Chicken  19866894388943_1
gccctcaactgggcatgtgtttcagccctgctttggcaccatggtggggcatcttggaatgggacagctgatgtgatctcatcctggacacgatcattttcctcctgctggaaaaagaatgcctaggctattagagagaggaagctcacagtgtcatgcaagtttatatcaaacaattgttgtaccaaaggagctggaaaaacaatttttttaagcaccactgtaccatttcctatatttttttaaacaaaagctcaacatatttcagctataaaaatgcagacagtgtattaactcttyacattgcttacaaacacacacatcaaaactcatggaggtttaaccccagaaccctgtattcataatccttcttgtttgacacttaactcaaagttgcgattcaaaataagctctaatgaaaattatgcagtagccaaggcaggaaataaaatacttgccctaccctttctatcttgttccccatgattacagcctattgagcgtgccataaggaaacgcataatagaatgagatcaaataataaatggaagcaatacatcagccctatactcctgttacctaaaacgactttcacctcca

SEQ ID NO: 87308 - DNA, 600 bp, Chicken  19866894388948_1
cttgcatcttttgaatgctcgtggctggatagtaggggaaaagcaagatgtgcttctttctttggggggaagtgatcctggatgggtcactgagcaccatgtagtgtgaggttagcagttgcttccttgtttttggtcaagcatgtggaactggggagactgttcaaactgccaaatgcactgccataattgttcactaagcaaacttggattctgaagccgtgttttgcacagtgacatcctcattgacagatccagtaatgacagtaattcagcacgttggggtagtgggaaacactygtttgcaattttttgaatcttttggattaatgtaggagatgtttgtggtgacaacgcctcttaaagactaatggtgatgaggatatctgagtttttgaagaggcagctcgtttctcatgaaccatgtttaggctgcactgacatctgctggttctgagcatgcacacgttgttctgggtaggtgttttcagaatgcttattcctttcttaaatttccctgaagcagtgatcttgctgcatttgttcagagaaaaattgatagggggggaaaaaaagtagatgatattttagaggaggtct

SEQ ID NO: 87309 - DNA, 599 bp, Chicken  19866894388954_1
  misc_feature (1)..(2): n is any nucleotide
nnttccccttgctgaaacttacccttctgtgctggggtggggcttacagtggggtaggatcagctccctttccgtgtgaaatatttataatcccaacagcttttttccagccctgtgctctgcagactcccctggctcaaacccgagcattcctgtctggccagaagcctgatgccaaggggcagcctggcaagcactgtgctccgtgtcctccagggcaggcttccacccagagctggacgatgcaagttcaagtacatttgagccaaatgacccactgctagctgggactgaataagrtgtcctaatttagctgctttttgaggaaataggccaatcatctgaaccgaacgtgtggtgaagctggtcatgtacagaatttcaygctctgagtcagccttgtacaaatacctgctggtaaccttgtgttcagaattaagttcgttgagttcaggacacttcaaggcatttcctttcctgtcctgttattgggcagttcaccaagcattactgagaagggattatatagagaatcctgtgtttaggcatgggggtttcctgatgcggctccctgggtcaacacttgctcctctgatgta

SEQ ID NO: 87310 - DNA, 600 bp, Chicken  19866894388954_2
tataatcccaacagcttttttccagccctgtgctctgcagactcccctggctcaaacccgagcattcctgtctggccagaagcctgatgccaaggggcagcctggcaagcactgtgctccgtgtcctccagggcaggcttccacccagagctggacgatgcaagttcaagtacatttgagccaaatgacccactgctagctgggactgaataagrtgtcctaatttagctgctttttgaggaaataggccaatcatctgaaccgaacgtgtggtgaagctggtcatgtacagaatttcaygctctgagtcagccttgtacaaatacctgctggtaaccttgtgttcagaattaagttcgttgagttcaggacacttcaaggcatttcctttcctgtcctgttattgggcagttcaccaagcattactgagaagggattatatagagaatcctgtgtttaggcatgggggtttcctgatgcggctccctgggtcaacacttgctcctctgatgtactttgcaagttctgggcttgctgtgcttgtctgtctttcctgctccagcactgtccaacttgtcaaaggatgagctacttgtaaat

SEQ ID NO: 87311 - DNA, 599 bp, Chicken  19866894388955_1
  misc_feature (1)..(97): n is any nucleotide
nnnnnnnnnnnnnnnnnnnnnnnnnnnnnnnnnnnnnnnnnnnnnnnnnnnnnnnnnnnnnnnnnnnnnnnnnnnnnnnnnnnnnnnnnnnnnnnnncaagcattttcagtgtatcagggaaaaaaaggtgataaggacttatttcacttgctccaatagtgccagaatttgagacagaaacaataaataacgctgattacactttgtcagactaaatccaaggaactgaaaaacttgactccaggctgctgtcatttataaatattcagggagccattcaaatacatgtgttttttttwaaaaatctattttctagaaaattctctaaataatcattgctggtaaactcttctcgaatgcaatgtgatacaagctttgtgccaaaatctggaacacagctgagtgctctgaacagagtgggagacacctgagatggttctgttaaattatgcaagaatctcagctatgcacagcaaaagcatcagtgtcaggaggtgaagaacacagcactctgtacacacacaactaaatgtgtttaaagcaggagttctcaagactctcccaagagttttggccacattttgtagagaaactctta

SEQ ID NO: 87312 - DNA, 600 bp, Chicken  19866894388955_2
tctcccaagagttttggccacattttgtagagaaactcttagtttcacttcccagtaatgatcataaaacatctttgtgccagatatagcaattgcctgcatggaaaaataattttaggcaagtatttaatatgttttagctaccttgagacaacagcttagcaactgcaaagagtggggccagcagcttgtgatcggctcttctgagaccaccaggaggactgtgggccctggagcagtctgcagacacggtaccacctgggctgtctttctatggcagcattcctccatgagagacayaggaggttacttttgcagatgtcttacctcatcagccatatcagtcgtgtctaaagtgatttgggcactagtgtctcacattagcttccctagtgycttatttcgtcttgttcttttccgccagaggaagccctagaagaaaaygaaaggagcatcagcatctaacctccttgactttaactccctgtcttctgcaggtctggctcttagactttcagacttcagattgatttaatgatgttgggatgcttagttcttaacagaagttgtgctggagaaggtcatctccctgggtttgta

SEQ ID NO: 87313 - DNA, 600 bp, Chicken  19866894388955_3
ctgcatggaaaaataattttaggcaagtatttaatatgttttagctaccttgagacaacagcttagcaactgcaaagagtggggccagcagcttgtgatcggctcttctgagaccaccaggaggactgtgggccctggagcagtctgcagacacggtaccacctgggctgtctttctatggcagcattcctccatgagagacayaggaggttacttttgcagatgtcttacctcatcagccatatcagtcgtgtctaaagtgatttgggcactagtgtctcacattagcttccctagtgycttatttcgtcttgttcttttccgccagaggaagccctagaagaaaaygaaaggagcatcagcatctaacctccttgactttaactccctgtcttctgcaggtctggctcttagactttcagacttcagattgatttaatgatgttgggatgcttagttcttaacagaagttgtgctggagaaggtcatctccctgggtttgtaaagagcactgaactgtgggaagatattcaccctccttagcttcatgtgttttgcaatcaaatgggagtggtcagctcgcaggagctgcattgtttt

SEQ ID NO: 87314 - DNA, 600 bp, Chicken  19866894388955_4
cttgagacaacagcttagcaactgcaaagagtggggccagcagcttgtgatcggctcttctgagaccaccaggaggactgtgggccctggagcagtctgcagacacggtaccacctgggctgtctttctatggcagcattcctccatgagagacayaggaggttacttttgcagatgtcttacctcatcagccatatcagtcgtgtctaaagtgatttgggcactagtgtctcacattagcttccctagtgycttatttcgtcttgttcttttccgccagaggaagccctagaagaaaaygaaaggagcatcagcatctaacctccttgactttaactccctgtcttctgcaggtctggctcttagactttcagacttcagattgatttaatgatgttgggatgcttagttcttaacagaagttgtgctggagaaggtcatctccctgggtttgtaaagagcactgaactgtgggaagatattcaccctccttagcttcatgtgttttgcaatcaaatgggagtggtcagctcgcaggagctgcattgttttgggtttgtggagaagaggtcctttttcaaaacagggctcaactcactg

SEQ ID NO: 87315 - DNA, 599 bp, Chicken  19866894388957_1
  misc_feature (1)..(18): n is any nucleotide
nnnnnnnnnnnnnnnnnntattaaaagacatcctcacagggaaaatgatgaggtaaggtagggaatacccaagcccgcacaatatgacacctgaggagcttggatttggatttagaaataccctcagataagatacagttgcctgctggagaaggggatcgctataagaaactgcaaacctccttagcttgcctcagcttacaacactagaccatggatgcagaagccccaaggccacagccctccttcagttgctggtctaagcatgcaccagccctgatccagacaggacactcctgrtctcctcaaggtaggtccctggccgtgctctcacccctacagacacaccggtgctctcccaccagggctgccccttatggagccactcgtgcccttcactgcagaccacttctcatacacactggctcagccgacttgtccttcactagccagaaatcactctatcttgcacacccacgctctctgcacctgctggcattaccgacacagggatccattggcctgtgctctgaccccagtagctgtactcagacaccaaacatgcatgagcacacagatcagacagcactcagccagga

SEQ ID NO: 87316 - DNA, 600 bp, Chicken  19866894388960_1
agtcccctgacttcttgctttttttaaggcatgctgtaaatcactgccatctagttcagcgcacatgctgaaagaaaaggtccatttctttcttccagcactgcctcaacagcattagtcttgagggctggaggaagacaatgcattcatgagcagaagtattgtaatgggtgctagtcaaagcaaaagcacagaatgcacttacttgcctgaaaccactgaatgaacatcttgttataacgcatgagtgatgtggggtatttcccctcttaaaaagagaggtgggggggagagagagaraaaaaaaaaacaaaaraacaggaggcttcagtgctgaagagtccacagaatggtttcccawgttgacttaaatcctattaaataataaaccttagaggggaaaatgccttggcrtgtttcttgcatagtaaatttcagatatcatctataaaagaagaggcactcatcaagcagtagggttgtgtagagggaaatacattaaaagtgatactcaaagctggggaaagacctcatctacttttaagatgcaaggargtaaattcccttttgcaaggaactaagtgacacagaaataattct

SEQ ID NO: 87317 - DNA, 600 bp, Chicken  19866894388960_2
gctttttttaaggcatgctgtaaatcactgccatctagttcagcgcacatgctgaaagaaaaggtccatttctttcttccagcactgcctcaacagcattagtcttgagggctggaggaagacaatgcattcatgagcagaagtattgtaatgggtgctagtcaaagcaaaagcacagaatgcacttacttgcctgaaaccactgaatgaacatcttgttataacgcatgagtgatgtggggtatttcccctcttaaaaagagaggtgggggggagagagagaraaaaaaaaaacaaaaraacaggaggcttcagtgctgaagagtccacagaatggtttcccawgttgacttaaatcctattaaataataaaccttagaggggaaaatgccttggcrtgtttcttgcatagtaaatttcagatatcatctataaaagaagaggcactcatcaagcagtagggttgtgtagagggaaatacattaaaagtgatactcaaagctggggaaagacctcatctacttttaagatgcaaggargtaaattcccttttgcaaggaactaagtgacacagaaataattcttgcttgcccaagcaca

SEQ ID NO: 87318 - DNA, 600 bp, Chicken  19866894388960_3
cacatgctgaaagaaaaggtccatttctttcttccagcactgcctcaacagcattagtcttgagggctggaggaagacaatgcattcatgagcagaagtattgtaatgggtgctagtcaaagcaaaagcacagaatgcacttacttgcctgaaaccactgaatgaacatcttgttataacgcatgagtgatgtggggtatttcccctcttaaaaagagaggtgggggggagagagagaraaaaaaaaaacaaaaraacaggaggcttcagtgctgaagagtccacagaatggtttcccawgttgacttaaatcctattaaataataaaccttagaggggaaaatgccttggcrtgtttcttgcatagtaaatttcagatatcatctataaaagaagaggcactcatcaagcagtagggttgtgtagagggaaatacattaaaagtgatactcaaagctggggaaagacctcatctacttttaagatgcaaggargtaaattcccttttgcaaggaactaagtgacacagaaataattcttgcttgcccaagcacagaggttttgatgccggctgtactgtaaggatttcaggctcagaat

SEQ ID NO: 87319 - DNA, 600 bp, Chicken  19866894388960_4
ttagtcttgagggctggaggaagacaatgcattcatgagcagaagtattgtaatgggtgctagtcaaagcaaaagcacagaatgcacttacttgcctgaaaccactgaatgaacatcttgttataacgcatgagtgatgtggggtatttcccctcttaaaaagagaggtgggggggagagagagaraaaaaaaaaacaaaaraacaggaggcttcagtgctgaagagtccacagaatggtttcccawgttgacttaaatcctattaaataataaaccttagaggggaaaatgccttggcrtgtttcttgcatagtaaatttcagatatcatctataaaagaagaggcactcatcaagcagtagggttgtgtagagggaaatacattaaaagtgatactcaaagctggggaaagacctcatctacttttaagatgcaaggargtaaattcccttttgcaaggaactaagtgacacagaaataattcttgcttgcccaagcacagaggttttgatgccggctgtactgtaaggatttcaggctcagaattcacatcagattctcctacactaccccaggatacagtgatttaatctctgcca

SEQ ID NO: 87320 - DNA, 564 bp, Chicken  19866894388960_5
gggtatttcccctcttaaaaagagaggtgggggggagagagagaraaaaaaaaaacaaaaraacaggaggcttcagtgctgaagagtccacagaatggtttcccawgttgacttaaatcctattaaataataaaccttagaggggaaaatgccttggcrtgtttcttgcatagtaaatttcagatatcatctataaaagaagaggcactcatcaagcagtagggttgtgtagagggaaatacattaaaagtgatactcaaagctggggaaagacctcatctacttttaagatgcaaggargtaaattcccttttgcaaggaactaagtgacacagaaataattcttgcttgcccaagcacagaggttttgatgccggctgtactgtaaggatttcaggctcagaattcacatcagattctcctacactaccccaggatacagtgatttaatctctgccacctcctgattgccaacctccccaagagcccaaatggccagaagagaagtgctccctccatagcaatccagtttctgcgttcccagccttgctagcaccatcgaag

SEQ ID NO: 87321 - DNA, 600 bp, Chicken  19866894388961_1
tgattccatttgtcttgcatttaggaaaggagtttgtgcggacagtcattctggctcacctcgtgggtggtaactagttaagctgtaacaatttattccttaatgaaccctagtaaattagagctcaggcaggaatttgtcctgcactctctctgggaatgaggtgtgctgagggggtttgcatgtgtctgcattgtgctgcgctgtgggtgactgcaggcatgacagctatgggtaagcaaaggattttagaagcaactactttgcaaattgaaatccatccagagcaagtggaaggcrtcaaacaggtggggggaaaacctgggaacatccaggcttagccattggctgcagtgagcgtggctcagcagtgccagcagcmggcaggaggacagctttggatgctggcggggaagctggggatgaagatgcaacataaaatacacataaaaggtaaaatatggggagcggagtctcagctggcatgaactgacagagcatttttgacaccagtagaattataccttcctctggatgagatctggcctgctatttttgcagtgtttctgattgctaatttgactttggagctgaagtggt

SEQ ID NO: 87322 - DNA, 600 bp, Chicken  19866894388961_2
ctgtaacaatttattccttaatgaaccctagtaaattagagctcaggcaggaatttgtcctgcactctctctgggaatgaggtgtgctgagggggtttgcatgtgtctgcattgtgctgcgctgtgggtgactgcaggcatgacagctatgggtaagcaaaggattttagaagcaactactttgcaaattgaaatccatccagagcaagtggaaggcrtcaaacaggtggggggaaaacctgggaacatccaggcttagccattggctgcagtgagcgtggctcagcagtgccagcagcmggcaggaggacagctttggatgctggcggggaagctggggatgaagatgcaacataaaatacacataaaaggtaaaatatggggagcggagtctcagctggcatgaactgacagagcatttttgacaccagtagaattataccttcctctggatgagatctggcctgctatttttgcagtgtttctgattgctaatttgactttggagctgaagtggtgctgatgtgttcatttcattacgggagctggattctaggctgcaaatagagcttagcagaaacttctccacaaagcgatgct

SEQ ID NO: 87323 - DNA, 600 bp, Chicken  19866894388961_3
actggaagctgaaaatgcgatggtcgctctccatgcagctccaatgtgaattccgctgtgcggtgtagggatcttctgattattgtacagctccagcacagcagtgctcagcccagcttaagtatttatgtgctactgcacgaggtgtgttaggcagtaatgttgaattaagtggccagatctgaggagcctgtgagaatcccaggatgctccgtgctgctctgacttcccctgagctcacatctccttctaccagatatcaaaacatttctgccgacatccatccttttctccctgtgmctgtgagatactggagatggggactttccagacaagggacattcccacccatcttcagtgctttggaacactgggatctctgaagctttagcagcttcactgctacctttgtattttctctctcgttgggagttatagtgggaggccaagaagcactgtgctgtgtgtgaaatggtacaggaggcttggagaagaaaggaggataaggacaggctctgatgttcatttctccttctgcaagtttgaaactgacaaagtgtggccactcctcctcatgctaaccaatgcattctggtttca

SEQ ID NO: 87324 - DNA, 554 bp, Chicken  19866894388961_4
cacatgaaatgaagacggaaaggcatggatgtgattgtaccacgtggccttgtggagtgactgcgactcatagaagtctgtgtggttctgtgctggaaaatggcagagttggacctcttgggtttcctctccctcgtggccaaagtggtctcttagtattaaaagtaactttgttcattgggccgtgaggatcccctcaaaacctgtaagagaaatggactccaggtatgaagaggacaaggcaacctcagctcctggagagcggagcggaagggctgcgagatgcaaatgttcagaccygattcactttcatttctttactcaaggtaacttctagtctgaccttggcagctgtaaatctcagagctgattctgaagagatgggaacaatgaggataattgctctgcaactctgagagccttggtggggatggaggcatcagcacacgtgagagaggagcagctctctttattgcactgggaagcagaaggtctatttgctattaagctgagtgacagccctgtttgaatcctgccacagctttgccaaagag

SEQ ID NO: 87325 - DNA, 600 bp, Chicken  19866894388962_1
agggcatattgggatgcagaaaacaggcacccagtcgtattctagagtcactccttccattaagtccagaatttcctaaacacattctaaccattgtggccacaccctcttgtccaaactggcaggaagattattttaatcttgggagaaaagattcctccccccccccccaaaaaaaaacccaaacaacaacaggattattaagtcctaccatacccattttggtacataccagtttaattcctatgatggggattcagaataaaagcatcctgctttcattttttattttcaagtttwaaaaaaaaaacaaaacaatattgtcatgtagtgctgtagcaattttcagtgctgctgcaaaatagaatacagctgctttcctgtgaattgctactaaccctctttcacatgagaaatgtgacactgggtaacaattcaaaaaagcccatttcacactcttgtgtaagtaaggtggcaactgtaagacttagaaacatcttggaaggagagttttattaaaaaagagaaattaatcatgctttaatacaagtgactccatgcaagaagtttctatcatacttgctactctactgaactcct

SEQ ID NO: 87326 - DNA, 600 bp, Chicken  19866894388963_1
ttctgtggaaggtggagagagcaaccgagagtcatatgtagagacattaattactgatttgtatagttccattttcactacttgtctttgtttcttagtcctctctactttgaccttactgctgatctctttccttcttccaccgttgtcccttaaacccttcatgaatgtagtgagaatagtgagaaggtggctggaaaaacaggagggggaatggctgtttacaagggtggatagtgataggacaagggggaatgatttaaaactaagacggggaagtttaggttagatatgaggagkaagtttttcacmcagagggtggtgacacaatggaacaggttgctcaaggaggctgtggatgccccatccctggaggcattcaaggccaggctggatgtggctctgggcagcctggtcttgtggttggtgacgctgcatatagcaggggggtcgaaactcratgatcattgtggtccttttcaacccaggccattgtatgattctatgattgaccatttttttctctacagagtggccagtgaagtggatgggtgaccacatattctttcrtacttgtgccctcctcatctggctgacttt

SEQ ID NO: 87327 - DNA, 600 bp, Chicken  19866894388963_2
tggagagagcaaccgagagtcatatgtagagacattaattactgatttgtatagttccattttcactacttgtctttgtttcttagtcctctctactttgaccttactgctgatctctttccttcttccaccgttgtcccttaaacccttcatgaatgtagtgagaatagtgagaaggtggctggaaaaacaggagggggaatggctgtttacaagggtggatagtgataggacaagggggaatgatttaaaactaagacggggaagtttaggttagatatgaggagkaagtttttcacmcagagggtggtgacacaatggaacaggttgctcaaggaggctgtggatgccccatccctggaggcattcaaggccaggctggatgtggctctgggcagcctggtcttgtggttggtgacgctgcatatagcaggggggtcgaaactcratgatcattgtggtccttttcaacccaggccattgtatgattctatgattgaccatttttttctctacagagtggccagtgaagtggatgggtgaccacatattctttcrtacttgtgccctcctcatctggctgacttttgtttggaattg

SEQ ID NO: 87328 - DNA, 600 bp, Chicken  19866894388963_3
ttcatgaatgtagtgagaatagtgagaaggtggctggaaaaacaggagggggaatggctgtttacaagggtggatagtgataggacaagggggaatgatttaaaactaagacggggaagtttaggttagatatgaggagkaagtttttcacmcagagggtggtgacacaatggaacaggttgctcaaggaggctgtggatgccccatccctggaggcattcaaggccaggctggatgtggctctgggcagcctggtcttgtggttggtgacgctgcatatagcaggggggtcgaaactcratgatcattgtggtccttttcaacccaggccattgtatgattctatgattgaccatttttttctctacagagtggccagtgaagtggatgggtgaccacatattctttcrtacttgtgccctcctcatctggctgacttttgtttggaattggttgcccgctgaaggtgagagtagggctcaggagaattgcatttcccatgcaaattcattcattcattcagtgctaggtctcctctcatttttcgtatttgacctgtttttatatgatgaattacttttggagcttgtgaaggatccc

SEQ ID NO: 87329 - DNA, 594 bp, Chicken  19866894388963_4
acggggaagtttaggttagatatgaggagkaagtttttcacmcagagggtggtgacacaatggaacaggttgctcaaggaggctgtggatgccccatccctggaggcattcaaggccaggctggatgtggctctgggcagcctggtcttgtggttggtgacgctgcatatagcaggggggtcgaaactcratgatcattgtggtccttttcaacccaggccattgtatgattctatgattgaccatttttttctctacagagtggccagtgaagtggatgggtgaccacatattctttcrtacttgtgccctcctcatctggctgacttttgtttggaattggttgcccgctgaaggtgagagtagggctcaggagaattgcatttcccatgcaaattcattcattcattcagtgctaggtctcctctcatttttcgtatttgacctgtttttatatgatgaattacttttggagcttgtgaaggatcccactgcagcagragtcttagcagtaacttatttggtgttaratttcacttaactgctatattaatttctcagaaatgtgttaagcgtaggctttggtgccatatt

SEQ ID NO: 87330 - DNA, 393 bp, Chicken  19866894388963_5
ggtccttttcaacccaggccattgtatgattctatgattgaccatttttttctctacagagtggccagtgaagtggatgggtgaccacatattctttcrtacttgtgccctcctcatctggctgacttttgtttggaattggttgcccgctgaaggtgagagtagggctcaggagaattgcatttcccatgcaaattcattcattcattcagtgctaggtctcctctcatttttcgtatttgacctgtttttatatgatgaattacttttggagcttgtgaaggatcccactgcagcagragtcttagcagtaacttatttggtgttaratttcacttaactgctatattaatttctcagaaatgtgttaagcgtaggctttggtgccatatt

SEQ ID NO: 87331 - DNA, 364 bp, Chicken  19866894388963_6
ttctatgattgaccatttttttctctacagagtggccagtgaagtggatgggtgaccacatattctttcrtacttgtgccctcctcatctggctgacttttgtttggaattggttgcccgctgaaggtgagagtagggctcaggagaattgcatttcccatgcaaattcattcattcattcagtgctaggtctcctctcatttttcgtatttgacctgtttttatatgatgaattacttttggagcttgtgaaggatcccactgcagcagragtcttagcagtaacttatttggtgttaratttcacttaactgctatattaatttctcagaaatgtgttaagcgtaggctttggtgccatatt

SEQ ID NO: 87332 - DNA, 599 bp, Chicken  19866894388968_1
  misc_feature (1)..(67): n is any nucleotide
nnnnnnnnnnnnnnnnnnnnnnnnnnnnnnnnnnnnnnnnnnnnnnnnnnnnnnnnnnnnnnnnnnncaaatgcagcttcgtagcgctggtgggagcggctgcttctcaaatgccggagaggtgaaatggtgaaccagcaggtgctgccgagtgggtgtatgggaggacatcaggatgagtgcttgtcctttaggagttacataggagcatggctcagtgttgctgcatctgcattcagagcaccggcgttgctcatgctcactgccggcattgtcaccaggagcaacagcaccgggtcygtgctgcgcagctgccattgctcagcacagtttgcagcaccgygcactgttggcctctctccaaggaaggggacggacggccctgtgcccagcactgatctgcgggtaccaggatgggcacgcagaggcrgctgctggggagggtaagaggrcgctctgagccctacacaaaggatggggctctggmgtgtggggatgggctgagagaagtggactggaccaggctgcaggaggtggaggaaagggagagggaatgatgctgttggagcaggagccggagcagcctctcctctcaggct

SEQ ID NO: 87333 - DNA, 599 bp, Chicken  19866894388968_2
  misc_feature (1)..(24): n is any nucleotide
nnnnnnnnnnnnnnnnnnnnnnnncaaatgcagcttcgtagcgctggtgggagcggctgcttctcaaatgccggagaggtgaaatggtgaaccagcaggtgctgccgagtgggtgtatgggaggacatcaggatgagtgcttgtcctttaggagttacataggagcatggctcagtgttgctgcatctgcattcagagcaccggcgttgctcatgctcactgccggcattgtcaccaggagcaacagcaccgggtcygtgctgcgcagctgccattgctcagcacagtttgcagcaccgygcactgttggcctctctccaaggaaggggacggacggccctgtgcccagcactgatctgcgggtaccaggatgggcacgcagaggcrgctgctggggagggtaagaggrcgctctgagccctacacaaaggatggggctctggmgtgtggggatgggctgagagaagtggactggaccaggctgcaggaggtggaggaaagggagagggaatgatgctgttggagcaggagccggagcagcctctcctctcaggctccagcaggaacacttccargaggtggctgagtcagtaatagct

SEQ ID NO: 87334 - DNA, 600 bp, Chicken  19866894388968_3
tgaaccagcaggtgctgccgagtgggtgtatgggaggacatcaggatgagtgcttgtcctttaggagttacataggagcatggctcagtgttgctgcatctgcattcagagcaccggcgttgctcatgctcactgccggcattgtcaccaggagcaacagcaccgggtcygtgctgcgcagctgccattgctcagcacagtttgcagcaccgygcactgttggcctctctccaaggaaggggacggacggccctgtgcccagcactgatctgcgggtaccaggatgggcacgcagaggcrgctgctggggagggtaagaggrcgctctgagccctacacaaaggatggggctctggmgtgtggggatgggctgagagaagtggactggaccaggctgcaggaggtggaggaaagggagagggaatgatgctgttggagcaggagccggagcagcctctcctctcaggctccagcaggaacacttccargaggtggctgagtcagtaatagctgtgtctgagccccgcaaagccttcagagtgcaagggccrtatctgtggtgtgctgagctgagcccagcaaagcagcaggcagagcccr

SEQ ID NO: 87335 - DNA, 600 bp, Chicken  19866894388968_4
tgggtgtatgggaggacatcaggatgagtgcttgtcctttaggagttacataggagcatggctcagtgttgctgcatctgcattcagagcaccggcgttgctcatgctcactgccggcattgtcaccaggagcaacagcaccgggtcygtgctgcgcagctgccattgctcagcacagtttgcagcaccgygcactgttggcctctctccaaggaaggggacggacggccctgtgcccagcactgatctgcgggtaccaggatgggcacgcagaggcrgctgctggggagggtaagaggrcgctctgagccctacacaaaggatggggctctggmgtgtggggatgggctgagagaagtggactggaccaggctgcaggaggtggaggaaagggagagggaatgatgctgttggagcaggagccggagcagcctctcctctcaggctccagcaggaacacttccargaggtggctgagtcagtaatagctgtgtctgagccccgcaaagccttcagagtgcaagggccrtatctgtggtgtgctgagctgagcccagcaaagcagcaggcagagcccragcacccgtgtgagaccagagc

SEQ ID NO: 87336 - DNA, 600 bp, Chicken  19866894388968_5
cctttaggagttacataggagcatggctcagtgttgctgcatctgcattcagagcaccggcgttgctcatgctcactgccggcattgtcaccaggagcaacagcaccgggtcygtgctgcgcagctgccattgctcagcacagtttgcagcaccgygcactgttggcctctctccaaggaaggggacggacggccctgtgcccagcactgatctgcgggtaccaggatgggcacgcagaggcrgctgctggggagggtaagaggrcgctctgagccctacacaaaggatggggctctggmgtgtggggatgggctgagagaagtggactggaccaggctgcaggaggtggaggaaagggagagggaatgatgctgttggagcaggagccggagcagcctctcctctcaggctccagcaggaacacttccargaggtggctgagtcagtaatagctgtgtctgagccccgcaaagccttcagagtgcaagggccrtatctgtggtgtgctgagctgagcccagcaaagcagcaggcagagcccragcacccgtgtgagaccagagcagagagtgctgctcagagagcaggagtgcagctgc

SEQ ID NO: 87337 - DNA, 600 bp, Chicken  19866894388968_6
tgctcagcacagtttgcagcaccgygcactgttggcctctctccaaggaaggggacggacggccctgtgcccagcactgatctgcgggtaccaggatgggcacgcagaggcrgctgctggggagggtaagaggrcgctctgagccctacacaaaggatggggctctggmgtgtggggatgggctgagagaagtggactggaccaggctgcaggaggtggaggaaagggagagggaatgatgctgttggagcaggagccggagcagcctctcctctcaggctccagcaggaacacttccargaggtggctgagtcagtaatagctgtgtctgagccccgcaaagccttcagagtgcaagggccrtatctgtggtgtgctgagctgagcccagcaaagcagcaggcagagcccragcacccgtgtgagaccagagcagagagtgctgctcagagagcaggagtgcagctgctgtgtgatggctgtgctgctctcaaaggaggtgggagagacggaggagtgtgggttttgttgtcagtaagcatctggggaaaaggtgtgctgccttcatgttatcccatcaataggcctttctgctggttg

SEQ ID NO: 87338 - DNA, 544 bp, Chicken  19866894388968_7
cctgtgcccagcactgatctgcgggtaccaggatgggcacgcagaggcrgctgctggggagggtaagaggrcgctctgagccctacacaaaggatggggctctggmgtgtggggatgggctgagagaagtggactggaccaggctgcaggaggtggaggaaagggagagggaatgatgctgttggagcaggagccggagcagcctctcctctcaggctccagcaggaacacttccargaggtggctgagtcagtaatagctgtgtctgagccccgcaaagccttcagagtgcaagggccrtatctgtggtgtgctgagctgagcccagcaaagcagcaggcagagcccragcacccgtgtgagaccagagcagagagtgctgctcagagagcaggagtgcagctgctgtgtgatggctgtgctgctctcaaaggaggtgggagagacggaggagtgtgggttttgttgtcagtaagcatctggggaaaaggtgtgctgccttcatgttatcccatcaataggcctttctgctggttggaactgt

SEQ ID NO: 87339 - DNA, 495 bp, Chicken  19866894388968_8
gctgctggggagggtaagaggrcgctctgagccctacacaaaggatggggctctggmgtgtggggatgggctgagagaagtggactggaccaggctgcaggaggtggaggaaagggagagggaatgatgctgttggagcaggagccggagcagcctctcctctcaggctccagcaggaacacttccargaggtggctgagtcagtaatagctgtgtctgagccccgcaaagccttcagagtgcaagggccrtatctgtggtgtgctgagctgagcccagcaaagcagcaggcagagcccragcacccgtgtgagaccagagcagagagtgctgctcagagagcaggagtgcagctgctgtgtgatggctgtgctgctctcaaaggaggtgggagagacggaggagtgtgggttttgttgtcagtaagcatctggggaaaaggtgtgctgccttcatgttatcccatcaataggcctttctgctggttggaactgt

SEQ ID NO: 87340 - DNA, 600 bp, Chicken  19866894388980_1
ctctaagatatatactgctacaattccaatacacagatatgatttaatacatgctctgaaaatcaaggagaaattagaccctgacaacagtatgtgttgtaacatgtgcactgcagtacagtctaccacatggaagaaggtactcagagtaatgaattcctatagtaacagaggtatccaaagtcagtttagggtactgagatgatctgctaaatcaccagtgaattctgaattataaccgtcttgaatttacaggaatttctttagtaaatgtgtgtacatatacatttaaacacatayttttggtacttacaggggtaagtaccaatgataatgccatattaaagcaatttcttcatgtcagaagagaatttatcctaaatatatccacataagactgcatgcaaggggggctacctttcaagccactcataataggctaaaratgttgtgctgaggaacaaatacatgcaatttagcaattcctaaattaattgttccaaagatgatgttttcacttatcagtcaacttttgtgctgtgatacagtatctgaatattgaaaacggcagctggactataactacaatttatgaagcag

SEQ ID NO: 87341 - DNA, 600 bp, Chicken  19866894388980_2
agagtaatgaattcctatagtaacagaggtatccaaagtcagtttagggtactgagatgatctgctaaatcaccagtgaattctgaattataaccgtcttgaatttacaggaatttctttagtaaatgtgtgtacatatacatttaaacacatayttttggtacttacaggggtaagtaccaatgataatgccatattaaagcaatttcttcatgtcagaagagaatttatcctaaatatatccacataagactgcatgcaaggggggctacctttcaagccactcataataggctaaaratgttgtgctgaggaacaaatacatgcaatttagcaattcctaaattaattgttccaaagatgatgttttcacttatcagtcaacttttgtgctgtgatacagtatctgaatattgaaaacggcagctggactataactacaatttatgaagcagacatttaaaacaccaagtttgattagataaattactgctgttatctacagttcagacatctatcaggctgtcagtgcttatattcagtcataaatagttcatgcataaaattcacaccagtgactgctgactgacaaatagaatt

SEQ ID NO: 87342 - DNA, 392 bp, Chicken  19866894388988_1
cgtccccctcgtagctcccatcccctccagcgccgctctcagcgccgcgtcacccctccgctcaccccgtatcgcccccccgggcactgagccccggccccacaactcccagctcccccttccagggccatcccggccccatcctcaccccgtctgcctctcctgcccggcagcggacccgaaggtgctgccccgtggggatgcggccccaaatccccccccaaccccatcactcagagtgacatccgacggtgaccggaggagccctccctcgtgctgctccaccaccactctcgtatkctgacagttaaatcatttgattgttttgctgttgattttttttttttccatgagtatctgttggttttggatgctcagagtgtgcggggggg

SEQ ID NO: 87343 - DNA, 600 bp, Chicken  19866894388989_1
atctcagctctgattctgacactttttgcacaaagcagtgtcccagtcttttgaactccaagttctttgaatcatagaatcaccaagattggaaaagacctctaagatcatccagtccaaccattcacctacacacgtcccttagtacaacatctaaatgtttcttcaacacctccagggacggtgactcaagcaccacccaggataatctgttccagcacctgaccactcttttggagaataaatttttcctaatctccaacctgaatctcccctggtgcaaataaaatgcagaccacsctccatctcaccacatttccaatagcttttaggctctccttttctctaatcctgctctgcccagcatgttactgagagtttctctgctgtcttgttcgctcccytctttgtgccttacatggttggagattacagttgccttcagaatagaacagagttcaacaacagagccttgtcgacaaaactcatataaactgtcatgacctctataataaagaactgaagattagtttcaactctgaatatgtgatatcttccttgctaygtagcacctacagttatgacttctgtcaagttaga

SEQ ID NO: 87344 - DNA, 600 bp, Chicken  19866894388989_2
agatcatccagtccaaccattcacctacacacgtcccttagtacaacatctaaatgtttcttcaacacctccagggacggtgactcaagcaccacccaggataatctgttccagcacctgaccactcttttggagaataaatttttcctaatctccaacctgaatctcccctggtgcaaataaaatgcagaccacsctccatctcaccacatttccaatagcttttaggctctccttttctctaatcctgctctgcccagcatgttactgagagtttctctgctgtcttgttcgctcccytctttgtgccttacatggttggagattacagttgccttcagaatagaacagagttcaacaacagagccttgtcgacaaaactcatataaactgtcatgacctctataataaagaactgaagattagtttcaactctgaatatgtgatatcttccttgctaygtagcacctacagttatgacttctgtcaagttagaaaatgtattcagaacagactaagcaagtaggaatcagattgctttatacgttgcaaaataattcttggttataaaaaaamcagcaattaggggaggaactctgt

SEQ ID NO: 87345 - DNA, 600 bp, Chicken  19866894388989_3
gaatctcccctggtgcaaataaaatgcagaccacsctccatctcaccacatttccaatagcttttaggctctccttttctctaatcctgctctgcccagcatgttactgagagtttctctgctgtcttgttcgctcccytctttgtgccttacatggttggagattacagttgccttcagaatagaacagagttcaacaacagagccttgtcgacaaaactcatataaactgtcatgacctctataataaagaactgaagattagtttcaactctgaatatgtgatatcttccttgctaygtagcacctacagttatgacttctgtcaagttagaaaatgtattcagaacagactaagcaagtaggaatcagattgctttatacgttgcaaaataattcttggttataaaaaaamcagcaattaggggaggaactctgttcttgtaaaacaaacacaaggggagatgatgattcaggagctgtaaaatgctaaacaattaactgctttaaggaatgggtggatgcaaatagttgctctcaccattttgcttcattcaaagacaaaagcagtgcttacggattcgatttctagatgatttc

SEQ ID NO: 87346 - DNA, 600 bp, Chicken  19866894388989_4
tctctgctgtcttgttcgctcccytctttgtgccttacatggttggagattacagttgccttcagaatagaacagagttcaacaacagagccttgtcgacaaaactcatataaactgtcatgacctctataataaagaactgaagattagtttcaactctgaatatgtgatatcttccttgctaygtagcacctacagttatgacttctgtcaagttagaaaatgtattcagaacagactaagcaagtaggaatcagattgctttatacgttgcaaaataattcttggttataaaaaaamcagcaattaggggaggaactctgttcttgtaaaacaaacacaaggggagatgatgattcaggagctgtaaaatgctaaacaattaactgctttaaggaatgggtggatgcaaatagttgctctcaccattttgcttcattcaaagacaaaagcagtgcttacggattcgatttctagatgatttccaagcccaaaataagcttccagtaaaatgggagcctagtggtaggaatttcattattttcaacatctggtttatgtgaaatgaatataccaattgtgcttagcaccctcaattgt

SEQ ID NO: 87347 - DNA, 600 bp, Chicken  19866894388990_1
gagtgcaacaactttcttaatttgctgttcttcccactttgtttctgcctcatcttcacttgatccatcgctcacaggcactacaacttacatcagtcgttagcacacctcattacgccctttgcttatttccctactcctcacccaacctcctccttcaaaaacagtaccacttcccacagccattacaagtgatagaaacagatgacagcagacgaaaagcctgtacacaaggaccacgtccaaattagaagatgtaggaatggcaaccggagttatcttcgtttacccaaccgttcytcagattactgcagtaccagaagaacaaagatcaaatgtctcaaagcaaacctgtatatcacgtgagacttcaaaaacagactacaacgtggggacatcacacacggaagatccttaagtgttctaaaatgcacaatctactacaggcacagaagtttctccgtagcatttattacagcaatagagtcagaccatacctgcatattacttacaaccattatccaaataataaagcrattggcctacaagcctggcaaaccagtgctttgtaagtgaaactgcaaacagcaagatgagtta

SEQ ID NO: 87348 - DNA, 600 bp, Chicken  19866894388990_2
ccacgtccaaattagaagatgtaggaatggcaaccggagttatcttcgtttacccaaccgttcytcagattactgcagtaccagaagaacaaagatcaaatgtctcaaagcaaacctgtatatcacgtgagacttcaaaaacagactacaacgtggggacatcacacacggaagatccttaagtgttctaaaatgcacaatctactacaggcacagaagtttctccgtagcatttattacagcaatagagtcagaccatacctgcatattacttacaaccattatccaaataataaagcrattggcctacaagcctggcaaaccagtgctttgtaagtgaaactgcaaacagcaagatgagttaaggagcaaccgaaatagccacatacgcttggcatgcagtaagtctgcctacttccaaagggctggctggctctggttggttgtgttttgttgttggtttgtttttacccctttcccataacagtcataatgtcagtgtgtggagagcaggaacagcccacgtaaacctcaaggaccaccaagcattatgctcttttgtcaagaccaacagcacaactttgcactgcactcttcact

SEQ ID NO: 87349 - DNA, 600 bp, Chicken  19866894389008_1
tctcatttgaatagtcacgttcacacaaatagataggaaatgcttgcagctcctgggaaaccgggtcccttgctctgcctccatgggtgcaacatacggttaggaattggtactcctcctttaacaatgtctgacctctgcaggcctcttatctaggttttcctccagtttaacccagctggacgtaagcatttaggcttctgtgtttgtaaaagcccattcagggggcgtagtgggatatattgaagctgtttaatgtattctgagaggtacgcacaattcccgagggagcccggatcytgagctctctgttgcaaagttctgcaccaacggccctcctttccccgtggccactcatgctgctgcagttgttgctattgctacaaaactggaattgtaacactgagactctacctttatttaagccaataaaacgtggatgtattcgagtgagtctgggaagcgccgcgttcttggttggtcacttctggcagggataagtctgcaagggatcccatcctttcgtttgaactgaggtcattcctcagtgcatctgtctggagagcgggttgagcggggcttatttacaagctgcaccca

SEQ ID NO: 87350 - DNA, 599 bp, Chicken  19866894389011_1
  misc_feature (1)..(3): n is any nucleotide
nnntgaaataaactagaattcttcaaataagtacatcttttagtagcacaaatattctgaatggtctgtagcacaaaataaggagtaatcagttttcttttgctttttttttttttttttaaggtcgattagggaatgtatatcatgtaaacagaaacttttttttttctgttgtaactaattattttgaaaaatctcacaaatgttttgtctgctactaccaaaaatagatttatttacagtaatcagtgacagtgataatatccagaacaactttctgttcctgctttatgaaacaawaaatgcacaagtctatgatgaaattatttctgaaatattctaactaacagtaattatatagtaacataattttaatgttttgtatcttcattctctttattgatcttagtaatgcttagactacctatatataccagtatatactgttctgagaatctaatgctattttatatcttagatccacagtctcattcaatatatactttcactgccttgcaacaagcctttctccatgaattgtcagtttatatgcttacagaagcattttcaagacttactgcagcatctagcagtttatg

SEQ ID NO: 87351 - DNA, 600 bp, Chicken  19866894389015_1
ggcttcagcacgtgagcaactttgctggcctttgtgtggttactgacctattgcaagttacgcatgttccttgcttgctcagctggccccactctagcaaggagattaaagcagcctctgatgaagacctcctggataaaaggtactgagatgaacttaatcaccttactttgttgttcaagtaattgttttgcctactttccatcaaatctttcatcctatccggagtaaactatttgctggaaacatgtctaccagctatgcattttatattggagtatggaagaagcgccttatacmgctgacactttctgttgccagcatggcctgacccacttacaaagcatgaactgaaatgttaatcctttgtggccacttaagctaaagtgcctccaggatgctcctgtttatctggtagaatcttcaagaacagatttgcgactgagggaagcaaaagaagaactaaaaactgcttttgagcacagatatatgcactggagttcatgttttcagtctcacctcaatggcctttctttttgggtgggattaggaaggtggagaaagaggtgtaaacagagcaagggatcagaaaagaatttt

SEQ ID NO: 87352 - DNA, 600 bp, Chicken  19866894389022_1
attatctatatccaaccactcagaatcagatatttctgtccaaaaagatcagaagctggaggaaaaacagagtaagagaccagaatactatgaattccccgttaggtgctaaggcatacactcctcagtgcaatgtggccaggtctcagatgcctggaagacccaaagaagccacttgtcacctgcctgggctaaggagatccgctgtattcagagtcactgggataaacgagacttcctgctaatttgctggcctcatctgggacatagtcagatcataaagcaataggcaaaccaaawtaattacattcccttccaaaaatgtggtttaaatagaaaataaagctgtcagccatattaaaacaaagacgttttcatttgaatgttgcatgggattgggacagcaagggcttttcaaaccttaatgaacagtgaaagggtattttgctttaaggcttttcaggcaaaggatgaacttttaaccacttcagaagtgcatgatacagtgcaggcaaaagtggaaattaactgctttccatagatactaacaggccgagcaaacaacctgactgttacgtgaatcttacctcgctggggtca

SEQ ID NO: 87353 - DNA, 600 bp, Chicken  19866894389025_1
aagcccaaccaaaaacccagcactgccaagtctaccattaaatcagacatgtccaacctatggccctagacagcgagtaatatgaccccaaaaacttttaacatcattatgtgactttggtgatatttctctcaagtcagttgcatgtagcacaagcatggagtgtgcagatggcaacataacgctgaggagtggagggcacagtgcagtgctaaccccacttctcacactgccacacacaccagttgtgtaccacacattatatgtgcttatgccacttggcgggtaaaatgcagagaytactgataataatatttcaacacacctacatgtgtgtgtgcttgtgaagacatgcctttttkcttataaagcaaacatgtaygttttcttatataattatttaacttgggattgtgttatttttatgaataatttaataagtcaacacattcactttgaaatgttcaccagaatatttatcctgtgctaacaattgtaattttcaacatcttcaaggtgaaaatctacttatctgggctgtgtttcaaaccatcacagcattctaaatgaaatttaagttacagcaagcaaataattgtc

SEQ ID NO: 87354 - DNA, 600 bp, Chicken  19866894389025_2
gccctagacagcgagtaatatgaccccaaaaacttttaacatcattatgtgactttggtgatatttctctcaagtcagttgcatgtagcacaagcatggagtgtgcagatggcaacataacgctgaggagtggagggcacagtgcagtgctaaccccacttctcacactgccacacacaccagttgtgtaccacacattatatgtgcttatgccacttggcgggtaaaatgcagagaytactgataataatatttcaacacacctacatgtgtgtgtgcttgtgaagacatgcctttttkcttataaagcaaacatgtaygttttcttatataattatttaacttgggattgtgttatttttatgaataatttaataagtcaacacattcactttgaaatgttcaccagaatatttatcctgtgctaacaattgtaattttcaacatcttcaaggtgaaaatctacttatctgggctgtgtttcaaaccatcacagcattctaaatgaaatttaagttacagcaagcaaataattgtctgcatttggataagcactgtcctgtgaacaacagaaaatatgcagctgtgctttccattttg

SEQ ID NO: 87355 - DNA, 600 bp, Chicken  19866894389025_3
tgaccccaaaaacttttaacatcattatgtgactttggtgatatttctctcaagtcagttgcatgtagcacaagcatggagtgtgcagatggcaacataacgctgaggagtggagggcacagtgcagtgctaaccccacttctcacactgccacacacaccagttgtgtaccacacattatatgtgcttatgccacttggcgggtaaaatgcagagaytactgataataatatttcaacacacctacatgtgtgtgtgcttgtgaagacatgcctttttkcttataaagcaaacatgtaygttttcttatataattatttaacttgggattgtgttatttttatgaataatttaataagtcaacacattcactttgaaatgttcaccagaatatttatcctgtgctaacaattgtaattttcaacatcttcaaggtgaaaatctacttatctgggctgtgtttcaaaccatcacagcattctaaatgaaatttaagttacagcaagcaaataattgtctgcatttggataagcactgtcctgtgaacaacagaaaatatgcagctgtgctttccattttgataaatgaattggaaaataa

SEQ ID NO: 87356 - DNA, 599 bp, Chicken  19866894389026_1
  misc_feature (1)..(231): n is any nucleotide
nnnnnnnnnnnnnnnnnnnnnnnnnnnnnnnnnnnnnnnnnnnnnnnnnnnnnnnnnnnnnnnnnnnnnnnnnnnnnnnnnnnnnnnnnnnnnnnnnnnnnnnnnnnnnnnnnnnnnnnnnnnnnnnnnnnnnnnnnnnnnnnnnnnnnnnnnnnnnnnnnnnnnnnnnnnnnnnnnnnnnnnnnnnnnnnnnnnnnnnnnnnnnnnnnnnnnnnnnnnnnnnnnnnnnnnctatagaacagatgcgttatagcttctgtatttttgttactggaaacagtggggaaggtggtgtggttkcaaactcaaaggtgataattcagaatgggtttgggttccagagcactgctcacagtgagtacttgttgcatgctgcgatttctcacttctgmgggaatgacaccacagtgctgatggctctgccatcccacgagttgcccttcagctctgcayatccatctcttctttggctgcttctagaggtcacagagatggtcccaaacccacggccctgtgctttgctgggtcacatcccayggacgccgagccatttctgagggctctgagcagcccttctgctttccaaactgcccctctct

SEQ ID NO: 87357 - DNA, 600 bp, Chicken  19866894389026_10
ggaggcacttaatatagaacacacttatcttggtttccgttcagaatgtgccctgtatgcttgggaggttcctatcagcctgtgaatcactgccatgcatattcaaagcccctttcctttcaccaggrctaaatccacagttycttggggcgtttgctccctgtggtccagcacagcatgccttgttcggtccttgcagcatctccccatacccagactggcccagctcctgctgcactgctctgtgacgtgggggacaggagagggccacgtcctcagggagggggcacagatgtcccmtgtccccagcactgcatgctgcgcacagagtaccaccacatggctggaaatccacgcacctcccacgtgcacttggaacagaacgtgatgggagcggggctgtaattaacatcggattaggagtgagcccttccttcctctccccaggcatattctctcttgctgtctctttttctagtagaaagcttttcctacgagtggtacttgtgtaacttggcaaggatgctttgatgggctggccgcattgttcattgaattactggctggctggaaagccaagggctgcaatcttctgtgcat

SEQ ID NO: 87358 - DNA, 599 bp, Chicken  19866894389026_2
  misc_feature (1)..(139): n is any nucleotide
nnnnnnnnnnnnnnnnnnnnnnnnnnnnnnnnnnnnnnnnnnnnnnnnnnnnnnnnnnnnnnnnnnnnnnnnnnnnnnnnnnnnnnnnnnnnnnnnnnnnnnnnnnnnnnnnnnnnnnnnnnnnnnnnnnnnnnnnnnnctatagaacagatgcgttatagcttctgtatttttgttactggaaacagtggggaaggtggtgtggttkcaaactcaaaggtgataattcagaatgggtttgggttccagagcactgctcacagtgagtacttgttgcatgctgcgatttctcacttctgmgggaatgacaccacagtgctgatggctctgccatcccacgagttgcccttcagctctgcayatccatctcttctttggctgcttctagaggtcacagagatggtcccaaacccacggccctgtgctttgctgggtcacatcccayggacgccgagccatttctgagggctctgagcagcccttctgctttccaaactgcccctctcttccctcgatgcctgcaggggctggctgctgcaggggggaagcctcggtaccttcatagccgtgtgtcactgtgctgctgatgccatggatcc

SEQ ID NO: 87359 - DNA, 599 bp, Chicken  19866894389026_3
  misc_feature (1)..(78): n is any nucleotide
nnnnnnnnnnnnnnnnnnnnnnnnnnnnnnnnnnnnnnnnnnnnnnnnnnnnnnnnnnnnnnnnnnnnnnnnnnnnnnctatagaacagatgcgttatagcttctgtatttttgttactggaaacagtggggaaggtggtgtggttkcaaactcaaaggtgataattcagaatgggtttgggttccagagcactgctcacagtgagtacttgttgcatgctgcgatttctcacttctgmgggaatgacaccacagtgctgatggctctgccatcccacgagttgcccttcagctctgcayatccatctcttctttggctgcttctagaggtcacagagatggtcccaaacccacggccctgtgctttgctgggtcacatcccayggacgccgagccatttctgagggctctgagcagcccttctgctttccaaactgcccctctcttccctcgatgcctgcaggggctggctgctgcaggggggaagcctcggtaccttcatagccgtgtgtcactgtgctgctgatgccatggatcccagtgctgaaggctgtgtgtcactgcagtggaggagcagtgggaatggcacagagctatgg

SEQ ID NO: 87360 - DNA, 600 bp, Chicken  19866894389026_4
aacagatgcgttatagcttctgtatttttgttactggaaacagtggggaaggtggtgtggttkcaaactcaaaggtgataattcagaatgggtttgggttccagagcactgctcacagtgagtacttgttgcatgctgcgatttctcacttctgmgggaatgacaccacagtgctgatggctctgccatcccacgagttgcccttcagctctgcayatccatctcttctttggctgcttctagaggtcacagagatggtcccaaacccacggccctgtgctttgctgggtcacatcccayggacgccgagccatttctgagggctctgagcagcccttctgctttccaaactgcccctctcttccctcgatgcctgcaggggctggctgctgcaggggggaagcctcggtaccttcatagccgtgtgtcactgtgctgctgatgccatggatcccagtgctgaaggctgtgtgtcactgcagtggaggagcagtgggaatggcacagagctatggtgttttgctctgaggtgttggtgtagctaaaactgatgaaagaactgaskaaagctgctgctgtgtgagctcagagagggctcca

SEQ ID NO: 87361 - DNA, 600 bp, Chicken  19866894389026_5
acccacggccctgtgctttgctgggtcacatcccayggacgccgagccatttctgagggctctgagcagcccttctgctttccaaactgcccctctcttccctcgatgcctgcaggggctggctgctgcaggggggaagcctcggtaccttcatagccgtgtgtcactgtgctgctgatgccatggatcccagtgctgaaggctgtgtgtcactgcagtggaggagcagtgggaatggcacagagctatggtgttttgctctgaggtgttggtgtagctaaaactgatgaaagaactgaskaaagctgctgctgtgtgagctcagagagggctccaggtgaaaamaagcacactcagagcgtttagtgactggatgttttgggacaggaggcacttaatatagaacacacttatcttggtttccgttcagaatgtgccctgtatgcttgggaggttcctatcagcctgtgaatcactgccatgcatattcaaagcccctttcctttcaccaggrctaaatccacagttycttggggcgtttgctccctgtggtccagcacagcatgccttgttcggtccttgcagcatctccccataccc

SEQ ID NO: 87362 - DNA, 600 bp, Chicken  19866894389026_6
cccacggccctgtgctttgctgggtcacatcccayggacgccgagccatttctgagggctctgagcagcccttctgctttccaaactgcccctctcttccctcgatgcctgcaggggctggctgctgcaggggggaagcctcggtaccttcatagccgtgtgtcactgtgctgctgatgccatggatcccagtgctgaaggctgtgtgtcactgcagtggaggagcagtgggaatggcacagagctatggtgttttgctctgaggtgttggtgtagctaaaactgatgaaagaactgaskaaagctgctgctgtgtgagctcagagagggctccaggtgaaaamaagcacactcagagcgtttagtgactggatgttttgggacaggaggcacttaatatagaacacacttatcttggtttccgttcagaatgtgccctgtatgcttgggaggttcctatcagcctgtgaatcactgccatgcatattcaaagcccctttcctttcaccaggrctaaatccacagttycttggggcgtttgctccctgtggtccagcacagcatgccttgttcggtccttgcagcatctccccataccca

SEQ ID NO: 87363 - DNA, 600 bp, Chicken  19866894389026_7
gccatttctgagggctctgagcagcccttctgctttccaaactgcccctctcttccctcgatgcctgcaggggctggctgctgcaggggggaagcctcggtaccttcatagccgtgtgtcactgtgctgctgatgccatggatcccagtgctgaaggctgtgtgtcactgcagtggaggagcagtgggaatggcacagagctatggtgttttgctctgaggtgttggtgtagctaaaactgatgaaagaactgaskaaagctgctgctgtgtgagctcagagagggctccaggtgaaaamaagcacactcagagcgtttagtgactggatgttttgggacaggaggcacttaatatagaacacacttatcttggtttccgttcagaatgtgccctgtatgcttgggaggttcctatcagcctgtgaatcactgccatgcatattcaaagcccctttcctttcaccaggrctaaatccacagttycttggggcgtttgctccctgtggtccagcacagcatgccttgttcggtccttgcagcatctccccatacccagactggcccagctcctgctgcactgctctgtgacgtgggggaca

SEQ ID NO: 87364 - DNA, 600 bp, Chicken  19866894389026_8
gcagtggaggagcagtgggaatggcacagagctatggtgttttgctctgaggtgttggtgtagctaaaactgatgaaagaactgaskaaagctgctgctgtgtgagctcagagagggctccaggtgaaaamaagcacactcagagcgtttagtgactggatgttttgggacaggaggcacttaatatagaacacacttatcttggtttccgttcagaatgtgccctgtatgcttgggaggttcctatcagcctgtgaatcactgccatgcatattcaaagcccctttcctttcaccaggrctaaatccacagttycttggggcgtttgctccctgtggtccagcacagcatgccttgttcggtccttgcagcatctccccatacccagactggcccagctcctgctgcactgctctgtgacgtgggggacaggagagggccacgtcctcagggagggggcacagatgtcccmtgtccccagcactgcatgctgcgcacagagtaccaccacatggctggaaatccacgcacctcccacgtgcacttggaacagaacgtgatgggagcggggctgtaattaacatcggattaggagtgagc

SEQ ID NO: 87365 - DNA, 600 bp, Chicken  19866894389026_9
tgggaatggcacagagctatggtgttttgctctgaggtgttggtgtagctaaaactgatgaaagaactgaskaaagctgctgctgtgtgagctcagagagggctccaggtgaaaamaagcacactcagagcgtttagtgactggatgttttgggacaggaggcacttaatatagaacacacttatcttggtttccgttcagaatgtgccctgtatgcttgggaggttcctatcagcctgtgaatcactgccatgcatattcaaagcccctttcctttcaccaggrctaaatccacagttycttggggcgtttgctccctgtggtccagcacagcatgccttgttcggtccttgcagcatctccccatacccagactggcccagctcctgctgcactgctctgtgacgtgggggacaggagagggccacgtcctcagggagggggcacagatgtcccmtgtccccagcactgcatgctgcgcacagagtaccaccacatggctggaaatccacgcacctcccacgtgcacttggaacagaacgtgatgggagcggggctgtaattaacatcggattaggagtgagcccttccttcctctcc

SEQ ID NO: 87366 - DNA, 599 bp, Chicken  19866894389029_1
  misc_feature (1)..(124): n is any nucleotide
nnnnnnnnnnnnnnnnnnnnnnnnnnnnnnnnnnnnnnnnnnnnnnnnnnnnnnnnnnnnnnnnnnnnnnnnnnnnnnnnnnnnnnnnnnnnnnnnnnnnnnnnnnnnnnnnnnnnnnnnnnnntgtggagagcagtgggaagagagtgtgtccggatggcctgctgaatatatgcccttcagcatggtcatgtattaaggtgagctggagacccctggaggatgagggacatgaaatacgcagcagggtagggcagcagtggacgctgggcattagtcacagggcattggcactggcascgctgcctgtgtccctgtacctgaaggcatctgtgtcctgcaaacacaggtctggaaaatgttgtccttttcagaaaaagacaaaataaataaataaatagatagatagatacaaaatctataggaaaagaaaaatatacaaaatccgcaaaaaacgactctgtgctaccgtataaaagtttctagttcagcttgtgctggtgttctcgttagagtgaaaacatatagaatacatcctaattgggaagcaccagtggacttagtctgactggatagctcatcgttggtatctgtattca

SEQ ID NO: 87367 - DNA, 475 bp, Chicken  19866894389029_2
tgtccttttcagaaaaagacaaaataaataaataaatagatagatagatacaaaatctataggaaaagaaaaatatacaaaatccgcaaaaaacgactctgtgctaccgtataaaagtttctagttcagcttgtgctggtgttctcgttagagtgaaaacatatagaatacatcctaattgggaagcaccagtggacttagtctgactggatagctcatcgttggtatctgtattcagaagttttcacagaggcatttgatccattgtgggtctgggagctgatgaagcagcacagccaytcttaaggcatggctttcctgaaggccctctgctgcatttgcagctgcatgtgagtgtgctggacagcccagggaactgccatgacactcggctgcttctgatgccattcacatgagttttcatctgttgaggaataaagatgtgtgttagctttgcagtgccttaaatccagaa

SEQ ID NO: 87368 - DNA, 600 bp, Chicken  19866894389031_1
aagaaacaaagacaaaaaactaaaaacagcttctcctggtccctcccttcttcccagtctcgatttgactaattaattcctgactcttctgcctcctctcccatcaagaggcacagaggaatggtgaatggggattgtggtcagttcctaataattcttctctgccattcattacctcttactctctctctccatccagcacaaggcccctcccatgggcagttccccagaacagctccttcttgggtcaataccgtagtctctagtccttcaggaaatgtcagctccaatgtgggagcyacagtttgctcctgcatgggctctccatgggctgcagcttccttcagggaacatccacctgctgaagcatgaggtcctccacaggctgcagtgtcaatatctgctccagtgttgctttctccatgggctgcaaggaaatctgtcacacaggaacaccttctcctccctcttcttcaaccctgaggtctgcagaatttcttccctcgtatgttttctcactgctttctctcacagctgctacacagtacattttaccctttcttcaatacatttccccaagctgctcaccaatggctgctg

SEQ ID NO: 87369 - DNA, 600 bp, Chicken  19866894389040_1
acttgttttcaggattaactgttttcatttaataacaataactaaaatatttgtaaaagatagcaaaaatgcctgaagaaaaagagatctgatttatagttcactctcacatcatccttcacctctagtgagggactggagcagtatataatagctaatattacacctgataaaaaaaaaaaaaaaaaaggaagtgagatttatggagcacaagaaggctaaaatttatagcctgctgcatagtttgacagcacttaataaactcacaaagtgtgtgctgagatagtagaaattctacaraaattgcctattcctgaagccaatggcaatggaacatttctacttttataaacaaaaaaagaaaaaagaaaaatgtcataacaatgtggaattgaactgaagaaactaatatagcaaagccatctcaaaagcactgaaacaacgggtatagagcccaccatgtataaatatatatatatataggaagcccagtgaagcaatttcaaataagcaatctgggtcaaaatgagctgatgctaaatgacaaaagtaaaatttcaatatctattaaaatcgacactggaaatggcaagaagcttt

SEQ ID NO: 87370 - DNA, 600 bp, Chicken  19866894389043_1
catatgagacctctgcatgctttacttgtgtggattgcccataaacatgctcaaatctcttttaataccaggtgccaaaaacggaacggaaaaagagaaggaaaaaagaagcggatgtggtgagttgagcaccctgggcctgcgtgttaaagaactgacccttgtggccagaattacacctgataagagacctgctaatgacatgacctgtggtgagatcttaacgtctcacctagtgagtgtgcagccttgaaaagatgctaggaagatggacaaggtgaatttggtttgcctgtgaaygactgtaggttaaaacarcgggctgtaaagcagcacttctgttcagaacaaggactgctgtaggttgttctatgaaaacatgtcccaccgtagtcaagacgggatgtgtatctgacagagcttttgtcttaaaggatgtaatagcactgggaaagatgtaaagcaaaaagggccgtggaagcataggagagctcttcaaaatggagagcttgaccagtcaaacacagctggttttaaactgtttgtgtgaagggttggttccataccggcccggatttctgagctgctgcagggctattg

SEQ ID NO: 87371 - DNA, 600 bp, Chicken  19866894389043_2
gctttacttgtgtggattgcccataaacatgctcaaatctcttttaataccaggtgccaaaaacggaacggaaaaagagaaggaaaaaagaagcggatgtggtgagttgagcaccctgggcctgcgtgttaaagaactgacccttgtggccagaattacacctgataagagacctgctaatgacatgacctgtggtgagatcttaacgtctcacctagtgagtgtgcagccttgaaaagatgctaggaagatggacaaggtgaatttggtttgcctgtgaaygactgtaggttaaaacarcgggctgtaaagcagcacttctgttcagaacaaggactgctgtaggttgttctatgaaaacatgtcccaccgtagtcaagacgggatgtgtatctgacagagcttttgtcttaaaggatgtaatagcactgggaaagatgtaaagcaaaaagggccgtggaagcataggagagctcttcaaaatggagagcttgaccagtcaaacacagctggttttaaactgtttgtgtgaagggttggttccataccggcccggatttctgagctgctgcagggctattggtccaaaaagaaaaatag

SEQ ID NO: 87372 - DNA, 596 bp, Chicken  19866894389046_1
accattcactaagacaaatgaagttacgtgccaagcacggctagcctgtgttggctcagttctaccttatctttgtcagcatcccactacagatgttgcaaccagtagtaactggtgatccatatacagtttgggaaacatcaaaagattgtttgaaccaaaagcctttcatcttccaactgtaagaggcattcatttcacgatgctgctgttttgacagaatttcttaaaggccaatctacagtcatttttttaaatacctaattcagtattcattaataagcagaaacctgtgagggratggctaaggatggggaggcctatatcatttcttcccctgtggccatgacagaaatcgaatatttcactggcatttcttttgaattcagcactactaaaaatgcaatattatggtggttggtgaccctgcacatagcaaggggggttgaaactggatgatcacttgtggtccttttcaacccaggccattctatgattcctgctggtgctaggttcatgcataaaaggaatgaggcaacattcctcaacacctgagacaaagtgacatctcatcaattctaactgtatctgaatat

SEQ ID NO: 87373 - DNA, 599 bp, Chicken  19866894389049_1
  misc_feature (1)..(16): n is any nucleotide
nnnnnnnnnnnnnnnncacaggtttaatgctcccagaagactatattgctgagacctaacagtaagcaaacactggagaaagagcaacatagaactcttgcacagcccttccccatgtacaaatcagtgctccacctccctctgatactcagcagccttgcacaaaatcgggacaattaactgtggctggaggcttccagcagcagctcccacctgccctgtccctgatggacaaccacgagacagagcctgctcagacactggctgctgaaagaagctcccctatggctcacagccccrtgtctaaatgaagcagtgaatttaacagcttgggaacacaagcacttggggtacaaatcctcccagagccctgtgggttattctagctcaggcaaggaactgagctgatgcaggttagctccatgcttacagaaaaacaaagggagcttttctacctgcctttcttagcgctgaagcaatcccagctctgctaggcctttatcaggacgcatgatgctgatttgcagtggcattcaacaaatttaaaatacaaggaaggcaaaacatcctgccaggcaccgtcagtctcatctctgcac

SEQ ID NO: 87374 - DNA, 599 bp, Chicken  19866894389056_1
  misc_feature (1)..(111): n is any nucleotide
nnnnnnnnnnnnnnnnnnnnnnnnnnnnnnnnnnnnnnnnnnnnnnnnnnnnnnnnnnnnnnnnnnnnnnnnnnnnnnnnnnnnnnnnnnnnnnnnnnnnnnnnnnnnnnntgaaagaaaggcatatactttttattttaaatgtaaggcaagtcatgcattttgacgaactgtagtgtataaatcagtagtaacaagctctcagctaaatgaacaatattttagatcagattagaactgtaatgacacttaacttttcctctgtcatccattaaatagttagctgatacatggaaaccktaatcaattttaaaactkttaattatagatgaggatatttttctttttgaagtatatcacagaakttctaaataaaaatcatgstataactgctattctataagctattaagattactcacaagtctcctaccacaggtaccaaatatatttagttgaaaataaactgacactattcaatccaaattctgaattatgtgcaaaaaggacattattttaagtgacaaaaagtcactgcccagcaaactgaacrctcagcaaaaaagctgaattttgctttctgacttgctacttatgcat

SEQ ID NO: 87375 - DNA, 599 bp, Chicken  19866894389056_2
  misc_feature (1)..(93): n is any nucleotide
nnnnnnnnnnnnnnnnnnnnnnnnnnnnnnnnnnnnnnnnnnnnnnnnnnnnnnnnnnnnnnnnnnnnnnnnnnnnnnnnnnnnnnnnnnnnntgaaagaaaggcatatactttttattttaaatgtaaggcaagtcatgcattttgacgaactgtagtgtataaatcagtagtaacaagctctcagctaaatgaacaatattttagatcagattagaactgtaatgacacttaacttttcctctgtcatccattaaatagttagctgatacatggaaaccktaatcaattttaaaactkttaattatagatgaggatatttttctttttgaagtatatcacagaakttctaaataaaaatcatgstataactgctattctataagctattaagattactcacaagtctcctaccacaggtaccaaatatatttagttgaaaataaactgacactattcaatccaaattctgaattatgtgcaaaaaggacattattttaagtgacaaaaagtcactgcccagcaaactgaacrctcagcaaaaaagctgaattttgctttctgacttgctacttatgcattcatgtaataaaaaggga

SEQ ID NO: 87376 - DNA, 599 bp, Chicken  19866894389056_3
  misc_feature (1)..(46): n is any nucleotide
nnnnnnnnnnnnnnnnnnnnnnnnnnnnnnnnnnnnnnnnnnnnnntgaaagaaaggcatatactttttattttaaatgtaaggcaagtcatgcattttgacgaactgtagtgtataaatcagtagtaacaagctctcagctaaatgaacaatattttagatcagattagaactgtaatgacacttaacttttcctctgtcatccattaaatagttagctgatacatggaaaccktaatcaattttaaaactkttaattatagatgaggatatttttctttttgaagtatatcacagaakttctaaataaaaatcatgstataactgctattctataagctattaagattactcacaagtctcctaccacaggtaccaaatatatttagttgaaaataaactgacactattcaatccaaattctgaattatgtgcaaaaaggacattattttaagtgacaaaaagtcactgcccagcaaactgaacrctcagcaaaaaagctgaattttgctttctgacttgctacttatgcattcatgtaataaaaagggaaggaaaacaaggaaaatggagaaacttaaagttgtctaaatttacgg

SEQ ID NO: 87377 - DNA, 599 bp, Chicken  19866894389056_4
  misc_feature (1)..(27): n is any nucleotide
nnnnnnnnnnnnnnnnnnnnnnnnnnntgaaagaaaggcatatactttttattttaaatgtaaggcaagtcatgcattttgacgaactgtagtgtataaatcagtagtaacaagctctcagctaaatgaacaatattttagatcagattagaactgtaatgacacttaacttttcctctgtcatccattaaatagttagctgatacatggaaaccktaatcaattttaaaactkttaattatagatgaggatatttttctttttgaagtatatcacagaakttctaaataaaaatcatgstataactgctattctataagctattaagattactcacaagtctcctaccacaggtaccaaatatatttagttgaaaataaactgacactattcaatccaaattctgaattatgtgcaaaaaggacattattttaagtgacaaaaagtcactgcccagcaaactgaacrctcagcaaaaaagctgaattttgctttctgacttgctacttatgcattcatgtaataaaaagggaaggaaaacaaggaaaatggagaaacttaaagttgtctaaatttacggaaccaacttttcagtttat

SEQ ID NO: 87378 - DNA, 600 bp, Chicken  19866894389056_5
acttttcctctgtcatccattaaatagttagctgatacatggaaaccktaatcaattttaaaactkttaattatagatgaggatatttttctttttgaagtatatcacagaakttctaaataaaaatcatgstataactgctattctataagctattaagattactcacaagtctcctaccacaggtaccaaatatatttagttgaaaataaactgacactattcaatccaaattctgaattatgtgcaaaaaggacattattttaagtgacaaaaagtcactgcccagcaaactgaacrctcagcaaaaaagctgaattttgctttctgacttgctacttatgcattcatgtaataaaaagggaaggaaaacaaggaaaatggagaaacttaaagttgtctaaatttacggaaccaacttttcagtttatccatgccttttattctattctacttcaaagcagcacactgtatatcttcatttctaatctggtagttttccatagttgaatatacaggggttagcgatgtttacgttctgacaaaatctataatgggtgagaagataagacatccatgttgaatagtggttaaaaatga

SEQ ID NO: 87379 - DNA, 600 bp, Chicken  19866894389061_1
aaattaaaaagggaaacagcaaactcctctgggattccataataatttaaacattcctctgggacatctgaagtttgggggaaaggtggaggagggagctaaaaattctgctaacttagaaggaatgtttgtaataaaaaagggacccatacgggtgtgccataccctgatttagtcagagagcagatgtgtgcgtctgtaacctcatctttttcctcttgttttccctcctgttctcttcatctcactccctcctctccctcatttttacagcagttacacctgcatgattgaaggagsagggtgggagctgcgaagctcaaagcttttggcacgttaggtcagagtacagcacaatagcaccataaatcaatgggcaggggatggggacggggatgggcagggggggtcaattcaaaaataaaccatgtgtgagttttatttagctctgccaytcytaaagggagttcacaacagggttgtggaagttttgattttagctcttttctcccctttccagcaccgtgtgctatgggatgtacccacagcacatactgccactgtccctttccctctcccagaatcacttgtttctacccg

SEQ ID NO: 87380 - DNA, 600 bp, Chicken  19866894389061_2
tgtgccataccctgatttagtcagagagcagatgtgtgcgtctgtaacctcatctttttcctcttgttttccctcctgttctcttcatctcactccctcctctccctcatttttacagcagttacacctgcatgattgaaggagsagggtgggagctgcgaagctcaaagcttttggcacgttaggtcagagtacagcacaatagcaccataaatcaatgggcaggggatggggacggggatgggcagggggggtcaattcaaaaataaaccatgtgtgagttttatttagctctgccaytcytaaagggagttcacaacagggttgtggaagttttgattttagctcttttctcccctttccagcaccgtgtgctatgggatgtacccacagcacatactgccactgtccctttccctctcccagaatcacttgtttctacccgaggaggcagctgctgaaagtcccagaagaggcagtgagakcaggaaccaaaatccctctggcctattggcatttactgcaccttgtagcttgggcaggagcaacatgcatccttcacacatgcacgcacacgtgtgtgcttttgggggagaagct

SEQ ID NO: 87381 - DNA, 600 bp, Chicken  19866894389061_3
gccataccctgatttagtcagagagcagatgtgtgcgtctgtaacctcatctttttcctcttgttttccctcctgttctcttcatctcactccctcctctccctcatttttacagcagttacacctgcatgattgaaggagsagggtgggagctgcgaagctcaaagcttttggcacgttaggtcagagtacagcacaatagcaccataaatcaatgggcaggggatggggacggggatgggcagggggggtcaattcaaaaataaaccatgtgtgagttttatttagctctgccaytcytaaagggagttcacaacagggttgtggaagttttgattttagctcttttctcccctttccagcaccgtgtgctatgggatgtacccacagcacatactgccactgtccctttccctctcccagaatcacttgtttctacccgaggaggcagctgctgaaagtcccagaagaggcagtgagakcaggaaccaaaatccctctggcctattggcatttactgcaccttgtagcttgggcaggagcaacatgcatccttcacacatgcacgcacacgtgtgtgcttttgggggagaagctgag

SEQ ID NO: 87382 - DNA, 600 bp, Chicken  19866894389061_4
gtcagagtacagcacaatagcaccataaatcaatgggcaggggatggggacggggatgggcagggggggtcaattcaaaaataaaccatgtgtgagttttatttagctctgccaytcytaaagggagttcacaacagggttgtggaagttttgattttagctcttttctcccctttccagcaccgtgtgctatgggatgtacccacagcacatactgccactgtccctttccctctcccagaatcacttgtttctacccgaggaggcagctgctgaaagtcccagaagaggcagtgagakcaggaaccaaaatccctctggcctattggcatttactgcaccttgtagcttgggcaggagcaacatgcatccttcacacatgcacgcacacgtgtgtgcttttgggggagaagctgaggggacatctcagcytataacaccaaagtgaagaatgcaaggttttgatttattagcggaagaagaagggaagaaataaaaatcccaactgcccaaagcccaagtgtgatatacagagcgttgaggcaactttcatcatgtttttaatgtggtttccttcatctccctaggcttgtctgtttg

SEQ ID NO: 87383 - DNA, 600 bp, Chicken  19866894389061_5
aacagggttgtggaagttttgattttagctcttttctcccctttccagcaccgtgtgctatgggatgtacccacagcacatactgccactgtccctttccctctcccagaatcacttgtttctacccgaggaggcagctgctgaaagtcccagaagaggcagtgagakcaggaaccaaaatccctctggcctattggcatttactgcaccttgtagcttgggcaggagcaacatgcatccttcacacatgcacgcacacgtgtgtgcttttgggggagaagctgaggggacatctcagcytataacaccaaagtgaagaatgcaaggttttgatttattagcggaagaagaagggaagaaataaaaatcccaactgcccaaagcccaagtgtgatatacagagcgttgaggcaactttcatcatgtttttaatgtggtttccttcatctccctaggcttgtctgtttgcaagagcacattgtatttagatgatgcatttagcagaccaccaggagatgctcccccttgttggattctctaccccaccccataactgaacctaacaacaataacgaaaagatccaatttgttcttaagtag

SEQ ID NO: 87384 - DNA, 600 bp, Chicken  19866894389062_1
gaaaacagatggccataaaggagagaaatagactggctatgccccggtaacagcaacctgtgaagtcattatcaccagctgccccttgtgaattaggattctgtgtctgtgcaacacactttctgaagtaatttatcagcatgtggatttatggactccacaaaagccgtcttggccattgttttcccctacactttactggagacacctctatttagattttgtcaagattgctgctcctctgtgctgctgctgggtgggaaaagtccgacctcccagcagtgcagctgaatgctgatygcaggaggatgaaagccaagcaaagcytttcagagcatctcacagcttgctttgtcttgaagataccccaaggaatccattccctggaagagcaggctaccatttggtgatgctttggagtttcaggggaacttgattgtttggaaagtggaggggaggtgcggcgttgggctgttactttggagctgctcccctttccagcagtgacttgcaccagaccagcagcctgcacgagctttgctgcagaggcccttcttggccccctttggatagaacagcacagrggagccggggctgagg

SEQ ID NO: 87385 - DNA, 600 bp, Chicken  19866894389062_2
atagactggctatgccccggtaacagcaacctgtgaagtcattatcaccagctgccccttgtgaattaggattctgtgtctgtgcaacacactttctgaagtaatttatcagcatgtggatttatggactccacaaaagccgtcttggccattgttttcccctacactttactggagacacctctatttagattttgtcaagattgctgctcctctgtgctgctgctgggtgggaaaagtccgacctcccagcagtgcagctgaatgctgatygcaggaggatgaaagccaagcaaagcytttcagagcatctcacagcttgctttgtcttgaagataccccaaggaatccattccctggaagagcaggctaccatttggtgatgctttggagtttcaggggaacttgattgtttggaaagtggaggggaggtgcggcgttgggctgttactttggagctgctcccctttccagcagtgacttgcaccagaccagcagcctgcacgagctttgctgcagaggcccttcttggccccctttggatagaacagcacagrggagccggggctgagggcagaggctgtttgcccaccaaaccga

SEQ ID NO: 87386 - DNA, 600 bp, Chicken  19866894389062_3
cagctgaatgctgatygcaggaggatgaaagccaagcaaagcytttcagagcatctcacagcttgctttgtcttgaagataccccaaggaatccattccctggaagagcaggctaccatttggtgatgctttggagtttcaggggaacttgattgtttggaaagtggaggggaggtgcggcgttgggctgttactttggagctgctcccctttccagcagtgacttgcaccagaccagcagcctgcacgagctttgctgcagaggcccttcttggccccctttggatagaacagcacagrggagccggggctgagggcagaggctgtttgcccaccaaaccgagcacgtttcattgcagttcrgctactgaacagctaaggagagctgctgtccctgcagctaggaagtggttgtggtccatctcttgccacccaccccacagagaggaatcactgcagaatcaattttatcatgtgccaggggcaagaaacacaaccattaatactgtggtattcaatacaaggaacctgtgttctctctatggctgcctgagagtgatagaaacctccagggctaagaatgaatgtggatttcagaac

SEQ ID NO: 87387 - DNA, 600 bp, Chicken  19866894389062_4
tgctttgtcttgaagataccccaaggaatccattccctggaagagcaggctaccatttggtgatgctttggagtttcaggggaacttgattgtttggaaagtggaggggaggtgcggcgttgggctgttactttggagctgctcccctttccagcagtgacttgcaccagaccagcagcctgcacgagctttgctgcagaggcccttcttggccccctttggatagaacagcacagrggagccggggctgagggcagaggctgtttgcccaccaaaccgagcacgtttcattgcagttcrgctactgaacagctaaggagagctgctgtccctgcagctaggaagtggttgtggtccatctcttgccacccaccccacagagaggaatcactgcagaatcaattttatcatgtgccaggggcaagaaacacaaccattaatactgtggtattcaatacaaggaacctgtgttctctctatggctgcctgagagtgatagaaacctccagggctaagaatgaatgtggatttcagaacatccacgttcaataagagggtgacatgtaagccttgatttgtatccctcagccctcagttctt

SEQ ID NO: 87388 - DNA, 600 bp, Chicken  19866894389081_1
gcccatccctttacttggccctgagtctgcctgccatggatcattgtttcaggatgcatagtactagcctccctgtgtacagcatcccgccctttacctgatatagtctggctctgatgctattaaactcaatataggtatctaaatcttgtttgaaactacagatattcaatttctaacacttctcaaaatgtacatggtggtttttaatgtttctttgctatatatgttctgtgtaagggctgtttagtataagttctttatcaacttgacaagcataagccatcatggatagtcccrgtactatcaggtttgctagcaatgagggctgttaggtgcaaagwatttaaatctgttagatcccatggaagaggcagaggtttttttatatgatactcragtccccatgaagtgraacacttatgaatttaaattgctgatgtagttcactaggtgctgtcttagatgtggcacaaaatgggtttgtgtatcacagctttccaaaacatcaacaaaacaatcacacaatgacttccttgtgtatttctatgagttagggggttgaaaaatcccacagaagcaatggaaatgtcaactcta

SEQ ID NO: 87389 - DNA, 567 bp, Chicken  19866894389081_2
tgtttcaggatgcatagtactagcctccctgtgtacagcatcccgccctttacctgatatagtctggctctgatgctattaaactcaatataggtatctaaatcttgtttgaaactacagatattcaatttctaacacttctcaaaatgtacatggtggtttttaatgtttctttgctatatatgttctgtgtaagggctgtttagtataagttctttatcaacttgacaagcataagccatcatggatagtcccrgtactatcaggtttgctagcaatgagggctgttaggtgcaaagwatttaaatctgttagatcccatggaagaggcagaggtttttttatatgatactcragtccccatgaagtgraacacttatgaatttaaattgctgatgtagttcactaggtgctgtcttagatgtggcacaaaatgggtttgtgtatcacagctttccaaaacatcaacaaaacaatcacacaatgacttccttgtgtatttctatgagttagggggttgaaaaatcccacagaagcaatggaaatgtcaactctagtcttgcctgg

SEQ ID NO: 87390 - DNA, 512 bp, Chicken  19866894389081_3
gatatagtctggctctgatgctattaaactcaatataggtatctaaatcttgtttgaaactacagatattcaatttctaacacttctcaaaatgtacatggtggtttttaatgtttctttgctatatatgttctgtgtaagggctgtttagtataagttctttatcaacttgacaagcataagccatcatggatagtcccrgtactatcaggtttgctagcaatgagggctgttaggtgcaaagwatttaaatctgttagatcccatggaagaggcagaggtttttttatatgatactcragtccccatgaagtgraacacttatgaatttaaattgctgatgtagttcactaggtgctgtcttagatgtggcacaaaatgggtttgtgtatcacagctttccaaaacatcaacaaaacaatcacacaatgacttccttgtgtatttctatgagttagggggttgaaaaatcccacagaagcaatggaaatgtcaactctagtcttgcctgg

SEQ ID NO: 87391 - DNA, 496 bp, Chicken  19866894389081_4
gatgctattaaactcaatataggtatctaaatcttgtttgaaactacagatattcaatttctaacacttctcaaaatgtacatggtggtttttaatgtttctttgctatatatgttctgtgtaagggctgtttagtataagttctttatcaacttgacaagcataagccatcatggatagtcccrgtactatcaggtttgctagcaatgagggctgttaggtgcaaagwatttaaatctgttagatcccatggaagaggcagaggtttttttatatgatactcragtccccatgaagtgraacacttatgaatttaaattgctgatgtagttcactaggtgctgtcttagatgtggcacaaaatgggtttgtgtatcacagctttccaaaacatcaacaaaacaatcacacaatgacttccttgtgtatttctatgagttagggggttgaaaaatcccacagaagcaatggaaatgtcaactctagtcttgcctgg

SEQ ID NO: 87392 - DNA, 570 bp, Chicken  19866894389088_1
agagagtacagagactattgcactgtggaaatgtcttcccattacagatcacccaaaaacaaattcactcctgttcactatagattcattacaaacaggacttaaggcaatatgcgaaggtttaaagctcatcttttgaaaccaaacagagccttccacttggaagagatgtgcataatttgtgtaatctgagttgcactttatgtgtttcatgtggagaattcttgtgttcaaccaatctttcacatattcatattcattaaatatttgatctcatgtcatatttcaaaaatagctcaytatgtttggatgtgcacagaaagtgtactgctatacaggtagaatgattttgctctgatagctgttgtggaagttgaataaggtgtatactactgtttttactatgttttctctctgatctgcatacatttgcataatgatgagagaggagtagaaggctgaggtacttaatgcattcctttcctcagtctttattaataagactaattgttctcgggatacctatcctgctgaacggaagacagagactgggagtgtactaagctctta

SEQ ID NO: 87393 - DNA, 600 bp, Chicken  19866894389091_1
ttctctatgatttggggcagaaacactggaaggagttggcacagcttccctgtctttaacatggggaagaggaagtcccagatcacgacttaggtaacttaacgtcaaaaccacccttgggaaggatttgtctatcttcattattcagaggggaaattgagggatgctaggatcccagaatggatgccgtagttcataaacacaaataagaagaatctagttatgcatcctgagcatgctctgtgctgatttaagcctctacttcaccagcttctggaggggagagttacaaaatatccyaattcaatgggactggctggtttctctgttttatgctgaggagaggtgagagccagactgcagataaggcagggcagaaggcggggagctcaggagagagaggtgcagtaagtcctgaaaccacaaaatgagtaatacagtaataagaaggacttatgtagtaatatgaccatttctcaggagagaatagtactcagaaattcaataataaaataactagtcacatgttaaagcaacaacacctcctatttggcaactaattgtacgtgatatacagtagtagatgaataaaatctttgt

SEQ ID NO: 87394 - DNA, 599 bp, Chicken  19866894389099_1
  misc_feature (1)..(130): n is any nucleotide
nnnnnnnnnnnnnnnnnnnnnnnnnnnnnnnnnnnnnnnnnnnnnnnnnnnnnnnnnnnnnnnnnnnnnnnnnnnnnnnnnnnnnnnnnnnnnnnnnnnnnnnnnnnnnnnnnnnnnnnnnnnnnnnnnnttcaaaaaaaaaggctagtttttttttcattcttgacaaagagcaaagaacaatgtcagcatctataaactagatatttattgaaaccatattaagctttaagctgaaattagctttgaagaaagactttggtgttcctccaaatccaccctgtgcttcaggggtcacaygagtttgaaactgtagagctttctcagacacaaaacactgagtcacccctccatttcaataacgtgataaaaaatgaagacccaaaaaaagaaagagttccacactgatttcaaaaaggatcagacttgtataccacagtaatgtcacatataagcataaactgaataacacaagctgtagacaatgcawttgtacctttgcaaacggtacatttctcagaagcaaacaccttcagggccatgacccagacatgtgctgcattaggtgatggtacagcccaacaattcccccaggaaat

SEQ ID NO: 87395 - DNA, 600 bp, Chicken  19866894389099_2
atctataaactagatatttattgaaaccatattaagctttaagctgaaattagctttgaagaaagactttggtgttcctccaaatccaccctgtgcttcaggggtcacaygagtttgaaactgtagagctttctcagacacaaaacactgagtcacccctccatttcaataacgtgataaaaaatgaagacccaaaaaaagaaagagttccacactgatttcaaaaaggatcagacttgtataccacagtaatgtcacatataagcataaactgaataacacaagctgtagacaatgcawttgtacctttgcaaacggtacatttctcagaagcaaacaccttcagggccatgacccagacatgtgctgcattaggtgatggtacagcccaacaattcccccaggaaatctgatacagctagcattgtaaccaattaataacggactgctctacatttgacagctggtatttctgcatttaccctcattttgaaactgttgttactaaatcatgccactaggtcaaatcaaacaaacaccttaaattaagacaattcagaagcttacattttctctttcatcacggtttcacagatatct

SEQ ID NO: 87396 - DNA, 600 bp, Chicken  19866894389105_1
acatccctcatctccaactcacctccatgagatttcaagatcatgcacaccccaactcactttcaaactagaaactcagcagttttttgaagaaaaaaaatcaaatctcataatcgaaatatgccaaataatacaaaattcacaataaatttcagcagcttacagtatctgcttatttctaatacaacatgctttgacatagagctcttctcaagcccccatcaaccaactgctgttcaggaacacaactatgccacagaagttttaccctgctggtacacagcgataattcttcataamcctttattttcacaaatgtctggggctgaatggacattgatttgctgcctgttaacatgttttccttttaatctactgtgatatccattctattctgcttaggactatttatataagtggtgctgtgggagctatgaaatgggactgaaaagctggcaaattgcatcaggtcttaaaagacctttaaaaaaaccacactctatatctgaaagccacttgattgggtagcatttgaagctattcttcttgcagagatttttcagatgctgataaaacattttaggggtgatagatgagcca

SEQ ID NO: 87397 - DNA, 600 bp, Chicken  19866894389117_1
ggtttgtagtgaaatatagacataccttcgaatactcatctctccattaaactcagggttgcagctttcttttagattgtacacgcacacatgccttcaacagggcttcattctatcttgagtggggcctcctcactttggctgaacaggttgaaggacatgaccactaatttcaggcacaggattgatacagctttcaaaccactcaagaatgtaggtagaggagcttgcattcacaagtgctgtcagtgcccatcagaagtatgccttaacctatacattcctttcatcttcctaccyggatgagttatgtaactccattgctcactttgttgttcttgctgaacctattctcaggtgccctgttttcccctcgaatggttttgggagcctgaattttgagttctgctggggacagattacctaaataactgggctttacaaagcctatatccatttgaggatgcaatcatgtaaagattaccaagcaattttaggcactttgctgaacagagattatgctaacaataacaagaactgcttccacaagaaagtagtaaaactgggagggttatttatttatttatttatttttcttta

SEQ ID NO: 87398 - DNA, 488 bp, Chicken  19866894389117_2
tcactttgttgttcttgctgaacctattctcaggtgccctgttttcccctcgaatggttttgggagcctgaattttgagttctgctggggacagattacctaaataactgggctttacaaagcctatatccatttgaggatgcaatcatgtaaagattaccaagcaattttaggcactttgctgaacagagattatgctaacaataacaagaactgcttccacaagaaagtagtaaaactgggagggttatttatttatttatttatttttctttaatatcaaagcttactctcattgtragtccttggrtgaggaagtagaaagaygattattccagtgtgctggacaaatttgccagaggagagaaactgaatgtttatgcactgcccaaggccagagtcatacaattataagaatatactgccacctctgtaattctgtgaattttaaatgaagcaccttacctactattaattagctatatttt

SEQ ID NO: 87399 - DNA, 478 bp, Chicken  19866894389117_3
gttcttgctgaacctattctcaggtgccctgttttcccctcgaatggttttgggagcctgaattttgagttctgctggggacagattacctaaataactgggctttacaaagcctatatccatttgaggatgcaatcatgtaaagattaccaagcaattttaggcactttgctgaacagagattatgctaacaataacaagaactgcttccacaagaaagtagtaaaactgggagggttatttatttatttatttatttttctttaatatcaaagcttactctcattgtragtccttggrtgaggaagtagaaagaygattattccagtgtgctggacaaatttgccagaggagagaaactgaatgtttatgcactgcccaaggccagagtcatacaattataagaatatactgccacctctgtaattctgtgaattttaaatgaagcaccttacctactattaattagctatatttt

SEQ ID NO: 87400 - DNA, 461 bp, Chicken  19866894389117_4
tctcaggtgccctgttttcccctcgaatggttttgggagcctgaattttgagttctgctggggacagattacctaaataactgggctttacaaagcctatatccatttgaggatgcaatcatgtaaagattaccaagcaattttaggcactttgctgaacagagattatgctaacaataacaagaactgcttccacaagaaagtagtaaaactgggagggttatttatttatttatttatttttctttaatatcaaagcttactctcattgtragtccttggrtgaggaagtagaaagaygattattccagtgtgctggacaaatttgccagaggagagaaactgaatgtttatgcactgcccaaggccagagtcatacaattataagaatatactgccacctctgtaattctgtgaattttaaatgaagcaccttacctactattaattagctatatttt

SEQ ID NO: 87401 - DNA, 600 bp, Chicken  19866894389121_1
gcacgaggcactttcggctccgctgcagccccacggtgccgtcctggcacgggcacagagcagcgatccctgcccggagctagcgcggccaaaagggccatcgggagcggggaaacgcggagcttccccggaggggtatccggagctcagatggcatatcagtgccgcgatacaatgttttgttgtaactgctgcacggaccgtcccacgcccctcggccccgagccagactcgggggcagagacttccaggaaccgccgggccccgtgcagcgtcccacggccgtccctaccgccgcgrtgcccgcggacggtgcgcggcgattcggtcaccctgcgccgtcgggggctgtcggccgggacctccctcccgcactgcacgtcgcgtctcgtccccatccgcagtcgctgaaatacacgcggccctcccagcctcggcaggaagcaccgaagcacctccgacgttccactcgcgctctgctgctggagcggactttccccgcagaactgcacgcttgcactgcggactgactgcagagcgaagggagaacagcggcatccgcgtaacaaagcaataccggcgaatactgtaaccaaggga

SEQ ID NO: 87402 - DNA, 600 bp, Chicken  19866894389127_1
cctttcatttaagtatgttattcatgtgaaaatcataaactgttgcttcatgcctagaataaatttaatcagtgctgtaggcatctaatgccatcactgttttaattcaatgtgtcagtgaaacaaatgtgtttcttttcatttccagtttctttatgctttactaattcagaatattgtatgatgctgtggaaatatgagactgagagcaaacaaatcactaattttcatcctgtcagtagatttggaattgaatcctccaattgtagcataaaataagatgacagtatattttccatrtattttaaagtaacagaatatctaatgataaacgtactgcaacaagaaaaaaaaaatcctttgtgctctataatatcccatacagagtaagaaacaagaaataattttggtgcaaaatggtaatgccatgacagtaaagtgtggttgcttgcaacttctccaatgtcctttccttggcaatatgaagttggtagaaggttttagttttgatgagagccacctgcagatggcaagaagagcatttttagggccttttctgtcctttattgataactggtttatttgaattttgagtttcat

SEQ ID NO: 87403 - DNA, 600 bp, Chicken  19866894389127_2
ttgatgagagccacctgcagatggcaagaagagcatttttagggccttttctgtcctttattgataactggtttatttgaattttgagtttcatgactaacatcttaaacaaaatttatatcttagtcaagaaataacataaaaattaaaaaaatacattggtattgattattaaatacagtgaaaatttgccttcaagaagtactgtttatattcatccagatcatactaatgctaatacgaacacagtgccttccattgtatgaaattatctaagtcttggttcacttgagtgcttaytctctggacttgtcattgaatttgaaatcaccttacctacagaatcatgctttttaaaactaacaaatgattctcttctgagtttggatttttcaattccataattgagaaacacgatagaagtgaaaaatagttcgtcgacaaataaagragaatgtgtattgatgtattgcagatgttagtttggagttgcattatgaggcattggtccagttttataatgtgagtgattgtatgggaacctggtttctgtagaataagggcttaagcacaacttgcatttcaagtacgtagtaatca

SEQ ID NO: 87404 - DNA, 600 bp, Chicken  19866894389127_3
aaatacattggtattgattattaaatacagtgaaaatttgccttcaagaagtactgtttatattcatccagatcatactaatgctaatacgaacacagtgccttccattgtatgaaattatctaagtcttggttcacttgagtgcttaytctctggacttgtcattgaatttgaaatcaccttacctacagaatcatgctttttaaaactaacaaatgattctcttctgagtttggatttttcaattccataattgagaaacacgatagaagtgaaaaatagttcgtcgacaaataaagragaatgtgtattgatgtattgcagatgttagtttggagttgcattatgaggcattggtccagttttataatgtgagtgattgtatgggaacctggtttctgtagaataagggcttaagcacaacttgcatttcaagtacgtagtaatcattgcagctgtggcaggagcaacatcattatcctttatctagtgcagaatagttttgctgtatagtatacaaacaattttctttcaaaactcatgacagattcagacaagtaacaaagctgaagttgatagaaattcaaaatgttacatgag

SEQ ID NO: 87405 - DNA, 599 bp, Chicken  19866894389133_1
  misc_feature (1)..(52): n is any nucleotide
nnnnnnnnnnnnnnnnnnnnnnnnnnnnnnnnnnnnnnnnnnnnnnnnnnnntggtgtaacgctagtgctgggtaaacagtgcaacagaagccccgtgttgctcaatcgctaatccttattttctccttgctgcccacaaagacccagactccttcctgaagtctgcgcgcctccagcgcctgccctcgtcctcctcggagatgggcagccaggatgcatctcccctgcgtgagaccagcaaggatcccttctctggagactgcagctgccggcaggacgggctgaccgtcatcatcacygcctgcctcaccttcgccacaggggtcacggtggccttgatcatgcagatctactttggagaccctcaggtaagacaaagcagtggctttgcagcatgccgtggattttggcttgggacgtgcatgttccctcacctcccttcttgccagcagatcggccctagtagcgtcagtgagaccccggtgctacccacaactgcctgaaagctttcccatgttgctgctgtcaggggtgtcaggctgggcacggagctctcacatggcgcaggcagcggtgcccgatggggctgggggtccta

SEQ ID NO: 87406 - DNA, 600 bp, Chicken  19866894389133_2
ggcacggagctctcacatggcgcaggcagcggtgcccgatggggctgggggtcctaggggcagcaggcagccccgctgctgtgtgcccagcagtatccaagctgggtgtgaatgccttctgagagcagatctctgagcagtggaggcacctctcccacaactccacctgcagagttttacggatcgttgtgtgagggtccatccctggaagtctccgtgcaggggattgctgaggtcagaaccacacctcctgctgaccgctcatgtggagtggtgcagagtaaatgcagtgtggtcatrgggtcacactttccccaagagaaatgtgctgcagaacatttcctgctgcagcctgagaatggccacgaggcaccctgtgatcacagctaccattgccacatcccacacagcagggtagacctggctgcacatccagraatgggagaactttgctcttttcaatttcttgccctcttactggcactcaaattgcagctccgtgcaggcggagagctggccacaactctctctccattggcagctcttccagcgtggagctgtggtgacggatgctgcccgctgcacagcactgggcgtcga

SEQ ID NO: 87407 - DNA, 600 bp, Chicken  19866894389133_3
cagtggaggcacctctcccacaactccacctgcagagttttacggatcgttgtgtgagggtccatccctggaagtctccgtgcaggggattgctgaggtcagaaccacacctcctgctgaccgctcatgtggagtggtgcagagtaaatgcagtgtggtcatrgggtcacactttccccaagagaaatgtgctgcagaacatttcctgctgcagcctgagaatggccacgaggcaccctgtgatcacagctaccattgccacatcccacacagcagggtagacctggctgcacatccagraatgggagaactttgctcttttcaatttcttgccctcttactggcactcaaattgcagctccgtgcaggcggagagctggccacaactctctctccattggcagctcttccagcgtggagctgtggtgacggatgctgcccgctgcacagcactgggcgtcgaggtgctcagcaagcagggctcctcggtggacgcggccattgcatcagtgctctgcgcaggagtggtgaacccccaaccctcgggcatcggcgggtaggtgccagctgctcccgtgtgtcctcccagcagggtctggc

SEQ ID NO: 87408 - DNA, 600 bp, Chicken  19866894389134_1
tttacaagttttctatgtgcattatccctaagcagttgattttgggagttccatatacttcacctttcaattttgttgtgctctgaagatgaactgtgtaaaaaaaaaaattaaaactatatcttcctgttcaggaagtctgtcagctgcaaactgttggaagctgggagagtactcaagaaaaatattagataggattatcctgttcatattggcatctgtttttgtccatttctggaaacagaatgtgtagctagctgggccttgagtctgatctagtgcatttgttctcatgttccygtgctattctgtgctttttggacaccagctaaacttttacacccatcagcacagctcagatggcacaaggacagattttctgtgttcctgtacctctggagcattattgattgaactgttgcccaaataccagtggcagggctaaataacccccttagaaacacctttaaaacgaagtttccagaaggttgagtaaaacgtgaacacasaagtctggtagctcttaattggaggaaaagtaaaaggggcttgacttttcacagaactatagaatagcctgagttggaagggacccacaas

SEQ ID NO: 87409 - DNA, 600 bp, Chicken  19866894389134_2
tattggcatctgtttttgtccatttctggaaacagaatgtgtagctagctgggccttgagtctgatctagtgcatttgttctcatgttccygtgctattctgtgctttttggacaccagctaaacttttacacccatcagcacagctcagatggcacaaggacagattttctgtgttcctgtacctctggagcattattgattgaactgttgcccaaataccagtggcagggctaaataacccccttagaaacacctttaaaacgaagtttccagaaggttgagtaaaacgtgaacacasaagtctggtagctcttaattggaggaaaagtaaaaggggcttgacttttcacagaactatagaatagcctgagttggaagggacccacaasgatcattgaggtcaactcctggctcctcagaggacaatccaaactggagtcttaagtttttctagtggtgagggcaacaatgcttttcagcctgttatacacaaaacttgtgcactcaattcaggagtgawtgaaatgtaccacaaaggtactttttcttagggtgtttcagaataacagcaaacttgaatgatgtcaccttgcacagg

SEQ ID NO: 87410 - DNA, 600 bp, Chicken  19866894389134_3
gtgctattctgtgctttttggacaccagctaaacttttacacccatcagcacagctcagatggcacaaggacagattttctgtgttcctgtacctctggagcattattgattgaactgttgcccaaataccagtggcagggctaaataacccccttagaaacacctttaaaacgaagtttccagaaggttgagtaaaacgtgaacacasaagtctggtagctcttaattggaggaaaagtaaaaggggcttgacttttcacagaactatagaatagcctgagttggaagggacccacaasgatcattgaggtcaactcctggctcctcagaggacaatccaaactggagtcttaagtttttctagtggtgagggcaacaatgcttttcagcctgttatacacaaaacttgtgcactcaattcaggagtgawtgaaatgtaccacaaaggtactttttcttagggtgtttcagaataacagcaaacttgaatgatgtcaccttgcacaggactgatgtaactacgttagttggaaggatggaggaccaaaagataattttcctatttaaattcttgtcattggatttatgtttttctctgg

SEQ ID NO: 87411 - DNA, 600 bp, Chicken  19866894389134_4
agtggcagggctaaataacccccttagaaacacctttaaaacgaagtttccagaaggttgagtaaaacgtgaacacasaagtctggtagctcttaattggaggaaaagtaaaaggggcttgacttttcacagaactatagaatagcctgagttggaagggacccacaasgatcattgaggtcaactcctggctcctcagaggacaatccaaactggagtcttaagtttttctagtggtgagggcaacaatgcttttcagcctgttatacacaaaacttgtgcactcaattcaggagtgawtgaaatgtaccacaaaggtactttttcttagggtgtttcagaataacagcaaacttgaatgatgtcaccttgcacaggactgatgtaactacgttagttggaaggatggaggaccaaaagataattttcctatttaaattcttgtcattggatttatgtttttctctgggatcccaatgtgctagttttgcaagcagcaaacagacatattcaaagtggggaggcttctgtaaaattcagctggttgtcaaacttcttggaactgagcacaggactgtttcctataccacaggcttctgt

SEQ ID NO: 87412 - DNA, 600 bp, Chicken  19866894389142_1
ttaagtataagtaattcacagaacgcttttgtgtatggctattctttagctgaaataatcaaaggattttctgccctgtgtggtatacaagtgtgaaataaattcacagccttatcctttaggatagcactttaaaatgttgaataactccaaagaacctcctactttcattaaaacaatgcaattacaattagaaattcccctttgatagaatcagattaaaaagaaaaaacatattggaaattgccattgcagactaaattttgtgtattattttctattttatagttaacattgatyagatgaagcagtgaaatgcctcatgtttatattatttcaagtgctataaatagtacatgaaaaaccttgccaagtgcattttatttagggagacattatgtacagactaaaaatgcaataaatggcatcagtaaacattttgaactatgcacagatgttcttgtcattataaaagttgtgttactaattacgtttacacttgggttcaattcagtgaactttgttttagaataggagttctcaattttataggcaaaataacattcatgcttcagtgaaactgaaaggctggggagaaaa

SEQ ID NO: 87413 - DNA, 600 bp, Chicken  19866894389159_1
caggggccgtgtggctgccagcccataagctaaagcttatttctggaatatgctggaaacccacctcagacaacaatgcgtttgattcctcctttccaggcatgttcacttttgcttctttcttacggggaagattttgcttccatctcccttctgctcttcttctcaagccagcgcaacacaaggagagccaaccccggtcattcttcaagagctgagtggtgaggatgtcatagaatcatatcaaagaatcatagaatggcctgggttgaaaaggaccaccgtaatcatccccccatsatggtgcactgggtgtatggggcagtgcataccctgatagcagcaaaactgttgtttcacgtgccataaacaggagctcatacaacaacyctgtgtcatgtagctctcccggtgttctcacagggactggagctcgacttaaatgctgtgagagccttctgtgtgccgggctggttgtggcactggggggaccgatcagttgggcagcaagcagcccacggcaggagggatggaactgcattctctctaagggccattccaacctgagccgctcagtgattgtgtctcttattcagaact

SEQ ID NO: 87414 - DNA, 600 bp, Chicken  19866894389159_2
cctttccaggcatgttcacttttgcttctttcttacggggaagattttgcttccatctcccttctgctcttcttctcaagccagcgcaacacaaggagagccaaccccggtcattcttcaagagctgagtggtgaggatgtcatagaatcatatcaaagaatcatagaatggcctgggttgaaaaggaccaccgtaatcatccccccatsatggtgcactgggtgtatggggcagtgcataccctgatagcagcaaaactgttgtttcacgtgccataaacaggagctcatacaacaacyctgtgtcatgtagctctcccggtgttctcacagggactggagctcgacttaaatgctgtgagagccttctgtgtgccgggctggttgtggcactggggggaccgatcagttgggcagcaagcagcccacggcaggagggatggaactgcattctctctaagggccattccaacctgagccgctcagtgattgtgtctcttattcagaactgacgtgtggttttgcttcatttctgaggatggttcaaagtgctctccttcccrgatggagattctgacatgcctttaattctaatcttct

SEQ ID NO: 87415 - DNA, 600 bp, Chicken  19866894389159_3
gtttcacgtgccataaacaggagctcatacaacaacyctgtgtcatgtagctctcccggtgttctcacagggactggagctcgacttaaatgctgtgagagccttctgtgtgccgggctggttgtggcactggggggaccgatcagttgggcagcaagcagcccacggcaggagggatggaactgcattctctctaagggccattccaacctgagccgctcagtgattgtgtctcttattcagaactgacgtgtggttttgcttcatttctgaggatggttcaaagtgctctccttcccrgatggagattctgacatgcctttaattctaatcttctcctctcctcatttttttttaatcagccttcacagttaagcatataattagccacttggataaagtaggtgtgtggtgtcacagagtcaccaagctgaacctaggccttctgaagtccgaatcaactccatcatcagagcagccttcctgtaggcacgccagcacttgcagcatggcccagaacctcctgcctttgaacttcccagctttaggctgctgcgtcagcgtctgtgtatgatggaagcagtgaaggggggaaacagg

SEQ ID NO: 87416 - DNA, 600 bp, Chicken  19866894389160_1
tggctggtgtgagaatctgattttctccctgcgtgagtgcagatatccctgtgctctgtgcattccctctgaagggtgacacaaagcagagctctggcacatggcctgctgtaaaggttggaaggaacagcactgcttagtttcacaggggggaaaaaaagaggtgttccagtttacagatgcatatttcaaactcttggttgtctgctgacttatttcattgctaccttgacggactggaatcctcatggggttaattactttgggaggggaaaaagggatcagtaaaatcaggtttgmagtgttgttgggctgcaatgtgaaggccttcctgaagaggcacgggtggggaggactctcctgtaaaatgtaagagctgttgctgtgacttgcagagcttggaggagcctgtctggagtgatgcagtgtagcaggaatgtgtgtaaaccagctggctgacacgctggtgcccttgatgatgactaacgtgattaaaacgacaaggggarggaaattctcttagcagcacacaggagctgctcctggacctcatagagaagcataaaaacccacttcagaccgaatgtctcctcttgagtt

SEQ ID NO: 87417 - DNA, 600 bp, Chicken  19866894389160_2
gacttatttcattgctaccttgacggactggaatcctcatggggttaattactttgggaggggaaaaagggatcagtaaaatcaggtttgmagtgttgttgggctgcaatgtgaaggccttcctgaagaggcacgggtggggaggactctcctgtaaaatgtaagagctgttgctgtgacttgcagagcttggaggagcctgtctggagtgatgcagtgtagcaggaatgtgtgtaaaccagctggctgacacgctggtgcccttgatgatgactaacgtgattaaaacgacaaggggarggaaattctcttagcagcacacaggagctgctcctggacctcatagagaagcataaaaacccacttcagaccgaatgtctcctcttgagtttgtttttctccattgggggttgcagaaaaactgcaaagccgctgtaggcaaaacaggaacgttcctttctgtggcattggctgcagttgcagatttcagagggctctggagcagtgagctctgctcataaacaaccaaagcagtggtccaaacctcctctaaataactggatttttgaccagaggctcaagggtgttgattcaggcctc

SEQ ID NO: 87418 - DNA, 600 bp, Chicken  19866894389164_1
acctcatttgtggtgccagtatggatggcagaaaaaggctttatccagtttgactcaggatgctgcatttggagcacgtaacatctgagccccatctctctcctgtccctacgtgtactcccgttgtccttaccttgtgaactgcagggttttcttcattagcatgtgctgttagtatgtttgttaaattcatgccacacagtaattaacctcgaaatgatgtaacgtgtacagaactggcaacctcacgctgttcacagtacatacagcacagccacgttgcgtctgggacagctacarccccatttggatattaatgtagggtgaccactgccaaccttatggcaattggctctttgcaagaaatcattctgatgccctggagcatgatactaagcaatgaaatggctgtgtgctttaagaaaasagaaaatacaaaccgtacagctgcacagcagcatttatttctatagcgtattgaaccacgtgtacaaaaatacaggtaaggctcagctcacagtttccagagagctgatttccactgacttctgggagtcaggtggtaggataagtgttgtgttacactccctaatgaacgta

SEQ ID NO: 87419 - DNA, 580 bp, Chicken  19866894389164_2
ccttaccttgtgaactgcagggttttcttcattagcatgtgctgttagtatgtttgttaaattcatgccacacagtaattaacctcgaaatgatgtaacgtgtacagaactggcaacctcacgctgttcacagtacatacagcacagccacgttgcgtctgggacagctacarccccatttggatattaatgtagggtgaccactgccaaccttatggcaattggctctttgcaagaaatcattctgatgccctggagcatgatactaagcaatgaaatggctgtgtgctttaagaaaasagaaaatacaaaccgtacagctgcacagcagcatttatttctatagcgtattgaaccacgtgtacaaaaatacaggtaaggctcagctcacagtttccagagagctgatttccactgacttctgggagtcaggtggtaggataagtgttgtgttacactccctaatgaacgtatgtaagcacagtgcagattttttattattattatcatttttttttcttttctagatgatttgtgtgtcagacttttcctgggcattgcgcaccaagtatatatattt

SEQ ID NO: 87420 - DNA, 600 bp, Chicken  19866894389165_1
cagccatttcctaggccttataatctgcttccctgtccaatactagctaattttacttcaccttctcctcttcccttttccctgcccagcctgttttgactccctctcctccccagcaggcagctggcctggcaggatggagggagcagcagtgtggttcatgtggcacacgaggtcagccactgccaaaccatcagataacatggcaagaggggaggtacaaatgctacttctcaatgtaatattttacctgctgtttcgaagcagggaattactgagaacaagtgtaactaaaaacawgtgcgtgattttagtgggggcttgattaaaaaacctcaactgagcaaacaaaacgtggtctagcaaaagatatgatcagccactggtgttttctggttgttattgtcagattatgaagctttgcagtcagtataggatttaagtggaaagaagaaacaacatgaaagcccaagtaatgaatccactgaagtaactgaaacaagaaagtaacatcaagaatgaattcatttttatagaattgaggcctgaaggctcaaaacgtaaatgggcatttagctaaagcctatgcaaacgcaaaca

SEQ ID NO: 87421 - DNA, 599 bp, Chicken  19866894389172_1
  misc_feature (1)..(103): n is any nucleotide
nnnnnnnnnnnnnnnnnnnnnnnnnnnnnnnnnnnnnnnnnnnnnnnnnnnnnnnnnnnnnnnnnnnnnnnnnnnnnnnnnnnnnnnnnnnnnnnnnnnnnnncaggaatgagaaagacagataaaagctgagcaagagtgcaatctggactgcttgatacagacatactctgacatttaactcagagatacttttcaggcttacttaaatgaataccagctgaaaatcagaactgtttaaaagacagacagaaaaaaaatctgcatagaagtagtattatattttactctctcctttcrtagtcttaaaatggttttagaactttcattcaatactgtwatttcaggcttcaaatcaaaacaaacaaaaaaaggtgagcatctgattttactttgtgtttaacttctccaggcagtaactatggttgtatrtccagggtcagcagaaatgactgtagcatttgggaatacagccttaatgcattttctgtagctgtgtcatgcaaarccactgcaaatcaggtgacacctgagcatggcacatcatcctcagcagtatgcattttgctgcagtgacaaaaggccatttccagccaggc

SEQ ID NO: 87422 - DNA, 599 bp, Chicken  19866894389172_2
  misc_feature (1)..(63): n is any nucleotide
nnnnnnnnnnnnnnnnnnnnnnnnnnnnnnnnnnnnnnnnnnnnnnnnnnnnnnnnnnnnnnncaggaatgagaaagacagataaaagctgagcaagagtgcaatctggactgcttgatacagacatactctgacatttaactcagagatacttttcaggcttacttaaatgaataccagctgaaaatcagaactgtttaaaagacagacagaaaaaaaatctgcatagaagtagtattatattttactctctcctttcrtagtcttaaaatggttttagaactttcattcaatactgtwatttcaggcttcaaatcaaaacaaacaaaaaaaggtgagcatctgattttactttgtgtttaacttctccaggcagtaactatggttgtatrtccagggtcagcagaaatgactgtagcatttgggaatacagccttaatgcattttctgtagctgtgtcatgcaaarccactgcaaatcaggtgacacctgagcatggcacatcatcctcagcagtatgcattttgctgcagtgacaaaaggccatttccagccaggccaaaaaacccctgaaacagttaaccttcgattttgtgtat

SEQ ID NO: 87423 - DNA, 600 bp, Chicken  19866894389172_3
gcaagagtgcaatctggactgcttgatacagacatactctgacatttaactcagagatacttttcaggcttacttaaatgaataccagctgaaaatcagaactgtttaaaagacagacagaaaaaaaatctgcatagaagtagtattatattttactctctcctttcrtagtcttaaaatggttttagaactttcattcaatactgtwatttcaggcttcaaatcaaaacaaacaaaaaaaggtgagcatctgattttactttgtgtttaacttctccaggcagtaactatggttgtatrtccagggtcagcagaaatgactgtagcatttgggaatacagccttaatgcattttctgtagctgtgtcatgcaaarccactgcaaatcaggtgacacctgagcatggcacatcatcctcagcagtatgcattttgctgcagtgacaaaaggccatttccagccaggccaaaaaacccctgaaacagttaaccttcgattttgtgtatatatttggcctcaaaatacctcatctgaggacaaaactgatttttttttctttttttgaaagctattttccataaatctttaaaaattattct

SEQ ID NO: 87424 - DNA, 600 bp, Chicken  19866894389172_4
aatgaataccagctgaaaatcagaactgtttaaaagacagacagaaaaaaaatctgcatagaagtagtattatattttactctctcctttcrtagtcttaaaatggttttagaactttcattcaatactgtwatttcaggcttcaaatcaaaacaaacaaaaaaaggtgagcatctgattttactttgtgtttaacttctccaggcagtaactatggttgtatrtccagggtcagcagaaatgactgtagcatttgggaatacagccttaatgcattttctgtagctgtgtcatgcaaarccactgcaaatcaggtgacacctgagcatggcacatcatcctcagcagtatgcattttgctgcagtgacaaaaggccatttccagccaggccaaaaaacccctgaaacagttaaccttcgattttgtgtatatatttggcctcaaaatacctcatctgaggacaaaactgatttttttttctttttttgaaagctattttccataaatctttaaaaattattctctccagagtacaaaagcttagtcaaatctttgtggtatgaacaaggggaataagcaggagcagttctggttttgaa

SEQ ID NO: 87425 - DNA, 552 bp, Chicken  19866894389173_1
  misc_feature (1)..(149): n is any nucleotide
nnnnnnnnnnnnnnnnnnnnnnnnnnnnnnnnnnnnnnnnnnnnnnnnnnnnnnnnnnnnnnnnnnnnnnnnnnnnnnnnnnnnnnnnnnnnnnnnnnnnnnnnnnnnnnnnnnnnnnnnnnnnnnnnnnnnnnnnnnnnnnnnnnnnncctgttgagcctccagcaagttttacatttatttgcatacatggcaattgtatttgtgtacttggtctttctctagaattcatcttggatctccttgccacaaacagtagctgcagagctgtagtggttgcacagcatgaaaatcgggttkctatctctggggctgtccctgaagagacaactgctccttcatctaattcttcacttgctgcaaatttgtcttgaggaggtagtgccctcagaactgttgctgtgtacttcttttcatatagaagctgaaccatgactgggtccaaactgtaatgtggctgcatggcttactcttctatgtgaaataatgtcagcaagtccaagaaggcatactgcctcagtgagcaatacaggcaaactggtgacaattaaa

SEQ ID NO: 87426 - DNA, 600 bp, Chicken  19866894389182_1
ttccaacccaaaccagtctatgattctacttttgcctaatatatttactattagatcttggttaattaaggagtgtagctttaacctctttgtctcttctcctcctccaatctcctttccattttctggtcctttttaggagtgcctcaataccttaggtgaagtgaaccttaaaacgctggtgtgagatctgaaggagaattggcaaacacaatgaccctattccttctctctgctttctggttgtttttgtttgtttgcttttaaattctgcatattatttacaggagcattctctgkttatttttcttcccctgtcattgtctttgcaaggaaggttagactgtaacagtgatcagcagttatgggggcagcagcagatacggagataccagatagcgttaaggataatgcttcatttctaggtagatggaaatcgctttctctcacctaatgataaaaatgtagaccaaggaaatgggtacattagatttgtgttgtgacagtaacatcagcagaatcttaagaagaaatcaaatgctgttaaaaaactcagaaagaagaaatgaagccattccatttcaacacccatcccctgaa

SEQ ID NO: 87427 - DNA, 600 bp, Chicken  19866894389184_1
gagacagcagactcggtgctgctgcaggtgggtgcctcaattgaactagtggtagcacgagctctcttaacaaggcatattgtattaatgaaggatgacaacgcgaagcaacgtaggtactgccaagctcaagtggagctgatgtctgcctgctgcaggactgcacatcttgccgtggacaaaagcaggttggatagagtgaggcttaaaaatcttgtgttaagccttcatcgtgtactggctctagcttcaatcttacctcgtctcttgcaattaaatactggccttgtgccccagaakccaagtaatacccctgagacaaagccatggagttaattttagttaaataaatgaggatttacaccattttttagcataggagggcattcgtgctagcatacaacttcggatagtacagcttctctggtattccagtaaactagggcactgaattattcagagaagacaagtgcacagggaggtgtgggctgcctggacctcccgcagctgcaagaataagggatcatgctgtagctcttgcctcaaaattctgacaagtttcttcccagggctgctcaaaatagcttcatgtttttggaa

SEQ ID NO: 87428 - DNA, 600 bp, Chicken  19866894389193_1
cagaaaagcaaccaagtggtactagctgagaggaacaagaacaagaaggctatgaaatcaaacctgcatgaagtctcaaagaggttgggctgaatggaaataccaaaaattgctaggcatttcccaagcaatttcttgcataaccaggttaaaatgaaactttccaaaattatcttgaaggaaaaaggatgttgttttctacagatagagtgcatagttaggagtaggatagattgaaaatctgggctactgactactgcactgtcctccttccactaatccattggtacccacatgcasagttacaaaagagaaaaaagtaaacctctttacagaggcacaccacatgggtggaatactcttggtaacttctgtcagaagaaatgtatcagatttatgtaatcatgaaaggagctttggtttcagttttcattaaggagttaactagcccttttacatttgatcagctctaccttggtcttcactgaatgcttttatgaacatacaggcaaaacaaagcctaaaaatccaaatggggatgcattctagctttcaaggtaccttgtacagagtttgcatttcacactagatgcaagggca

SEQ ID NO: 87429 - DNA, 600 bp, Chicken  19866894389197_1
agtccttgtttcgaaaacagagtacacagaaacatataagagatgccactggtctcacacatgatcataagtaattgttataattgatccagaaactgcccaagcataaggtccacctgtctgagcataaagaaaggtgaaaagcaaccagatgtggacaagcatgaattcccttcacatttctcgctcttatatggctcccaccacttaatatgagtagagcagtcagagcaaccctcacatcagcttgcacatatgtgatggcattatggccaggtggcataaattaccgtagtcccytgatgctcagactgaaactcattttcagcacagtccagctctgcccaaattggagtgctgctgttactccagtgagatcagcagagcaatgtccaaattgtggcaggttttcattaaaaaatgttaatacagataataaaaagtaaaayagcattaacaataatcaagtctgctcactgggtagattttctcaccttgaaaccaacactaatctgcaaaaccatagaatcatagtgctcaaatcaaatgctcgaatacattttaattactatgatgcattaatattttaattaattattc

SEQ ID NO: 87430 - DNA, 600 bp, Chicken  19866894389197_2
agatgtggacaagcatgaattcccttcacatttctcgctcttatatggctcccaccacttaatatgagtagagcagtcagagcaaccctcacatcagcttgcacatatgtgatggcattatggccaggtggcataaattaccgtagtcccytgatgctcagactgaaactcattttcagcacagtccagctctgcccaaattggagtgctgctgttactccagtgagatcagcagagcaatgtccaaattgtggcaggttttcattaaaaaatgttaatacagataataaaaagtaaaayagcattaacaataatcaagtctgctcactgggtagattttctcaccttgaaaccaacactaatctgcaaaaccatagaatcatagtgctcaaatcaaatgctcgaatacattttaattactatgatgcattaatattttaattaattattcttacttaagagccaagaaagagactgaaaaaatatgatgaaaacaaatttgaaacatacttgaacattttcttacttcactgcatttactgactgcagtccttttggcagcacactcacttaaccacctgcagaattctctgggacagg

SEQ ID NO: 87431 - DNA, 600 bp, Chicken  19866894389197_3
accaagcattacactgtgcctacttatttttgtcatatggtaaattaaacaaaataaacattagtataaaagagtatttataaatggagaatatatatataatctgtattttaaatctgtagattaaagcaaatggttgcagatctctgtaccatgaacagtaaacatagtttgcttttaattttgatgtgaattctttatctatcagtgtttatgcatatatcttagagatatgtgcagatatttggcaatagctttatgtaaagattatttatgaaagaaaggtgttatagtgataarctaaaaatgaaaaatcttaaaatatttatwctaaagtatgtttctaatgatgatctaaaatgtttgtatayggaagtagaaagagttcacttctctttttaaaaaatatttggctttgatttttttttctgtgatttgtaagaactcataaccatttgtaagttatttactggaagtgatgtatgtagctaggactgaaaatgacatattccaatgtcccactgctaaatggtcagtgtaagccataggtactcaaacttttggattgcctgggcacactaaataaaaaggagttgtcta

SEQ ID NO: 87432 - DNA, 600 bp, Chicken  19866894389197_4
tgtcatatggtaaattaaacaaaataaacattagtataaaagagtatttataaatggagaatatatatataatctgtattttaaatctgtagattaaagcaaatggttgcagatctctgtaccatgaacagtaaacatagtttgcttttaattttgatgtgaattctttatctatcagtgtttatgcatatatcttagagatatgtgcagatatttggcaatagctttatgtaaagattatttatgaaagaaaggtgttatagtgataarctaaaaatgaaaaatcttaaaatatttatwctaaagtatgtttctaatgatgatctaaaatgtttgtatayggaagtagaaagagttcacttctctttttaaaaaatatttggctttgatttttttttctgtgatttgtaagaactcataaccatttgtaagttatttactggaagtgatgtatgtagctaggactgaaaatgacatattccaatgtcccactgctaaatggtcagtgtaagccataggtactcaaacttttggattgcctgggcacactaaataaaaaggagttgtctaaggctgcatttacaaaggttgctctgaaag

SEQ ID NO: 87433 - DNA, 600 bp, Chicken  19866894389197_5
gagtatttataaatggagaatatatatataatctgtattttaaatctgtagattaaagcaaatggttgcagatctctgtaccatgaacagtaaacatagtttgcttttaattttgatgtgaattctttatctatcagtgtttatgcatatatcttagagatatgtgcagatatttggcaatagctttatgtaaagattatttatgaaagaaaggtgttatagtgataarctaaaaatgaaaaatcttaaaatatttatwctaaagtatgtttctaatgatgatctaaaatgtttgtatayggaagtagaaagagttcacttctctttttaaaaaatatttggctttgatttttttttctgtgatttgtaagaactcataaccatttgtaagttatttactggaagtgatgtatgtagctaggactgaaaatgacatattccaatgtcccactgctaaatggtcagtgtaagccataggtactcaaacttttggattgcctgggcacactaaataaaaaggagttgtctaaggctgcatttacaaaggttgctctgaaagtaatgtctcctaattatttccatggaaactacaacagttac

SEQ ID NO: 87434 - DNA, 600 bp, Chicken  19866894389201_1
aaaacagagaaaatcaacagtatcttgtattatttcaatgtaactggagaagctgcctgcagaccaagtatcatcagctgttcccttacagtgcaaatgaagagagataacttgtccttgggaccttgaaagcctcagctcttcctttgtttgcatttacagaacatagttttcccatggagaataataaactggggaatgatatctagtcttagagtaatcttgtgaacttctcagctatattggatttactgcattctgtgagcctcagctatgctaatgatccttaactgcctagtrtggccccacctgagactacccaccccacacaccctgcccatgggacaaaagctgtatttaagctcaggtctgagaatctctctccttcctttgagccatgtatagagtatcttcaacctttgtttctagctatctctaacaatgtctcctgctgctcttacctaggcctggcttcctctagccgtggctaccaatgggcctggatctgcctgctgtgttcaagtaccccgtggaatgtgatgttatgggacaatggcatggctgaagctggggtgattcttggttctcccagctgcctga

SEQ ID NO: 87435 - DNA, 600 bp, Chicken  19866894389208_1
gaatgccgtagtgagatggtctgcaacacaggagtactgtgctgtgagacacccactctctttctcttttctctttcattttggtggaacgtacgttgttctctgcacacctagctaattgccatctctattgtgtttgtaacttaaaagaacaaatacatgcaaatgatgggttttccctgttttcttgttttctgtaagttctctggccagacgaatattcatctgagcaaaaattttttcctgactaacaaagcaagagaaaaatccaacaccttcatcaacctccgggaggtgctraaccggttcaagctccctgcaggagaatacatcatcgtgccctctacctttgagcccaacttgaatggagacttctgcctccgagtcttctcggaaaaaaatgcaaactcaacgtacgtatctttgtgccacaggtgatttaccaggaatgggagggtttggtatgattattgtttattttatagcaatttctgtctggatagaggcttttagtctttggactgtagccagctgggtcccacagcccaggctgatccrtggaaacgagaaagccacagaaagatgtgctttgcacgggtg

SEQ ID NO: 87436 - DNA, 600 bp, Chicken  19866894389208_2
agagaaaaatccaacaccttcatcaacctccgggaggtgctraaccggttcaagctccctgcaggagaatacatcatcgtgccctctacctttgagcccaacttgaatggagacttctgcctccgagtcttctcggaaaaaaatgcaaactcaacgtacgtatctttgtgccacaggtgatttaccaggaatgggagggtttggtatgattattgtttattttatagcaatttctgtctggatagaggcttttagtctttggactgtagccagctgggtcccacagcccaggctgatccrtggaaacgagaaagccacagaaagatgtgctttgcacgggtggtgagcacaccgactaggagaaacagcccacacctctgaaatcatgctgggaaaaatccaagacaattgttcagccaactgctgcctttactaacactgagctgggttttagtagagatggctcaaagcacacsgttggctgcagatgtggcatgtcccatacagcacgtgggctggggccttgggatggggtgggagatctttcacagcaacttacctccttcactgcaagcacaaaccttcttccccttgcgtatt

SEQ ID NO: 87437 - DNA, 600 bp, Chicken  19866894389208_3
gtgatttaccaggaatgggagggtttggtatgattattgtttattttatagcaatttctgtctggatagaggcttttagtctttggactgtagccagctgggtcccacagcccaggctgatccrtggaaacgagaaagccacagaaagatgtgctttgcacgggtggtgagcacaccgactaggagaaacagcccacacctctgaaatcatgctgggaaaaatccaagacaattgttcagccaactgctgcctttactaacactgagctgggttttagtagagatggctcaaagcacacsgttggctgcagatgtggcatgtcccatacagcacgtgggctggggccttgggatggggtgggagatctttcacagcaacttacctccttcactgcaagcacaaaccttcttccccttgcgtattttctataccaatgagaatactgccacgtcagtgtgcgtgtggttcaccccagcaacctctcagctttgaacatgtattgttattactgtaatttaaagaatttggatcttaaagtaattgaatcagagaagtgacttattttgtttttaatatcaatttccgaatctttctagggt

SEQ ID NO: 87438 - DNA, 600 bp, Chicken  19866894389209_1
tatttcatgtgcatctctgtacagggctctgtgtgacacaaaggattgtgggaagctttccaaggaacagtttgctttggctttctacttaattaatcagaaattaacaaagggcattgatccacctcaagctctgactccagagatgattccaccttcagacaggagtgtcacattacagaaggtaaggatgggtttgcatgcttggtataaatttcaaaggctgcacggaggcgcttcaagtactggcaaagcttaagtttatcataacatcaggaagaaaacaagtattaattacaragaagtgacaaagcactgctccattcatgttttgaagtgaagctgtcatttattacacttgccaaccaagcagagagatcttatgttgagaaagcattattttctattttagaagaatgatcctgcctaaagaaatcttagtttgcatcggaagtaacatgcacaagttctatgtttttgtcctaatgtgcttttcaattatcttttacatttctttttttcagtaactctcaaaataatgtgaactaaataaagtttatgtatttraagttcaaaaagtaaatgtccaccattttattc

SEQ ID NO: 87439 - DNA, 531 bp, Chicken  19866894389209_2
taacatcaggaagaaaacaagtattaattacaragaagtgacaaagcactgctccattcatgttttgaagtgaagctgtcatttattacacttgccaaccaagcagagagatcttatgttgagaaagcattattttctattttagaagaatgatcctgcctaaagaaatcttagtttgcatcggaagtaacatgcacaagttctatgtttttgtcctaatgtgcttttcaattatcttttacatttctttttttcagtaactctcaaaataatgtgaactaaataaagtttatgtatttraagttcaaaaagtaaatgtccaccattttattcttcacagatagtttaaatgtcttggtagcctgttaattgccatctgtcttaatccagcagtagactatacctcaacagttcaagttatgtttatcagaatggcagaagtcatggcaaattcttacttgttttacgcatcatagagtcttaccgttggttaccttttctttgggtgtgcaaagcattgacctgattcta

SEQ ID NO: 87440 - DNA, 600 bp, Chicken  19866894389220_1
gcacatcacttgtgaactcaatagaggaggcaagttccacaagagctatatcatactcatgatcagggacaaagccatcgtatttttcatgaatgataattcttcggacatattttctctgttttggaggtctcaacagaattccaaagctggcagtccatctccgaggttctctttctctgaaacacattggcaattatgtcacaagcacacaaaaaaagatttccatagaaacaaagctttctgtttaagaaaaatgtcacatggtcaggactgtctacagaacagagaagagccgarcttcattgtcttccagcagataaaggcattagtggttcatgaaaagtcagagtagatttatcagagcaaccctgaagttgtaggtcctacaggatcagaagggtgctaataacttaccctttaaagcagtgggctgcagtcactagccacgtattactgatcaccgacgcaccgcagtaatgtgtcccatcgagctgaatactagcctgccatggccattctccatcccgtgcacgctgtccatcagttattctttccactcctgtgaaggagaatgcctcctttcgtattccacagact

SEQ ID NO: 87441 - DNA, 600 bp, Chicken  19866894389224_1
ttcattttctcagcatgtaagaaaaattgagaaaacagattttgcgagatgcttaagtcaataaacttgggctttgtttattcatgagtggatctaatttaattctgaagttgaacatcctttccccagaaatgtccttctggataaatttgacgttgtcagcttcctccgtggtggtggcttccaccgttcacgaaatagaaatggcagtgcaaaaacctctggttcgtgtctgctgcatgtcctctcctgatcgagtggcctcagaagtcatggggaaattctctgcagttgcagtgrtgtatgactcacactccgaagttgatttggtgtggaacttcaggttcygaacttgaaaaactgaatgcagttctggagtgggggttttcctgttaaaagatttttgtgactgagatgatgaagaagagcaatctgaatgaatgtcctcttctgataaagacatcatcataaacgttggccagaacctctaaggacaggattagagtttataccatgagatattcgccatcaaagaaacacagagcaacagatgattgcccccacataaccaaacatggcaatagaacagcacacacccct

SEQ ID NO: 87442 - DNA, 600 bp, Chicken  19866894389224_2
atgcttaagtcaataaacttgggctttgtttattcatgagtggatctaatttaattctgaagttgaacatcctttccccagaaatgtccttctggataaatttgacgttgtcagcttcctccgtggtggtggcttccaccgttcacgaaatagaaatggcagtgcaaaaacctctggttcgtgtctgctgcatgtcctctcctgatcgagtggcctcagaagtcatggggaaattctctgcagttgcagtgrtgtatgactcacactccgaagttgatttggtgtggaacttcaggttcygaacttgaaaaactgaatgcagttctggagtgggggttttcctgttaaaagatttttgtgactgagatgatgaagaagagcaatctgaatgaatgtcctcttctgataaagacatcatcataaacgttggccagaacctctaaggacaggattagagtttataccatgagatattcgccatcaaagaaacacagagcaacagatgattgcccccacataaccaaacatggcaatagaacagcacacacccctctcagaaggcaggattttcagtatcaaaagcatgcattacttaaatga

SEQ ID NO: 87443 - DNA, 600 bp, Chicken  19866894389224_3
gcaatctgaatgaatgtcctcttctgataaagacatcatcataaacgttggccagaacctctaaggacaggattagagtttataccatgagatattcgccatcaaagaaacacagagcaacagatgattgcccccacataaccaaacatggcaatagaacagcacacacccctctcagaaggcaggattttcagtatcaaaagcatgcattacttaaatgatgctagcaccaaactgcattttgtgttccatttaaggtttctaatcacctctctgttccatgagtgctgaggttacttwggttaaagcaggtgctcgctctttgacatggagggttttgaagcatttgctatggagtcaaaatgcagttaaaagaaaaatgaaataaaaggcagcaagtaatcagctgaattaaaaacatcaaaatttgtaatagctcaggcttgattcaaggcagtttttagtataatttccagcaaagagagtgcagctgaatcttgggcagagctttatatattaagacttgagccaatattgtcgagaggtagtttaggtataaaggttcctcttaccacctttaagtacccagcgcttaatagt

SEQ ID NO: 87444 - DNA, 600 bp, Chicken  19866894389225_1
tgcacagagctatacaactctgtggtattttcagtctataaggagaataaatagaaatggaaagataaaaaatttttacctaattttaatgattctcattttgagtcagagggttacggttttgcagcagaatagtaaacatagaggagttcttcatattgaaagagtgaaatttactcaatgtcttaagaaagattagctgaaagatttaaaccagaaaagaaatggagctaggaaacagcaatgaaagcatttgaactaaggccttctcagacgttactcaatattttggagtaaaartctttactttcctattckcagggaattagcataaagtgcactagaagagaaattatgtgagaaggctttgtgagtagttgacagattgtatttgtaagcatgtcttatttctttagattattctgctaaaagataattctccaaagcaagatcgkaacactwacatatgatttactgttgtactgactagaaagcagtctttattagaaaacasgacatcattcagaggtattgtgagacaaacaggattaatgattaaaaggtttcttaagaccataaacaaataaccttatagtatgt

SEQ ID NO: 87445 - DNA, 600 bp, Chicken  19866894389225_2
tctgtggtattttcagtctataaggagaataaatagaaatggaaagataaaaaatttttacctaattttaatgattctcattttgagtcagagggttacggttttgcagcagaatagtaaacatagaggagttcttcatattgaaagagtgaaatttactcaatgtcttaagaaagattagctgaaagatttaaaccagaaaagaaatggagctaggaaacagcaatgaaagcatttgaactaaggccttctcagacgttactcaatattttggagtaaaartctttactttcctattckcagggaattagcataaagtgcactagaagagaaattatgtgagaaggctttgtgagtagttgacagattgtatttgtaagcatgtcttatttctttagattattctgctaaaagataattctccaaagcaagatcgkaacactwacatatgatttactgttgtactgactagaaagcagtctttattagaaaacasgacatcattcagaggtattgtgagacaaacaggattaatgattaaaaggtttcttaagaccataaacaaataaccttatagtatgttttgtttactccatgaaa

SEQ ID NO: 87446 - DNA, 600 bp, Chicken  19866894389225_3
atattgaaagagtgaaatttactcaatgtcttaagaaagattagctgaaagatttaaaccagaaaagaaatggagctaggaaacagcaatgaaagcatttgaactaaggccttctcagacgttactcaatattttggagtaaaartctttactttcctattckcagggaattagcataaagtgcactagaagagaaattatgtgagaaggctttgtgagtagttgacagattgtatttgtaagcatgtcttatttctttagattattctgctaaaagataattctccaaagcaagatcgkaacactwacatatgatttactgttgtactgactagaaagcagtctttattagaaaacasgacatcattcagaggtattgtgagacaaacaggattaatgattaaaaggtttcttaagaccataaacaaataaccttatagtatgttttgtttactccatgaaaacaaacatctagcttgaaattattttctttatccacagaagcttatactggaccaaaaagctgttgggctttttttgtttgtttgtttgtttttggtataattttctctggtaataatgtctctggttatctaattg

SEQ ID NO: 87447 - DNA, 600 bp, Chicken  19866894389225_4
aagagtgaaatttactcaatgtcttaagaaagattagctgaaagatttaaaccagaaaagaaatggagctaggaaacagcaatgaaagcatttgaactaaggccttctcagacgttactcaatattttggagtaaaartctttactttcctattckcagggaattagcataaagtgcactagaagagaaattatgtgagaaggctttgtgagtagttgacagattgtatttgtaagcatgtcttatttctttagattattctgctaaaagataattctccaaagcaagatcgkaacactwacatatgatttactgttgtactgactagaaagcagtctttattagaaaacasgacatcattcagaggtattgtgagacaaacaggattaatgattaaaaggtttcttaagaccataaacaaataaccttatagtatgttttgtttactccatgaaaacaaacatctagcttgaaattattttctttatccacagaagcttatactggaccaaaaagctgttgggctttttttgtttgtttgtttgtttttggtataattttctctggtaataatgtctctggttatctaattgttatgca

SEQ ID NO: 87448 - DNA, 600 bp, Chicken  19866894389225_5
cagaaaagaaatggagctaggaaacagcaatgaaagcatttgaactaaggccttctcagacgttactcaatattttggagtaaaartctttactttcctattckcagggaattagcataaagtgcactagaagagaaattatgtgagaaggctttgtgagtagttgacagattgtatttgtaagcatgtcttatttctttagattattctgctaaaagataattctccaaagcaagatcgkaacactwacatatgatttactgttgtactgactagaaagcagtctttattagaaaacasgacatcattcagaggtattgtgagacaaacaggattaatgattaaaaggtttcttaagaccataaacaaataaccttatagtatgttttgtttactccatgaaaacaaacatctagcttgaaattattttctttatccacagaagcttatactggaccaaaaagctgttgggctttttttgtttgtttgtttgtttttggtataattttctctggtaataatgtctctggttatctaattgttatgcaattaattttgctgtacagattaacctcaattactatcatttgtgaatgatgc

SEQ ID NO: 87449 - DNA, 600 bp, Chicken  19866894389226_1
gcttttccctctgctcccccacttccaagtggcagcaccacacaactgggtgtgcagctgtggcacccaaatctacacatctactccccagcactacttgatcaaaaatatcaaactttgagttgattgtaacagaactgccaaagttttgagtctgtcttgcatatacagcctcagtcctgtcgggaaatctccaaacaaaacaatccttttaattcagacttccttataggcttctttatgggggcctgaaatacgacttttaaaggggtattgggggtgtttttttggtttgcaatscagtgggcagtgtcagcctgctggctcagctcctccagaacctgaatccaggttctgctggggggaagtcatgggatcccatccagatgcgtggtggcacagtagcacaacagtatggctactgattcacaagctgtgtgggcttctgcagaaaacacatagctccatgatggtatccacctgtctgccagtccacgtggttccagagaggctttggcatgactgccccaagaagggatgcaaaggacagactcagggtctggcaccctatgagctgcatctgcaaagtatcccagcaaa

SEQ ID NO: 87450 - DNA, 599 bp, Chicken  19866894389231_1
  misc_feature (1)..(49): n is any nucleotide
nnnnnnnnnnnnnnnnnnnnnnnnnnnnnnnnnnnnnnnnnnnnnnnnntaagttaacagcagtacaattatgaaaccaaatgtatttgtcttagaattatcctccatagaagtatacagccaagtgacaactgctttcttagatgacatagccttcatagaagaacaagtttgcccaacagctatcaacctcaagggttgcgaaagctttcattttaagagaggttattcttaggtgctcgtaaagacattaacgtttactgcatcggctgaaatttgttcttcatgcttacatgcctrtatccatctctgtcacacagcaattgcacggaggatatgcagagcatcaagtaaaaccattagccacctttaacacagctcaggaacacagggatctaagagcaaaactgckgcatttaaatataaagcggtgttctaaaacattatcaccaaagtgtatggaataaggatcttcatagctcagataggatacttgtattgaaactacagaaatcaccactgatttgaacatatttgaatcatagaaccatagaatggcctgggttgaaaaggaccacaatgatcatctagtttcaagc

SEQ ID NO: 87451 - DNA, 523 bp, Chicken  19866894389231_2
taagttaacagcagtacaattatgaaaccaaatgtatttgtcttagaattatcctccatagaagtatacagccaagtgacaactgctttcttagatgacatagccttcatagaagaacaagtttgcccaacagctatcaacctcaagggttgcgaaagctttcattttaagagaggttattcttaggtgctcgtaaagacattaacgtttactgcatcggctgaaatttgttcttcatgcttacatgcctrtatccatctctgtcacacagcaattgcacggaggatatgcagagcatckgcatttaaatataaagcggtgttctaaaacattatcaccaaagtgtatggaataaggatcttcatagctcagataggatacttgtattgaaactacagaaatcaccactgatttgaacatatttgaatcatagaaccatagaatggcctgggttgaaaaggaccacaatgatcatctagtttcaagcccactgctacgtacagggtcgccaaccagcagacca

SEQ ID NO: 87452 - DNA, 600 bp, Chicken  19866894389234_1
ctgcctgctagttttcaagacactgagtaccaggaaaagcaatttctgcacaagaaacagctgcacctaaaagtacagttagaaaggaagttcttttgctgatgccaaaggaatgcctaaaaagccactcctcaaagcgctcccaaaagaagcacgagaagtgtattagttcacacaatggaaagaatgaggacttgaacctcacccagaaggatggcaggacagacttcctctggaatatgatggatggagactgcagagcacaggagtggctcactttgcaccagcagcccctgccayggtgcaatgttgcaatgatgcagcacagagcaaacagcagcaggagccgtggtacccatttgtgcaatggagctgaccttcctgggcatctcatgccacgatcacatcacagcacagcatcctatactgactacagataaaaccacagaatgaagtctccaaggtgggaatgcttgaataatatgcatctatcatgctgtatttttggaagttaatgatggtgtataacagcgctattaagaaaagctctgaaaataccaaatatttatgagcaggcagatcagcatttctattatggga

SEQ ID NO: 87453 - DNA, 600 bp, Chicken  19866894389234_2
tatgggatctgtcacacggattcatcatgaatcacttggatcctacacagtttatgcagctgtcagagctgcagtcatgacagccccggcgccacaaaccattgccttcttttaagatgcatccattatctgccatttttcaatcaccaaagaatcaacaaaattgcattatacatcattacaaggacatgcagctgtaacctcagaatcaacaatttcagtggtaggaagtgacctcccatctccttccctggaagaaagagagcaccaaaggcagccgacagcagcactccctgcccrtagaacacacatcacaaatagccccttctctaaatttccctcttggtagataccacattaacgagtccratcccgtgacgtcccagctcagcttcccactcatgagaacaaaaatagaaactacaaagcacttccaagggtcaagtccaagtgagaacacagctaaccgctctgcatctcaaatatgacattaggaacagagtccacagggaagcctgggcttgcagaacacagacaggtccatcccctcaagaggtagcacaggaatcagagcagaaaatgaaacagcacgagaagatg

SEQ ID NO: 87454 - DNA, 600 bp, Chicken  19866894389234_3
tgcagtcatgacagccccggcgccacaaaccattgccttcttttaagatgcatccattatctgccatttttcaatcaccaaagaatcaacaaaattgcattatacatcattacaaggacatgcagctgtaacctcagaatcaacaatttcagtggtaggaagtgacctcccatctccttccctggaagaaagagagcaccaaaggcagccgacagcagcactccctgcccrtagaacacacatcacaaatagccccttctctaaatttccctcttggtagataccacattaacgagtccratcccgtgacgtcccagctcagcttcccactcatgagaacaaaaatagaaactacaaagcacttccaagggtcaagtccaagtgagaacacagctaaccgctctgcatctcaaatatgacattaggaacagagtccacagggaagcctgggcttgcagaacacagacaggtccatcccctcaagaggtagcacaggaatcagagcagaaaatgaaacagcacgagaagatgtttttctctcaaggaaaccctgccaggaaggccaaaccaaaagttacacattagatctgttttctacag

SEQ ID NO: 87455 - DNA, 600 bp, Chicken  19866894389234_4
tccaagggtcaagtccaagtgagaacacagctaaccgctctgcatctcaaatatgacattaggaacagagtccacagggaagcctgggcttgcagaacacagacaggtccatcccctcaagaggtagcacaggaatcagagcagaaaatgaaacagcacgagaagatgtttttctctcaaggaaaccctgccaggaaggccaaaccaaaagttacacattagatctgttttctacagctttaccaagagtgtaacattaaggctgcaaggcacagggcaactgaagtcaggaggaaatcygcctctcctgcagctttccccrgctcaccttccaaggaggacagctggaagcagcccagtgcaggtactcaccgctgctttgttgtcacagcacagcctgacatggctccacgtccacatccagctctgtcccagtggtaagcaactctatctttcactgctggaaacaattcaacacatccactgtttctgaacacaattatttattacgttattttcgggatccaggaaaggccgggccttaattacaacaacatgtgcagggggtgggttcccaatcactggcttctcaaggaggct

SEQ ID NO: 87456 - DNA, 600 bp, Chicken  19866894389234_5
gaacacagctaaccgctctgcatctcaaatatgacattaggaacagagtccacagggaagcctgggcttgcagaacacagacaggtccatcccctcaagaggtagcacaggaatcagagcagaaaatgaaacagcacgagaagatgtttttctctcaaggaaaccctgccaggaaggccaaaccaaaagttacacattagatctgttttctacagctttaccaagagtgtaacattaaggctgcaaggcacagggcaactgaagtcaggaggaaatcygcctctcctgcagctttccccrgctcaccttccaaggaggacagctggaagcagcccagtgcaggtactcaccgctgctttgttgtcacagcacagcctgacatggctccacgtccacatccagctctgtcccagtggtaagcaactctatctttcactgctggaaacaattcaacacatccactgtttctgaacacaattatttattacgttattttcgggatccaggaaaggccgggccttaattacaacaacatgtgcagggggtgggttcccaatcactggcttctcaaggaggctccacttctccaagaaaacattt

SEQ ID NO: 87457 - DNA, 599 bp, Chicken  19866894389235_1
  misc_feature (1)..(247): n is any nucleotide
nnnnnnnnnnnnnnnnnnnnnnnnnnnnnnnnnnnnnnnnnnnnnnnnnnnnnnnnnnnnnnnnnnnnnnnnnnnnnnnnnnnnnnnnnnnnnnnnnnnnnnnnnnnnnnnnnnnnnnnnnnnnnnnnnnnnnnnnnnnnnnnnnnnnnnnnnnnnnnnnnnnnnnnnnnnnnnnnnnnnnnnnnnnnnnnnnnnnnnnnnnnnnnnnnnnnnnnnnnnnnnnnnnnnnnnnnnnnnnnnnnnnnnncctctctcaccacagctgcacaattcagtcctacacacagaggccccacgggsgggggggttggaccactgtccagctggggyggtgtttcagctgcttgccttgcatagagaggagccacaggagcccatcacagccaaatgctcaatgaagagcagagcaatactgcatcacatttagcagcctgctgctgggctcgctgcagaagtggctgagtacaacagctcggcatggccgatgtgacgcaaaaatggtgagggtaattgctttttgccatctcactcgtcaaacatcacggtgaggctgaaggtcctcattcwcgcatgcagacaygctgttcccattgccctgt

SEQ ID NO: 87458 - DNA, 599 bp, Chicken  19866894389235_2
  misc_feature (1)..(217): n is any nucleotide
nnnnnnnnnnnnnnnnnnnnnnnnnnnnnnnnnnnnnnnnnnnnnnnnnnnnnnnnnnnnnnnnnnnnnnnnnnnnnnnnnnnnnnnnnnnnnnnnnnnnnnnnnnnnnnnnnnnnnnnnnnnnnnnnnnnnnnnnnnnnnnnnnnnnnnnnnnnnnnnnnnnnnnnnnnnnnnnnnnnnnnnnnnnnnnnnnnnnnnnnnnnnnnnnnnnnnnnnncctctctcaccacagctgcacaattcagtcctacacacagaggccccacgggsgggggggttggaccactgtccagctggggyggtgtttcagctgcttgccttgcatagagaggagccacaggagcccatcacagccaaatgctcaatgaagagcagagcaatactgcatcacatttagcagcctgctgctgggctcgctgcagaagtggctgagtacaacagctcggcatggccgatgtgacgcaaaaatggtgagggtaattgctttttgccatctcactcgtcaaacatcacggtgaggctgaaggtcctcattcwcgcatgcagacaygctgttcccattgccctgtgagtcccagtggtggctgggagaggcagct

SEQ ID NO: 87459 - DNA, 600 bp, Chicken  19866894389235_3
caattcagtcctacacacagaggccccacgggsgggggggttggaccactgtccagctggggyggtgtttcagctgcttgccttgcatagagaggagccacaggagcccatcacagccaaatgctcaatgaagagcagagcaatactgcatcacatttagcagcctgctgctgggctcgctgcagaagtggctgagtacaacagctcggcatggccgatgtgacgcaaaaatggtgagggtaattgctttttgccatctcactcgtcaaacatcacggtgaggctgaaggtcctcattcwcgcatgcagacaygctgttcccattgccctgtgagtcccagtggtggctgggagaggcagctccaggttggggtgctggctgtgctgggcagcccygctcctgcctccctgcaaaggagcttgcttgcctctcctgctgcggtgcggcgcagaaacaagctgtttgctcagctggccagyctggactgagcccagctgggagctgaaagcaggctgatgcagttaggaaacagatctgtcaggaaaggttaaaggaattcactgtggcttgtttaaaacagagacgtgtggggagggagg

SEQ ID NO: 87460 - DNA, 600 bp, Chicken  19866894389235_4
cacacagaggccccacgggsgggggggttggaccactgtccagctggggyggtgtttcagctgcttgccttgcatagagaggagccacaggagcccatcacagccaaatgctcaatgaagagcagagcaatactgcatcacatttagcagcctgctgctgggctcgctgcagaagtggctgagtacaacagctcggcatggccgatgtgacgcaaaaatggtgagggtaattgctttttgccatctcactcgtcaaacatcacggtgaggctgaaggtcctcattcwcgcatgcagacaygctgttcccattgccctgtgagtcccagtggtggctgggagaggcagctccaggttggggtgctggctgtgctgggcagcccygctcctgcctccctgcaaaggagcttgcttgcctctcctgctgcggtgcggcgcagaaacaagctgtttgctcagctggccagyctggactgagcccagctgggagctgaaagcaggctgatgcagttaggaaacagatctgtcaggaaaggttaaaggaattcactgtggcttgtttaaaacagagacgtgtggggagggaggaacacggagatct

SEQ ID NO: 87461 - DNA, 600 bp, Chicken  19866894389235_5
gccacaggagcccatcacagccaaatgctcaatgaagagcagagcaatactgcatcacatttagcagcctgctgctgggctcgctgcagaagtggctgagtacaacagctcggcatggccgatgtgacgcaaaaatggtgagggtaattgctttttgccatctcactcgtcaaacatcacggtgaggctgaaggtcctcattcwcgcatgcagacaygctgttcccattgccctgtgagtcccagtggtggctgggagaggcagctccaggttggggtgctggctgtgctgggcagcccygctcctgcctccctgcaaaggagcttgcttgcctctcctgctgcggtgcggcgcagaaacaagctgtttgctcagctggccagyctggactgagcccagctgggagctgaaagcaggctgatgcagttaggaaacagatctgtcaggaaaggttaaaggaattcactgtggcttgtttaaaacagagacgtgtggggagggaggaacacggagatcttgcagcatctgaaggcggttgagaaaagggcagtggtcggttgtgctgcaggtctgtgatgtcactgatcgattcccagcagg

SEQ ID NO: 87462 - DNA, 600 bp, Chicken  19866894389235_6
tgcagaagtggctgagtacaacagctcggcatggccgatgtgacgcaaaaatggtgagggtaattgctttttgccatctcactcgtcaaacatcacggtgaggctgaaggtcctcattcwcgcatgcagacaygctgttcccattgccctgtgagtcccagtggtggctgggagaggcagctccaggttggggtgctggctgtgctgggcagcccygctcctgcctccctgcaaaggagcttgcttgcctctcctgctgcggtgcggcgcagaaacaagctgtttgctcagctggccagyctggactgagcccagctgggagctgaaagcaggctgatgcagttaggaaacagatctgtcaggaaaggttaaaggaattcactgtggcttgtttaaaacagagacgtgtggggagggaggaacacggagatcttgcagcatctgaaggcggttgagaaaagggcagtggtcggttgtgctgcaggtctgtgatgtcactgatcgattcccagcaggaagaaaaaacagttttagggtctcccatcttaaacgccataatatttaacttcataaaatgtccgtgatttagctgtgtggtcg

SEQ ID NO: 87463 - DNA, 599 bp, Chicken  19866894389246_1
  misc_feature (1)..(105): n is any nucleotide
nnnnnnnnnnnnnnnnnnnnnnnnnnnnnnnnnnnnnnnnnnnnnnnnnnnnnnnnnnnnnnnnnnnnnnnnnnnnnnnnnnnnnnnnnnnnnnnnnnnnnnnnncagggggttcggatgccctgggaaaacaggccatggggaggcagcaggaactgggtcagatttaatggtcactgggcttgggattgagggatagttggatagcagcagctgctctgcaataggggacaaattcccataaataaaggggatccctggtccgtccccatctcgtggctggtttcccaccagtaaagycctgcagcccagccctgaggtctccgggcagccccacacccccacaagctcctgcccttcctacagcacaaagaggaaagcatagccaggagccagcaggagatgttgagggtcacacctccccatgtcccacctgctccggccgcaggcgctcctgcacccactggtactcgatgctggtgatctggtgcagcaggcagctgctgttgaactccaggctctggtacagcttgctgtacgccagccactgcctggggatttggggagaggctggggtgagccccgaggggataacaaag

SEQ ID NO: 87464 - DNA, 599 bp, Chicken  19866894389250_1
  misc_feature (1)..(73): n is any nucleotide
nnnnnnnnnnnnnnnnnnnnnnnnnnnnnnnnnnnnnnnnnnnnnnnnnnnnnnnnnnnnnnnnnnnnnnnnntagatggggctttcagcaatctagcctagtgggaggtgtcccttcctgtagtagtggggttggaactagatgatcttggaggtcccttccatcccaagctattctatgattctgtgattctatatttaacgatattgtctctgtcttaggagatcaacctttaaaaggtacttggtgctacaaaacttttagtgtcaactgttttgaatacagatgggttactttcrctgctgcagccataaaggctttttaaaagtacagttattttcttgtcagtagggaaagaggcaaaattactagggcagacaatatctgaatagtcctctggaaaaacctaactttcaccgtggacacttgggggaagataaaatgactacatttgcaactttggtgcatctctcaggaatctggagttggatggaatgactccaagacacatgcttctcacattttaaaagggctgtttaaaagcctgaggcaagctggctactaaaatgtgttccaaagctggatgtgtaaaattaga

SEQ ID NO: 87465 - DNA, 599 bp, Chicken  19866894389257_1
  misc_feature (1)..(24): n is any nucleotide
nnnnnnnnnnnnnnnnnnnnnnnntgggaagaagccctttcttctattctctcctcatttaatacatagctttgaaccttttttattccaacatttcaaaatatccaaataggaagacagaatggctaactgacctgtgactctctctcattcatcactacaatggagtgcttccccaagtcacttgcatttgtatgtccacagaaataaatgacatgatctgttttctgtgtatagagagaagagacgtgaagattaagattaaaaatcttgactgagtttagatgtccaatctgaagyttcatgacttgttttctgactatttagcatcccatgttttaatatttaaaattcgtttgcctctggcttctgctctgtgtgctctgaactcctgcaactcatgcctccaagggacctagctaagcactcagcaagcttgtgacctcctttctaaactggttgaaatgacttgcttacctgcacaaaacagctctctgggagaggtaggaatagaatgcaaatcacaagagcaatactaagtggctttggcatgttctttcttgtgatcctgtcttactttatcacttttagttttgcaa

SEQ ID NO: 87466 - DNA, 600 bp, Chicken  19866894389257_2
tcctttctaaactggttgaaatgacttgcttacctgcacaaaacagctctctgggagaggtaggaatagaatgcaaatcacaagagcaatactaagtggctttggcatgttctttcttgtgatcctgtcttactttatcacttttagttttgcaaattaggtaatgttgttagagatgtttcctatgctgtatgttcctgattcaacatcacagcaaatctgtcttgttgaatgaataagaacttctggggaggaaaaaaagaaaaaacaaaacaaacaaaaaacccactgacaaaaacraacagccatcctgtgataatgtaggtagcccctgctgccttatacatgcagcacatckttgaaataaggttgcatttcctgtsttttagatacttggctttgcaatcgtactaatactcttggtgtagagaagatgggaagacaacagtgtaactttacgcattgcacaatgcayaactttacaagtttcaaagcagaaaaagaaacctatrccttatctaaataacgtgacattacattgaagytcacgagtcagagaagcagtgaaatcacaagtctgacccctcagacatctgccgc

SEQ ID NO: 87467 - DNA, 600 bp, Chicken  19866894389257_3
ggtaggaatagaatgcaaatcacaagagcaatactaagtggctttggcatgttctttcttgtgatcctgtcttactttatcacttttagttttgcaaattaggtaatgttgttagagatgtttcctatgctgtatgttcctgattcaacatcacagcaaatctgtcttgttgaatgaataagaacttctggggaggaaaaaaagaaaaaacaaaacaaacaaaaaacccactgacaaaaacraacagccatcctgtgataatgtaggtagcccctgctgccttatacatgcagcacatckttgaaataaggttgcatttcctgtsttttagatacttggctttgcaatcgtactaatactcttggtgtagagaagatgggaagacaacagtgtaactttacgcattgcacaatgcayaactttacaagtttcaaagcagaaaaagaaacctatrccttatctaaataacgtgacattacattgaagytcacgagtcagagaagcagtgaaatcacaagtctgacccctcagacatctgccgctagaaactaatgaagtaagagcagatgacaacagcacaggagatgtgaggtgtacaga

SEQ ID NO: 87468 - DNA, 600 bp, Chicken  19866894389257_4
gagcaatactaagtggctttggcatgttctttcttgtgatcctgtcttactttatcacttttagttttgcaaattaggtaatgttgttagagatgtttcctatgctgtatgttcctgattcaacatcacagcaaatctgtcttgttgaatgaataagaacttctggggaggaaaaaaagaaaaaacaaaacaaacaaaaaacccactgacaaaaacraacagccatcctgtgataatgtaggtagcccctgctgccttatacatgcagcacatckttgaaataaggttgcatttcctgtsttttagatacttggctttgcaatcgtactaatactcttggtgtagagaagatgggaagacaacagtgtaactttacgcattgcacaatgcayaactttacaagtttcaaagcagaaaaagaaacctatrccttatctaaataacgtgacattacattgaagytcacgagtcagagaagcagtgaaatcacaagtctgacccctcagacatctgccgctagaaactaatgaagtaagagcagatgacaacagcacaggagatgtgaggtgtacagatagcatggctcctgtgtcttctatt

SEQ ID NO: 87469 - DNA, 600 bp, Chicken  19866894389257_5
atgtttcctatgctgtatgttcctgattcaacatcacagcaaatctgtcttgttgaatgaataagaacttctggggaggaaaaaaagaaaaaacaaaacaaacaaaaaacccactgacaaaaacraacagccatcctgtgataatgtaggtagcccctgctgccttatacatgcagcacatckttgaaataaggttgcatttcctgtsttttagatacttggctttgcaatcgtactaatactcttggtgtagagaagatgggaagacaacagtgtaactttacgcattgcacaatgcayaactttacaagtttcaaagcagaaaaagaaacctatrccttatctaaataacgtgacattacattgaagytcacgagtcagagaagcagtgaaatcacaagtctgacccctcagacatctgccgctagaaactaatgaagtaagagcagatgacaacagcacaggagatgtgaggtgtacagatagcatggctcctgtgtcttctatttagtcccaggcagctgattccatagtacctcaacacagatctaattatcttgaccacttaagtgttccttttcttttgaaaacagtgtttga

SEQ ID NO: 87470 - DNA, 600 bp, Chicken  19866894389257_6
agcaaatctgtcttgttgaatgaataagaacttctggggaggaaaaaaagaaaaaacaaaacaaacaaaaaacccactgacaaaaacraacagccatcctgtgataatgtaggtagcccctgctgccttatacatgcagcacatckttgaaataaggttgcatttcctgtsttttagatacttggctttgcaatcgtactaatactcttggtgtagagaagatgggaagacaacagtgtaactttacgcattgcacaatgcayaactttacaagtttcaaagcagaaaaagaaacctatrccttatctaaataacgtgacattacattgaagytcacgagtcagagaagcagtgaaatcacaagtctgacccctcagacatctgccgctagaaactaatgaagtaagagcagatgacaacagcacaggagatgtgaggtgtacagatagcatggctcctgtgtcttctatttagtcccaggcagctgattccatagtacctcaacacagatctaattatcttgaccacttaagtgttccttttcttttgaaaacagtgtttgactcagcctctgagtgacctccagtcacactgtctccc

SEQ ID NO: 87471 - DNA, 600 bp, Chicken  19866894389257_7
ctggggaggaaaaaaagaaaaaacaaaacaaacaaaaaacccactgacaaaaacraacagccatcctgtgataatgtaggtagcccctgctgccttatacatgcagcacatckttgaaataaggttgcatttcctgtsttttagatacttggctttgcaatcgtactaatactcttggtgtagagaagatgggaagacaacagtgtaactttacgcattgcacaatgcayaactttacaagtttcaaagcagaaaaagaaacctatrccttatctaaataacgtgacattacattgaagytcacgagtcagagaagcagtgaaatcacaagtctgacccctcagacatctgccgctagaaactaatgaagtaagagcagatgacaacagcacaggagatgtgaggtgtacagatagcatggctcctgtgtcttctatttagtcccaggcagctgattccatagtacctcaacacagatctaattatcttgaccacttaagtgttccttttcttttgaaaacagtgtttgactcagcctctgagtgacctccagtcacactgtctcccaaaatgctggaaaattccccttttatcttcatt

SEQ ID NO: 87472 - DNA, 600 bp, Chicken  19866894389270_1
aggagggtttctgttatgtgtcactgaatcctatacaggaccgtccataggtgaccagtgtgcagctgcaccacgtcagatgctagttgcaaagttattgaaatactctctgttgtgagtttattccaaatgtatgattactattttcttatacactggtggagtgttggaagttgaacaaacagaatgcttgtaaaggtttgcagtcaacccagctgggaaaatatgctctgtatgaagaatttgcacacaattacttgggtaaaagagggaaggtagtcaggtgctgtctcaaaaaaygaggtcaaacaatggactggctgatctgtgttctgtggaggatcagaaagacctcaaacctgatgatctgttctaatcccagaataccttttatatcaccctaaatttactccagtattcactaactacatatgyacgagattgttcacactcagtctgtggaggaagctgaaagtgtggggctccaaatgccaatctgtgtcagaaaaatatgaattttggttatgcttgtgacagtcagccaaacaattatgttttccttaaaaccccacatatgtctgaacaaagtaaaactaactc

SEQ ID NO: 87473 - DNA, 600 bp, Chicken  19866894389270_2
gattactattttcttatacactggtggagtgttggaagttgaacaaacagaatgcttgtaaaggtttgcagtcaacccagctgggaaaatatgctctgtatgaagaatttgcacacaattacttgggtaaaagagggaaggtagtcaggtgctgtctcaaaaaaygaggtcaaacaatggactggctgatctgtgttctgtggaggatcagaaagacctcaaacctgatgatctgttctaatcccagaataccttttatatcaccctaaatttactccagtattcactaactacatatgyacgagattgttcacactcagtctgtggaggaagctgaaagtgtggggctccaaatgccaatctgtgtcagaaaaatatgaattttggttatgcttgtgacagtcagccaaacaattatgttttccttaaaaccccacatatgtctgaacaaagtaaaactaactcttatttaatcttcaagcttctaattaaatccgattaaaccagaataccacatattaaatatctgaatctgcatcacctacagcctccagtaaaatcttggaaggaagccaaaaccagaaaagccataattttcat

SEQ ID NO: 87474 - DNA, 600 bp, Chicken  19866894389276_1
gttcctgcacccagagagatctatcctgaaatatgatctctccagtagtgagtttggaggagggtgttcaggattgttaagataactggtttagttaaagtggctgagtacatccaaaaataatctatagcacagagaatgcttctggtcacggacagccattcccacacggtgtcacgggatcgccgtagtgcatcgctggcatttggcagggagaggaggcacacatcacggcttcccctttgctaacggaatggaggaaattgctttacagcgctgagcttgggcctctgagccctygctgttggagctctatgttgtgccagtaagcaccttgaaaacactgcaaaaatctaggatggagttgccaagatggtaaatgggaacaggaggtgatgccacttgttcaaggctacagaggaacttggtgattacagagtgctcgcttgagatttcctacatgctatggtctttgccttgtgcactgttgtggagcctaaggcctttcagaggctattgatttggggccatgcttttaaagctacagacaggcagttctgcagatatcattatgcacctactcgagcctatggattgttc

SEQ ID NO: 87475 - DNA, 600 bp, Chicken  19866894389284_1
tttgtagagtatttgcatgagaagagctcagctcggctggtagtggcaggcctgggaatctgtggggaaactcttcagagcttacctatggggacattatatatggaaatcataatattattatagcttataaaaagcacttacattagggtggcacccacttgttctgctctacatttatgtatgcaaataagtgacagagcatttgcagtttgcaactgagaaacattattttctcctttaatctgagtttgtgttcatttcctgttatgatctacctgtggcagaagttcagattgyggtatttgaatggagttttaagcaccttcaatgttttttagcaatactgacatgcctgcactggcaaacagacattgcaracagtctggactccctttatactggtagaaaagtgcatttgctggtttcttttgtatggttctgggttagaaacagtccatagcccttgggatattttaccttgcatttgtacggggcttttctcagcacagaaaactagaagtccagcagatgctgttatgctggcaaaagcttaatgtgtcagcctctattttcttcaaaaattcttgcatttcaaaa

SEQ ID NO: 87476 - DNA, 600 bp, Chicken  19866894389284_2
cttacctatggggacattatatatggaaatcataatattattatagcttataaaaagcacttacattagggtggcacccacttgttctgctctacatttatgtatgcaaataagtgacagagcatttgcagtttgcaactgagaaacattattttctcctttaatctgagtttgtgttcatttcctgttatgatctacctgtggcagaagttcagattgyggtatttgaatggagttttaagcaccttcaatgttttttagcaatactgacatgcctgcactggcaaacagacattgcaracagtctggactccctttatactggtagaaaagtgcatttgctggtttcttttgtatggttctgggttagaaacagtccatagcccttgggatattttaccttgcatttgtacggggcttttctcagcacagaaaactagaagtccagcagatgctgttatgctggcaaaagcttaatgtgtcagcctctattttcttcaaaaattcttgcatttcaaaaaacatttgtccagccctctctcctgctaatgcatagcagaaggttcggtgatggattggtttgtctaggtgcttgttacg

SEQ ID NO: 87477 - DNA, 600 bp, Chicken  19866894389287_1
gtgtttggatggctgcgtccagcaaacagcacacccaggccagggcagcacaggatggccaccaggagagtcccccagtccagaagtaggacccagattttcccgcttgagcccctcatttaaggagatgatgttaccttcaccattgcacagatgcctccgagattccgtggcctcaaaataaagggaaaagggagaaagaaagccaaagttagggatttatttcagcatctgccagggctgtgtggtaacgtttgtgtctgtgcacaggagcatcctggaaatccaacctcgtgctcrgggcgtgtatctcagggctgggaaagggctgggaagcagcctgcaccctcggggctggattcacctctcctgtctgaccacatcaattttcatcctgagctctgggcaaactccagcagcccggtgttggctgctccgaaaccaaccggagcaccttttggtgccaccaacccccagggatgctctccttcccttcccctgcgcaccacacacacgtgcgggacgcggcgacgctctgcggagccgcagaggtgggagggaatcccccattcctgcgatcagatgccggcagcgtcagaa

SEQ ID NO: 87478 - DNA, 559 bp, Chicken  19866894389287_2
gaaggtctgagacacagcgtctctctgaaccaacttcaaaaccctcctccgacgggtggaaatttgggaggatgggatggggctctggggtgccgggcgcctcgtgccagcctgggaccgggaaactggggcagcacggaggggctcccgcagcattcaattaatttccatccccactttgctcggcaggaggctgttctgctccacgtgcaggcagccctgcgtggcggctgctcccttctgcaggtgaccgcgggacatcgaccgggcacgcagagctaagcaggcagcagtgatccrcagccacggtcccctcggcaggcacgggggggggtcttgcagccggyggggagcggagcgtgttcccggccctgcatcgcctaatggggctcagcaggcagagcacaggctctgagggacgcgggagggatggtggcgtgtttgtcacagctgctgtcgaggaagggagggagcagggagctttccttggggatgctcgggatctcagtgttctgcttgcctggctgctggcagaggggcgcagaggcaccggacacat

SEQ ID NO: 87479 - DNA, 512 bp, Chicken  19866894389287_3
tccgacgggtggaaatttgggaggatgggatggggctctggggtgccgggcgcctcgtgccagcctgggaccgggaaactggggcagcacggaggggctcccgcagcattcaattaatttccatccccactttgctcggcaggaggctgttctgctccacgtgcaggcagccctgcgtggcggctgctcccttctgcaggtgaccgcgggacatcgaccgggcacgcagagctaagcaggcagcagtgatccrcagccacggtcccctcggcaggcacgggggggggtcttgcagccggyggggagcggagcgtgttcccggccctgcatcgcctaatggggctcagcaggcagagcacaggctctgagggacgcgggagggatggtggcgtgtttgtcacagctgctgtcgaggaagggagggagcagggagctttccttggggatgctcgggatctcagtgttctgcttgcctggctgctggcagaggggcgcagaggcaccggacacat

SEQ ID NO: 87480 - DNA, 600 bp, Chicken  19866894389294_1
tccctttatggggtttaggggtctctctataggatttggggtcctttatggggttttggggtctctatggggttttgtggtcccctatggggtttttgggatccctatggggatttggggtccctctatagggtttggggtccctctatagggcttggggtcctttatggggtttaggggtccctctatagggcttggggtcctttatggggttttggggtctctatggggttttgtggtcccctatggggtttttggggtccctatggggatttggggtccctctatagggtttggggyccctctatagggcttggggtcctttatggggttttggggtccctctataggatttggggtcccttatggggttttgggttctctatggggttttgtggtcccctatggggtgtttggggtccctatggggttttggggtccctctatagggcttggggtcctttatggggttttggagtccctatggggtttagggatctctctataggatttggggtcctttatggggttttggggtctctatggggttttgtggtcccctatggggttttgtggtcccctatggggtttttggggtcc

SEQ ID NO: 87481 - DNA, 600 bp, Chicken  19866894389297_1
gaaagttccctccccagaggccaaagtttccgcagacattacatattttgcaagtgaacttttcagaggctcagtgacagagcaccgcagccacaggtggacgcattcagaggtgtgggctacgcatcagcacaaacgggtgggagaatttcaggttttagtggacaaaaggtatgacagctgtgagactgcaggtcagaatttgctgctcttgtgatacaattgctgcggcaagagtcatggatcttgagcacttctatggcaacagtgaacagatccaaagcaccatgtgtaggatcrataatactagcatgagaaagcttcggttcctgagaattatttgctaggtttgttaggttacttatgcaactacaggaactttcaggaaagcacaataaacagtatttacrattaatgctttccagtagggatcctaagatggtcaataccacactaaaactttgaatctttttcattttaaaagccacgcggccaactaaaatccaaagggctgctcattttgattccaaatattctgccagtatatcctggcaaaaatcagaaacctctgcggttccaaaaggaagaaatatatgtatg

SEQ ID NO: 87482 - DNA, 600 bp, Chicken  19866894389297_2
aggtgtgggctacgcatcagcacaaacgggtgggagaatttcaggttttagtggacaaaaggtatgacagctgtgagactgcaggtcagaatttgctgctcttgtgatacaattgctgcggcaagagtcatggatcttgagcacttctatggcaacagtgaacagatccaaagcaccatgtgtaggatcrataatactagcatgagaaagcttcggttcctgagaattatttgctaggtttgttaggttacttatgcaactacaggaactttcaggaaagcacaataaacagtatttacrattaatgctttccagtagggatcctaagatggtcaataccacactaaaactttgaatctttttcattttaaaagccacgcggccaactaaaatccaaagggctgctcattttgattccaaatattctgccagtatatcctggcaaaaatcagaaacctctgcggttccaaaaggaagaaatatatgtatggattataccttcactctcagcctttttcagtattctacaagcaagtagaatatcaaagcaagaaacattytggggagaaaataaagatgaaatctctagtcaacccttcg

SEQ ID NO: 87483 - DNA, 600 bp, Chicken  19866894389297_3
tacaggaactttcaggaaagcacaataaacagtatttacrattaatgctttccagtagggatcctaagatggtcaataccacactaaaactttgaatctttttcattttaaaagccacgcggccaactaaaatccaaagggctgctcattttgattccaaatattctgccagtatatcctggcaaaaatcagaaacctctgcggttccaaaaggaagaaatatatgtatggattataccttcactctcagcctttttcagtattctacaagcaagtagaatatcaaagcaagaaacattytggggagaaaataaagatgaaatctctagtcaacccttcgttgcaatgcagttttccacctgcctcgagcttatatgagctacctgtcccaagcacgtgccaggtttgtacagtttaacatcatacagcaatcagtttctcggcactaatgatacccaaagagcagacttatctgtcaaagtttgtttggtggtttaaaagctaagggagcatttcacaaatgaaaccccagagcttaagggatccaacatttttatatttatgcaaaatgcaacttaagcattggttttcacacccaaa

SEQ ID NO: 87484 - DNA, 599 bp, Chicken  19866894389301_1
  misc_feature (1)..(263): n is any nucleotide
nnnnnnnnnnnnnnnnnnnnnnnnnnnnnnnnnnnnnnnnnnnnnnnnnnnnnnnnnnnnnnnnnnnnnnnnnnnnnnnnnnnnnnnnnnnnnnnnnnnnnnnnnnnnnnnnnnnnnnnnnnnnnnnnnnnnnnnnnnnnnnnnnnnnnnnnnnnnnnnnnnnnnnnnnnnnnnnnnnnnnnnnnnnnnnnnnnnnnnnnnnnnnnnnnnnnnnnnnnnnnnnnnnnnnnnnnnnnnnnnnnnnnnnnnnnnnnnnnnnnnnnggcaggggatcctctggctgaacgtcgctggtgctgytgttccccagcagcttgggcactggcacaaaaatgggctaaaaatccatacggagagctacggagatgctgagagccgctgtgctcccttcctgggtccagcagaggtattctggaagaagcatgctcttgactgacaaagcacagggacaaagcagctgctgaggataccaagcacaggtgagaaatggggtgtttgtgtggtttctgcacagaactggmaccyacctggttcagagatggcccagggagccctcatgtcacctcctgtattcccaacccaccttccctgctctcatc

SEQ ID NO: 87485 - DNA, 599 bp, Chicken  19866894389301_2
  misc_feature (1)..(42): n is any nucleotide
nnnnnnnnnnnnnnnnnnnnnnnnnnnnnnnnnnnnnnnnnnggcaggggatcctctggctgaacgtcgctggtgctgytgttccccagcagcttgggcactggcacaaaaatgggctaaaaatccatacggagagctacggagatgctgagagccgctgtgctcccttcctgggtccagcagaggtattctggaagaagcatgctcttgactgacaaagcacagggacaaagcagctgctgaggataccaagcacaggtgagaaatggggtgtttgtgtggtttctgcacagaactggmaccyacctggttcagagatggcccagggagccctcatgtcacctcctgtattcccaacccaccttccctgctctcatccctgcttgccttacccatgcatccccttcgtcgcctacagagcatccccttgttttctcttttgcagtctttcatcaagtccttcatctggatgctacatagagtgatgtatgctctattcagaggttgcctgaggaggctgtggatgccccatycctgcaggcattcaaggccaggctggatgtggctctgggcagcctgggctggtggttggcgacccc

SEQ ID NO: 87486 - DNA, 599 bp, Chicken  19866894389301_3
  misc_feature (1)..(38): n is any nucleotide
nnnnnnnnnnnnnnnnnnnnnnnnnnnnnnnnnnnnnnggcaggggatcctctggctgaacgtcgctggtgctgytgttccccagcagcttgggcactggcacaaaaatgggctaaaaatccatacggagagctacggagatgctgagagccgctgtgctcccttcctgggtccagcagaggtattctggaagaagcatgctcttgactgacaaagcacagggacaaagcagctgctgaggataccaagcacaggtgagaaatggggtgtttgtgtggtttctgcacagaactggmaccyacctggttcagagatggcccagggagccctcatgtcacctcctgtattcccaacccaccttccctgctctcatccctgcttgccttacccatgcatccccttcgtcgcctacagagcatccccttgttttctcttttgcagtctttcatcaagtccttcatctggatgctacatagagtgatgtatgctctattcagaggttgcctgaggaggctgtggatgccccatycctgcaggcattcaaggccaggctggatgtggctctgggcagcctgggctggtggttggcgaccccgcac

SEQ ID NO: 87487 - DNA, 600 bp, Chicken  19866894389301_4
cagctgctgaggataccaagcacaggtgagaaatggggtgtttgtgtggtttctgcacagaactggmaccyacctggttcagagatggcccagggagccctcatgtcacctcctgtattcccaacccaccttccctgctctcatccctgcttgccttacccatgcatccccttcgtcgcctacagagcatccccttgttttctcttttgcagtctttcatcaagtccttcatctggatgctacatagagtgatgtatgctctattcagaggttgcctgaggaggctgtggatgccccatycctgcaggcattcaaggccaggctggatgtggctctgggcagcctgggctggtggttggcgaccccgcacatagcaggggggtagaaactggatggtcattgtggtccttttcaacccaggccattctatgattccatgattctattcctgctgttctttctgacatcagcgtttgccattctgggacatggtttgtatggaaatcccaaatctggagatgctacagactggttccagctttcctctgctttcctctcagccttcactttaatgaccataagcgctgcagcattttccag

SEQ ID NO: 87488 - DNA, 600 bp, Chicken  19866894389304_1
atagaattgttaagtaaataggagactcacccgacttgacttgtctcctgtcttggcaccagcttctgcacctacatacagtaagtcaaagttatttgaataacccattctggatcaagccttgactaccctgtgttctatattaacaagaaacaagataaatagttctctgtgtgctggaccttatgaacctgtatgaaatgtgttttggctcatttctgggtccatttgaaatcttcttggaagttgaagtatttataagatattttctctttcccatgcagtctctaagggctaatygtgatgaaggatttctctcaaataaaatgcttaacaggaatctgctctttgcctggcctgtttttgtagaggttaaaagatcttaattttctttgggatttttatgagtctgttaactttattgacgctagttaactagttcagaagtcactggggatagtagaagcattcgtgtacacagagattgagaatttcaaagtctaatttcttggaaaaaaagactagaagtgttccccaaagaacttaaaaattaatcgaagaagagtaattttatcaggagtaaaatctttcytagtgtta

SEQ ID NO: 87489 - DNA, 600 bp, Chicken  19866894389304_2
ggctaatygtgatgaaggatttctctcaaataaaatgcttaacaggaatctgctctttgcctggcctgtttttgtagaggttaaaagatcttaattttctttgggatttttatgagtctgttaactttattgacgctagttaactagttcagaagtcactggggatagtagaagcattcgtgtacacagagattgagaatttcaaagtctaatttcttggaaaaaaagactagaagtgttccccaaagaacttaaaaattaatcgaagaagagtaattttatcaggagtaaaatctttcytagtgttacagtcctgtttcttccaagtaggatattttttcatcagactttgtaaccaatttccaccaaacttaagtaggtagaagccaactcagtgccaatactgcgtcatggttcttcttacccagttactgtctgggcagctacatctcagtgtgtgggatatttcgcaagagacaaaggtgataaagaagttctattgcttcatttgtaagccatgcttttcatgggttagctagagtaaatcatgctgaagacaaaagatttcctctattttaaaacctttcagatctcctcaca

SEQ ID NO: 87490 - DNA, 600 bp, Chicken  19866894389308_1
gtcttgcttttatggcagaaaaaggaaaagaaaagatctgctgtaataaacaatcatcactttttcaatttcaatgtgtcaatagattttggtaaatcagcatttacactgaaaatattttaatactgggaaaaacagattttgtaatcagtgtttctgattaattccttcttcagaaatatattctgataatagcaactactcataataaaacccagaaaaggctttcatttactgtggcatgggaagtcctgccagttataaatgctctacatagtttctttacaattgttatgttcwttaagcctcaacaaaaaccaaagctcctcttccaggtttggtagcaaagagaccattattctccagtgctaacctttggccatcattttggtaataagcttttttaacattttttaggaaagtattcagcttgtcagtaggcaccattgacacagtgcagccgccccatccagctccagtcagacgtgacccgatggccccaaattgcctaaaacaaaataatagaaaaaataatgaaaaataaactagaaggggataatttgtcatatataaaattcctacagaaaattagtgaatact

SEQ ID NO: 87491 - DNA, 600 bp, Chicken  19866894389313_1
gtggatgagcaaacagtgaggtggattgagaactgtctgacagagcttagggggttgtgatcagcagggcagaactagttggaagcctgtagctaatgatgttcctcaggagttggtgctgggtccagtcttcatcagtgacttggatgaagggatagaatgcacattcagcaagtttgctgttggtagaagctggaaggagaggctgacacaccagaaggctatgcagctgcttagtgagacctggacaggctggagagctgggcacagaggaacctgataaggttcagcaagggcaartgtggagtcctayacgtggggaggaataactgcatgcattagtacaggttaggggctgacctgctggataggagctctgcagaaaataacttttttctgcctggagaggtggtggagtctccttccttggagacagtcaaaaccctcctggatgctttcctgtgtagcaggggagttgggccagaggtgccttccaacctctgtgcttctttgattctgagtgtgtggtgaagagtccagtgaatacaggaaagttttcctgagctgtagccagaccctgttgggaaccttgcatccaac

SEQ ID NO: 87492 - DNA, 600 bp, Chicken  19866894389313_2
cagtgaggtggattgagaactgtctgacagagcttagggggttgtgatcagcagggcagaactagttggaagcctgtagctaatgatgttcctcaggagttggtgctgggtccagtcttcatcagtgacttggatgaagggatagaatgcacattcagcaagtttgctgttggtagaagctggaaggagaggctgacacaccagaaggctatgcagctgcttagtgagacctggacaggctggagagctgggcacagaggaacctgataaggttcagcaagggcaartgtggagtcctayacgtggggaggaataactgcatgcattagtacaggttaggggctgacctgctggataggagctctgcagaaaataacttttttctgcctggagaggtggtggagtctccttccttggagacagtcaaaaccctcctggatgctttcctgtgtagcaggggagttgggccagaggtgccttccaacctctgtgcttctttgattctgagtgtgtggtgaagagtccagtgaatacaggaaagttttcctgagctgtagccagaccctgttgggaaccttgcatccaactgagactgtgtgc

SEQ ID NO: 87493 - DNA, 600 bp, Chicken  19866894389326_1
tgaactaaacagcttctatgcaactggggggaaatacaatgaaagacaaagctgctggggtactgctgctcagaatcaccaaggtaaacaacaacttctaagtcttgagcacatactgctgttacaggtacagcaaggacagcaataaaccacctaaagatccatcagtcccttcccatgctcctctactataaaggtcatagagaaactacagacaagccattgtccagaggcaggagtaccaccagcaagaggaaaggagcaatggcatcacttcccagattgctccaaccatggttrctccaaccagtgtgcagtaggagcayggagactgagtccatcaaggccacagcaagagccctacaggacagccatcctgttacagtgcccacacaccgcacattcctaatcagcagccctcactgatagatcttcactgctaatggtacatytgggattggccatgaagaccaatggctggctttccgagcccacactttgccaggctcaggagggctgtacatrctgtaagaaggccacgtcctccccctcctgctggtggtgagaagcctgaccctggctgggtaggaactggttgga

SEQ ID NO: 87494 - DNA, 600 bp, Chicken  19866894389326_2
gggggaaatacaatgaaagacaaagctgctggggtactgctgctcagaatcaccaaggtaaacaacaacttctaagtcttgagcacatactgctgttacaggtacagcaaggacagcaataaaccacctaaagatccatcagtcccttcccatgctcctctactataaaggtcatagagaaactacagacaagccattgtccagaggcaggagtaccaccagcaagaggaaaggagcaatggcatcacttcccagattgctccaaccatggttrctccaaccagtgtgcagtaggagcayggagactgagtccatcaaggccacagcaagagccctacaggacagccatcctgttacagtgcccacacaccgcacattcctaatcagcagccctcactgatagatcttcactgctaatggtacatytgggattggccatgaagaccaatggctggctttccgagcccacactttgccaggctcaggagggctgtacatrctgtaagaaggccacgtcctccccctcctgctggtggtgagaagcctgaccctggctgggtaggaactggttggagcaacaagtcccaggggactgccagt

SEQ ID NO: 87495 - DNA, 600 bp, Chicken  19866894389326_3
cctaaagatccatcagtcccttcccatgctcctctactataaaggtcatagagaaactacagacaagccattgtccagaggcaggagtaccaccagcaagaggaaaggagcaatggcatcacttcccagattgctccaaccatggttrctccaaccagtgtgcagtaggagcayggagactgagtccatcaaggccacagcaagagccctacaggacagccatcctgttacagtgcccacacaccgcacattcctaatcagcagccctcactgatagatcttcactgctaatggtacatytgggattggccatgaagaccaatggctggctttccgagcccacactttgccaggctcaggagggctgtacatrctgtaagaaggccacgtcctccccctcctgctggtggtgagaagcctgaccctggctgggtaggaactggttggagcaacaagtcccaggggactgccagtagtggcagctattcacagaacagatcagccggagcgccctttgtctgcctatttatgccgactggatctgtccttcagctagtataaatctgcccagagctactgcctttttgcagtccttgccag

SEQ ID NO: 87496 - DNA, 600 bp, Chicken  19866894389326_4
tccagaggcaggagtaccaccagcaagaggaaaggagcaatggcatcacttcccagattgctccaaccatggttrctccaaccagtgtgcagtaggagcayggagactgagtccatcaaggccacagcaagagccctacaggacagccatcctgttacagtgcccacacaccgcacattcctaatcagcagccctcactgatagatcttcactgctaatggtacatytgggattggccatgaagaccaatggctggctttccgagcccacactttgccaggctcaggagggctgtacatrctgtaagaaggccacgtcctccccctcctgctggtggtgagaagcctgaccctggctgggtaggaactggttggagcaacaagtcccaggggactgccagtagtggcagctattcacagaacagatcagccggagcgccctttgtctgcctatttatgccgactggatctgtccttcagctagtataaatctgcccagagctactgcctttttgcagtccttgccagcgtacaccagctgatgacttaatgctagcatcaataatctttagcacaagaaaagccctgagaaataaacaga

SEQ ID NO: 87497 - DNA, 600 bp, Chicken  19866894389331_1
gtgaaactgtttcactgtgatggttcagtctttatttcatgcacagaaaggtttagggagaagtagcatcttgcactgtggttgcatgagattagccaatagtaaatatttccaccattttcatcaattcttgtttctctatagtgttctgcttgattatacttacagacctgggagtgtacaatattacatttgttctgttttagccggaaggatttttggtattattggttaccctatctggaaaaggggatgttttctttaccaaaaaatgaccagttaaccaagaatggtagagaraacagccgttttaggtagagaactgcaaatacaaacagctgctgggtttaaacttgttcagtaagttctttgatgatactctgcatgaaactgcttaactgattgattagaaaccaatgaaaagggatcaagggaccaaaaagtgtgttgatatctgtctaaaatagagatgtctgtctaaaatttcccctatcttctatcaggattggggaaaaaaagcttcactccgacatttttgatcaaaatacagtactttaacaaaaacgataatttgtatatgtattccattttcaactcatg

SEQ ID NO: 87498 - DNA, 600 bp, Chicken  19866894389332_1
cacgaggagctgcaaaactgtacttctgaatctgcacagaattaattcctttttctgttcctgaaaaactgacgagaaaaagcaattcctcttctcattgcttacttctgcttacaatttccatctagcttatcaactattacaagaaaaaagtttcctccttcaactgagaaccatgagaattaagaatcttgctcctgtccctactgtctcagccaccatctcttcccaacaccccttggcctggggggctttgtcggggaacagtaaaggggagcgctgctcaggcagggcaagcargctggtacctgggtgtgtaagtgccagaacatacaaaggagagactggtggaggctgacggtcagtgggatggaacttctatggacgcattttctagggcgtaaaaggacacaacactcgtaagtacatccaggctggatatggtaatctagtggaaatcatacaatcagcatgtatctgatgcacacactgatgctaggacgaagcagatctttctcacaggcagcagggaaaccatttatacgtttatgtttggttttttttttttactctctgtgggacaagacttgtggaagaaac

SEQ ID NO: 87499 - DNA, 599 bp, Chicken  19866894389333_1
  misc_feature (1)..(126): n is any nucleotide
nnnnnnnnnnnnnnnnnnnnnnnnnnnnnnnnnnnnnnnnnnnnnnnnnnnnnnnnnnnnnnnnnnnnnnnnnnnnnnnnnnnnnnnnnnnnnnnnnnnnnnnnnnnnnnnnnnnnnnnnnnnnnnatcctcagttttgagctgacccatccttactgacccaggcactgacaacacgtgcataaaccatgccaagtgcttccatgcgtgctgcaagcttcccaacagagctagcgagtgcagcaagcacaccagcaccaacaggggatgctacagaagaaacttttaagggtctctgtytttcaaagcttttagcctttctcrctcaccctcagcctccctgtgcctttataaggggaaggccattcagtccggcactgagcatcacctggccgcaccaaacacccctgccccgagcacatcagcacccctcagtaagtgctatcgatgcattcaagagctctacttcagctgcacagatgttctgtgtttgcgttccatatggtaataacgctgctgcagtgtgcgttcagattggagacaaaggctggcattccctacagaccagcacagcacccagacaggtgtgtgttccatca

SEQ ID NO: 87500 - DNA, 599 bp, Chicken  19866894389333_2
  misc_feature (1)..(102): n is any nucleotide
nnnnnnnnnnnnnnnnnnnnnnnnnnnnnnnnnnnnnnnnnnnnnnnnnnnnnnnnnnnnnnnnnnnnnnnnnnnnnnnnnnnnnnnnnnnnnnnnnnnnnnatcctcagttttgagctgacccatccttactgacccaggcactgacaacacgtgcataaaccatgccaagtgcttccatgcgtgctgcaagcttcccaacagagctagcgagtgcagcaagcacaccagcaccaacaggggatgctacagaagaaacttttaagggtctctgtytttcaaagcttttagcctttctcrctcaccctcagcctccctgtgcctttataaggggaaggccattcagtccggcactgagcatcacctggccgcaccaaacacccctgccccgagcacatcagcacccctcagtaagtgctatcgatgcattcaagagctctacttcagctgcacagatgttctgtgtttgcgttccatatggtaataacgctgctgcagtgtgcgttcagattggagacaaaggctggcattccctacagaccagcacagcacccagacaggtgtgtgttccatcagctgctcccacacaaggtggaaca

SEQ ID NO: 87501 - DNA, 600 bp, Chicken  19866894389333_3
tgagcatcacctggccgcaccaaacacccctgccccgagcacatcagcacccctcagtaagtgctatcgatgcattcaagagctctacttcagctgcacagatgttctgtgtttgcgttccatatggtaataacgctgctgcagtgtgcgttcagattggagacaaaggctggcattccctacagaccagcacagcacccagacaggtgtgtgttccatcagctgctcccacacaaggtggaacagactgcttcagcaacttcatgagacaagcacaggaatgtgtcacaggtaaaatgsccactcctgacttcttgaaccagaattctgtgcccacaccctaacagcatcccagccactttccatctcaatgtgctgaatgttaataatactgaagaagttgcatagtaaagatcagcccagctttccaaatgaagctcctggtttgtttgggtggcttcttttttcattaactggagaaaaggacaacttttatgggttctttctcacaagcagcctgttctatagcaaaagcatctaagaaaagtaaatcagagtgaaaaaagctggaaactcaagatggaagttgggccattaaac

SEQ ID NO: 87502 - DNA, 600 bp, Chicken  19866894389333_4
ctcctgacttcttgaaccagaattctgtgcccacaccctaacagcatcccagccactttccatctcaatgtgctgaatgttaataatactgaagaagttgcatagtaaagatcagcccagctttccaaatgaagctcctggtttgtttgggtggcttcttttttcattaactggagaaaaggacaacttttatgggttctttctcacaagcagcctgttctatagcaaaagcatctaagaaaagtaaatcagagtgaaaaaagctggaaactcaagatggaagttgggccattaaacctyttttctaaaagaactgcatcctggcaargcttctacrtaggacagcacaacagccagacccccagggttgcactgatgcccaatgtcagcagccacgggttggcatccacagagacagcaactgctgctctgcagggggccgccccaacccctgggcacccacctgtcacagccctgcggttcattactgggcacacatgaggtaggaaaaggtgctcggtctgttcacttattcatcttctacacagctaaaaagtgttctgaaggtgcacgggagatgaacgtgatcgtcactacctc

SEQ ID NO: 87503 - DNA, 600 bp, Chicken  19866894389333_5
gcccacaccctaacagcatcccagccactttccatctcaatgtgctgaatgttaataatactgaagaagttgcatagtaaagatcagcccagctttccaaatgaagctcctggtttgtttgggtggcttcttttttcattaactggagaaaaggacaacttttatgggttctttctcacaagcagcctgttctatagcaaaagcatctaagaaaagtaaatcagagtgaaaaaagctggaaactcaagatggaagttgggccattaaacctyttttctaaaagaactgcatcctggcaargcttctacrtaggacagcacaacagccagacccccagggttgcactgatgcccaatgtcagcagccacgggttggcatccacagagacagcaactgctgctctgcagggggccgccccaacccctgggcacccacctgtcacagccctgcggttcattactgggcacacatgaggtaggaaaaggtgctcggtctgttcacttattcatcttctacacagctaaaaagtgttctgaaggtgcacgggagatgaacgtgatcgtcactacctccattttacagtcacaaaaatgctggagt

SEQ ID NO: 87504 - DNA, 600 bp, Chicken  19866894389333_6
ctaacagcatcccagccactttccatctcaatgtgctgaatgttaataatactgaagaagttgcatagtaaagatcagcccagctttccaaatgaagctcctggtttgtttgggtggcttcttttttcattaactggagaaaaggacaacttttatgggttctttctcacaagcagcctgttctatagcaaaagcatctaagaaaagtaaatcagagtgaaaaaagctggaaactcaagatggaagttgggccattaaacctyttttctaaaagaactgcatcctggcaargcttctacrtaggacagcacaacagccagacccccagggttgcactgatgcccaatgtcagcagccacgggttggcatccacagagacagcaactgctgctctgcagggggccgccccaacccctgggcacccacctgtcacagccctgcggttcattactgggcacacatgaggtaggaaaaggtgctcggtctgttcacttattcatcttctacacagctaaaaagtgttctgaaggtgcacgggagatgaacgtgatcgtcactacctccattttacagtcacaaaaatgctggagtagagaaaac

SEQ ID NO: 87505 - DNA, 600 bp, Chicken  19866894389340_1
tgtgaaaaatctgtttaccttgtagttgttctgtttcagaaaagtcctgcagaagtactcatcagactgctcttcagtcttctcttgagaggatcagctgagtccgatgttaatcagctctctaagttttggtgtgattgctgaggtaaaaggtggccagaactgttcagtattcataaacagatcactcagttcctcttactctttcactgaggagtagttacgctctgcctcagaggtggtagcatgtcaacatgctacagcctgagggttttgctggagctttaccaataatcatastctttccacagtcttgttttttcctgcctgtattaattggagtgccaggttctcattctgtcatccttcaattatagctgattggaagtgatgattgtgcaaccctgttgaagctttctgctgtcaccaagtgagggaataactatgagtatcaggaagccctgagggagtgctcttaatttaattctagcagaatcagaatttttgtttggggaagaatgggccatgtttgatctcattcttgtgtaaaacattcaggcatgcagatgtctgtggaattgcagcggatttcgaggtggt

SEQ ID NO: 87506 - DNA, 600 bp, Chicken  19866894389345_1
gcttccccccccactgtcaactgcaagaattgatttggcatgtactggtagcacaaagcaaggaacagacaaaaaccgacagaggtcgtgtacatcctcacagagcgaaggggaggaatgaatgaatgtaagggtcccttacgagagacgctcctggtgtgatgtacctgtacagcagtgatttttccaggctgagctgaacagtgtgggaagccccacaccaggacacaagttgtgttgaaagaagacagtttagcagatgaggctaacatcagaccagtacccacaactacccaacasaggagaggttcctgtacttagactccttgggaccaaattagatttgatcttgaaatagctatgaagcatataaaacaaatttacgttgtaaagtacaaaaataaacccgtgagaacagacgaacacatcgcactcagaagaatgtcgcaacgtgatgcacttgccatgtgaaaatgaatctgtgcttccggccttcaccttaaggggagtggtcaaaaatgccacattgatacctaactaccctgttgccacactcttcaatgtgcacaccatatctctgggagataatctttcgagcta

SEQ ID NO: 87507 - DNA, 600 bp, Chicken  19866894389350_1
atgaatgccagtgaccaaaatcccactgagaggtttttgaaagaccgtatgcagtagatttgtggtcatcatttattacatgtttgatagatatgtgtggtaaaatgtgaatatgtattatgagtataatgacaagaaaacaaaacaaatgtttatcatatagttgttactagacagcactgttttgatgtgtgtatatatcctttaaggatagtgagccactattaaataacataaaccaagaaattttggtcactgatttctgaaaaagctccttcagatgatgagttgagtggaagygtgttccaggaaacagtgcaaaagctaaggcagatataaatgctgtagggtaggtacaaaagttcccattttatgaggcaaactatctggataggagcacttcatattctgcgaatcgattttgtaggtacagaaggattcagaaactggcaytacacatccaacacatttcacaagtgatccttaaaagtgtacacttgtggctgyttgcagtgtatgctttcggtatcaaagtgaactgaaacatgtattcatagctctctcctccagccaagcaaacgaatgaaatgagtaacttta

SEQ ID NO: 87508 - DNA, 600 bp, Chicken  19866894389350_2
tatcatatagttgttactagacagcactgttttgatgtgtgtatatatcctttaaggatagtgagccactattaaataacataaaccaagaaattttggtcactgatttctgaaaaagctccttcagatgatgagttgagtggaagygtgttccaggaaacagtgcaaaagctaaggcagatataaatgctgtagggtaggtacaaaagttcccattttatgaggcaaactatctggataggagcacttcatattctgcgaatcgattttgtaggtacagaaggattcagaaactggcaytacacatccaacacatttcacaagtgatccttaaaagtgtacacttgtggctgyttgcagtgtatgctttcggtatcaaagtgaactgaaacatgtattcatagctctctcctccagccaagcaaacgaatgaaatgagtaactttaataactatgcatttatgtactatatatagatatgacattaaacaaatctttaaaatctgatgtattgaaatgtacctaatagttacaacatttactaaatatggatgatatataagattaattagagggggaaaaaaagtcctgtaaaatgtg

SEQ ID NO: 87509 - DNA, 600 bp, Chicken  19866894389350_3
aggatagtgagccactattaaataacataaaccaagaaattttggtcactgatttctgaaaaagctccttcagatgatgagttgagtggaagygtgttccaggaaacagtgcaaaagctaaggcagatataaatgctgtagggtaggtacaaaagttcccattttatgaggcaaactatctggataggagcacttcatattctgcgaatcgattttgtaggtacagaaggattcagaaactggcaytacacatccaacacatttcacaagtgatccttaaaagtgtacacttgtggctgyttgcagtgtatgctttcggtatcaaagtgaactgaaacatgtattcatagctctctcctccagccaagcaaacgaatgaaatgagtaactttaataactatgcatttatgtactatatatagatatgacattaaacaaatctttaaaatctgatgtattgaaatgtacctaatagttacaacatttactaaatatggatgatatataagattaattagagggggaaaaaaagtcctgtaaaatgtgagtggttgatgtaaagatgttttatcagaatttgcttgcttgttgagtaaaaaa

SEQ ID NO: 87510 - DNA, 600 bp, Chicken  19866894389350_4
tcctgtaaaatgtgagtggttgatgtaaagatgttttatcagaatttgcttgcttgttgagtaaaaaagagggttctacagttgttttttttaaagactcatgaaatctgaagatttttcaagtttagaaatattaaaaaaaaaaaaacacaacatctgatggctgtcaaatagtaaaaacagtgaatcaataagccacactagtctaattgttctgagtataggggtagcatatatagcactcagtggattacttatggtaaacagctttcataaaaatggaccaattcaaagcctgtyggcatcagtcagtacactcctattattatcgtcaacttccattccaactcagggtcttgatccaaagcctacctaagctaatggaaaatgttacagctgaagtgatgtctggacctaaacaagctcttctgaaatcaaatatactacctcttcttacgactcttttcttgattattctgctaattttgactgcacccagtgcttgtttgtttctaaatgagagtcattctactgaatgttcaaaatatatccagcctgtaactaagaaaaatgtgatgttgtcagaggaagaagcacaaa

SEQ ID NO: 87511 - DNA, 600 bp, Chicken  19866894389366_1
gtttggctcctgtatgctggtggagggtgaaggcagtgtaccctgttcccgggctaacaagggactgtttgaaagcagctctgagcaggatgacgtcaagcaagaaacctccaagaggatgttgcaagctgggctttgaaggcagggtttgtttgggaacatcaggcttcagctggatccgctgatattgggcatgccaatgagacagcccaattaccgggcagaactgagtaagaggctttcaggctgtgggtaccttgagatgagcagcacgtaaacatcctgcctgcctcagcgggkggaaaccaccaccccacatgctctgtctgaagcgagggcacaggcacccagagctcctccctgtggagcagcagaggctccaagtaggtgggatggggggaagagggacagctattgcagcactgtgccctcacagcccaaagccaaccacaccctgggctgcatcaaaagaaacgtgtccagcagggcaagggaggggatctgtctctctgttctgcactggtgagacctcacctggtgtactgcatccagatgtggagtcctcagagtgttttatttccgtgatctctcaattactag

SEQ ID NO: 87512 - DNA, 600 bp, Chicken  19866894389369_1
tcttgtgctggcctggcccaaagcactggcatcaagaggctgcacggctgctaaagctctgtgcctgtgattttttgtggttgctactgaaaatggaagagtgaaactaatttgctggtaatggatgtgctgctgacagaaacacattcccccccaacaccagcaggttgcttatggcatactttctgcatctaaaaatattctttttttttccagcaactaatttcatttaaagactgttttcacacatcagtggctgttaatcagttaaggagttatcagttttaatattagaaagargtaggtgtcactgacaacttaaaaccatttcatttctattcagctggcttgcagcagattatgagraatcttaggctcatcttatttctcctccttttcccaccctctttaaaagagagataatgccattaaatgaacggctgtactgtgctcattctacatatcctttgaagaaccattgaattagaaataccgagataaaatataagactaaaataagatttaattagaaattaaactccagactcccatgtaattttaaataaaatcatgtatacttcatgagaagattttaaggtt

SEQ ID NO: 87513 - DNA, 600 bp, Chicken  19866894389369_2
gtgattttttgtggttgctactgaaaatggaagagtgaaactaatttgctggtaatggatgtgctgctgacagaaacacattcccccccaacaccagcaggttgcttatggcatactttctgcatctaaaaatattctttttttttccagcaactaatttcatttaaagactgttttcacacatcagtggctgttaatcagttaaggagttatcagttttaatattagaaagargtaggtgtcactgacaacttaaaaccatttcatttctattcagctggcttgcagcagattatgagraatcttaggctcatcttatttctcctccttttcccaccctctttaaaagagagataatgccattaaatgaacggctgtactgtgctcattctacatatcctttgaagaaccattgaattagaaataccgagataaaatataagactaaaataagatttaattagaaattaaactccagactcccatgtaattttaaataaaatcatgtatacttcatgagaagattttaaggttgacggtcagaagaggaacggtgagacaatggaccaaaacccaaggtatatgcttatgaggctcagg

SEQ ID NO: 87514 - DNA, 600 bp, Chicken  19866894389369_3
cggctctcatgttcaaatcaaaccaggtaaggatgcagagaaaaattgtgcaataggtacttgttgctccccaagcttctcttcacctatggctgggggactgggctgggatagctcagcaaataccccgctgtcctccccaaagcatctgctgctgggcttttgactctgcacacctttcatccagtttgctgtggcagttctgacatatattttatttattgtccttctgcttttttttttctttctttctttaatttgcacagctcatctccttttcctgaattctttctttctaayttggtatgaaatctttcacttagatttgacagcccactgtgctcggtgtttgttgtgaggattgatgttgcaactttcagtataatgtaatgcccttgaatatgctgtyttatactgtttgggcagaggagggacctgtctgacccaggggagcttcagattacacaaaaattggtctagtttagtttcatttcacatcccacattaaaaaaaaaaagggttattggtgttgtgaatgtgttggcagcgcacttactcgtgaaaacaaaacattcccttcaagctgagctatgtatcata

SEQ ID NO: 87515 - DNA, 600 bp, Chicken  19866894389369_4
gatagctcagcaaataccccgctgtcctccccaaagcatctgctgctgggcttttgactctgcacacctttcatccagtttgctgtggcagttctgacatatattttatttattgtccttctgcttttttttttctttctttctttaatttgcacagctcatctccttttcctgaattctttctttctaayttggtatgaaatctttcacttagatttgacagcccactgtgctcggtgtttgttgtgaggattgatgttgcaactttcagtataatgtaatgcccttgaatatgctgtyttatactgtttgggcagaggagggacctgtctgacccaggggagcttcagattacacaaaaattggtctagtttagtttcatttcacatcccacattaaaaaaaaaaagggttattggtgttgtgaatgtgttggcagcgcacttactcgtgaaaacaaaacattcccttcaagctgagctatgtatcataccgtcattaacaaactgcacctcgttgaaaatatgtcgaggaaaactgatttacgttgcatttgctgctttgcacacaatagaagcacagtaaactctcatgccataat

SEQ ID NO: 87516 - DNA, 594 bp, Chicken  19866894389382_1
agctgctccctgaaaccctgctcacagtgctaagagattttggagggcagataaggtactcagactcccttcccgtctttgctgtggctaagccgccttctatctccttacgagtgcgggttcaaacctctccgctagaagggcctacattattcacagacgcatcctcaaaaactggtcaaggggcagtggtttggcaagattcagacaatagttggcagactgctatttttgtagaccgaacaatcagtgtgcagatgcttgaggtgacggccgtagccgttgcagtacgtctttggygtgagataccttgtaacatcgttacagactctgcttttgctgctaagctactagcctggatgggtcaggaaggtctcccgagcacagaagctgctggcattctggagraggctctagcctgtcgtacggcccctgttgctattttgcatgtgcgcagtcactctgaggtgccaggcttttttacaacaggtaactgcagtggcagacaaggtcgccagtacgcaggttttcacagcccaggaagcccgtgatctccattctactcttcatataggagcccgagcactctctaga

SEQ ID NO: 87517 - DNA, 486 bp, Chicken  19866894389382_2
tacgagtgcgggttcaaacctctccgctagaagggcctacattattcacagacgcatcctcaaaaactggtcaaggggcagtggtttggcaagattcagacaatagttggcagactgctatttttgtagaccgaacaatcagtgtgcagatgcttgaggtgacggccgtagccgttgcagtacgtctttggygtgagataccttgtaacatcgttacagactctgcttttgctgctaagctactagcctggatgggtcaggaaggtctcccgagcacagaagctgctggcattctggagraggctctagcctgtcgtacggcccctgttgctattttgcatgtgcgcagtcactctgaggtgccaggcttttttacaacaggtaactgcagtggcagacaaggtcgccagtacgcaggttttcacagcccaggaagcccgtgatctccattctactcttcatataggagcccgagcactctctaga

SEQ ID NO: 87518 - DNA, 599 bp, Chicken  19866894389383_1
  misc_feature (1)..(27): n is any nucleotide
nnnnnnnnnnnnnnnnnnnnnnnnnnnccctggatctgcaaagtaataaagttacttatactgctccttcttccatttctccgattttttaacagtgaagacaccagaattaaagagcgtggcattaaagctatttttagtcctgatgttatgttcttgcacagcttgcaagcttacaatatacctgaagagtactagatcttatgcacagagcatgatgtaagaaatttgtttcgggttgcttcttcactgtgcagcctagcttctttcagagctgcctttgcatgtctacctgtagaygtgagctcatatttgactatctgaatggtcctatttagaaggtgtacatcacagcacatccaagacatccctaactgaccacagctcatccatcagctcttgagtctgtcaactgctctgagttttaaggcaaagtgtcgctgttttccttaaaattacagtggtgtcggcattcagcaggccaacctgtctgtttctgagcactcggtcctcaacagcatttgtaactctttcaggctctctgtgccacagtttctattcaaacagattttgcattgaatttctaatcattataacaa

SEQ ID NO: 87519 - DNA, 600 bp, Chicken  19866894389385_1
taccaaagcaagactcagtctagatttggtctctaacagctacagtgttgtaattcaattttataatgtaactttgccccttactctgaaacttgtggagaaccgtcactgaatttctggactgagattttgcctttaaatgaagttatttttctagtctgaatacgtgagaataatagtttttgtcccataagactcattttttacatacctattgattgcaagagaaaccaggaaaaacgaaattgaaatgccttttgagtatgtcattctgatgttggaagttgctgttgagtgtgygctggcagcagattggcgatttctgtggcaactgaatacattccgaagttgcaatttgaagaaagtatagatcatggatcaaaatggagcctggaagtttcagtgtgaaatcacaggatgtctgcctaaggagggtgtacttttcagctgacagactctaatagcagctattatgcatacatcaactgctttgttcacagcacctggcattctgtagagtcaggccttcatcaggcatttgaaaaattgtttttccacttttaccatattctcacaatttttctccttttgtcctttaat

SEQ ID NO: 87520 - DNA, 600 bp, Chicken  19866894389405_1
ggtactgggtctgatcttgttcaacatctttatcagtgacgcagatgaagagacagagtgcaccctcaccaagtttactggtgagctgtggctgacacaccagaaagatgtgctgccattcagtgagacctggacaggaaaccagatagggtttaacaagggcaagtgcagagtcctaaacttggggaggaataacctcctgcatcagtacaggttagaggctgacctgctggaatgaaaccctgtgaaaaaggacatgaatgtcctggtaggcagcaggttggccatgagccagcagtrtgcccttgtggccaagaaggccagtggtatcctggggtgcattaaaaagagtgtagccagccagtcaagggaggtgatcctccccttctattctgccctggtgaggccacatctggaccactatctcaagttctgggctcccctgttcaagaaaagtagggaacttctagagagagcctggcagagggctgcaaagactattaggggcctggagcatttcccctttgaggaagggctgagagagctgggactgtttagcctggaggagagaagactaaggagggatcttatcaatgctta

SEQ ID NO: 87521 - DNA, 599 bp, Chicken  19866894389406_1
  misc_feature (1)..(15): n is any nucleotide
nnnnnnnnnnnnnnncttactttagtccagacagtagcttttcccttgcactgacacagttatgcattcagcctcaagaggtggtcttggacttgctccattcttaatgcaggagggatttcactccccttgtcatggttttctaattttgttattggtattccacaatatagcttcatgtaaagcacatggaattaaagagttaatactccagttccatggattgacaactttctggatacctggttctcagaagagaaaaaaagaactacatatcccagaggacttcacgttcagagyggaagataagtcataggaggaagtcactagatctctctcctccttgctgcctggcagcgtgtgggtatgctccccagctgtgcgtcttcagttcaaagtaaggctttcagtttcagacactctctctctcattttatttgatttattagcctcaattccaattacgttgtattatatcgtgttatcttgcattccaatatcgtatttagtaaaattaggtttccaccttagatcattgctgctgttctgtttttgggccctgctcccatctccctatccttccccttctcccttcccac

SEQ ID NO: 87522 - DNA, 564 bp, Chicken  19866894389407_1
ctgccagcatctggggatgttcaaactctgatgtcacaattccaataatctcaaattattcctgagtctcaatatttttttttccttggtcgttgcctaaggagaatttgcttacatttgtttgcaatatttactcgctaggtatgatctcataactacatcaggccatgaaaaaactttgtgaaaaagatctgacaattttaccaataatattttgttaaatgctgaaacaaagtttttaatttttcagtggcgagataggacaagaaaggaccatcttcctttattttttaagagtcyctgaaaatgcacacaggcagaacagtaaagggaagctcttaataagaaggaagtagaagaaaaaatatgaaagtgctgttttcctcaaatgtttcaacagccttacagaggcatacatgtacacatacaggagcaatgaagacagacaacagctactggcagtctaatagctaatacagtttccagaagcgataagcctttctaaaataaaatggccagaatgttatctgcaaatattcacaaagttttttttattacttagga

SEQ ID NO: 87523 - DNA, 600 bp, Chicken  19866894389411_1
caacgtggattaaacataactttttctctggcagtttaactaaatgcttggggtcttctagttaacctgtttgactgaaagataatgctgccaggtcaagtcattctacagacaaccttcttccttgttcctgtctaaagctgatgtataaggctattataaatgattccattattactcctgtgtgaaagagggggatttatttacttggcatttatcaatgcagcaggataaagaatagcctatctagcaactgcaggaggtcccagaacgtatttactagattcagttttctgaaaycatcatttatgacatctcatggctcagatcgttggcaacaccygatgaaagcttaatccmgaatttgtaagactacagaatatgtcatgggcagaaatggaargtaggtatgagcacgtagaaaacagatttrcttcttttatgcttcatcactgtaatataaaacaagttcacaaatatattcagctcattcagtaacaagacagtgctttcatgcaaaagcttataattttaaaatattaggtcagttttcttaaatgagaaacatatttctacaaccttcccaagtggaagaattct

SEQ ID NO: 87524 - DNA, 600 bp, Chicken  19866894389411_2
atgcttggggtcttctagttaacctgtttgactgaaagataatgctgccaggtcaagtcattctacagacaaccttcttccttgttcctgtctaaagctgatgtataaggctattataaatgattccattattactcctgtgtgaaagagggggatttatttacttggcatttatcaatgcagcaggataaagaatagcctatctagcaactgcaggaggtcccagaacgtatttactagattcagttttctgaaaycatcatttatgacatctcatggctcagatcgttggcaacaccygatgaaagcttaatccmgaatttgtaagactacagaatatgtcatgggcagaaatggaargtaggtatgagcacgtagaaaacagatttrcttcttttatgcttcatcactgtaatataaaacaagttcacaaatatattcagctcattcagtaacaagacagtgctttcatgcaaaagcttataattttaaaatattaggtcagttttcttaaatgagaaacatatttctacaaccttcccaagtggaagaattctaccaaacctactgtggaataactgtcatacagtaactattcca

SEQ ID NO: 87525 - DNA, 600 bp, Chicken  19866894389411_3
gttaacctgtttgactgaaagataatgctgccaggtcaagtcattctacagacaaccttcttccttgttcctgtctaaagctgatgtataaggctattataaatgattccattattactcctgtgtgaaagagggggatttatttacttggcatttatcaatgcagcaggataaagaatagcctatctagcaactgcaggaggtcccagaacgtatttactagattcagttttctgaaaycatcatttatgacatctcatggctcagatcgttggcaacaccygatgaaagcttaatccmgaatttgtaagactacagaatatgtcatgggcagaaatggaargtaggtatgagcacgtagaaaacagatttrcttcttttatgcttcatcactgtaatataaaacaagttcacaaatatattcagctcattcagtaacaagacagtgctttcatgcaaaagcttataattttaaaatattaggtcagttttcttaaatgagaaacatatttctacaaccttcccaagtggaagaattctaccaaacctactgtggaataactgtcatacagtaactattccagcccaattgggctcctc

SEQ ID NO: 87526 - DNA, 600 bp, Chicken  19866894389411_4
ttctacagacaaccttcttccttgttcctgtctaaagctgatgtataaggctattataaatgattccattattactcctgtgtgaaagagggggatttatttacttggcatttatcaatgcagcaggataaagaatagcctatctagcaactgcaggaggtcccagaacgtatttactagattcagttttctgaaaycatcatttatgacatctcatggctcagatcgttggcaacaccygatgaaagcttaatccmgaatttgtaagactacagaatatgtcatgggcagaaatggaargtaggtatgagcacgtagaaaacagatttrcttcttttatgcttcatcactgtaatataaaacaagttcacaaatatattcagctcattcagtaacaagacagtgctttcatgcaaaagcttataattttaaaatattaggtcagttttcttaaatgagaaacatatttctacaaccttcccaagtggaagaattctaccaaacctactgtggaataactgtcatacagtaactattccagcccaattgggctcctccagagcatttcccttatatgaataccctatccaaagtaaaagt

SEQ ID NO: 87527 - DNA, 600 bp, Chicken  19866894389411_5
tctaaagctgatgtataaggctattataaatgattccattattactcctgtgtgaaagagggggatttatttacttggcatttatcaatgcagcaggataaagaatagcctatctagcaactgcaggaggtcccagaacgtatttactagattcagttttctgaaaycatcatttatgacatctcatggctcagatcgttggcaacaccygatgaaagcttaatccmgaatttgtaagactacagaatatgtcatgggcagaaatggaargtaggtatgagcacgtagaaaacagatttrcttcttttatgcttcatcactgtaatataaaacaagttcacaaatatattcagctcattcagtaacaagacagtgctttcatgcaaaagcttataattttaaaatattaggtcagttttcttaaatgagaaacatatttctacaaccttcccaagtggaagaattctaccaaacctactgtggaataactgtcatacagtaactattccagcccaattgggctcctccagagcatttcccttatatgaataccctatccaaagtaaaagttgtcttatttcagaagaatgatttttctcc

SEQ ID NO: 87528 - DNA, 600 bp, Chicken  19866894389412_1
actggtattttagaaaatcaccttcaattgcaacgaatttcaccaagatcacatactttctgtgaatatgaagagggtcaactcaagttattagcaagtcctgctgcattcaaatgggaaattttgagagtcaggggagaactgagcagccttcagctgtcgtgccttgtggatgtagataacgttatttctcagaaaagcaccagcaacagatagtctgcatgacatacctgaagggaaatgtttgcctgagggcgaatttttgctgatggcaactccacataggaatccttcccaacraagttcaccgtgatgagcttctcacacttttgcccagcaaagccagcaagacagcggcagacgggctcctggtgtgcgacgatgcactgggccccgttctggcactcgtagttatcacatgggctcgtctggagcagaaccatcggtggaggagtttcacagaaaagtccactgtagagagttaagtgaagaaatagcagcctcatttatcccaactttttgtatggaagaaagcattttcagatgctgacattacaatactactgtggtataatgactccaagattcagctgccatgtg

SEQ ID NO: 87529 - DNA, 600 bp, Chicken  19866894389416_1
tcagctctttgctgtttatgattcagcagaacctgcagtatcatgatggatggctgaagcactctccactctttcttccatatgtcttgttgattgcattgaagttcggttactacagtcaaggactagatatataatatgctagtacacagctgaacatatagctatgatgatgaatagcgggtttttacttcccttaacaagaagaatggaatcttcctggcttgtacctaataattgatgtttattgatctaatatagactacattgcatgtggtctttacaacagaagtcttgttkttytttttttttttttttttcccctccagaaaaatgatacagcaaacttttacaatggagagggataactggctaggaatgaactataagaaatctgcatgagcaatgctaatattgatatatggtatatagacactgtgagaaccatgctcttcagtttaattaaaatattgttactattcagctttaatcttctgctttgatcaaatttattacttttgataatcagaatggttcaaattaatgttattgatgatgaccatatgagggactcactcaacagcaaaggtttcaaatgtc

SEQ ID NO: 87530 - DNA, 600 bp, Chicken  19866894389416_2
gctctttgctgtttatgattcagcagaacctgcagtatcatgatggatggctgaagcactctccactctttcttccatatgtcttgttgattgcattgaagttcggttactacagtcaaggactagatatataatatgctagtacacagctgaacatatagctatgatgatgaatagcgggtttttacttcccttaacaagaagaatggaatcttcctggcttgtacctaataattgatgtttattgatctaatatagactacattgcatgtggtctttacaacagaagtcttgttkttytttttttttttttttttcccctccagaaaaatgatacagcaaacttttacaatggagagggataactggctaggaatgaactataagaaatctgcatgagcaatgctaatattgatatatggtatatagacactgtgagaaccatgctcttcagtttaattaaaatattgttactattcagctttaatcttctgctttgatcaaatttattacttttgataatcagaatggttcaaattaatgttattgatgatgaccatatgagggactcactcaacagcaaaggtttcaaatgtcaac

SEQ ID NO: 87531 - DNA, 600 bp, Chicken  19866894389421_1
acgtggctaagtaccagcaacaggcaactgaaaaattagctccagcaagctgacaatgccacacctgaccccagaagtctgtagcgttggtcggccaagtggtaatggcttggtgtaaagcagaggagaaatgtgccattaaatgagaagcagggagtgggctgctgagcggtgacggctgttaaaagatacaaaccaaagcgtggccctgacagcgcattatattccaaagataaagagaggcagaggcaaaagcaaaacaaatggggctgctccgtacagatggccgaaagggaattrcaacataaaccccaccagccagaaattacggctacagacggcctgcctgctggggagagaaacccagctcttagggctggtgctggccaaaatcctcctggccaaggggaaagtcctgcacgtggtttggaggaacgtctgtccagctgtgctaatggctgccggtgctgctgagctgacggcaatgaaggartgtgatttaggggggagtggcagtctgtgatttcttttctttgtctaactgccgatttggtttttgagtaaatcggatttatgctgctctcagacaattttgctaat

SEQ ID NO: 87532 - DNA, 600 bp, Chicken  19866894389421_2
aaccaaagcgtggccctgacagcgcattatattccaaagataaagagaggcagaggcaaaagcaaaacaaatggggctgctccgtacagatggccgaaagggaattrcaacataaaccccaccagccagaaattacggctacagacggcctgcctgctggggagagaaacccagctcttagggctggtgctggccaaaatcctcctggccaaggggaaagtcctgcacgtggtttggaggaacgtctgtccagctgtgctaatggctgccggtgctgctgagctgacggcaatgaaggartgtgatttaggggggagtggcagtctgtgatttcttttctttgtctaactgccgatttggtttttgagtaaatcggatttatgctgctctcagacaattttgctaataaggcgatgagtcagagagcccacagcagatgggaatcttcagctgaggtagaaaccattgtttcttttttctttttttttcctaaaaggaaagtagctctttttcttttccagaaagctgacctctggaaaatatgatgatttttcctttctagcagaaacacagcttttccaaataatacctagctgtgct

SEQ ID NO: 87533 - DNA, 599 bp, Chicken  19866894389430_1
  misc_feature (1)..(56): n is any nucleotide
nnnnnnnnnnnnnnnnnnnnnnnnnnnnnnnnnnnnnnnnnnnnnnnnnnnnnnnnacacagacagatgtggtttgacaccttcagccccacgctccccaacacgtcctgcccggtgccaggaccccttcctacataggatcacattgttttctgtacttcttgctccccaaacaggccctgtacagtgattcagaggctgtgggcacacagcacaaggctcgctgttcttcttgctgctaaggaaggcccaaagcagaaccactgatatgctccagccctttgggcagctgctgcagcrctgtgggctgcatctttgggaagctgtgtgccyacatcacatcttggtgacgtgcactcagcctttttcctcacttgggtgcaatccctgcttytgtaacggccaacggcagaggttgcaaagagttccaaataatcggtgggaaatgatgatttaactgtttaagtggaataagagtagcaaagtttacacyttaaaaggaccagcagtttctgagaagtaccccacattagttccattcagggagcgccatcagatgagatacacccgctgtctgcaaggtagctcaggcttgctgg

SEQ ID NO: 87534 - DNA, 599 bp, Chicken  19866894389430_2
  misc_feature (1)..(23): n is any nucleotide
nnnnnnnnnnnnnnnnnnnnnnnacacagacagatgtggtttgacaccttcagccccacgctccccaacacgtcctgcccggtgccaggaccccttcctacataggatcacattgttttctgtacttcttgctccccaaacaggccctgtacagtgattcagaggctgtgggcacacagcacaaggctcgctgttcttcttgctgctaaggaaggcccaaagcagaaccactgatatgctccagccctttgggcagctgctgcagcrctgtgggctgcatctttgggaagctgtgtgccyacatcacatcttggtgacgtgcactcagcctttttcctcacttgggtgcaatccctgcttytgtaacggccaacggcagaggttgcaaagagttccaaataatcggtgggaaatgatgatttaactgtttaagtggaataagagtagcaaagtttacacyttaaaaggaccagcagtttctgagaagtaccccacattagttccattcagggagcgccatcagatgagatacacccgctgtctgcaaggtagctcaggcttgctgggtgagaatgctgtgcctcatttagagggccaca

SEQ ID NO: 87535 - DNA, 600 bp, Chicken  19866894389430_3
tccccaacacgtcctgcccggtgccaggaccccttcctacataggatcacattgttttctgtacttcttgctccccaaacaggccctgtacagtgattcagaggctgtgggcacacagcacaaggctcgctgttcttcttgctgctaaggaaggcccaaagcagaaccactgatatgctccagccctttgggcagctgctgcagcrctgtgggctgcatctttgggaagctgtgtgccyacatcacatcttggtgacgtgcactcagcctttttcctcacttgggtgcaatccctgcttytgtaacggccaacggcagaggttgcaaagagttccaaataatcggtgggaaatgatgatttaactgtttaagtggaataagagtagcaaagtttacacyttaaaaggaccagcagtttctgagaagtaccccacattagttccattcagggagcgccatcagatgagatacacccgctgtctgcaaggtagctcaggcttgctgggtgagaatgctgtgcctcatttagagggccacattatcagtgcaactttggcctaatccttcttaaactgatggctggactagaggatcccagag

SEQ ID NO: 87536 - DNA, 600 bp, Chicken  19866894389430_4
agaggctgtgggcacacagcacaaggctcgctgttcttcttgctgctaaggaaggcccaaagcagaaccactgatatgctccagccctttgggcagctgctgcagcrctgtgggctgcatctttgggaagctgtgtgccyacatcacatcttggtgacgtgcactcagcctttttcctcacttgggtgcaatccctgcttytgtaacggccaacggcagaggttgcaaagagttccaaataatcggtgggaaatgatgatttaactgtttaagtggaataagagtagcaaagtttacacyttaaaaggaccagcagtttctgagaagtaccccacattagttccattcagggagcgccatcagatgagatacacccgctgtctgcaaggtagctcaggcttgctgggtgagaatgctgtgcctcatttagagggccacattatcagtgcaactttggcctaatccttcttaaactgatggctggactagaggatcccagaggtcttttccaaccttactgattctgtgaagtcgtatttctccaaaggacgtttaaactcttaaactgagattccctgataatccacagagttcccttct

SEQ ID NO: 87537 - DNA, 600 bp, Chicken  19866894389441_1
caagctgtaaactcagcacaacctcaggcaagtcacacaggtctctcatatgtcatgagccatactgccaaacgagtcctctttcaggaagaaggtggtgggaaatacaaaagctgaaggctgagtttcctgagaaatcacctattcatatatcctgaagattgacaggctactgtactttgctattctccatttcctcactaaagcacttcagccaccagagccaacatacatgcctgctcccagctctgcacctctgtgccccacttgggttggctgtgagatgccacatgggactcmtgcccagagagtgagggatgctccgctccaccttcatagggacaaacaactcaaaaacccatggaagcgctgagcgttcccttaatccaccagcaaatcaatcatctgctttacaacagcacctacgtgctcactctgacctctaaggagcacagaaggaacgtgtacagctttctggcttagctctaatttattttttaaaagaaagttctgaaagtttcttgtactggtggggaacccagataactgttacttcatgcttgttattgttgttgctactttataaatgtaaattctatt

SEQ ID NO: 87538 - DNA, 600 bp, Chicken  19866894389441_2
tcatagggacaaacaactcaaaaacccatggaagcgctgagcgttcccttaatccaccagcaaatcaatcatctgctttacaacagcacctacgtgctcactctgacctctaaggagcacagaaggaacgtgtacagctttctggcttagctctaatttattttttaaaagaaagttctgaaagtttcttgtactggtggggaacccagataactgttacttcatgcttgttattgttgttgctactttataaatgtaaattctattgagcttcaaacaattgagacacccccaggctcyggttcttttatctatcacacaatgctgtttggtttttaattttttccatactgcttattccttattctcagtcctargagggaaggagatacaaagtgctccttcatttgaaccttcctgagacaaaactgagaatttttataaggaaaataacttttacacagatggcatagtcaaagttcaccatgaaacaatttctcttttcctaggctctgcatatgtggggcgacagcgtgggatctggagcctcatagcaaccacttgagtcttccccttcatcttcctactgccatggggctg

SEQ ID NO: 87539 - DNA, 600 bp, Chicken  19866894389441_3
ttacaacagcacctacgtgctcactctgacctctaaggagcacagaaggaacgtgtacagctttctggcttagctctaatttattttttaaaagaaagttctgaaagtttcttgtactggtggggaacccagataactgttacttcatgcttgttattgttgttgctactttataaatgtaaattctattgagcttcaaacaattgagacacccccaggctcyggttcttttatctatcacacaatgctgtttggtttttaattttttccatactgcttattccttattctcagtcctargagggaaggagatacaaagtgctccttcatttgaaccttcctgagacaaaactgagaatttttataaggaaaataacttttacacagatggcatagtcaaagttcaccatgaaacaatttctcttttcctaggctctgcatatgtggggcgacagcgtgggatctggagcctcatagcaaccacttgagtcttccccttcatcttcctactgccatggggctgttccttactacacatttttcagtgtcttgtctgatctacttttaaatgtgccagacactgaagtgctgccacatgcc

SEQ ID NO: 87540 - DNA, 600 bp, Chicken  19866894389445_1
ttcagtctattaaaataaaaaaattaaacagtcacttatatttatcaggttccagatgttgaatctcgcgaagacttgattaaaaaacactatatggcaagaatagcagaacttacgtcccatctacagcttgctgacagcaaatcagtacactttcatgcagaggtgagaatagtcatgtttgtactaaacacagtaagtccccttttgaattttccatgagcaagtgttaaatctatgccacatattccaggaaaaatgtatttttgcagtacgttttttggctgtggtcttttatgygtaagaatggatgttatagaaagactttaatcaacaggaggaaaaatgtcaccctgtaaggctaaaaaagcttaagaattaaaacgtgtatcatgtactggtctgttgattataaattgaaacggctggttttagttaccaggctatttttggcttcatcttaaagtgatactgagaacgttcaataatacttgaatgtatcatgaagtaatgaaaacagctctcctgagaattttttgtttgtatttaagaattaacaaaataattcatagtctcttcagcttcctcttttcatttcag

SEQ ID NO: 87541 - DNA, 600 bp, Chicken  19866894389453_1
gggctccggctgtgcttcccggaccccaaaacccaaagggatccatccagatccacccttttgtcccattactgaaatcttagggaactgacttcttcccattattatttttgcactgggatctccacagtgaccaccgagccctgatgcactaatgaatatggatgtgggggttggtctcttcccttccttaattagtcttgtcgccctcctagaggccatctaatgagcactgctcagccagatatccccccggagccgtgagccagcggttcccagttgcacacatcaaaggggtgkgggtgacatcacagagatcacagcaaacatcagctctgtctgtccggggggagaaaaaaaaaagagctccttgcagatccacagctggtgggtcttttaattgcacaagggccgaggaacattccaaccataacatcctgcagcctccccgccaccagacagcacgccttttattagcacaggaatgtgtctttaataaactggaggtcttcagcctggaagaagggccggatccagcacggtgtcctgcagccgtggctgtgcagcagggtgctgtgagggtgctgcggtgctgtggct

SEQ ID NO: 87542 - DNA, 600 bp, Chicken  19866894389463_1
ttgcagtaacacagttccactgtgaatatttcaaagggaaattaattagaagaactcagctgaaaccgtggcgatagccttccccatcacaaaaccagcctctggctcgacacagagcatgaattgtatatggaatgactgcagatctctgctccacaaaggaagtatattctgtatatggtcccagtcacgtgtaatccatccttggtgatagtgcagtgtaggtacattaaaaagacctttacactctacaactctttagtgtagaactaaaatccttggtgcggtaatgtaagaaamagtaagatctgtttccagcagcctgtgattttgtgcatgcatttctgctttctgtgtgagatactttggacagaagtaaaagtagcattaaagaacaaaaatcttgaaacttagattattgaaaattcagaataactccactgaataaaattgatttaagtatgctggcgtgagtataatgcaaagctgccatccacataaaaaaataggaatcctggcmttacctttcaagcatttgtggtagaaatgaaaggtgatagatcaggatgtttgtgtgagtgaagacagaaagaatttgag

SEQ ID NO: 87543 - DNA, 600 bp, Chicken  19866894389463_2
gtaggtacattaaaaagacctttacactctacaactctttagtgtagaactaaaatccttggtgcggtaatgtaagaaamagtaagatctgtttccagcagcctgtgattttgtgcatgcatttctgctttctgtgtgagatactttggacagaagtaaaagtagcattaaagaacaaaaatcttgaaacttagattattgaaaattcagaataactccactgaataaaattgatttaagtatgctggcgtgagtataatgcaaagctgccatccacataaaaaaataggaatcctggcmttacctttcaagcatttgtggtagaaatgaaaggtgatagatcaggatgtttgtgtgagtgaagacagaaagaatttgagcacccaaccacagtgttattcagggtttcctttccctcccagctctcctggatcaaaatcttgaagtagttcttcataggctttcaggactttcctctttcataacctgtaggttggaggtacctcagccaaccatttgggctttagctaccgtggagttacctgctccccattccttcccagagaagtaccaaaggaactcttcagtcgttatttcccc

SEQ ID NO: 87544 - DNA, 600 bp, Chicken  19866894389470_1
aaaccaaaaaattgccccatttgcctatattttgttattgagaggtttggggtttttaagactaagcatgacttcttccttttgggatgtcacgggtcctggaagaaaacttctcacagccaatttttctgactgcgacagaataggcaaatactgcagctctggggggttttgctgtctgcccaacctccttaatttgcaatctttgtaaagaagtgactcaactgatttgtttgacgctgggtacacttgtgcccttcaatgaagtaatcctgacatccctttgtaactgtgccctcsttgycttctttggggtttcccaactgccattactcagccagagagaggtaacagcctctttggaagaggaagttgggtttcactagatgtaattcttctgttttccataagcaagtcaccccaccctatgtgggcaacaacactgtatcactcagcacagagccgtgtcccacccaggcaccaccatgagagcgatcggttttcccaagaagggaggagacttctttcattggctgtaattacagatggaaaaatgctgcgtagaagcaacacagtggtagaaaatgcagctctggcaga

SEQ ID NO: 87545 - DNA, 600 bp, Chicken  19866894389470_2
caaaaaattgccccatttgcctatattttgttattgagaggtttggggtttttaagactaagcatgacttcttccttttgggatgtcacgggtcctggaagaaaacttctcacagccaatttttctgactgcgacagaataggcaaatactgcagctctggggggttttgctgtctgcccaacctccttaatttgcaatctttgtaaagaagtgactcaactgatttgtttgacgctgggtacacttgtgcccttcaatgaagtaatcctgacatccctttgtaactgtgccctcsttgycttctttggggtttcccaactgccattactcagccagagagaggtaacagcctctttggaagaggaagttgggtttcactagatgtaattcttctgttttccataagcaagtcaccccaccctatgtgggcaacaacactgtatcactcagcacagagccgtgtcccacccaggcaccaccatgagagcgatcggttttcccaagaagggaggagacttctttcattggctgtaattacagatggaaaaatgctgcgtagaagcaacacagtggtagaaaatgcagctctggcagaacca

SEQ ID NO: 87546 - DNA, 600 bp, Chicken  19866894389476_1
cgtgaattgctcaagtatttgggagagctatttatatctcccactgaactcagttagggcaggtttaatgcgaggaatctgcccctcctttcaccccagcagagcacatatgcgtttgcagggttaacctggagtaatgacatgtttaatcagaggagttatttgaatgcatttgttcaatgtgcctggaagtatttaaggtgtgtacacaggcgtttctcaagggtgccaaacatagctggaatgagtggctattgcaatggatctcccccactcccagaagactttgagctgttcccyctgcccaccccacagcagccacacgttgcaatgtgactgacagcttctcccctctgtttctcctttcataaggatcgtttttagatgcagtggtgtatcttcagtgtaatggcagctgcgcatcgctgcaaactgagagactgactccctgatatcragcatcatccacaccaccacaatggatagctgttggcatgcttcagatgtggcagtgcagcaggacccggtgccctcctggtggattcagtcccacagacacctccatctgctgcagaacaggagctccgtcacacagcagca

SEQ ID NO: 87547 - DNA, 600 bp, Chicken  19866894389476_2
gttatttgaatgcatttgttcaatgtgcctggaagtatttaaggtgtgtacacaggcgtttctcaagggtgccaaacatagctggaatgagtggctattgcaatggatctcccccactcccagaagactttgagctgttcccyctgcccaccccacagcagccacacgttgcaatgtgactgacagcttctcccctctgtttctcctttcataaggatcgtttttagatgcagtggtgtatcttcagtgtaatggcagctgcgcatcgctgcaaactgagagactgactccctgatatcragcatcatccacaccaccacaatggatagctgttggcatgcttcagatgtggcagtgcagcaggacccggtgccctcctggtggattcagtcccacagacacctccatctgctgcagaacaggagctccgtcacacagcagcatcaacgcatcctctctggtttggtactttgcatccactgtctgctaacagggcagcccagtgcaccctcagtgctgagcgctggatgaacagaggttccctcagttagcatcaagggtgatgttctaccaaggatatccatgggcacaaacagtggc

SEQ ID NO: 87548 - DNA, 600 bp, Chicken  19866894389480_1
acgccctagccagcatgggttcatgaagtgcaggtcctgcttgaccaacctgatctccttcagattcagtgatctgcctgctggatgagggaagggctgctgatgtagtctagctagacttcagcaaagccttctacactgtttcctacagtattctcctgtagaaggtggcagcctgtggcttagatacactctgctgggtaaagaactggctggaaggccaggcccagagagtggtggtaagtgaagctaaatccagctggtgattggtcacgagtggtgttgcccgggggtcagtaytggggcctgtcctgttcaatatctttaccaatgacctggataagggcactgagcacaccctcagtaagtctgcagataacacaaattggcaggaagtgtcaatctgagtggggctaggaaagtcctacagagggatctggacaggctggatcactgggctgaagccaatgggatgaggttcaacaagtccaagtgctgggtcctgcactttggccacaacaactccaggcaatgctacagccttggggcagagtgactggaaaactgtgtagaggaaatggacctgggggtattggtcaa

SEQ ID NO: 87549 - DNA, 600 bp, Chicken  19866894389486_1
tactacaaactagtcagtaaagtaaggtaaacatacttacttagaactcttagaaagactgatttcccaagtgtacttgacatatactattcacaatataggtagaatggaaaatgaacttttctgaaaagctgttgttgaccatctctgtatatgccagtacttaaatttcccaaagtctgtttagcagacagagcagttttcagtggtctcaagagctgtgaagttgtatgatgtctataagaagtgagccaatataattaacctttcctaaatactcttggcaacaaatgagtacawatgtgtttcatgagaatagcttttctcctgtctaacaaatattatttatgtatcctatatcaaaataggcaagtttgaagatatttttcattgcttgttagttactgcaaagtctattttcctcagacgtactgcccaagatataacctgctgaaatagacatgaagatttttattcactatatttgctcatgttatttttcagtccaagcagtgcacaaagcattggcttcctagaagccccagaacttacactcagcaactgttcacttaagaagagaggtaatttatccaaggcagt

SEQ ID NO: 87550 - DNA, 599 bp, Chicken  19866894389491_1
  misc_feature (1)..(201): n is any nucleotide
nnnnnnnnnnnnnnnnnnnnnnnnnnnnnnnnnnnnnnnnnnnnnnnnnnnnnnnnnnnnnnnnnnnnnnnnnnnnnnnnnnnnnnnnnnnnnnnnnnnnnnnnnnnnnnnnnnnnnnnnnnnnnnnnnnnnnnnnnnnnnnnnnnnnnnnnnnnnnnnnnnnnnnnnnnnnnnnnnnnnnnnnnnnnnnnnnnnnnnnnngaggcattactttgtgagtgacctatgtatattccaaagcagagtgagttacttgtgaatccaccttagtactcagctgttagtgatcacacagatctkctttatgtgatgtaaaaggcagactcaatagttttatggctatggagtcagaatagttgagtgtgtcagctttgaattatattgtatatgaatcagtgctcgtttgcagtacaagaccatcatcttgaaaaatatattgaaaaagaaaataatctgatgcattgcagctatagaaagcagcacaaaactgttggctacatgggaaaaatgtcttagaagtacccattgctgtagctaactagtagaattcataccgcaatgaaaagttcatagcaggaatgctttagaatgtcagatgt

SEQ ID NO: 87551 - DNA, 599 bp, Chicken  19866894389491_2
  misc_feature (1)..(56): n is any nucleotide
nnnnnnnnnnnnnnnnnnnnnnnnnnnnnnnnnnnnnnnnnnnnnnnnnnnnnnnngaggcattactttgtgagtgacctatgtatattccaaagcagagtgagttacttgtgaatccaccttagtactcagctgttagtgatcacacagatctkctttatgtgatgtaaaaggcagactcaatagttttatggctatggagtcagaatagttgagtgtgtcagctttgaattatattgtatatgaatcagtgctcgtttgcagtacaagaccatcatcttgaaaaatatattgaaaaakaaaataatctgatgcattgcagctatagaaagcagcacaaaactgttggctacatgggaaaaatgtcttagaagtacccattgctgtagctaactagtagaattcataccgcaatgaaaagttcatagcaggaatgctttagaatgtcagatgttttgcagttgatacaatggaaatacttgctgatttgaggagggggaaagatattatactccgtatatttattttcctttaaaaaggaagttatatacagcagatacaaagtgtttgtgacaactattgttcttaacttaatttta

SEQ ID NO: 87552 - DNA, 599 bp, Chicken  19866894389491_3
  misc_feature (1)..(52): n is any nucleotide
nnnnnnnnnnnnnnnnnnnnnnnnnnnnnnnnnnnnnnnnnnnnnnnnnnnngaggcattactttgtgagtgacctatgtatattccaaagcagagtgagttacttgtgaatccaccttagtactcagctgttagtgatcacacagatctkctttatgtgatgtaaaaggcagactcaatagttttatggctatggagtcagaatagttgagtgtgtcagctttgaattatattgtatatgaatcagtgctcgtttgcagtacaagaccatcatcttgaaaaatatattgaaaaagaaaktaatctgatgcattgcagctatagaaagcagcacaaaactgttggctacatgggaaaaatgtcttagaagtacccattgctgtagctaactagtagaattcataccgcaatgaaaagttcatagcaggaatgctttagaatgtcagatgttttgcagttgatacaatggaaatacttgctgatttgaggagggggaaagatattatactccgtatatttattttcctttaaaaaggaagttatatacagcagatacaaagtgtttgtgacaactattgttcttaacttaattttaagaa

SEQ ID NO: 87553 - DNA, 599 bp, Chicken  19866894389491_4
  misc_feature (1)..(51): n is any nucleotide
nnnnnnnnnnnnnnnnnnnnnnnnnnnnnnnnnnnnnnnnnnnnnnnnnnngaggcattactttgtgagtgacctatgtatattccaaagcagagtgagttacttgtgaatccaccttagtactcagctgttagtgatcacacagatctkctttatgtgatgtaaaaggcagactcaatagttttatggctatggagtcagaatagttgagtgtgtcagctttgaattatattgtatatgaatcagtgctcgtttgcagtacaagaccatcatcttgaaaaatatattgaaaaagaaaakaatctgatgcattgcagctatagaaagcagcacaaaactgttggctacatgggaaaaatgtcttagaagtacccattgctgtagctaactagtagaattcataccgcaatgaaaagttcatagcaggaatgctttagaatgtcagatgttttgcagttgatacaatggaaatacttgctgatttgaggagggggaaagatattatactccgtatatttattttcctttaaaaaggaagttatatacagcagatacaaagtgtttgtgacaactattgttcttaacttaattttaagaat

SEQ ID NO: 87554 - DNA, 600 bp, Chicken  19866894389507_1
ttcttccaggtaagatgcagctttctccccatcctaggggatgaaatccctaggctctgctctgacaaatgcaggtcaaacaatgtaagccattgcactggctcagcgccctgatgctgtgcccatgcatgagtgaatgctgcagggagcactgggaatgagatgttacagagcaagtgtgctttgtgctgcaaaggaggcagcgttcgattaaaccattgcctagaaagcatttttgtacttgctagaaaaccctctaattctgttccttaatgcagttctattatgagcagtctgtastaagcacttaatttgcattgtgctagtctcttwgmgcctgggatttccattgtttcttgcagctacttccaaatggtaagcaagaggatgttagttgaaaaggagcagaaacagatctatatgctatgtatattgcaataagatcactagctgatagctcttgctacgccatattgtcagcaattttcatcctgattcctagatacaacacagactactttgaaatctagaccgaggtagcatcttctgtaagaagtcagtggagggttctgtttagaaagacaaaactttggtggaata

SEQ ID NO: 87555 - DNA, 600 bp, Chicken  19866894389507_2
ctaggggatgaaatccctaggctctgctctgacaaatgcaggtcaaacaatgtaagccattgcactggctcagcgccctgatgctgtgcccatgcatgagtgaatgctgcagggagcactgggaatgagatgttacagagcaagtgtgctttgtgctgcaaaggaggcagcgttcgattaaaccattgcctagaaagcatttttgtacttgctagaaaaccctctaattctgttccttaatgcagttctattatgagcagtctgtastaagcacttaatttgcattgtgctagtctcttwgmgcctgggatttccattgtttcttgcagctacttccaaatggtaagcaagaggatgttagttgaaaaggagcagaaacagatctatatgctatgtatattgcaataagatcactagctgatagctcttgctacgccatattgtcagcaattttcatcctgattcctagatacaacacagactactttgaaatctagaccgaggtagcatcttctgtaagaagtcagtggagggttctgtttagaaagacaaaactttggtggaatatcaaagcctgatcctttgaggctgtcatcattc

SEQ ID NO: 87556 - DNA, 600 bp, Chicken  19866894389507_3
aggggatgaaatccctaggctctgctctgacaaatgcaggtcaaacaatgtaagccattgcactggctcagcgccctgatgctgtgcccatgcatgagtgaatgctgcagggagcactgggaatgagatgttacagagcaagtgtgctttgtgctgcaaaggaggcagcgttcgattaaaccattgcctagaaagcatttttgtacttgctagaaaaccctctaattctgttccttaatgcagttctattatgagcagtctgtastaagcacttaatttgcattgtgctagtctcttwgmgcctgggatttccattgtttcttgcagctacttccaaatggtaagcaagaggatgttagttgaaaaggagcagaaacagatctatatgctatgtatattgcaataagatcactagctgatagctcttgctacgccatattgtcagcaattttcatcctgattcctagatacaacacagactactttgaaatctagaccgaggtagcatcttctgtaagaagtcagtggagggttctgtttagaaagacaaaactttggtggaatatcaaagcctgatcctttgaggctgtcatcattcct

SEQ ID NO: 87557 - DNA, 600 bp, Chicken  19866894389513_1
agagcctggaatcaacccttcaccttgacttctgattcaatacccaaacacagatatcaatataacatcccagtgcagcagttctgtgcattacttctgaacctcctcaagtcctatcccttttcatagccatttgtaacacaccaaatgctcttatacgtgagcattgccacaagacataaaatacatttacatttttgtaaactaacgagaaaaaaataccaagtgtaaaataataaaacagtttcatctatctgtatgaaaaaggacagaggctgaagacaaatcctgtaaaaagayagcagggaaggaaaatgaagtccaatgaagatagcaaggagagcaaacagtaaaaggaaggtcacagatattcagataagcgttggtgccacagctcagmagagatgaagaaatgaaattactratggtaggaaaagagaatgagggctgatgcagaggaaaatcactaagccactataacattagcccaaactgaagggtctccaaagagttgaataacttgttagcataaccgctgctgcggggtgaaatattcctgcctaatggaaagacaggtgctggtcatagcaggcagggcac

SEQ ID NO: 87558 - DNA, 600 bp, Chicken  19866894389513_2
acctcctcaagtcctatcccttttcatagccatttgtaacacaccaaatgctcttatacgtgagcattgccacaagacataaaatacatttacatttttgtaaactaacgagaaaaaaataccaagtgtaaaataataaaacagtttcatctatctgtatgaaaaaggacagaggctgaagacaaatcctgtaaaaagayagcagggaaggaaaatgaagtccaatgaagatagcaaggagagcaaacagtaaaaggaaggtcacagatattcagataagcgttggtgccacagctcagmagagatgaagaaatgaaattactratggtaggaaaagagaatgagggctgatgcagaggaaaatcactaagccactataacattagcccaaactgaagggtctccaaagagttgaataacttgttagcataaccgctgctgcggggtgaaatattcctgcctaatggaaagacaggtgctggtcatagcaggcagggcacagtgccactctttttgagaagacaacaggacaggtgggatggcggcagctcgtggttaccagtgtctgctattgtacaggctcgttgaagccacacgacc

SEQ ID NO: 87559 - DNA, 600 bp, Chicken  19866894389513_3
catagccatttgtaacacaccaaatgctcttatacgtgagcattgccacaagacataaaatacatttacatttttgtaaactaacgagaaaaaaataccaagtgtaaaataataaaacagtttcatctatctgtatgaaaaaggacagaggctgaagacaaatcctgtaaaaagayagcagggaaggaaaatgaagtccaatgaagatagcaaggagagcaaacagtaaaaggaaggtcacagatattcagataagcgttggtgccacagctcagmagagatgaagaaatgaaattactratggtaggaaaagagaatgagggctgatgcagaggaaaatcactaagccactataacattagcccaaactgaagggtctccaaagagttgaataacttgttagcataaccgctgctgcggggtgaaatattcctgcctaatggaaagacaggtgctggtcatagcaggcagggcacagtgccactctttttgagaagacaacaggacaggtgggatggcggcagctcgtggttaccagtgtctgctattgtacaggctcgttgaagccacacgaccattgccattgctttggtaaagcag

SEQ ID NO: 87560 - DNA, 600 bp, Chicken  19866894389514_1
ttctttcacagtatgggatagatagctacaaactatatttattttgcaaatgaacataaaaaaaattaaaggggctatcatatgtgaataaagtttcagtctttcacgtagttttctaacgtagtatgaaaattacattttttagtagctatttcttcatatttttttgctagatgttgcttgaaccactgtagtatcttcctctgtttctaaaaataatgtaaaggcatagtcacagaaatgttcattcttttaattatttgtgcatatattaacaactatagcacattaggtccaagrtgatctaacctgtaacttttatttgatttctcaatagtgtttaccaggtgaagaacatacatttaaaatacaacacgtgaagaacatacatctaaaattccaattattccaatagctttttactttgttttctatcttttgacacactggaaaagcatccttatatacccacagtccaacagtttaccagttcatctaatcaaatggatcttcagttacccagactgcaggacttcaaagacttatgtttatgaatgcagtcagcacaggtcattctttgccattctcttcctagctgtc

SEQ ID NO: 87561 - DNA, 600 bp, Chicken  19866894389520_1
ctgtaacttggattgtcacctcaggtacattcctatggcctcactataaagcataaaaccactgatttacaccagaatagtatccgttattctcacaaacccacatttggagttaattataaattttgtcccgacaagaaccacggaacagccctctgcatgtggacagattatccaagaacacgtgactatgacagcaacccgatcagactagatgaagcctaaccctaggataatctcactgcatttcactcagaagcatttcacacattccactcttcctgacagcaagataaagarcaataaaacaaaaccaaaacacaccttaaggaggtgcttgaccatcaacccataattctgcaaatatttactactcatggcagccaggttaagcatagacaactacgggattgaggtgatgctctaactgtggaattacctggagctgaggctcctgccaggccaacagtaacattcaactgaattctcctccacccactctccctaactgcaaggtatgtcattttataaagcgtttctaaaaaatctactgcttatactacgtaggcatcaatactaattttataaatatttgtctgt

SEQ ID NO: 87562 - DNA, 575 bp, Chicken  19866894389522_1
atgtttttgttgtttgtttgtttgttttataaaacatccatggtattgttattttttccatgttttaaacaagctggaagaagttaggttaaatgaattttaatgtttgaagatcttgtgcttgtttacagttataatgtgtcataaaatgtaataatactggctcagttttatgcaaaaaatggacatcaaaggaaaatcggttctcagtcacgtcctctctgctaggaaatgtcactctagaaaaggtttaaaatctaaaatattttatgtgcaagttgagactggtctggtacatcyatattttggtacctgatgcgtgccaaatttgaagtctctttaaaggcacttctgctaaaatacagatatttctgtgtgcaatagaggcatactgatgcttccccactcccaggtgaagatccctaaagtggcttcagactgagctggttttaatccatttcacaggtaatttgcattagatatttagttttgaaatgtctcctccatatcttacaggagctataatgcatgcctcacatttattgtttttgttggtcttccaagtcagtctccat

SEQ ID NO: 87563 - DNA, 599 bp, Chicken  19866894389523_1
  misc_feature (1)..(122): n is any nucleotide
nnnnnnnnnnnnnnnnnnnnnnnnnnnnnnnnnnnnnnnnnnnnnnnnnnnnnnnnnnnnnnnnnnnnnnnnnnnnnnnnnnnnnnnnnnnnnnnnnnnnnnnnnnnnnnnnnnnnnnnnnnctccctgctaaagggggttccctacagcaggttgcacaggttggcatccaaatggtcttgagtatctccaaagaaggagtctccacagtgtctctggtcagcctgttccagtgctctgtcaccctaccctcactgtaaagaaattctgcgtatttgtgtggaacttcctatgttctgrctcttggccattgctcctcatcctatcactgcatgtcactgaaaagaatctggcctcatccagttgcctcccacacttcagatgtttatgagcattgatcagatcccttttcagccttctcttctccaggctgaacagccccaggtctctcagccttgtatgggtggtgttccaggccttcaccatctttgtcaccctccgctggactcttactaggagatccctgtcgttcttgaaacagggagcccagaactggattcctgataatttacagctgtttctaaaccatgggattaaac

SEQ ID NO: 87564 - DNA, 600 bp, Chicken  19866894389524_1
caatatgctgtgatgtgatcctcttcccaattgtttttcagtcacagatgcatttaaaatcagttaacagttaggtaacagtctgtaactgagtaaatagtaatgaaatgtatattgcagacaactactgtagacatagaaagcatgtcacttgcaaaatgataggaaatgcttgtatatggtttagcctagtgctgaagtaagacaggttgcacttctgaactaaataaatctgcagtatgtttgctttaaaataaaataataaaacaaaaaaaacactcattttcaaggaatttcaawtattttcttttttagacattatttttcttcaaggaacagaagtcatatttaaagtagcactgagtctacttagcagtcaagagacagctataatgggatgtgagagttttgagaatattgttgattttcttaaaaccactattccagacatgactcaacctcaaatggaaaagattattacccaggtaaggttgtttttctttctacttctgtttcaatttagtatacttttagaagtctgtgcctaaggaattcctacagagtatgtagaagtcttcccaggatgtcccttttggtgtg

SEQ ID NO: 87565 - DNA, 552 bp, Chicken  19866894389531_1
  misc_feature (1)..(38): n is any nucleotide
nnnnnnnnnnnnnnnnnnnnnnnnnnnnnnnnnnnnnnaaaaaagaagagtcccttgcaattttactccatcgtgctacagaccaccgggcaagggcaaagtgcagggaggaagggacagcaggagagttatgcaaaatggggggcagagcagggagaaaggaggaggaaggtggaataacccctgtcagcccacaaataataacaataataatccacacagataggaaaaaaaaatcccaaaccctctgctcccctcccagctcagcgggctgtgggtgcggggcggcccccaggaggrcacagagcggtgggccacggctccccsggccggggggaggtcacggtgaggagcgcgaggcccgaagacccccacgccgaacggaaggcggcgggcagccccttccccatctctccacgccaccgccgggggctgccaaccctccgccctcaccccggctcccgtgaggggtcgcagcgcggtcccgcaggcccgggttggccgggccgcagcccgcctccgcctcagcgcttcccatacctgtgaggggat

SEQ ID NO: 87566 - DNA, 525 bp, Chicken  19866894389531_2
  misc_feature (1)..(11): n is any nucleotide
nnnnnnnnnnnaaaaaagaagagtcccttgcaattttactccatcgtgctacagaccaccgggcaagggcaaagtgcagggaggaagggacagcaggagagttatgcaaaatggggggcagagcagggagaaaggaggaggaaggtggaataacccctgtcagcccacaaataataacaataataatccacacagataggaaaaaaaaatcccaaaccctctgctcccctcccagctcagcgggctgtgggtgcggggcggcccccaggaggrcacagagcggtgggccacggctccccsggccggggggaggtcacggtgaggagcgcgaggcccgaagacccccacgccgaacggaaggcggcgggcagccccttccccatctctccacgccaccgccgggggctgccaaccctccgccctcaccccggctcccgtgaggggtcgcagcgcggtcccgcaggcccgggttggccgggccgcagcccgcctccgcctcagcgcttcccatacctgtgaggggat

SEQ ID NO: 87567 - DNA, 600 bp, Chicken  19866894389536_1
cggagaagactccttagagagctgtaagtgctgcttctgactgctgcaggatttttttgtgcaaatctcagggctcagagtagaataggcgttagagcatattgccatctccactgcataagaagagaaacttggaattgacaaaacagatcctttgcaatacaatggctttattgtgtagccttttcagaggaaaatgaaaaagaactttaatttaaagattgcatttctgtgaagttctgtgtcctgagaagcagaacgagcacagtatgcagtgtgacagagctctgtaacttcttyctcccatttcctctgtcagagatccctgtgagctccaggaaaggtatttatcaaagcagtttgtgttgcacttggaygtttaggtaattgaccagttattagacaatatttgaygtacgcatcctttcccttgatggcaaactcttcccaccagcgaaggaggcccacaggctcattsttcttcagtttccttggtctttccctgctctctcaagstgtgtgagcactgcacagtctctgggattacatgctggcagtttggctcatktcatttatttcatttttccatttcttctcatc

SEQ ID NO: 87568 - DNA, 600 bp, Chicken  19866894389536_2
gagtagaataggcgttagagcatattgccatctccactgcataagaagagaaacttggaattgacaaaacagatcctttgcaatacaatggctttattgtgtagccttttcagaggaaaatgaaaaagaactttaatttaaagattgcatttctgtgaagttctgtgtcctgagaagcagaacgagcacagtatgcagtgtgacagagctctgtaacttcttyctcccatttcctctgtcagagatccctgtgagctccaggaaaggtatttatcaaagcagtttgtgttgcacttggaygtttaggtaattgaccagttattagacaatatttgaygtacgcatcctttcccttgatggcaaactcttcccaccagcgaaggaggcccacaggctcattsttcttcagtttccttggtctttccctgctctctcaagstgtgtgagcactgcacagtctctgggattacatgctggcagtttggctcatktcatttatttcatttttccatttcttctcatcattttcaggtgcatctagaacactgcttagggagcagcgtctgcgtatgcgtgtgatttcaaactgtaattgaaagt

SEQ ID NO: 87569 - DNA, 600 bp, Chicken  19866894389536_3
tgcataagaagagaaacttggaattgacaaaacagatcctttgcaatacaatggctttattgtgtagccttttcagaggaaaatgaaaaagaactttaatttaaagattgcatttctgtgaagttctgtgtcctgagaagcagaacgagcacagtatgcagtgtgacagagctctgtaacttcttyctcccatttcctctgtcagagatccctgtgagctccaggaaaggtatttatcaaagcagtttgtgttgcacttggaygtttaggtaattgaccagttattagacaatatttgaygtacgcatcctttcccttgatggcaaactcttcccaccagcgaaggaggcccacaggctcattsttcttcagtttccttggtctttccctgctctctcaagstgtgtgagcactgcacagtctctgggattacatgctggcagtttggctcatktcatttatttcatttttccatttcttctcatcattttcaggtgcatctagaacactgcttagggagcagcgtctgcgtatgcgtgtgatttcaaactgtaattgaaagttttcacatttgaaacagtgttaggggttgggtggctg

SEQ ID NO: 87570 - DNA, 600 bp, Chicken  19866894389536_4
tagccttttcagaggaaaatgaaaaagaactttaatttaaagattgcatttctgtgaagttctgtgtcctgagaagcagaacgagcacagtatgcagtgtgacagagctctgtaacttcttyctcccatttcctctgtcagagatccctgtgagctccaggaaaggtatttatcaaagcagtttgtgttgcacttggaygtttaggtaattgaccagttattagacaatatttgaygtacgcatcctttcccttgatggcaaactcttcccaccagcgaaggaggcccacaggctcattsttcttcagtttccttggtctttccctgctctctcaagstgtgtgagcactgcacagtctctgggattacatgctggcagtttggctcatktcatttatttcatttttccatttcttctcatcattttcaggtgcatctagaacactgcttagggagcagcgtctgcgtatgcgtgtgatttcaaactgtaattgaaagttttcacatttgaaacagtgttaggggttgggtggctgttgtgatcttctgtgttattggtggatctgtgcttccccagggctggtgtgtctctaaagttac

SEQ ID NO: 87571 - DNA, 600 bp, Chicken  19866894389536_5
aaagattgcatttctgtgaagttctgtgtcctgagaagcagaacgagcacagtatgcagtgtgacagagctctgtaacttcttyctcccatttcctctgtcagagatccctgtgagctccaggaaaggtatttatcaaagcagtttgtgttgcacttggaygtttaggtaattgaccagttattagacaatatttgaygtacgcatcctttcccttgatggcaaactcttcccaccagcgaaggaggcccacaggctcattsttcttcagtttccttggtctttccctgctctctcaagstgtgtgagcactgcacagtctctgggattacatgctggcagtttggctcatktcatttatttcatttttccatttcttctcatcattttcaggtgcatctagaacactgcttagggagcagcgtctgcgtatgcgtgtgatttcaaactgtaattgaaagttttcacatttgaaacagtgttaggggttgggtggctgttgtgatcttctgtgttattggtggatctgtgcttccccagggctggtgtgtctctaaagttactacagccatctgctttgctgttgggtgtttctacacag

SEQ ID NO: 87572 - DNA, 600 bp, Chicken  19866894389536_6
tatgcagtgtgacagagctctgtaacttcttyctcccatttcctctgtcagagatccctgtgagctccaggaaaggtatttatcaaagcagtttgtgttgcacttggaygtttaggtaattgaccagttattagacaatatttgaygtacgcatcctttcccttgatggcaaactcttcccaccagcgaaggaggcccacaggctcattsttcttcagtttccttggtctttccctgctctctcaagstgtgtgagcactgcacagtctctgggattacatgctggcagtttggctcatktcatttatttcatttttccatttcttctcatcattttcaggtgcatctagaacactgcttagggagcagcgtctgcgtatgcgtgtgatttcaaactgtaattgaaagttttcacatttgaaacagtgttaggggttgggtggctgttgtgatcttctgtgttattggtggatctgtgcttccccagggctggtgtgtctctaaagttactacagccatctgctttgctgttgggtgtttctacacagagccaggatctccccagtatgtgccagagcagctcagagtaagagtgggaag

SEQ ID NO: 87573 - DNA, 600 bp, Chicken  19866894389538_1
tatgatcctagacacatttcccccagcccaatgggagctcagtggctatcccgagagtgagaagttgtcagccttcttgctccacttcagtttgtttgtattggaccaacaatgcttagaagtgaatgacagtcatagcaaatgccagtgcataaagagattaactcagctgtgtgagcatactggtttcatttatcccccaagcagatcaaaccatttaagattaaggtctttagtatagctaattacaagtaatccaccatcgagacaagctgcctttgcttttgcccaatggcatayacgagaccatgcagtttccttccactttcagaggcctgtttttgctgtgcgtgtcactgttctcacttccttctgatgaaagatgatgacagctgactgttgtgagtacacacacacacacacacacacacacacacacacacacacacacacacaaaaagacctagcttgctcttttgctacacaaactgctttatttctttttcctgaatgttggaactctcaaatcaaaagggttcctatctcacctttcactgggggagatgtctcaaactttttgtatccagtttcattcctgtt

SEQ ID NO: 87574 - DNA, 600 bp, Chicken  19866894389543_1
gtgccttctcaccactgccaaacctgggagtgggcagggtggttactggggtagcatccaatgcttggattaaaaataaccaagaaaaacccatgtttgtgagcatagtgtgtgagcttcagagatgttttgcactggtgtaggaaacatggccccacagtattgtaggatggcattttaattattttagacggaatcagtctgctcctgtgctaattttgttcctcatttgctcttccagcctaatctgcagctaatcttctggtgaagaagcaaggctgtgttgttggagtcttcagratccgtaggaacattgctgggaaggtgtttgataccaaagagatccaaaaagtacaaaagccaggatcctgcaagaaccakacctgatkattaatgcactgtggtgttgcatttgcatgaccccaaacctagcaggggagatcttttcaggttctgtgctgcatgctgccactgtttggtatgaagtcagggcctacaagggagtgtaattatggagatgttgcycttgctattagcactcttaccctaataaccttaacatatattctacaaatgaagtggctgtcacatctcacgatg

SEQ ID NO: 87575 - DNA, 600 bp, Chicken  19866894389543_2
aagaaaaacccatgtttgtgagcatagtgtgtgagcttcagagatgttttgcactggtgtaggaaacatggccccacagtattgtaggatggcattttaattattttagacggaatcagtctgctcctgtgctaattttgttcctcatttgctcttccagcctaatctgcagctaatcttctggtgaagaagcaaggctgtgttgttggagtcttcagratccgtaggaacattgctgggaaggtgtttgataccaaagagatccaaaaagtacaaaagccaggatcctgcaagaaccakacctgatkattaatgcactgtggtgttgcatttgcatgaccccaaacctagcaggggagatcttttcaggttctgtgctgcatgctgccactgtttggtatgaagtcagggcctacaagggagtgtaattatggagatgttgcycttgctattagcactcttaccctaataaccttaacatatattctacaaatgaagtggctgtcacatctcacgatgctgccccagtgcaagggtactgctgtcacttagttggctgtttctgctgccctccagccatgcagcccatcttgccacggg

SEQ ID NO: 87576 - DNA, 600 bp, Chicken  19866894389543_3
cccatgtttgtgagcatagtgtgtgagcttcagagatgttttgcactggtgtaggaaacatggccccacagtattgtaggatggcattttaattattttagacggaatcagtctgctcctgtgctaattttgttcctcatttgctcttccagcctaatctgcagctaatcttctggtgaagaagcaaggctgtgttgttggagtcttcagratccgtaggaacattgctgggaaggtgtttgataccaaagagatccaaaaagtacaaaagccaggatcctgcaagaaccakacctgatkattaatgcactgtggtgttgcatttgcatgaccccaaacctagcaggggagatcttttcaggttctgtgctgcatgctgccactgtttggtatgaagtcagggcctacaagggagtgtaattatggagatgttgcycttgctattagcactcttaccctaataaccttaacatatattctacaaatgaagtggctgtcacatctcacgatgctgccccagtgcaagggtactgctgtcacttagttggctgtttctgctgccctccagccatgcagcccatcttgccacgggtcttggga

SEQ ID NO: 87577 - DNA, 551 bp, Chicken  19866894389543_4
tcatttgctcttccagcctaatctgcagctaatcttctggtgaagaagcaaggctgtgttgttggagtcttcagratccgtaggaacattgctgggaaggtgtttgataccaaagagatccaaaaagtacaaaagccaggatcctgcaagaaccakacctgatkattaatgcactgtggtgttgcatttgcatgaccccaaacctagcaggggagatcttttcaggttctgtgctgcatgctgccactgtttggtatgaagtcagggcctacaagggagtgtaattatggagatgttgcycttgctattagcactcttaccctaataaccttaacatatattctacaaatgaagtggctgtcacatctcacgatgctgccccagtgcaagggtactgctgtcacttagttggctgtttctgctgccctccagccatgcagcccatcttgccacgggtcttgggatttctcttgagctgtgattgccccaggacagtttcttctgttgtgttttcctgtgagtggtgcttggtctcacagagctccaggcac

SEQ ID NO: 87578 - DNA, 600 bp, Chicken  19866894389553_1
gaaggacagttctcaatttaactgaataaatcaacatgcaagtactcatttctgttatatgtggcacctatcaattcatacatattcaaatattttgagatagtgttaattagtttagcccacttattatttcttcctcttttgttctttggaatattagccaagtgcttttctcaactataaagaaggacaaaacaaagctcaatattaaaatatttagtgattttatgttattgtaacaaattctgttccatggaggcataatgagttctagcatgcagatcatttctgataataaawgaataaatatataataaaaaagagcggtctctcaagtgctaaattagctgcttcagagagcccatttttccaggaataaaatagtaaagaagtctgacagtctttcatagaatcatagaatcatagaatcgctatggttggaaaagatccacaggatcatgcagtccaaccattcgttcacccttcaccaatggttctcactaacccatgtccctcagcacaacattcaaatgttccttgaacaccaccatggtcagtgactccaccacctctctgggcagcccataccaatgcctgatc

SEQ ID NO: 87579 - DNA, 600 bp, Chicken  19866894389554_1
cctcacctcagagtagtagaactgtttcaaggtgcaaacaaggcctccttcacagcaaagtgaaaataaaatacgtacacatgtatttagctgtcatattatttggctgtcgtacagtatcatgatagttgcagaccacatgagccatatcaagtgtaggggtatatggcaatgaaagatgaatcttgttttctttccttctgatcatatagctaacatctgacttcttaaaaaagtaaactctctgaattgctaagtaccattttcaagagccatttcaatacttaagggtttatatgrtaacactaatgaattcagttagaatttcccatgagtgattgagagactgtttaccattagggaatcaaaggagaaaaaagagtaattaaatgtcaagcaccagaaataagtattggctgaagtcagggaggagcaattcctagttaagaaaatttattacataaaaagaccaaaagcttctaagataaccccatttgaaaacaaatgaacaaataaataattcaatccacctaacataaagccaccagatcaagcagaacttttccagaattctctttccattgctgaaactgtaccaag

SEQ ID NO: 87580 - DNA, 600 bp, Chicken  19866894389556_1
acaaatcttcaagttcagagagtttttaaagggattgagtctggcttaagggagctcacagtagggatttcagctggtttaagaaaagacttccgaaaatcgatttcactgaaagcagcacatagcactttgttctttctcacctggaggtgagacctgatatctgaccaagctaaacaaggcagtgtaactgatgggttgctgctttttgaatgcaaacccctctaccccctcttggcttccttccctcccactgtaatgatgctcaggagggttctggcactgattgcaccagccatstacaagccaccaggcacaaaccttttctattgcccccaaactgctaattctgccacttgaactctgtctttagaggctctcttgggcctaaatagaacatactgaaaattaacgaattatagataataaagaagaaatggatgaagttctttctatgtagtaaccatgcaggaatggcagcctattccccggaaagccctgtgggtaacagagatatcaagacagcatccaatctgaatttccagttctttaaaagaaaagacagtagaggagggtaatgggttgtacaccatgtatctc

SEQ ID NO: 87581 - DNA, 600 bp, Chicken  19866894389560_1
atcctggctttgaatgtctccagggatggggcatccacaacctctctggacatcctgttccggtgcacctatatatgtattatttatctgtattagatgtggcactgaaaatacgatttgcattcatactcccaaacactctttaatacttacagaacaaaaactaaaaggaattggagatcttagtagttcagtctgagggcaacccttaattttatagaaaaacactaatacaaacaaataaaccatcagggaaaagagctgtcagctaatgtaatctacttctggtccagacagcaytagcactgatttctatcaggctaagtgcccatgtttactaagtagtctccaaaagaggaggaaagtcattgtgttcttgtgaccaaattagtttagatgaggcatttgttctgaatacatcagtgctgaattaatcatatcaacctaattcacacacatttatgtgtaatttataacsttacatcaaaacttctttatctgcaaatcataaagcagtgggtgaacaattgactgacagattgggctcagagttacattatgctctggctagtcactagtgggtttcccaaggcctcaatt

SEQ ID NO: 87582 - DNA, 468 bp, Chicken  19866894389560_2
gatcttagtagttcagtctgagggcaacccttaattttatagaaaaacactaatacaaacaaataaaccatcagggaaaagagctgtcagctaatgtaatctacttctggtccagacagcaytagcactgatttctatcaggctaagtgcccatgtttactaagtagtctccaaaagaggaggaaagtcattgtgttcttgtgaccaaattagtttagatgaggcatttgttctgaatacatcagtgctgaattaatcatatcaacctaattcacacacatttatgtgtaatttataacsttacatcaaaacttctttatctgcaaatcataaagcagtgggtgaacaattgactgacagattgggctcagagttacattatgctctggctagtcactagtgggtttcccaaggcctcaattatagggacagttctcttaatgttttcataaatgatttcattataag

SEQ ID NO: 87583 - DNA, 599 bp, Chicken  19866894389571_1
  misc_feature (1)..(33): n is any nucleotide
nnnnnnnnnnnnnnnnnnnnnnnnnnnnnnnnnttagagagcaacaatgacttgcacgattaaaagaaaagctcagcttttaatataaactagaagtgtcaattcaaactgaactctgcctaacttttacagaactgaagtaagccataggcaaagcagtgggggatttatattttaccagcctgctgggaactgcttttaagaggactgcagttcaaggtctgagagaaaatatttaccccaaacaatgctcaagccacaccagcaattgttccagctgctctgacatgagatagcaartcatccctttgcagcacagcaccagcgcgtccccctcrgtcacaaatcctgcccargagctctgctgcatgcactgctacctcagcttcacattcttaccttccagcatagtctttatggttacggactgttttgcaatttcaacatcaacttcaaaaatctctccatctgaactctgcagcttaattgaaggcatctataagagaaggacagttattttcacacaatattcaacagattttacaagtttmgctgatacaaatatgcaggttaccttcattgtttctattgcttctgaa

SEQ ID NO: 87584 - DNA, 600 bp, Chicken  19866894389571_2
gagcaacaatgacttgcacgattaaaagaaaagctcagcttttaatataaactagaagtgtcaattcaaactgaactctgcctaacttttacagaactgaagtaagccataggcaaagcagtgggggatttatattttaccagcctgctgggaactgcttttaagaggactgcagttcaaggtctgagagaaaatatttaccccaaacaatgctcaagccacaccagcaattgttccagctgctctgacatgagatagcaartcatccctttgcagcacagcaccagcgcgtccccctcrgtcacaaatcctgcccargagctctgctgcatgcactgctacctcagcttcacattcttaccttccagcatagtctttatggttacggactgttttgcaatttcaacatcaacttcaaaaatctctccatctgaactctgcagcttaattgaaggcatctataagagaaggacagttattttcacacaatattcaacagattttacaagtttmgctgatacaaatatgcaggttaccttcattgtttctattgcttctgaacagccctgtgacacttacaacacacttcaattatttgct

SEQ ID NO: 87585 - DNA, 600 bp, Chicken  19866894389571_3
cgattaaaagaaaagctcagcttttaatataaactagaagtgtcaattcaaactgaactctgcctaacttttacagaactgaagtaagccataggcaaagcagtgggggatttatattttaccagcctgctgggaactgcttttaagaggactgcagttcaaggtctgagagaaaatatttaccccaaacaatgctcaagccacaccagcaattgttccagctgctctgacatgagatagcaartcatccctttgcagcacagcaccagcgcgtccccctcrgtcacaaatcctgcccargagctctgctgcatgcactgctacctcagcttcacattcttaccttccagcatagtctttatggttacggactgttttgcaatttcaacatcaacttcaaaaatctctccatctgaactctgcagcttaattgaaggcatctataagagaaggacagttattttcacacaatattcaacagattttacaagtttmgctgatacaaatatgcaggttaccttcattgtttctattgcttctgaacagccctgtgacacttacaacacacttcaattatttgctgcttgaatcaacagtcct

SEQ ID NO: 87586 - DNA, 600 bp, Chicken  19866894389571_4
tcaagccacaccagcaattgttccagctgctctgacatgagatagcaartcatccctttgcagcacagcaccagcgcgtccccctcrgtcacaaatcctgcccargagctctgctgcatgcactgctacctcagcttcacattcttaccttccagcatagtctttatggttacggactgttttgcaatttcaacatcaacttcaaaaatctctccatctgaactctgcagcttaattgaaggcatctataagagaaggacagttattttcacacaatattcaacagattttacaagtttmgctgatacaaatatgcaggttaccttcattgtttctattgcttctgaacagccctgtgacacttacaacacacttcaattatttgctgcttgaatcaacagtcctaagttcattaatccygatgtttaagaaggattgatacaaatacacctacatcatttaaaatagaaggaacctgtatttttttccttaagttgaaggcaaaatgaaataaacaaaagcactaatcagttgatttgcttttacatacagcccaacactagagctatctttctcttgaaacagcccttcaacaacaat

SEQ ID NO: 87587 - DNA, 600 bp, Chicken  19866894389571_5
cactgctacctcagcttcacattcttaccttccagcatagtctttatggttacggactgttttgcaatttcaacatcaacttcaaaaatctctccatctgaactctgcagcttaattgaaggcatctataagagaaggacagttattttcacacaatattcaacagattttacaagtttmgctgatacaaatatgcaggttaccttcattgtttctattgcttctgaacagccctgtgacacttacaacacacttcaattatttgctgcttgaatcaacagtcctaagttcattaatccygatgtttaagaaggattgatacaaatacacctacatcatttaaaatagaaggaacctgtatttttttccttaagttgaaggcaaaatgaaataaacaaaagcactaatcagttgatttgcttttacatacagcccaacactagagctatctttctcttgaaacagcccttcaacaacaattccaagacactgcttgtcttcaaactcaaccactgctcattttaaccgttcactgagggcaaatccccaaagcagtttccaaatgatagagcctggaacagaacaaaacagaagtcagga

SEQ ID NO: 87588 - DNA, 600 bp, Chicken  19866894389571_6
ggcaaaatgaaataaacaaaagcactaatcagttgatttgcttttacatacagcccaacactagagctatctttctcttgaaacagcccttcaacaacaattccaagacactgcttgtcttcaaactcaaccactgctcattttaaccgttcactgagggcaaatccccaaagcagtttccaaatgatagagcctggaacagaacaaaacagaagtcaggaggaacctccagatgtgttccggtccaactccccctcgccccaaacagagtctaacaaaccagactacccaggatcaaaygcttccttcagaaagtgctttgcattctgaagagcctgaaaaaagcaatacagcactacaaggaacgctatcagcacttaacactgctcttacagagcagaaagttacatcagcactttgttaacgttaggaaagagcaggatgactcagtatttttatgaagtttttcaaacactgataaggcctacagcgcaagcagcagactctgaagacctcactaacaaacagcatttacaaatcatattttcatgcacttaactcagagccagaagtaacgtacttgatacagtagctaccagg

SEQ ID NO: 87589 - DNA, 600 bp, Chicken  19866894389575_1
tggatctgagttgcatgtcaaagattttgggaaattccctagcacacagtatactgaaggacagaatctgggatggagtcaaccaggggagtggctgctgcagattatctggagttgagcctcatcattcagcgtgttggtcacttttcccaaggaagatgatcccctgctgctaggggtcagctctaccttagctcatgtcttatcatgaccagctgtgactcctcctggtcactatccttggcagtttgtagcccaaccagtagcagaagctgtaggaggaagagcaaagctgtgcasgctgttgcgttctgttaaatcacagaaatgaaatctaggagacttctgtgacatctctgctctgggcctgcgggactggaagggctctctgctctgaatgattcttcaattatgtttcattgcagtggtcarctgttaacctgcttagggactgactttcaccatggagctggagtgcttgatgtcttctatgaaactccctcccttctcctctcatgtgggtaygacacttacatccgctactgggacatacggaccagcaccaggtgagcctaccctgctggcatcttgggcctgtgc

SEQ ID NO: 87590 - DNA, 600 bp, Chicken  19866894389575_2
cgtgttggtcacttttcccaaggaagatgatcccctgctgctaggggtcagctctaccttagctcatgtcttatcatgaccagctgtgactcctcctggtcactatccttggcagtttgtagcccaaccagtagcagaagctgtaggaggaagagcaaagctgtgcasgctgttgcgttctgttaaatcacagaaatgaaatctaggagacttctgtgacatctctgctctgggcctgcgggactggaagggctctctgctctgaatgattcttcaattatgtttcattgcagtggtcarctgttaacctgcttagggactgactttcaccatggagctggagtgcttgatgtcttctatgaaactccctcccttctcctctcatgtgggtaygacacttacatccgctactgggacatacggaccagcaccaggtgagcctaccctgctggcatcttgggcctgtgcaaggatcccctcagctctccttgtgcagtgcctggggatttgtctgcagcttggttagctccttcaggcaaatgggacctcagttccagtccgggtgctgggtggtggaggctcagctgctctctgttttgt

SEQ ID NO: 87591 - DNA, 600 bp, Chicken  19866894389575_3
tcctggtcactatccttggcagtttgtagcccaaccagtagcagaagctgtaggaggaagagcaaagctgtgcasgctgttgcgttctgttaaatcacagaaatgaaatctaggagacttctgtgacatctctgctctgggcctgcgggactggaagggctctctgctctgaatgattcttcaattatgtttcattgcagtggtcarctgttaacctgcttagggactgactttcaccatggagctggagtgcttgatgtcttctatgaaactccctcccttctcctctcatgtgggtaygacacttacatccgctactgggacatacggaccagcaccaggtgagcctaccctgctggcatcttgggcctgtgcaaggatcccctcagctctccttgtgcagtgcctggggatttgtctgcagcttggttagctccttcaggcaaatgggacctcagttccagtccgggtgctgggtggtggaggctcagctgctctctgttttgtgttgtctttgcagaaaatgtgtccgggagtgggaagagccccatgacagcgccttgtactgcataaggactgatgggaaccatatgattgcaa

SEQ ID NO: 87592 - DNA, 599 bp, Chicken  19866894389576_1
  misc_feature (1)..(169): n is any nucleotide
nnnnnnnnnnnnnnnnnnnnnnnnnnnnnnnnnnnnnnnnnnnnnnnnnnnnnnnnnnnnnnnnnnnnnnnnnnnnnnnnnnnnnnnnnnnnnnnnnnnnnnnnnnnnnnnnnnnnnnnnnnnnnnnnnnnnnnnnnnnnnnnnnnnnnnnnnnnnnnnnnnnnnnnnncttctcagtacgcacccttgcttatggaggaaaaagctgttgaagagggcccagaggagggccacaaagatgatcagagggctgcagcacctcccctgtgaagacagactgagggagctgggcttgttcasctggaaaaaagaaggctgctgggtgacctcattgcagcctttctatatttgaaggggatcctataaacaggaggggagtcaactctttgaaagagtagataatagcaggacaaggggaaatagytttaagttgaaggagggaagaattaggttgagcayggtgaagtgctggaacaggctgcccagagaggctgtgggtgccccgtccatggagatgttcaagaccaggttggatgggkccctgggcagcctggtctggtattaaatgtggaggtttgcggccttgaatgcagtggggg

SEQ ID NO: 87593 - DNA, 599 bp, Chicken  19866894389576_2
  misc_feature (1)..(45): n is any nucleotide
nnnnnnnnnnnnnnnnnnnnnnnnnnnnnnnnnnnnnnnnnnnnncttctcagtacgcacccttgcttatggaggaaaaagctgttgaagagggcccagaggagggccacaaagatgatcagagggctgcagcacctcccctgtgaagacagactgagggagctgggcttgttcasctggaaaaaagaaggctgctgggtgacctcattgcagcctttctatatttgaaggggatcctataaacaggaggggagtcaactctttgaaagagtagataatagcaggacaaggggaaatagytttaagttgaaggagggaagaattaggttgagcayggtgaagtgctggaacaggctgcccagagaggctgtgggtgccccgtccatggagatgttcaagaccaggttggatgggkccctgggcagcctggtctggtattaaatgtggaggtttgcggccttgaatgcagtgggggggagggtttggagcttgatcattcttgaagtcccttccaacccaagtcattctatgatgatcctatgagcaggttcaggatgggctgtaactccatgcagatacctgtgcttgctctggtgcct

SEQ ID NO: 87594 - DNA, 599 bp, Chicken  19866894389576_3
  misc_feature (1)..(10): n is any nucleotide
nnnnnnnnnncttctcagtacgcacccttgcttatggaggaaaaagctgttgaagagggcccagaggagggccacaaagatgatcagagggctgcagcacctcccctgtgaagacagactgagggagctgggcttgttcasctggaaaaaagaaggctgctgggtgacctcattgcagcctttctatatttgaaggggatcctataaacaggaggggagtcaactctttgaaagagtagataatagcaggacaaggggaaatagytttaagttgaaggagggaagaattaggttgagcayggtgaagtgctggaacaggctgcccagagaggctgtgggtgccccgtccatggagatgttcaagaccaggttggatgggkccctgggcagcctggtctggtattaaatgtggaggtttgcggccttgaatgcagtgggggggagggtttggagcttgatcattcttgaagtcccttccaacccaagtcattctatgatgatcctatgagcaggttcaggatgggctgtaactccatgcagatacctgtgcttgctctggtgcctgaagagaagtgagatactaggagggacactatata

SEQ ID NO: 87595 - DNA, 600 bp, Chicken  19866894389576_4
tgatcagagggctgcagcacctcccctgtgaagacagactgagggagctgggcttgttcasctggaaaaaagaaggctgctgggtgacctcattgcagcctttctatatttgaaggggatcctataaacaggaggggagtcaactctttgaaagagtagataatagcaggacaaggggaaatagytttaagttgaaggagggaagaattaggttgagcayggtgaagtgctggaacaggctgcccagagaggctgtgggtgccccgtccatggagatgttcaagaccaggttggatgggkccctgggcagcctggtctggtattaaatgtggaggtttgcggccttgaatgcagtgggggggagggtttggagcttgatcattcttgaagtcccttccaacccaagtcattctatgatgatcctatgagcaggttcaggatgggctgtaactccatgcagatacctgtgcttgctctggtgcctgaagagaagtgagatactaggagggacactatatattcctttctcatccccctctttctccaagtttgaatccaatctgggagctcccttaatttcttgtcttagatttcagctca

SEQ ID NO: 87596 - DNA, 600 bp, Chicken  19866894389576_5
ggggggagggtttggagcttgatcattcttgaagtcccttccaacccaagtcattctatgatgatcctatgagcaggttcaggatgggctgtaactccatgcagatacctgtgcttgctctggtgcctgaagagaagtgagatactaggagggacactatatattcctttctcatccccctctttctccaagtttgaatccaatctgggagctcccttaatttcttgtcttagatttcagctcagtatcatcagttcgagtccttcagtgccatttagtgacagcaaatgttttgtaatrcaactataagattatgttgcaactattctgatgcttaaaactttggattcaattagttccaatctctgacatacatttagaacaaaacccctcatctaatgtagattgctttttgtttcaggcgaagagcagaggtgataactcttgcattttagctaataaggattccagtatgataaaggtcttgcattaatattgtgatttctatgttcagaaacaacaaagactcaaggaagcacatcttcccagatctttaaattttcatataatggttcagtcaggtacatttattatttagta

SEQ ID NO: 87597 - DNA, 600 bp, Chicken  19866894389581_1
ttgccatcatattatccacttgttcagaagaggaacactgaggtgagccaaattttagtctctaaccttcaggccagagagctgacctagaagtctttttaagtattcatctccctgaggtcttcacactccagagaagtcattctaactgagaacaaagccgcgagcccagcttccaagggcctccatgagaggccagctagtcccatcccagctactgggcaagaaggctggcagtgagggtgggacaaggccctgttaaaagggaaaagaaatgacttgtcaccattgccttgaagytgttatcagtgatggttccaagtaaacgtgaagctctgcctaaatactgcatgcctgtgcttaatgttcctcctaaaaacggcagcagcagagggaagtggctccagcactgagggtagagccacagtgatgaggaagtgctacagagctgcctggatctgaattccatgctgttactgcttagatgcgatcacacagcggctttttccaaccttaatgattcgacgattctgtgtagcaataggtaacaagagggacaggagcagctcgtgtgctgactgggaacgttctatcttgctt

SEQ ID NO: 87598 - DNA, 600 bp, Chicken  19866894389585_1
agctgtgcagagctgctgtgctcctcgcctggtgctgagccgtgtctgctctgtggctcctgcaggtgatccagctgctggcctgtgacttgctgctgtccctccgcaccagcctgtggcagaagcaggcgagcagcagccaggcgctgggtgagacctaccatgcctcaccccccgagctcactggcttccagcgtgacctcggcagcctgcgcaagctggcccacggcttcaggcccgcgtaccgcaaggtgagctttggcccttgctcctggcagaggagtggggaagggaagagcrgagcaccacctccttctgctcttctattttctgccctctttctggcagttcagccttctccctttccaggttgctcagttacatgtcaaaagcaatttgtgctttttttttgttcctgtctttcctycctcttgccctgacctgcaaaccgcaggcaggtggatgtgggctctgcttgttgtcagggtgtcagcactgtgctgctgacacagctgaaggctgcctccagcccacccctcaccacccaccctgctatccctccaggtcttccttcacgaggccaccgtgcgcctgatggcg

SEQ ID NO: 87599 - DNA, 600 bp, Chicken  19866894389585_2
ggcgagcagcagccaggcgctgggtgagacctaccatgcctcaccccccgagctcactggcttccagcgtgacctcggcagcctgcgcaagctggcccacggcttcaggcccgcgtaccgcaaggtgagctttggcccttgctcctggcagaggagtggggaagggaagagcrgagcaccacctccttctgctcttctattttctgccctctttctggcagttcagccttctccctttccaggttgctcagttacatgtcaaaagcaatttgtgctttttttttgttcctgtctttcctycctcttgccctgacctgcaaaccgcaggcaggtggatgtgggctctgcttgttgtcagggtgtcagcactgtgctgctgacacagctgaaggctgcctccagcccacccctcaccacccaccctgctatccctccaggtcttccttcacgaggccaccgtgcgcctgatggcgggggccagccctacccgcacccaccagctgctggagcacagtctcaggcgtcgcacaacccagaacagcaagcaaggtcagcatggggagctgcatttggccacggctattgggtgctgtgtagagc

SEQ ID NO: 87600 - DNA, 600 bp, Chicken  19866894389588_1
aagctttgtctcttaaaaattcgtatttttcatggcatgaattttccgtgtttcatctttcagaaggagagtttggttattagatccatattgtttttgttaaaaccacatctttcacttaaacgtatcattttttattgccataatgacagataaaaaggataacatgaacccaaatctaaaggaagcctagtactgacacacaagaaatttcttcaagtggatgacaaaaacctccatgcattacttgaaccagagcttatattggaagcagttaccaattaatattgactttattayttaagttattaattacaagttgctcatatacttaagaatgttagttatcccacgtgttagttactatgatatcattctatgacataacactcatactggtgtgattatctagattaaaaatgtcggtactcattaaaaaaaaaaacatatctttgtcgttgatttccatttacacatctaygtacagtgatactgtgtgaaacatgaaatgccatgtgctgccctaaatcaactgagtaaggattttttagtagaatatataaatcaaagccaggcatagttccctatgtattgagaacc

SEQ ID NO: 87601 - DNA, 600 bp, Chicken  19866894389588_2
aaggaagcctagtactgacacacaagaaatttcttcaagtggatgacaaaaacctccatgcattacttgaaccagagcttatattggaagcagttaccaattaatattgactttattayttaagttattaattacaagttgctcatatacttaagaatgttagttatcccacgtgttagttactatgatatcattctatgacataacactcatactggtgtgattatctagattaaaaatgtcggtactcattaaaaaaaaaaacatatctttgtcgttgatttccatttacacatctaygtacagtgatactgtgtgaaacatgaaatgccatgtgctgccctaaatcaactgagtaaggattttttagtagaatatataaatcaaagccaggcatagttccctatgtattgagaacccgtatattgcaacacacagaaaaaaaaccaaacaatatttgtgttatatttcacttgattgtagagttaatataagattttagttggtagctttagctccatgctctttaagacatatcagctagtgatgagacatttttatttccatacagctattagggatatggggattttttattcc

SEQ ID NO: 87602 - DNA, 600 bp, Chicken  19866894389590_1
ataaatagcatatttgagaattattagtagggaaagggaagacaagggagaggagtagcatactcaccaaaggggcaatggcagtagtacccttccaacccactctggcaggacccaccattaaaacaggggttgcattcacagtaattgactgtggagtcgcatgttttccctgccattgtgaaacaagagcaatttccaggtcagtgtaacccgatcagtagccaagtcaggatacatttaagcaacaaaaggaggaaagtgtggggcttagagagggaagaagagagaaaacatagrctcccaactctgacattggcctgaccaacacagacaaattttcaagtgttttgttgtaattatctcrtacagacactacatttctttttattaactggcacctataccagggggatcttgaaatgaaatgagaagctaaattaaaacaaaaagggtttttcttcctattcaatgcagtgcattcattgtgaaggggatcaagaaggggatcaagggtagtgacagcccttgctggaacttgtatgagcacagcatggtgaacacaggatgctattgtacattctgtgatttttcttattt

SEQ ID NO: 87603 - DNA, 600 bp, Chicken  19866894389590_2
caaaggggcaatggcagtagtacccttccaacccactctggcaggacccaccattaaaacaggggttgcattcacagtaattgactgtggagtcgcatgttttccctgccattgtgaaacaagagcaatttccaggtcagtgtaacccgatcagtagccaagtcaggatacatttaagcaacaaaaggaggaaagtgtggggcttagagagggaagaagagagaaaacatagrctcccaactctgacattggcctgaccaacacagacaaattttcaagtgttttgttgtaattatctcrtacagacactacatttctttttattaactggcacctataccagggggatcttgaaatgaaatgagaagctaaattaaaacaaaaagggtttttcttcctattcaatgcagtgcattcattgtgaaggggatcaagaaggggatcaagggtagtgacagcccttgctggaacttgtatgagcacagcatggtgaacacaggatgctattgtacattctgtgatttttcttatttttcctcatcaattacaacctccttcctgactcagagggaccagagtcctccagagctaaaatatgtt

SEQ ID NO: 87604 - DNA, 600 bp, Chicken  19866894389598_1
agattttctctccctcttagcaccagacagaaggtatgtgcatccgaggcaaagacacctgtatgtatggcgtgcatcagaagacatatggaagcagtctttagtttcatgtgacaattaattgtacgttcccagctggaatatagtttgagagctcagttcatcagtaggagaaaaaagaaaaaagaatgtctgcataagtgttctaacagctgtgagcagagggtcctggaaatggaacgtggagatttagtagcaaaaagtcaagattgctttagtttctccttgatgcaggatcaygtgaagggcaaaagtaactaacctgccatgtctcaaccaagagcgatggctggaagcttgctgagcagccagagaatccatgagtcaacacatatgctgtggatgtgtgtgtatgtatgctaacatatagtgccgtgtgacaaatacatgatataaatcacagcgtctcactactctcttccttgctgttccaccccrgttccaggaggcagcccagtctccagctgactcgtctccaagctcccctgtttgcatattctgctgagtggaccgtatgcccttgtttgatttcttttctct

SEQ ID NO: 87605 - DNA, 600 bp, Chicken  19866894389598_2
aagtgttctaacagctgtgagcagagggtcctggaaatggaacgtggagatttagtagcaaaaagtcaagattgctttagtttctccttgatgcaggatcaygtgaagggcaaaagtaactaacctgccatgtctcaaccaagagcgatggctggaagcttgctgagcagccagagaatccatgagtcaacacatatgctgtggatgtgtgtgtatgtatgctaacatatagtgccgtgtgacaaatacatgatataaatcacagcgtctcactactctcttccttgctgttccaccccrgttccaggaggcagcccagtctccagctgactcgtctccaagctcccctgtttgcatattctgctgagtggaccgtatgcccttgtttgatttcttttctctttcctgtgcagaggacacagggaaattgaaagccagcctgatgcacaccaaggtgattggagagggagagcctctggtacattagccattaggaatcagtacgaagaaaagcttttaggatgccaatctcaaatggtttgggccagcggttaacagcctcaagcgtttgccaattggatttattatctgttttcacct

SEQ ID NO: 87606 - DNA, 599 bp, Chicken  19866894389599_1
  misc_feature (1)..(237): n is any nucleotide
nnnnnnnnnnnnnnnnnnnnnnnnnnnnnnnnnnnnnnnnnnnnnnnnnnnnnnnnnnnnnnnnnnnnnnnnnnnnnnnnnnnnnnnnnnnnnnnnnnnnnnnnnnnnnnnnnnnnnnnnnnnnnnnnnnnnnnnnnnnnnnnnnnnnnnnnnnnnnnnnnnnnnnnnnnnnnnnnnnnnnnnnnnnnnnnnnnnnnnnnnnnnnnnnnnnnnnnnnnnnnnnnnnnnnnnnnnnnnagcgacccgctggtcgagtgcctccagaatgtgattgacacaaaagcgccgattgataccccractcagcaactaatccaggatattaaggtaggaacaaacaggtgggggtgggaaaaaagggctctttaaatatttgaaatcagtctctcttctttttgttgttgttgctgcctttcaagatgtggtgataaagcagaaaataggagatttaatcacgcagtgacgtggattgatgttgtggaaccagcaatattcattcacccgctgaaggaatttctgtttaaacactgtaataacaaagtatgaagtgcagcttggacaggaaaagagttaatttttttttgcatgaaaacagtaag

SEQ ID NO: 87607 - DNA, 600 bp, Chicken  19866894389602_1
tctgctttttgacaggtccattttcctcaagaccacaaactccaacagaacatggtcactgcagcccagagtgcctccagtcttaacctctttaatgagctcctctgagctggtgaggagcaggtccagaaacattacacctacccaagatgagatgctgtgggtaggcaacagtgctccagggcagggtgagaatccagtcccaagaaacattcatcctaatgcatttgccaacaggttcccttccaatcaaaccatagtgaaccactaaaatgaggaaatttcctgctttggtcacartgctgctgtaaggcagaagcagctcagttcaccacctcgcaaaacacaggacagctccagccatccacaaggcacgcccatagcttcagctcctgccccatgttcctccaccaggcagggaagtcagacactccttaaagctcctgatcccactgcaaaggtagaatggattctattttgactgagaaaaatatacttacagcagacacaaacagcataaattagataccatgatgggggaatggacagaggctttaaggcccactgttcaaatttccttggagggattccaagacacgg

SEQ ID NO: 87608 - DNA, 600 bp, Chicken  19866894389603_1
aaacctctaagatcatctagtgcaactgtgttttaagtagtttagaaggtttttaagtagtttaaaggttgttaagtagtttaaaaggtttttcttccagggtggtcaagtcatgtgtcactgaacacagcatgattcatctcaggaataatatttaggggctggattcctgcccttgagtatgctcttccctccctccatgagaatttaagtctggatttctttgaagtgcaccatggcatgctgatctttgattcagaggaagactcagaccaaagaacaacccttggaaatacaacrgagagtaagaatgaagacagaatagttctstgcactcaccagcttgcwgcatgcctcttttctggtgtctcatcaaacagacatccaaagttccctgagatgctccaagaggaaggggaagcagtgagcccttccttccattttttttccctgcttatcccttgagatccagttgtgcttcttctgtgctgtccacatgtgagaaacatactcccaaacatccctcctggaagcaagcctgaaaaccagcctgctagaaacctacccttatccacaaagtaggctggagtttttggtttg

SEQ ID NO: 87609 - DNA, 600 bp, Chicken  19866894389603_2
ttttaagtagtttagaaggtttttaagtagtttaaaggttgttaagtagtttaaaaggtttttcttccagggtggtcaagtcatgtgtcactgaacacagcatgattcatctcaggaataatatttaggggctggattcctgcccttgagtatgctcttccctccctccatgagaatttaagtctggatttctttgaagtgcaccatggcatgctgatctttgattcagaggaagactcagaccaaagaacaacccttggaaatacaacrgagagtaagaatgaagacagaatagttctstgcactcaccagcttgcwgcatgcctcttttctggtgtctcatcaaacagacatccaaagttccctgagatgctccaagaggaaggggaagcagtgagcccttccttccattttttttccctgcttatcccttgagatccagttgtgcttcttctgtgctgtccacatgtgagaaacatactcccaaacatccctcctggaagcaagcctgaaaaccagcctgctagaaacctacccttatccacaaagtaggctggagtttttggtttggtgtgtctgctttcagggggttgttagcaa

SEQ ID NO: 87610 - DNA, 600 bp, Chicken  19866894389603_3
gtttttaagtagtttaaaggttgttaagtagtttaaaaggtttttcttccagggtggtcaagtcatgtgtcactgaacacagcatgattcatctcaggaataatatttaggggctggattcctgcccttgagtatgctcttccctccctccatgagaatttaagtctggatttctttgaagtgcaccatggcatgctgatctttgattcagaggaagactcagaccaaagaacaacccttggaaatacaacrgagagtaagaatgaagacagaatagttctstgcactcaccagcttgcwgcatgcctcttttctggtgtctcatcaaacagacatccaaagttccctgagatgctccaagaggaaggggaagcagtgagcccttccttccattttttttccctgcttatcccttgagatccagttgtgcttcttctgtgctgtccacatgtgagaaacatactcccaaacatccctcctggaagcaagcctgaaaaccagcctgctagaaacctacccttatccacaaagtaggctggagtttttggtttggtgtgtctgctttcagggggttgttagcaatacctgagggtcagggaa

SEQ ID NO: 87611 - DNA, 600 bp, Chicken  19866894389603_4
gcaattgcagtgccaatggcttgtgtactgctaggctgggccaggtactccagccaaaggacttggaaagaccatgtagttacatttaatcagggctgctaggagtctgtcctggcacgttgctcttcttgcattaagtgcaggaggagggccatagcaagcatcagcagtaacttatctgctctggattgagtggttgatagtagaaagaatcctgaaggaaaggaggtagattattttctgctccagagattcccagatatttttcttttctttgctttgagacactgccctccagcmtcaattttatgaattactatttcttgcccctttgtttttctaggctcccttagctgcattttttattagctgtgctactaagtattgtccttttctctgcagatagggccaaatgccaaggagttgttcaggcttgtggaggatttcattgatgtcatcggctttcgcatgaaagatttccgggattcctaccaagtgacagacaatctgggtgagctgatttacactccccacgttgggtatagaccccaggaatctgtaattgcagtgcagtatgcatgatcttggatgtggggaggg

SEQ ID NO: 87612 - DNA, 599 bp, Chicken  19866894389606_1
  misc_feature (1)..(48): n is any nucleotide
nnnnnnnnnnnnnnnnnnnnnnnnnnnnnnnnnnnnnnnnnnnnnnnnaaaagctgtctgggaagtaacaggatagacatgtttaggattgttttggatatctcatgttaaatttatggtcaagctatcaaaagcaaagtttcacatcttcctctattgcaggagagcacagagcagtacgctaacatataatacgttgacttttccatgttacagttcctcaccttagcctaagaagttgatcagcacatttggtacctgagcaagaatttaactggggtagcagttaagtctccaaaygtaacaagaccagtgttagtggaatagcaatagaaacagtgagaaatggtgcatcagtgaaccagactactcgtccaaatgtccaaggacagctcttggtttatttttgttcttaaccacaagtccagattgatctttacccaacaaaagctggcatccaatattgtttatttttctattttcctgtttgcagaggacagattagctcttgcatacactgaagtttctgtccgctgaagtcttttgctaatcacagatcagcatatatacacatatatatatmcacacacacacttact

SEQ ID NO: 87613 - DNA, 537 bp, Chicken  19866894389606_2
cagttaagtctccaaaygtaacaagaccagtgttagtggaatagcaatagaaacagtgagaaatggtgcatcagtgaaccagactactcgtccaaatgtccaaggacagctcttggtttatttttgttcttaaccacaagtccagattgatctttacccaacaaaagctggcatccaatattgtttatttttctattttcctgtttgcagaggacagattagctcttgcatacactgaagtttctgtccgctgaagtcttttgctaatcacagatcagcatatatacacatatatatatmcacacacacacttactgtaggtcactaagagttactagaccttaagatacagaacacctagacgtccatgccawtggcaacaatactgaccacaagagagttttttgctatccaatgggatttatgggatgactagctcactgccactaactaaaagaaataaaaaaaaaacattgttgacatttaattcagatattgagcctactgcaaagccacagaaatcaaacttatgttcca

SEQ ID NO: 87614 - DNA, 463 bp, Chicken  19866894389606_3
tgaaccagactactcgtccaaatgtccaaggacagctcttggtttatttttgttcttaaccacaagtccagattgatctttacccaacaaaagctggcatccaatattgtttatttttctattttcctgtttgcagaggacagattagctcttgcatacactgaagtttctgtccgctgaagtcttttgctaatcacagatcagcatatatacacatatatatatmcacacacacacttactgtaggtcactaagagttactagaccttaagatacagaacacctagacgtccatgccawtggcaacaatactgaccacaagagagttttttgctatccaatgggatttatgggatgactagctcactgccactaactaaaagaaataaaaaaaaaacattgttgacatttaattcagatattgagcctactgcaaagccacagaaatcaaacttatgttcca

SEQ ID NO: 87615 - DNA, 599 bp, Chicken  19866894389607_1
  misc_feature (1)..(60): n is any nucleotide
nnnnnnnnnnnnnnnnnnnnnnnnnnnnnnnnnnnnnnnnnnnnnnnnnnnnnnnnnnnnattcacaaatagatggagaaattattctttttactaaactaagtcccaaacatacgtccatttgtatgctatgggctcctttgcaagaaaagatgtgaataatttggccatagctattctcatacaagtgggtgaaacaagtgcttctgtggatgatcacaggtattccttaccgagccacagtagcattccaggttttctcccaggcaaatggttctggaggattaaatcgcctctctrcaagaggaggtgcagcgtagggaatcccaaggaactggctgatatttttccactctgagccaatccgtactgccttggatttgccgatcaaatcaccatgggattgaatgtagacagatggggctaaatctgattcagaagtaggcagtattgaatctaatggggtagagagaaacaaaaaataatttgctctttaaaaatggcaccatttcagaaatgaaaattatccatttgaaattcaggcaagtgggattaagtgtgtaatctacttccataaatgggacatggataaaattatg

SEQ ID NO: 87616 - DNA, 600 bp, Chicken  19866894389607_2
tgattcagaagtaggcagtattgaatctaatggggtagagagaaacaaaaaataatttgctctttaaaaatggcaccatttcagaaatgaaaattatccatttgaaattcaggcaagtgggattaagtgtgtaatctacttccataaatgggacatggataaaattatgttgtttctccacttgaagtacgtcatgttgtgcaagatgttagctaataggtacagacatttatctaatgtgctctcaaaaccctttctcaaacatttctttccatttagacattgcattaacatgtatayttgagaatttttacaaaaagattttcagattctcctcctctcccaactctaaaaaccaagatattaaacctttaaatactcatagcasgtcagaaataagaaagataacaccacatctcattggtttaggctgctaccaggacagatttacatctcaatctccttattttttgattgcagaaaattttgaaatgttcctcaatacgttacagttttgttttcttttgttttaatataaagattacctggactattggccacatatacaaaagaaaattcttccaataaccttaagtactt

SEQ ID NO: 87617 - DNA, 600 bp, Chicken  19866894389607_3
gaaaattatccatttgaaattcaggcaagtgggattaagtgtgtaatctacttccataaatgggacatggataaaattatgttgtttctccacttgaagtacgtcatgttgtgcaagatgttagctaataggtacagacatttatctaatgtgctctcaaaaccctttctcaaacatttctttccatttagacattgcattaacatgtatayttgagaatttttacaaaaagattttcagattctcctcctctcccaactctaaaaaccaagatattaaacctttaaatactcatagcasgtcagaaataagaaagataacaccacatctcattggtttaggctgctaccaggacagatttacatctcaatctccttattttttgattgcagaaaattttgaaatgttcctcaatacgttacagttttgttttcttttgttttaatataaagattacctggactattggccacatatacaaaagaaaattcttccaataaccttaagtactttttttatacaaacagaactaagagatatcaagtattattccactcttaaaacaagctataccataggcrggaaccaaattctaattct

SEQ ID NO: 87618 - DNA, 554 bp, Chicken  19866894389607_4
ctttaaatactcatagcasgtcagaaataagaaagataacaccacatctcattggtttaggctgctaccaggacagatttacatctcaatctccttattttttgattgcagaaaattttgaaatgttcctcaatacgttacagttttgttttcttttgttttaatataaagattacctggactattggccacatatacaaaagaaaattcttccaataaccttaagtactttttttatacaaacagaactaagagatatcaagtattattccactcttaaaacaagctataccataggcrggaaccaaattctaattctaattcttctgattgataatggggtttcaccattctttgtgctattcacagaatttagaaggaagaagaaagaaataatgtctgcagattaagaggaaggagctggacttttgttattgtttttttgttcatttgtttgttcgttgttgtaccattctgtactttccagaacttattttataggccagacttccattattttatctccttcagcagttaatgttatgattttgcat

SEQ ID NO: 87619 - DNA, 600 bp, Chicken  19866894389609_1
atcagatatttaagaatgttaaaaagcaaggtccagcatttgtttcaaaatgtactaaaatgtactaaaaattcagccattctcttattcataactcttactatttgatttgaatattgattgctttgataaatatttttatattcaacttaattttcactagcactaatatcaatagaatactctggtgctagagtaatagcgaatggctttcaagtgttttatatgtagattaactattgtacatatatgcaagtgaattgtgagcacaaatgtgattctggaaatttttcctgcaawatacaaaggtgggatcatgatgacaagcaaaaaatacatccatatcaaagggtagaagtcaagattcttggatttctctcacagtgcagaaaattgttatacactcctctgtggtgaacaatataawactccaataaaatcagtgagaatggagagtatacaaacgtgtatagaactgaacctgtagaaccgaactttcaccttattattcttctccttagatagaagtcatgatttgtccaaggtcctggtttggaacattttaaatatttcaacatatttgaatttattttataatta

SEQ ID NO: 87620 - DNA, 600 bp, Chicken  19866894389609_2
gataaatatttttatattcaacttaattttcactagcactaatatcaatagaatactctggtgctagagtaatagcgaatggctttcaagtgttttatatgtagattaactattgtacatatatgcaagtgaattgtgagcacaaatgtgattctggaaatttttcctgcaawatacaaaggtgggatcatgatgacaagcaaaaaatacatccatatcaaagggtagaagtcaagattcttggatttctctcacagtgcagaaaattgttatacactcctctgtggtgaacaatataawactccaataaaatcagtgagaatggagagtatacaaacgtgtatagaactgaacctgtagaaccgaactttcaccttattattcttctccttagatagaagtcatgatttgtccaaggtcctggtttggaacattttaaatatttcaacatatttgaatttattttataattagcatttagaaaatatatctgaatttcacttagctcatgttttctcagaactcagacatcttcaaatgtgtattttaaatgtgtttttgtcttcaattgtttttttkttttttttttttaagttattg

SEQ ID NO: 87621 - DNA, 600 bp, Chicken  19866894389609_3
ctctgtggtgaacaatataawactccaataaaatcagtgagaatggagagtatacaaacgtgtatagaactgaacctgtagaaccgaactttcaccttattattcttctccttagatagaagtcatgatttgtccaaggtcctggtttggaacattttaaatatttcaacatatttgaatttattttataattagcatttagaaaatatatctgaatttcacttagctcatgttttctcagaactcagacatcttcaaatgtgtattttaaatgtgtttttgtcttcaattgtttttttkttttttttttttaagttattggagaaaagattcacagggagatgttactggcagtgataccaactatcaaccttgtaaatcagtattaatagttgagagtcattactattatattcaaaatttacgatgttaagcaaatgagtattcaattcacacatagtttgaagtattcctgataagttatctctaccctgtgtaaatcaacataacttttgaaaaaaatgtaatttattcacaaataaacaacaacttctatttatcagacatcagaaggagatagattctgtgaactttgtaatg

SEQ ID NO: 87622 - DNA, 599 bp, Chicken  19866894389620_1
  misc_feature (1)..(47): n is any nucleotide
nnnnnnnnnnnnnnnnnnnnnnnnnnnnnnnnnnnnnnnnnnnnnnnaccaaatgacctttgagatagatgcagtgtcatctctccaggacgtctattccagaacggaatttattagttatttttttctactgtatagtcagtatatcactattccagtactactcatctttttcaggagagacggagtatatcctgtctcccttcagaacagtcttctgcatatttggacgccactggccattttcctgtgactcttgtccaaactgcagaaatacacttgtcagcctttcctcatagrgtgtattcgatggctctgataatcctgcctgttatgctatgtacttttgtctgcctgttcagacgacctttttattttggtttaaaaaattaaaatttttattttatttccatgggccggcacccccttctaaaatgcaggcttcccctataggtgcacgctcacccagaaggtgatcctcggctcgaccttcgaggtgattcaaactgtacagagcccgtaggagaagtgccggagggcacagctcaagcaagtccagccctcccccctctctaagcgcgtcaagccgtcgtttaagt

SEQ ID NO: 87623 - DNA, 600 bp, Chicken  19866894389620_2
gcttcccctataggtgcacgctcacccagaaggtgatcctcggctcgaccttcgaggtgattcaaactgtacagagcccgtaggagaagtgccggagggcacagctcaagcaagtccagccctcccccctctctaagcgcgtcaagccgtcgtttaagtgtgaggtgcgcctgctcgacaatagcttggccctgactgttcccagggacccctgtggtatgacgaatcccccactgggagcaccaccgggcaaacaccacgctccagtatcctgggccattgtccgttttcccctcagcyggcaggccgaggacagcaacagccgcccggagagcggccacacagtgtgtggatcgctgtccaacctgagctgtcgcccagagcataccactgcaagtgtccacaacggcatgcaagtgacgtaagcagccaaagggcaggtactccgtgacatccatctgccacagctgattggggctcacaccccgaggatcaaccccttcgggcagctgcatagcctggctgcaagccatgcactgctgcacgatgtcacgtgcctcacccaatgatatccggaacatttgtcggagagcgagcgcc

SEQ ID NO: 87624 - DNA, 599 bp, Chicken  19866894389634_1
  misc_feature (1)..(30): n is any nucleotide
nnnnnnnnnnnnnnnnnnnnnnnnnnnnnnatactccatcaaggtaagacaaaactcaactcagcacctccctgcttagctttgaggtctgccccccatgctgcagctcccaaatcccgtccccttttgttgcattctgtcccactttcccccatcccaccgtgtcccattctgtcccatctttccttgtcccattctgttaccatcctatgttgtcctagcttcccccatctcatcccatcatgtctcaccttccctcatccatttctcaatctcatcctatctgtcatatcccacctytcctcatcccatcccatcttgtcccactgcgtctcacttttttcccccatyccttctaatcccacctgtcctatcccacctctcttcatctccgtccyattctatctcatcccatagtgtcccaccttcccccaccccttcccaatcccattccatcttctctcatcctgtcccacgttgccccagacctcattgctacctcacttcctcctgccacatccatccctaccactgtgccccatatctaacttccctcactcccacctttgggtgctttgtcctctccaagagccacagaa

SEQ ID NO: 87625 - DNA, 600 bp, Chicken  19866894389634_2
aaactcaactcagcacctccctgcttagctttgaggtctgccccccatgctgcagctcccaaatcccgtccccttttgttgcattctgtcccactttcccccatcccaccgtgtcccattctgtcccatctttccttgtcccattctgttaccatcctatgttgtcctagcttcccccatctcatcccatcatgtctcaccttccctcatccatttctcaatctcatcctatctgtcatatcccacctytcctcatcccatcccatcttgtcccactgcgtctcacttttttcccccatyccttctaatcccacctgtcctatcccacctctcttcatctccgtccyattctatctcatcccatagtgtcccaccttcccccaccccttcccaatcccattccatcttctctcatcctgtcccacgttgccccagacctcattgctacctcacttcctcctgccacatccatccctaccactgtgccccatatctaacttccctcactcccacctttgggtgctttgtcctctccaagagccacagaaragggactcccrgtaggcacagtggtttgggctcctctaaattattgttaag

SEQ ID NO: 87626 - DNA, 600 bp, Chicken  19866894389634_3
tgctgcagctcccaaatcccgtccccttttgttgcattctgtcccactttcccccatcccaccgtgtcccattctgtcccatctttccttgtcccattctgttaccatcctatgttgtcctagcttcccccatctcatcccatcatgtctcaccttccctcatccatttctcaatctcatcctatctgtcatatcccacctytcctcatcccatcccatcttgtcccactgcgtctcacttttttcccccatyccttctaatcccacctgtcctatcccacctctcttcatctccgtccyattctatctcatcccatagtgtcccaccttcccccaccccttcccaatcccattccatcttctctcatcctgtcccacgttgccccagacctcattgctacctcacttcctcctgccacatccatccctaccactgtgccccatatctaacttccctcactcccacctttgggtgctttgtcctctccaagagccacagaaragggactcccrgtaggcacagtggtttgggctcctctaaattattgttaagtgagccccagaccagctggcacctccatgaagctgcatatcctgctc

SEQ ID NO: 87627 - DNA, 600 bp, Chicken  19866894389634_4
tcctcatcccatcccatcttgtcccactgcgtctcacttttttcccccatyccttctaatcccacctgtcctatcccacctctcttcatctccgtccyattctatctcatcccatagtgtcccaccttcccccaccccttcccaatcccattccatcttctctcatcctgtcccacgttgccccagacctcattgctacctcacttcctcctgccacatccatccctaccactgtgccccatatctaacttccctcactcccacctttgggtgctttgtcctctccaagagccacagaaragggactcccrgtaggcacagtggtttgggctcctctaaattattgttaagtgagccccagaccagctggcacctccatgaagctgcatatcctgctccctccctgtcctttcacccaccctactcccagtaaggagcagcttcccccactttattacctctaaagctaatcattcttaacaagcacgctcggaggaaaggtcagcagctgccagtgccccaagaagtgccatacaggcatgctaggacccctggccttcctcgcagctctccacctccaacaggaggagtgggcagcac

SEQ ID NO: 87628 - DNA, 600 bp, Chicken  19866894389634_5
tcccatcttgtcccactgcgtctcacttttttcccccatyccttctaatcccacctgtcctatcccacctctcttcatctccgtccyattctatctcatcccatagtgtcccaccttcccccaccccttcccaatcccattccatcttctctcatcctgtcccacgttgccccagacctcattgctacctcacttcctcctgccacatccatccctaccactgtgccccatatctaacttccctcactcccacctttgggtgctttgtcctctccaagagccacagaaragggactcccrgtaggcacagtggtttgggctcctctaaattattgttaagtgagccccagaccagctggcacctccatgaagctgcatatcctgctccctccctgtcctttcacccaccctactcccagtaaggagcagcttcccccactttattacctctaaagctaatcattcttaacaagcacgctcggaggaaaggtcagcagctgccagtgccccaagaagtgccatacaggcatgctaggacccctggccttcctcgcagctctccacctccaacaggaggagtgggcagcacaagactgacct

SEQ ID NO: 87629 - DNA, 599 bp, Chicken  19866894389638_1
  misc_feature (1)..(10): n is any nucleotide
nnnnnnnnnnaacttgaaaaggtgggcccatgtaaccctaatgatgttcaacaaagccaagtgcaaagtgttgcaattgggtcaaggcaaccccaaactgggagaactccttgagagaagccctgtcgagaaggactcaggggtcactgtggattaaaaacttaacgtaagccagcagtgtgtatttgcagcttagaaggccaatggaatccaggactgcctcagaagatgagtggcctgtagggcaagggaggtgattgtccccctctactctgccttcctgaggcccctgctggagtwctgcgtcgacgtctggggctcccagtaggggaaagatgttaaacttttggagaggatccagaggagggccacgaagattatcagagggctagagcacctctcctaggaggacaggctaaaggaattgtgtttgttcattctggagaagagaaggctgtggggagatctcattacagccttccaatatttaaaggggattataaacaggagggaaatcaactttttactgtagatttagattaggtgtcagggagaagtttttccttagagggtagtgaggtgcaggaaaaagttctcag

SEQ ID NO: 87630 - DNA, 600 bp, Chicken  19866894389647_1
tccaacctctccttcccctccagagaaccatatttaacaaattatcccagttagatcaacaccagcgacaatttcagcatttccttattcaattttgaaaggaagccaatctttctgatattacctaattacaacaggactatatctcttcactgcagcaactttccaatcaaaatctcatctcctatccagtgacagagccttgaaatatcattttcaccacatgcagccccataaaaatatcatcacctggagttcccctctgcatagctttaggcctgtggcgctcagtgccttgcrgggctcaaggcaagcatctgccttccccatgacctgacatcgtagtaacgcagtgttagcatcgtgtcaggatggtaagcccaaagatctgtctctggacctgcccgtggctgtggttgaaagggccaaggagtgcttggagctggccccaccagccctttgttttcactgtagggccaaagccgaattaaaggctgacacaattccagagttagcagtgtcgcaagaaagttgtcctgcacgtctgttgattaaaaaacctcctgcaccagttcattttttttattgtattttgtaaac

SEQ ID NO: 87631 - DNA, 600 bp, Chicken  19866894389650_1
gcctcagagaaaaattcatatgtgcacacacacacacttatttttcagtgaatcactgtaataatagaaagatttttacaaatagttgttggtatctgtaattaaaggacaacatccaaccaaggcaaaatgtaacagtgccactcctccttccttgttcagtctgatgatctccacagcaacaaggacctgtaaagtgtgtattacctatgtgtcagtgtttctgaaagaaatttaggtagcaaccggagaacattcgggacatgtcaaagactggcaataaaccaacactaggacagytgaatgggtgagccagaaagtttaaagcatgcacgttaacagctgtgtctttcctcgtacatctagggtaaataagtaaagctctaacgctcttccagtgggaacagcactggaggctctgtgacagaagcaatgagcaaagggaggatgtcatcattacaggagtcacaagatgcttccagggtaagtgataaggaggcttccccaagaactgtggtaaaatggggagtccaggggaaggggatgagagcagaagtgaaagaagaggccttgtgaccctaaacaggggcctcctgaagc

SEQ ID NO: 87632 - DNA, 600 bp, Chicken  19866894389653_1
atcacagttgaccttgctgtaccctcacaaagctagtgctgtgacacactggaggggaaaaggattctgatctcagctgcatcattggaaaatatagctttatgtttgacacattaccaccaactggaattaaaatctcacctgtgaggttcttcacttttcatcagttttcagttatggttgttctttcattatgtatatatcagacgttcgatatgtacaaccctgtgacatatacacagttgatcagatgagatcagtgaaaaagagttgtccaagcacagacatggccacagtgcrtttgtgtaggacatctgatgaatttgtggcgctgattttttgcttttttctgcctggctggaagtatattgctgtgagataggatgattgataggtattgtagccctaacatttcagatagcgttgtgaggtgtgtctctgtccttaccataaaagaaccacagattcttgttgcagggttatggattcacttctgaagaccagaaacatgcaagtttgtcagatcttattttaactgagtctctgtattctgaccaaaataagtttcctctctgaactaggcaagtaaagaaaaggaaa

SEQ ID NO: 87633 - DNA, 600 bp, Chicken  19866894389661_1
ggggctccactcagcatcccatgggaacagacagaaccagcaagctcagttcaggttgtttcttgagttaggatgaaaactcaggtttaacattttcaaattcacctttgaagtttgttaggtttcctcactttgtgtaagaggttctctttcctgttgcttatttggaagtattctggaaatatttctgctttttgtagccctggggtgtgtccagagcagggcaatgaagctggtgaggagtgtggagcacaggccttatgaggagaggctgaaggagctgagattgttcagtctggwgaagaggaggctcaggggagaccttattgctctctataactacctgaagggaggttgtagtgagctgggggtcagcctcttctttcgtataactagtgatgggactacagggaatggcctcaagttgtgccaggggagattctggttggatgttaggaaatattttgtctccgaaagagtggtcaggcgctggaacgggctgcccagggagggggtggagtcacaccctggaggtgttcgaggaacgtttagacgcgctgagggacatggtttagtgggaaatgctggtgatagggagat

SEQ ID NO: 87634 - DNA, 600 bp, Chicken  19866894389668_1
atcttgaagcagcctggcatgcaaacaggcccatgccctgagaccttacgcaagtcccgctcagttgagacgctttcccatggccgtggttcatgcaagtacagcgatcctcagatctgccttgtccgtaaggagaaacgctctctggagcgcagcagcagtagtgctgctgacattgccaaacgcaaagagaaactcagagaggaaaaactgcagttctccaaattcctggatgagattagccagcgggtgctgagtcccatccgcttgcgcccactagaagagaccaggggagcagarcaagaccagaattctgcctgttgtgccagaggctctgtgccagaaggccaaggggaaggtcacctggaagaggtcaaaaccaagcgtgcatctgaaagatcctcctgcccaagcagaagaaaatcagaaaagaaatgtgagggaatgggaatggcttcgtgccagagaaaatgtgcagaggaggctgagagagtttccaaactaagaaagaaacccatccttgggagaaaggacagtaaggagaagctcctttccttggacagaaaggtagtagatctgtgtcagtatgagctgcagcag

SEQ ID NO: 87635 - DNA, 600 bp, Chicken  19866894389668_2
gtccctgttcgcagctgttacagccaaaccatctatgcgctaaagtcgagcggaagcatacagtggagcggaactacccaaagaaaggatccttctcccctccaacacacaggagttgggagaagggacattcccccatctagatcctccccttccttcagcctggcactaaacaaggtaggtgccaggactgctggcttttgcagacaggggtctcacaaaggctagaactcctacctagatcttgtctcacctgtaattccaggactggggggagacagcaggcccccagacctcatrctgtgggtactcagtcaccagaagtgttgctgtcttatgttgctgctygtgtctgtgctccaagttgggtatatcttcctgggaggagccatcttccctttgactcaggaggtgggggggtaggagttggttctctctcccctctgcaggcctcttgagtgtttgcaggtcagaggtcctcagtctgcagggagcaagttggaatgctctagtgtctgcaggtggtgggaggctctcgagactctgtctgctcagtgcctagctattctggggtagtctgactctatgtttgatgtctga

SEQ ID NO: 87636 - DNA, 600 bp, Chicken  19866894389668_3
agcggaagcatacagtggagcggaactacccaaagaaaggatccttctcccctccaacacacaggagttgggagaagggacattcccccatctagatcctccccttccttcagcctggcactaaacaaggtaggtgccaggactgctggcttttgcagacaggggtctcacaaaggctagaactcctacctagatcttgtctcacctgtaattccaggactggggggagacagcaggcccccagacctcatrctgtgggtactcagtcaccagaagtgttgctgtcttatgttgctgctygtgtctgtgctccaagttgggtatatcttcctgggaggagccatcttccctttgactcaggaggtgggggggtaggagttggttctctctcccctctgcaggcctcttgagtgtttgcaggtcagaggtcctcagtctgcagggagcaagttggaatgctctagtgtctgcaggtggtgggaggctctcgagactctgtctgctcagtgcctagctattctggggtagtctgactctatgtttgatgtctgactgaggcctttgtaagctgtatcctttcttctcctttgggcctgcttt

SEQ ID NO: 87637 - DNA, 599 bp, Chicken  19866894389706_1
  misc_feature (1)..(26): n is any nucleotide
nnnnnnnnnnnnnnnnnnnnnnnnnncaagcatgcttgaagaaatactgccttttgcttattgttcctgaagctgttctttgacccacattattgctttttaaggcaccttccactggaatgtgacctctatctacttcactcagatgtgtcttcatgcttctgttagggaaacatcctcagttttattcagtatttcttgtcaaactgaacagaactagcaaattgctcttgcagagtccgtaattaggcactagttgattagtgctgggtcactggaagagcaggtttccacctgtaraagtttgaacattccctgcatattgctcaggactgagccaaaggctgcctctgctctcaagggttttgcaatcagctgtcacacagaactgtattaaacaggaactaaaaatatctgcctcatttcccagcatgagatctgcttaatcaacacgtgcaggtggagttcccacccactgctgtgtttcctgcccttgctgtctccctgatctcctctgccaccatggccgggcacccagcaatacagaccccacactgctatgggcaactctgcctgccctgagctgctcaaaaagccag

SEQ ID NO: 87638 - DNA, 600 bp, Chicken  19866894389707_1
ccattaggaagaaggtgtcaatctaaggttattttttgccaaggctgacttccaattctcttcaccttgttttatcctccagcagggcagcaagatctgtatgtttattaaatgcattaaatatccctttataaatatgtatttatttagtttaataaatatatatttacaaagtcgtatttatacatatatttataaatattggtataaataaccatctatttatacagtagtgttctatagaactacagttagcagatgcattaaacgtaatgaaaagcttgctattttccaccaggytggcagctgatctgtctttcttcttcttgctctgaactgttatccagacctgcccatgtgttaaaccttcatatcctccacactttggggactttctctcatgttgtacaacagagcatctgtctgagaaggagcaggaaagtcagtcctctgatttactgctgatggggagccataaattttctttaggggaaacacaaggatgtagatcatagatgtgggaactctggatcaatatttttttccttttttcttgcattgggtgtaagtagctgcggattcactctcaccagagcaagc

SEQ ID NO: 87639 - DNA, 599 bp, Chicken  19866894389713_1
  misc_feature (1)..(61): n is any nucleotide
nnnnnnnnnnnnnnnnnnnnnnnnnnnnnnnnnnnnnnnnnnnnnnnnnnnnnnnnnnnnnagaaaggacagaggaagaaaatgcttctagatctgcaacaagatcttaccaacgtgcagaaggctgtcctgtatggagtgcaactggtgtatattccatgaaacctgacagccaagagaaaggttgattcaatgtccaaaaagcactcctagcaatatttctcagccttataatcagacaaaaacttctaaacactgtcacatcagccacctgtactttctgttgcccagcttcttccwgaaaaggaatgtcttgtttttccccattaccyrcccccttacgcccccactaacccagagttttccatctccattgcctagtcaggatttttmgtgttaattctgcctttccattctgcaggtctcatttcccagtccttgccttaaaacagccctctaaagatggcacagactttcttacccagatccaagatgtgcatgtcactgaggtagagacaagacctctgacccccaaagatcagcagcttattcttcagtagagtagctgaatgcctgagaagagaagcagcaaatgagca

SEQ ID NO: 87640 - DNA, 599 bp, Chicken  19866894389713_2
  misc_feature (1)..(29): n is any nucleotide
nnnnnnnnnnnnnnnnnnnnnnnnnnnnnagaaaggacagaggaagaaaatgcttctagatctgcaacaagatcttaccaacgtgcagaaggctgtcctgtatggagtgcaactggtgtatattccatgaaacctgacagccaagagaaaggttgattcaatgtccaaaaagcactcctagcaatatttctcagccttataatcagacaaaaacttctaaacactgtcacatcagccacctgtactttctgttgcccagcttcttccwgaaaaggaatgtcttgtttttccccattaccyrcccccttacgcccccactaacccagagttttccatctccattgcctagtcaggatttttmgtgttaattctgcctttccattctgcaggtctcatttcccagtccttgccttaaaacagccctctaaagatggcacagactttcttacccagatccaagatgtgcatgtcactgaggtagagacaagacctctgacccccaaagatcagcagcttattcttcagtagagtagctgaatgcctgagaagagaagcagcaaatgagcaaagcatcttcagcacgctcccccatgtgttag

SEQ ID NO: 87641 - DNA, 599 bp, Chicken  19866894389713_3
  misc_feature (1)..(28): n is any nucleotide
nnnnnnnnnnnnnnnnnnnnnnnnnnnnagaaaggacagaggaagaaaatgcttctagatctgcaacaagatcttaccaacgtgcagaaggctgtcctgtatggagtgcaactggtgtatattccatgaaacctgacagccaagagaaaggttgattcaatgtccaaaaagcactcctagcaatatttctcagccttataatcagacaaaaacttctaaacactgtcacatcagccacctgtactttctgttgcccagcttcttccwgaaaaggaatgtcttgtttttccccattaccyrcccccttacgcccccactaacccagagttttccatctccattgcctagtcaggatttttmgtgttaattctgcctttccattctgcaggtctcatttcccagtccttgccttaaaacagccctctaaagatggcacagactttcttacccagatccaagatgtgcatgtcactgaggtagagacaagacctctgacccccaaagatcagcagcttattcttcagtagagtagctgaatgcctgagaagagaagcagcaaatgagcaaagcatcttcagcacgctcccccatgtgttagc

SEQ ID NO: 87642 - DNA, 600 bp, Chicken  19866894389713_4
ctgcaacaagatcttaccaacgtgcagaaggctgtcctgtatggagtgcaactggtgtatattccatgaaacctgacagccaagagaaaggttgattcaatgtccaaaaagcactcctagcaatatttctcagccttataatcagacaaaaacttctaaacactgtcacatcagccacctgtactttctgttgcccagcttcttccwgaaaaggaatgtcttgtttttccccattaccyrcccccttacgcccccactaacccagagttttccatctccattgcctagtcaggatttttmgtgttaattctgcctttccattctgcaggtctcatttcccagtccttgccttaaaacagccctctaaagatggcacagactttcttacccagatccaagatgtgcatgtcactgaggtagagacaagacctctgacccccaaagatcagcagcttattcttcagtagagtagctgaatgcctgagaagagaagcagcaaatgagcaaagcatcttcagcacgctcccccatgtgttagcctttgttcagcctgccttggcttctattaatgagttgcaatagcttctgtctgcacccctc

SEQ ID NO: 87643 - DNA, 600 bp, Chicken  19866894389717_1
tcttaatataatccatataagcccagacagcgcatgcaagaggaatgaatgacataagaagcaaagacaaccagttcagaaacatgtgaaaggtcaaaagggcagataaaccccacattttacctgagtcaaatcaaagtaagagtcaaatcaggtatttttactattacaaaatactgactttccaattactttcccactgtacatgctggtatggcagcttctaacttaacaaaatggcaagagaatactgagcttgacctctatttaagaatgctttcttacaagcaaggaaagagyataacaacaacagcatgacttatcaagcctgcctyagcagatgacagtcaaatacagtgtataatgcaagcaatacaatcagtagaaatagtgtaatggaaaaaagctgaaccaaataccatccagacataataagtaagacacaatgaatactcatacaaaagaacagcattctgaaggataaagtaaaactcaccagctggagcgcagagcaccaacctgcatgatccataaggttgtttgggaacttataactgagacttctacagctctcactatctgaaaacaaaacaaaacaaa

SEQ ID NO: 87644 - DNA, 600 bp, Chicken  19866894389717_2
gcaagaggaatgaatgacataagaagcaaagacaaccagttcagaaacatgtgaaaggtcaaaagggcagataaaccccacattttacctgagtcaaatcaaagtaagagtcaaatcaggtatttttactattacaaaatactgactttccaattactttcccactgtacatgctggtatggcagcttctaacttaacaaaatggcaagagaatactgagcttgacctctatttaagaatgctttcttacaagcaaggaaagagyataacaacaacagcatgacttatcaagcctgcctyagcagatgacagtcaaatacagtgtataatgcaagcaatacaatcagtagaaatagtgtaatggaaaaaagctgaaccaaataccatccagacataataagtaagacacaatgaatactcatacaaaagaacagcattctgaaggataaagtaaaactcaccagctggagcgcagagcaccaacctgcatgatccataaggttgtttgggaacttataactgagacttctacagctctcactatctgaaaacaaaacaaaacaaaaaatgacaacaagcaaacaaacaccaagacaaata

SEQ ID NO: 87645 - DNA, 600 bp, Chicken  19866894389719_1
atcttattaaaaggaggatatttatttaccattctgccaagcaaactaatgcgtttattctttcctgcacatacagcttcctttgccattagagttctgcatgaagataaagcctaaaactgtatcatttcagtcaatggaaatttctttattgacttatgagagcatgttatgttctgtagcagtatagcaaaatagtcttgtaattttatctaggcgaggtacttgcagccaattttgctgtcagtcctgctatatctgttactgaaaaaaatctgaatttgtatttattaaagtttyctgtagttctcagttcatgaattgaaaaacagcacttttgttcaccttttgagatacagaaaaggatggtttttttctttaactayatatgtttgttttctcagacatttatcttctgtttctgttgatggactgaataagctgctgaccagtcttatcaattgaagtaaatggcaagaccccctttagcttccgtgattcaagtaagaaaaaaagcagmaactggagaactcaggaagggcagatagattataaaacaatttatccagttgtctaatgctacataatggctatatgtct

SEQ ID NO: 87646 - DNA, 600 bp, Chicken  19866894389719_2
cattagagttctgcatgaagataaagcctaaaactgtatcatttcagtcaatggaaatttctttattgacttatgagagcatgttatgttctgtagcagtatagcaaaatagtcttgtaattttatctaggcgaggtacttgcagccaattttgctgtcagtcctgctatatctgttactgaaaaaaatctgaatttgtatttattaaagtttyctgtagttctcagttcatgaattgaaaaacagcacttttgttcaccttttgagatacagaaaaggatggtttttttctttaactayatatgtttgttttctcagacatttatcttctgtttctgttgatggactgaataagctgctgaccagtcttatcaattgaagtaaatggcaagaccccctttagcttccgtgattcaagtaagaaaaaaagcagmaactggagaactcaggaagggcagatagattataaaacaatttatccagttgtctaatgctacataatggctatatgtctgtctaatactctataatgtctacaactcttagaaggaaagctgtcttttttagaggcttgcctctgcacttgttaaattggtcaat

SEQ ID NO: 87647 - DNA, 600 bp, Chicken  19866894389719_3
ggtacttgcagccaattttgctgtcagtcctgctatatctgttactgaaaaaaatctgaatttgtatttattaaagtttyctgtagttctcagttcatgaattgaaaaacagcacttttgttcaccttttgagatacagaaaaggatggtttttttctttaactayatatgtttgttttctcagacatttatcttctgtttctgttgatggactgaataagctgctgaccagtcttatcaattgaagtaaatggcaagaccccctttagcttccgtgattcaagtaagaaaaaaagcagmaactggagaactcaggaagggcagatagattataaaacaatttatccagttgtctaatgctacataatggctatatgtctgtctaatactctataatgtctacaactcttagaaggaaagctgtcttttttagaggcttgcctctgcacttgttaaattggtcaatacattgcctgaactccctgcaaaagagagaggttggttttagttctcaaaaaaaaaaaaaaaaaaaaaagatttttggttggcaatgggtagtgagcaatgattatttccagacagattactgtcaagaaatgc

SEQ ID NO: 87648 - DNA, 600 bp, Chicken  19866894389721_1
agtaaatttatgacaggaatggaggccaagtctactaagaccttgctatccagatctgccatcatagttcagtgtaccatggagtagtcagaagcatttccattttgcaggattttatatatgagctgattaaaggtttttcttcttgccagccagcaaaaatacgtatcagtataaggaattattcaaagaaaatttaaactttaaatgatacctgttttatcactgagtcttttgttggggaatgctgacagatataagtaattggcacacagagaattcaaaatcaagtttatagtwggaaattatattgcctggcagctacaagtaacagagaattcaacagtttgctagttaaaacataattaaagtaatattcatatttaaacactattaccagtagtttttaatgcaaatatcaacagatatcagtgagtgactgactgctgcagagaagttaatagtgcagcataaagaacaggtgctgggactgaaaattattttcatagtgcaaaaaataaaagcttcaactgagaaaaaaaaaatgaaaagcacattttgacatgcagaacactattgtgggagccaaatgaacagata

SEQ ID NO: 87649 - DNA, 600 bp, Chicken  19866894389724_1
tggacaacgtacatattgcagaagaactaatactagccaatttggactcattgagccacacaaatatttcatatgcagcaagaattaaaccagagaccttgcacccaccatatccaggtcaaaagcaatggttaagagagctatctctcagtgtcccacagagcaaacaaaaactttcattttttcagcctcaggactattacctttagcatcagggcagtgctgtcataggcatgcagggccatgcagctctgagcagattaaaggttgtacaaccttcatctgctttgtgaatcatarttttctgaaatgcaagtacttgctcagtaggaatgtcagtcagtactaaccttgatcacagacaactttctcttgcttttttaaaaacatctagagttctttctcccaatttatcctcaaagtgagaagcaagtttcagtcctccacgtctgtaaaatttactgaagtttctaaacttctatatttctataatggctgttttttagttctttagactggaatctcagtttatagtaagtatttcagaaatacagtgtattcaaagtaaggaatttggcaacaatcgagaactgaatttga

SEQ ID NO: 87650 - DNA, 600 bp, Chicken  19866894389732_1
agctcctgagacctttcgcatttcaatccattgaaaaatctacaatctggaagtctggatctggatctgacattactcaaatatttctgccattatttactcccactcgagactttgtctctcaaacaagaaccttactgttctgctatcactgtaccttgatttaatctggcacaacaatatccttccttttatgcctacctattttcagttccctacataatttctgagcttatttgcagaagactgtaaatttaaaagctcttcatttgtgggttgtcttggactgctctgcctgcwcaaagaagctgagtgcctcaagctccaagggagagccaagactaatcaaccacacagagrtatttttataatcgttctttttgaatgtcattgtaggagtatcacacggcacagatgtaggtctaaaaataaatattcctggcttcaaacctctcccattgatatggtttgtgtttggggattctttttccattctttctctcttaaagtagaactgtagtgtgagactcagcaccaggaacagcgattgtgccaaatttcccatgccagagcatatgcttaccctaagaagaaatacca

SEQ ID NO: 87651 - DNA, 600 bp, Chicken  19866894389732_2
ctggatctgacattactcaaatatttctgccattatttactcccactcgagactttgtctctcaaacaagaaccttactgttctgctatcactgtaccttgatttaatctggcacaacaatatccttccttttatgcctacctattttcagttccctacataatttctgagcttatttgcagaagactgtaaatttaaaagctcttcatttgtgggttgtcttggactgctctgcctgcwcaaagaagctgagtgcctcaagctccaagggagagccaagactaatcaaccacacagagrtatttttataatcgttctttttgaatgtcattgtaggagtatcacacggcacagatgtaggtctaaaaataaatattcctggcttcaaacctctcccattgatatggtttgtgtttggggattctttttccattctttctctcttaaagtagaactgtagtgtgagactcagcaccaggaacagcgattgtgccaaatttcccatgccagagcatatgcttaccctaagaagaaataccatgtagtgctgcactctttcagtttgactcratagtactccttcgaatactatctaatcta

SEQ ID NO: 87652 - DNA, 600 bp, Chicken  19866894389732_3
gagagccaagactaatcaaccacacagagrtatttttataatcgttctttttgaatgtcattgtaggagtatcacacggcacagatgtaggtctaaaaataaatattcctggcttcaaacctctcccattgatatggtttgtgtttggggattctttttccattctttctctcttaaagtagaactgtagtgtgagactcagcaccaggaacagcgattgtgccaaatttcccatgccagagcatatgcttaccctaagaagaaataccatgtagtgctgcactctttcagtttgactcratagtactccttcgaatactatctaatctaaatactatctaatctaaaaactaatgtattttgctgtacatagacagaagacaaaaaagtgtgtgtgccatttggaagtaccacacaaatctcttcatttttttgctgagagttttttgagggacaaggatgaagaaccatgaactatttaaagatatgcaggacagaattagagtatgatttctcggtatattcaaaattctattataggaaagtggaaacacaatcaatatgtaaagcaaagaatttattgttaccataatggaaatt

SEQ ID NO: 87653 - DNA, 600 bp, Chicken  19866894389738_1
tgttcttaaagaaaaaagtttctattagggattgggattttgatgattaaaattaatgagcgatttcagattctttatcagtatttatgaaaactcattccttttttctcctctcatgttctgacatacgaaaaagactctttcatcccgatcagcatttttatttgcttgtaaaatttagcctgatttttttgtcatctagtttcaagacagtgtgagctagtaacgggtgagcagtcgcagataaataagcactgagaagtaagccatatgtcaaccatatttttactaaaacataayaagtttccctacaggttggaaatagtattttttaattaagaagacatttaaactgtaaaagaagaaaagattttgagagagggtaacgcgagcaggagtacaggctttgcagaggacttggtatatgttgtccatggtaatacagtctagygggctgaaatgtaaacttctgtactgagctagatacaacttataaattttgtatagctggatctaaactttttgttggagttgttttaaaatgtgtcttcataaacacttcccatggagatattctttgtaaaaataaatgttaataac

SEQ ID NO: 87654 - DNA, 555 bp, Chicken  19866894389738_2
tcagcatttttatttgcttgtaaaatttagcctgatttttttgtcatctagtttcaagacagtgtgagctagtaacgggtgagcagtcgcagataaataagcactgagaagtaagccatatgtcaaccatatttttactaaaacataayaagtttccctacaggttggaaatagtattttttaattaagaagacatttaaactgtaaaagaagaaaagattttgagagagggtaacgcgagcaggagtacaggctttgcagaggacttggtatatgttgtccatggtaatacagtctagygggctgaaatgtaaacttctgtactgagctagatacaacttataaattttgtatagctggatctaaactttttgttggagttgttttaaaatgtgtcttcataaacacttcccatggagatattctttgtaaaaataaatgttaataactgactgacagagaatttatagaactgcaggcttaactgcctttaggccccagaggattacggtgcagtggagccaaatttataccaagaataaatataaaatagaa

SEQ ID NO: 87655 - DNA, 600 bp, Chicken  19866894389745_1
aagaaaggctgtattgcacaatagtatcagtaatgtcacgtggcacagaatttcacaaaacattagaaaatgggctctggagggttctttcttacacaacagggaaaaaaaaaaaacacttagaaaatggttcaagattttggtttcctctgggttcattgagtcttaacctctcccagaaagtgtgccatattttacagtaaaccacagaaaccttttccttagaaggaactgtaacttacttcgagcaatattacagcctgaacaaaggctgtatgcaaagaactcctaataacatgwgagtagacaaaaccctactgtacagtacaactgacttttaatagtgaattactctacactggaaacttttctaataatgcatgagttctttcaagttttggtgagcattagtattagtggtttcctgtgatgtggcgtttatgatagtagtacaagctcagcttgcaagtcagatctgcctagaggcagctcctggatctttgctcatattttcccacaatgaaaaatatagttgcagtaaattaaacattttggccatttccacggagtttttgtggacttgtgtatgtgtttatgaga

SEQ ID NO: 87656 - DNA, 600 bp, Chicken  19866894389760_1
atcaatctccaggctgcgactggtaggcatctgaagagagcagcagccgactggagtgaagtacttgcaccctggtgtaggtatactctgagggtcctggcagatttctcatcacaaggcttaagtcagtgcctaaacctgctaaaacattaggttttgcaacctcatgctgctactcagaaaaacataactatgtgcagtgtatactatgaaggcatcacattaaagaaagtacaaacgtatttagtactacttcgttatatctaaagtatgattgagtaggaggcacacacaggcaayttgcacagctcactaaaagcccacgccttcagttatccttaaccagactttcccctaacgcaccttacagactacagtacaaastggacagtrttaaagaaaagtcaaagccaygacgtgaataaggtcactaacagaaatcccacttcagtactttatctcacgatgctaaaagcagcaccaaacaaaaattaarggtaagtaggaatgtacagtattgagattccataaaccagatgaatgagggtaaaaaaaagcatcagtgcgtaagaatttcagtcatattccaaaaagctaggt

SEQ ID NO: 87657 - DNA, 600 bp, Chicken  19866894389760_2
actctgagggtcctggcagatttctcatcacaaggcttaagtcagtgcctaaacctgctaaaacattaggttttgcaacctcatgctgctactcagaaaaacataactatgtgcagtgtatactatgaaggcatcacattaaagaaagtacaaacgtatttagtactacttcgttatatctaaagtatgattgagtaggaggcacacacaggcaayttgcacagctcactaaaagcccacgccttcagttatccttaaccagactttcccctaacgcaccttacagactacagtacaaastggacagtrttaaagaaaagtcaaagccaygacgtgaataaggtcactaacagaaatcccacttcagtactttatctcacgatgctaaaagcagcaccaaacaaaaattaarggtaagtaggaatgtacagtattgagattccataaaccagatgaatgagggtaaaaaaaagcatcagtgcgtaagaatttcagtcatattccaaaaagctaggtaactgacagttaactactattccaaacatcagatgacacaaaacagacatcttcagactacatacaatgaaattgtcatctcct

SEQ ID NO: 87658 - DNA, 600 bp, Chicken  19866894389760_3
gtcctggcagatttctcatcacaaggcttaagtcagtgcctaaacctgctaaaacattaggttttgcaacctcatgctgctactcagaaaaacataactatgtgcagtgtatactatgaaggcatcacattaaagaaagtacaaacgtatttagtactacttcgttatatctaaagtatgattgagtaggaggcacacacaggcaayttgcacagctcactaaaagcccacgccttcagttatccttaaccagactttcccctaacgcaccttacagactacagtacaaastggacagtrttaaagaaaagtcaaagccaygacgtgaataaggtcactaacagaaatcccacttcagtactttatctcacgatgctaaaagcagcaccaaacaaaaattaarggtaagtaggaatgtacagtattgagattccataaaccagatgaatgagggtaaaaaaaagcatcagtgcgtaagaatttcagtcatattccaaaaagctaggtaactgacagttaactactattccaaacatcagatgacacaaaacagacatcttcagactacatacaatgaaattgtcatctcctatacaaata

SEQ ID NO: 87659 - DNA, 600 bp, Chicken  19866894389760_4
caaggcttaagtcagtgcctaaacctgctaaaacattaggttttgcaacctcatgctgctactcagaaaaacataactatgtgcagtgtatactatgaaggcatcacattaaagaaagtacaaacgtatttagtactacttcgttatatctaaagtatgattgagtaggaggcacacacaggcaayttgcacagctcactaaaagcccacgccttcagttatccttaaccagactttcccctaacgcaccttacagactacagtacaaastggacagtrttaaagaaaagtcaaagccaygacgtgaataaggtcactaacagaaatcccacttcagtactttatctcacgatgctaaaagcagcaccaaacaaaaattaarggtaagtaggaatgtacagtattgagattccataaaccagatgaatgagggtaaaaaaaagcatcagtgcgtaagaatttcagtcatattccaaaaagctaggtaactgacagttaactactattccaaacatcagatgacacaaaacagacatcttcagactacatacaatgaaattgtcatctcctatacaaatagaattgattttttgtttgaag

SEQ ID NO: 87660 - DNA, 600 bp, Chicken  19866894389760_5
gcagtgtatactatgaaggcatcacattaaagaaagtacaaacgtatttagtactacttcgttatatctaaagtatgattgagtaggaggcacacacaggcaayttgcacagctcactaaaagcccacgccttcagttatccttaaccagactttcccctaacgcaccttacagactacagtacaaastggacagtrttaaagaaaagtcaaagccaygacgtgaataaggtcactaacagaaatcccacttcagtactttatctcacgatgctaaaagcagcaccaaacaaaaattaarggtaagtaggaatgtacagtattgagattccataaaccagatgaatgagggtaaaaaaaagcatcagtgcgtaagaatttcagtcatattccaaaaagctaggtaactgacagttaactactattccaaacatcagatgacacaaaacagacatcttcagactacatacaatgaaattgtcatctcctatacaaatagaattgattttttgtttgaagtcagaagcatttaagaagttttttttatctggattatcagtctgtaccactgccttcaatgatgcagtcagagctcccagag

SEQ ID NO: 87661 - DNA, 600 bp, Chicken  19866894389761_1
tgtgtagttacattttatttttgctgaactttatagtaggttgacaggaaaagagcctgttccaggaaaaaataagtagcaatatagctttcacgctactactatagcagggaagggggaaagtatatttcctagtttgtcacaatgcacttgatgcaaatattttcagtgtgatggctagagatagtggcagaaatggccatttcatagtctgattcatatattagtggtagaagcagtctaaacttattatatattagtatttttatcaggttctgagcttgaagatggaaatatttmtgtgttcattaatgctaacartatgacggggcattttgcattaccataagaagaacgaaaatattcagtaattagaacaaaaagggttatctcaaatgcatattaaaaatagtggaaaactttgttttccagttcctgtgtgcatttaaaataagcctctggatcaagcttaagacctcatatggctatggcacgttttactatcctgattcactgcagctgtcaacaaacctttaacagaatttcattgactgaaaaaaaaamcaaccctgcttttaatggaatgctataatttcatct

SEQ ID NO: 87662 - DNA, 600 bp, Chicken  19866894389761_2
tgctgaactttatagtaggttgacaggaaaagagcctgttccaggaaaaaataagtagcaatatagctttcacgctactactatagcagggaagggggaaagtatatttcctagtttgtcacaatgcacttgatgcaaatattttcagtgtgatggctagagatagtggcagaaatggccatttcatagtctgattcatatattagtggtagaagcagtctaaacttattatatattagtatttttatcaggttctgagcttgaagatggaaatatttmtgtgttcattaatgctaacartatgacggggcattttgcattaccataagaagaacgaaaatattcagtaattagaacaaaaagggttatctcaaatgcatattaaaaatagtggaaaactttgttttccagttcctgtgtgcatttaaaataagcctctggatcaagcttaagacctcatatggctatggcacgttttactatcctgattcactgcagctgtcaacaaacctttaacagaatttcattgactgaaaaaaaaamcaaccctgcttttaatggaatgctataatttcatctgttatgaaaagaaaatatgtt

SEQ ID NO: 87663 - DNA, 600 bp, Chicken  19866894389761_3
tttatcaggttctgagcttgaagatggaaatatttmtgtgttcattaatgctaacartatgacggggcattttgcattaccataagaagaacgaaaatattcagtaattagaacaaaaagggttatctcaaatgcatattaaaaatagtggaaaactttgttttccagttcctgtgtgcatttaaaataagcctctggatcaagcttaagacctcatatggctatggcacgttttactatcctgattcactgcagctgtcaacaaacctttaacagaatttcattgactgaaaaaaaaamcaaccctgcttttaatggaatgctataatttcatctgttatgaaaagaaaatatgttttccttacacattcttgttttttggaatttttgtgtaagcttcaattccaatacattttagctactcaataagtcagcacgctcagatttcaagcaagctacctcgagttttcatttagaatgctggtgcttctacactctcagtctctgaagtctcagctgtcatccctgggtaaaagacataaagcagcaacagaatttataatgtgcagacttaatctgagatttcttatttgattatca

SEQ ID NO: 87664 - DNA, 600 bp, Chicken  19866894389765_1
cctttctgtctcttgttcaccattttttttctttcagtgtttatccaggatcatttcaaacataataatgcaattcaggtactcaattttccccctgtaattgctgttagttaaccgtgcaatttctaaaagagggagtatgagtgtcaggtgattttgctgagtttggctcaacctcaggaagttctgctctttgacagtaattttgtcgttgatgtcctgctgatactcaaactaactggggctttttcttataattatttcagacttcttagagacttgctttcatgcttacgtacrtactgctctatttcctcaatcttctcaaggagatatgtaaataaagcttaatttttacgtattctgatcataaagatatgataatggagaagtttgttttcatcaggaaaccaaaccaaagatgggcttttctcttttttcctcagcttttttcttaacttcttgaaatagaccaaaatacgttwttattattattattattattttattattattatttggcagcttttccaatgtatgcaatgtacttcagtgtgataactctatttctgcttgtatttctctcggaggcggatggaa

SEQ ID NO: 87665 - DNA, 600 bp, Chicken  19866894389765_2
tctgctctttgacagtaattttgtcgttgatgtcctgctgatactcaaactaactggggctttttcttataattatttcagacttcttagagacttgctttcatgcttacgtacrtactgctctatttcctcaatcttctcaaggagatatgtaaataaagcttaatttttacgtattctgatcataaagatatgataatggagaagtttgttttcatcaggaaaccaaaccaaagatgggcttttctcttttttcctcagcttttttcttaacttcttgaaatagaccaaaatacgttwttattattattattattattttattattattatttggcagcttttccaatgtatgcaatgtacttcagtgtgataactctatttctgcttgtatttctctcggaggcggatggaagtatgtaggatgcagcgttatcaaaaactgtacaagtggaagtgttgagtctcttcctcctccttgaggaagaaaaaggaaatttgttggctctgtcactttctttctccaggttattgtaactactgtagatcatgtcagaaagattaggtttaggaacaagtaccatggtgcaatatagcctt

SEQ ID NO: 87666 - DNA, 600 bp, Chicken  19866894389767_1
ggaggagggggtgctgatctccctccagagccccagatgtctttatcgttgcctaatgacaattatattcaaccaattaagacactgctatcacagttgcattgttagtaagcctttggccctgagtgttgatggctgtctaattagtgtttgtgcaaagtacgactgcaactaatatataaactgacaaatacacaaaagaaaaactgttaacaggaacattttcaaaacagtagatactctcctcattcagtccatggcagcaacaaagacaggccactttccttcatggcctacttmctgctggcactgcacaactgcactgaagcggatgggtcaaccagactgccactggggctctgctggaacaggacagtggtgaggacccattttgtgggctgcctgcaacacactgctctggggcaagtcccactgcatcgagttggtccgaacaccaaagacttctgataagacacttcacaaatcagtttctggttttcatattttctctgaaggatttgtagcaagaaaataaaaaaggggaatgaaaaacctttgtttcacagtcaggtttgatttccagaaggcaaagtctgttca

SEQ ID NO: 87667 - DNA, 599 bp, Chicken  19866894389775_1
  misc_feature (1)..(189): n is any nucleotide
nnnnnnnnnnnnnnnnnnnnnnnnnnnnnnnnnnnnnnnnnnnnnnnnnnnnnnnnnnnnnnnnnnnnnnnnnnnnnnnnnnnnnnnnnnnnnnnnnnnnnnnnnnnnnnnnnnnnnnnnnnnnnnnnnnnnnnnnnnnnnnnnnnnnnnnnnnnnnnnnnnnnnnnnnnnnnnnnnnnnnnnnnnnnnaaatggacatcataacccccagtttctgaagtcccataggcttgcagtttacagttaccttaaattgacacaccttaagaagattgcttaaaagcctggagaagaatatamcttatgcaatatacctatagctctggaggtacaatagctcagsgccatgtccagcagttattctccaatattttctctgcagtwatctccctgtatcatgtttacactgctacygagaaatcctctttggctagagtgtggtttagatatgtctagatacctcagcttttcacgtgatttgaaaataaagaaacaaatggagcccttaatctgctagaaatctactggctttggtgtcttctagtgatcagcagttccctgaagtgaaaccagaaggttrttcccagacaccccctcac

SEQ ID NO: 87668 - DNA, 599 bp, Chicken  19866894389775_2
  misc_feature (1)..(146): n is any nucleotide
nnnnnnnnnnnnnnnnnnnnnnnnnnnnnnnnnnnnnnnnnnnnnnnnnnnnnnnnnnnnnnnnnnnnnnnnnnnnnnnnnnnnnnnnnnnnnnnnnnnnnnnnnnnnnnnnnnnnnnnnnnnnnnnnnnnnnnnnnnnnnnnnnnaaatggacatcataacccccagtttctgaagtcccataggcttgcagtttacagttaccttaaattgacacaccttaagaagattgcttaaaagcctggagaagaatatamcttatgcaatatacctatagctctggaggtacaatagctcagsgccatgtccagcagttattctccaatattttctctgcagtwatctccctgtatcatgtttacactgctacygagaaatcctctttggctagagtgtggtttagatatgtctagatacctcagcttttcacgtgatttgaaaataaagaaacaaatggagcccttaatctgctagaaatctactggctttggtgtcttctagtgatcagcagttccctgaagtgaaaccagaaggttrttcccagacaccccctcactactgatagtgactgaaactgtgactaaatgtctgagggyaaa

SEQ ID NO: 87669 - DNA, 599 bp, Chicken  19866894389775_3
  misc_feature (1)..(105): n is any nucleotide
nnnnnnnnnnnnnnnnnnnnnnnnnnnnnnnnnnnnnnnnnnnnnnnnnnnnnnnnnnnnnnnnnnnnnnnnnnnnnnnnnnnnnnnnnnnnnnnnnnnnnnnnnaaatggacatcataacccccagtttctgaagtcccataggcttgcagtttacagttaccttaaattgacacaccttaagaagattgcttaaaagcctggagaagaatatamcttatgcaatatacctatagctctggaggtacaatagctcagsgccatgtccagcagttattctccaatattttctctgcagtwatctccctgtatcatgtttacactgctacygagaaatcctctttggctagagtgtggtttagatatgtctagatacctcagcttttcacgtgatttgaaaataaagaaacaaatggagcccttaatctgctagaaatctactggctttggtgtcttctagtgatcagcagttccctgaagtgaaaccagaaggttrttcccagacaccccctcactactgatagtgactgaaactgtgactaaatgtctgagggyaaatcrgagctcccactgctctttcggtgctgtaataaacagtg

SEQ ID NO: 87670 - DNA, 599 bp, Chicken  19866894389775_4
  misc_feature (1)..(75): n is any nucleotide
nnnnnnnnnnnnnnnnnnnnnnnnnnnnnnnnnnnnnnnnnnnnnnnnnnnnnnnnnnnnnnnnnnnnnnnnnnnaaatggacatcataacccccagtttctgaagtcccataggcttgcagtttacagttaccttaaattgacacaccttaagaagattgcttaaaagcctggagaagaatatamcttatgcaatatacctatagctctggaggtacaatagctcagsgccatgtccagcagttattctccaatattttctctgcagtwatctccctgtatcatgtttacactgctacygagaaatcctctttggctagagtgtggtttagatatgtctagatacctcagcttttcacgtgatttgaaaataaagaaacaaatggagcccttaatctgctagaaatctactggctttggtgtcttctagtgatcagcagttccctgaagtgaaaccagaaggttrttcccagacaccccctcactactgatagtgactgaaactgtgactaaatgtctgagggyaaatcrgagctcccactgctctttcggtgctgtaataaacagtgtgcagrcaggttcactaaaggacgagactg

SEQ ID NO: 87671 - DNA, 600 bp, Chicken  19866894389775_5
aagcctggagaagaatatamcttatgcaatatacctatagctctggaggtacaatagctcagsgccatgtccagcagttattctccaatattttctctgcagtwatctccctgtatcatgtttacactgctacygagaaatcctctttggctagagtgtggtttagatatgtctagatacctcagcttttcacgtgatttgaaaataaagaaacaaatggagcccttaatctgctagaaatctactggctttggtgtcttctagtgatcagcagttccctgaagtgaaaccagaaggttrttcccagacaccccctcactactgatagtgactgaaactgtgactaaatgtctgagggyaaatcrgagctcccactgctctttcggtgctgtaataaacagtgtgcagrcaggttcactaaaggacgagactgaaatgcatagttgagttaccctaccgtagtttcaacactttcagtgaatatcaatttagtctcctttaaagttctgatataaaacattactgtttttccttttaatgaaaatgacaggctgcacactagtgttagattcatccttagtgatgagttctgtaagcacc

SEQ ID NO: 87672 - DNA, 600 bp, Chicken  19866894389775_6
cagsgccatgtccagcagttattctccaatattttctctgcagtwatctccctgtatcatgtttacactgctacygagaaatcctctttggctagagtgtggtttagatatgtctagatacctcagcttttcacgtgatttgaaaataaagaaacaaatggagcccttaatctgctagaaatctactggctttggtgtcttctagtgatcagcagttccctgaagtgaaaccagaaggttrttcccagacaccccctcactactgatagtgactgaaactgtgactaaatgtctgagggyaaatcrgagctcccactgctctttcggtgctgtaataaacagtgtgcagrcaggttcactaaaggacgagactgaaatgcatagttgagttaccctaccgtagtttcaacactttcagtgaatatcaatttagtctcctttaaagttctgatataaaacattactgtttttccttttaatgaaaatgacaggctgcacactagtgttagattcatccttagtgatgagttctgtaagcacccacacatgtcaacagatcagtccctcagcaactgatgagggtattcctgtyctttggga

SEQ ID NO: 87673 - DNA, 600 bp, Chicken  19866894389775_7
catgtccagcagttattctccaatattttctctgcagtwatctccctgtatcatgtttacactgctacygagaaatcctctttggctagagtgtggtttagatatgtctagatacctcagcttttcacgtgatttgaaaataaagaaacaaatggagcccttaatctgctagaaatctactggctttggtgtcttctagtgatcagcagttccctgaagtgaaaccagaaggttrttcccagacaccccctcactactgatagtgactgaaactgtgactaaatgtctgagggyaaatcrgagctcccactgctctttcggtgctgtaataaacagtgtgcagrcaggttcactaaaggacgagactgaaatgcatagttgagttaccctaccgtagtttcaacactttcagtgaatatcaatttagtctcctttaaagttctgatataaaacattactgtttttccttttaatgaaaatgacaggctgcacactagtgttagattcatccttagtgatgagttctgtaagcacccacacatgtcaacagatcagtccctcagcaactgatgagggtattcctgtyctttgggagctggg

SEQ ID NO: 87674 - DNA, 600 bp, Chicken  19866894389775_8
cctgtatcatgtttacactgctacygagaaatcctctttggctagagtgtggtttagatatgtctagatacctcagcttttcacgtgatttgaaaataaagaaacaaatggagcccttaatctgctagaaatctactggctttggtgtcttctagtgatcagcagttccctgaagtgaaaccagaaggttrttcccagacaccccctcactactgatagtgactgaaactgtgactaaatgtctgagggyaaatcrgagctcccactgctctttcggtgctgtaataaacagtgtgcagrcaggttcactaaaggacgagactgaaatgcatagttgagttaccctaccgtagtttcaacactttcagtgaatatcaatttagtctcctttaaagttctgatataaaacattactgtttttccttttaatgaaaatgacaggctgcacactagtgttagattcatccttagtgatgagttctgtaagcacccacacatgtcaacagatcagtccctcagcaactgatgagggtattcctgtyctttgggagctgggaggcttcaaatcactgccatgtgaagtcactgctacttctatgg

SEQ ID NO: 87675 - DNA, 600 bp, Chicken  19866894389775_9
ctgagggyaaatcrgagctcccactgctctttcggtgctgtaataaacagtgtgcagrcaggttcactaaaggacgagactgaaatgcatagttgagttaccctaccgtagtttcaacactttcagtgaatatcaatttagtctcctttaaagttctgatataaaacattactgtttttccttttaatgaaaatgacaggctgcacactagtgttagattcatccttagtgatgagttctgtaagcacccacacatgtcaacagatcagtccctcagcaactgatgagggtattcctgtyctttgggagctgggaggcttcaaatcactgccatgtgaagtcactgctacttctatggtctggatatgccctccaaggaacaacaggcaactggtaaatgaagggccttaatcagatttccagttacactatttccctatggatggcactttcacccacttttgaaaaatctaacatcataattttggctgcacaccattggaagatgtcccagtggtgagaaagccctgtgctaatgctttttgtccaatcagtattatataaaaaggcactcggaagagctgaccatgttcccttcca

SEQ ID NO: 87676 - DNA, 599 bp, Chicken  19866894389777_1
  misc_feature (1)..(225): n is any nucleotide
nnnnnnnnnnnnnnnnnnnnnnnnnnnnnnnnnnnnnnnnnnnnnnnnnnnnnnnnnnnnnnnnnnnnnnnnnnnnnnnnnnnnnnnnnnnnnnnnnnnnnnnnnnnnnnnnnnnnnnnnnnnnnnnnnnnnnnnnnnnnnnnnnnnnnnnnnnnnnnnnnnnnnnnnnnnnnnnnnnnnnnnnnnnnnnnnnnnnnnnnnnnnnnnnnnnnnnnnnnnnnnnnnacatttgaacttctgtttcgtattccacggtagccaaagctcaccaaaaccagagccagaaatcacgatgttaargcaagaaattgacccttggatgttggctacataggaaaaattaacccaagaagtttgcaaaatccattttaatattagatggttgttttgattcagtcatatcttttaatatccatacggctcagctttgctattttaaactctccatggttaaactttcactgtccttatgatgttgctgtattatttcctaccacgttgtgttgctgcatgtccagccgcaatgcagctcttgacatcagtttttccaccactcaataaaaattaattaaygcattaaaaacacacacacaccctaa

SEQ ID NO: 87677 - DNA, 600 bp, Chicken  19866894389777_2
accagagccagaaatcacgatgttaargcaagaaattgacccttggatgttggctacataggaaaaattaacccaagaagtttgcaaaatccattttaatattagatggttgttttgattcagtcatatcttttaatatccatacggctcagctttgctattttaaactctccatggttaaactttcactgtccttatgatgttgctgtattatttcctaccacgttgtgttgctgcatgtccagccgcaatgcagctcttgacatcagtttttccaccactcaataaaaattaattaaygcattaaaaacacacacacaccctaaagaaggaagtgactggttctccccctgaatagactttttttggatatagcactaccaagagagatttgatgctttctccagccctggacaggcatgagagacgctggcttccaaattccccctctctgtggcaccaagatgaaacatccctgcattgattcagtacttcctactacaccaaatgttacattgagcgctcaaaaactacatcagcattctttcctttactctgcacctatataaatcatcagtacaatctggatgcacactgtgt

SEQ ID NO: 87678 - DNA, 600 bp, Chicken  19866894389785_1
gctgtaatgacctcccatttctatgagttttcactatttctgcttttgtatatggtggaaaaaagttgaggccaagcaagcaccaaggcttggtagggctagaatgatttcagtagtgatacctgcagtccttgttcctgtcccttcagctgtacatttgacaacgttcttgaaaaaatgtgaaaaaagaacctttttattttttaaactaaaactaagtcatgaggggattctgggatggctttggatgaattaaaaatggattaaaaaatatctatcagcattttccattggctgagrtcactgtgaaatgacatgggacagcatttgttcctcctaccccggaggccggcgctgtttcagtggcagggagagctgactgttggtcagtgctaaattcctctctgtatcactgctctttgaactgcgtgagtgggaggggtaaactgtcaaaggcacaggcaggcctgaagggctgctgccatgctgtttgcagctctttgagtgtggttggatgctgtggtggcaaacagtatcggagctggtttaagtcactgctcccaaggtgatggaaactgagaactcaatccaactttctaa

SEQ ID NO: 87679 - DNA, 600 bp, Chicken  19866894389797_1
gttgtatcccctggttgaatagatgagaaactttgtctcctctgtgagtgcttcaatgagcagtaaacagttttcaagctttgaatcttaaaacctgttgaaattgtcttgtgtattcatttagctgtctcagcaaatgcttttttcctgtgctgcacataagccagcaggttgctgagcatccttgcagaagggagaaaataatcattcttcctcaacttaaaaaccactcatttaaatacatctatttgctttaacccccagcccaatacagtagtaggtttctagtgcacagctttrtggaatataaaaagatcttaatgttttcacgttaacattgtgtcatagatccattagtagatgatctcatgttctaaatattaattcctcatttctgtgtaatatccaggcttcttgctcagtttgcatgagtgtattactttgcatttgtaagtaagagctgaggaagtccctatagtttcacttacgaacattgttagatttcagtgtctgcacctcttgcacgttctccagggtataagcgtagcatgttgggagttcctgtcttaatgggaaatattgatatagagtattgcttcc

SEQ ID NO: 87680 - DNA, 600 bp, Chicken  19866894389802_1
tttgtccagaaatgagaagatgacttaggacacacacacaaagtttttttttttctgttgtttttaagtagcacttaaaaagtaattgctgacaaactacaacagcatcctgcagaaagcttagcagttgctgctaatccacgagaagaaaaaaaaaaataaaagaagactgctgtaactcagatgactaatcttcctgtttattagctgatttgtttctctgtaattgtgagcattatccagtgaccaactcagtataagactcatttctgagtcactggaccaggaagcaggcttatwggaatttacactattttgcactctcactaatctcatggacaaagtactgctttgttcaagttctgtacgttcagatagctaagctatttggaagctggataaawtgaaatctgctgttttctccatgagagttcaggtaccttttaccttcacagaatatactgatggcagtaaactccctatgcttcttaagtygcagtgtaaggaagcatctggacaactagaycttttaaaagtcatacctccaagataaaggcaatcagaatggcaacagcaatggcttagaagacagcaggaact

SEQ ID NO: 87681 - DNA, 600 bp, Chicken  19866894389802_2
gcatcctgcagaaagcttagcagttgctgctaatccacgagaagaaaaaaaaaaataaaagaagactgctgtaactcagatgactaatcttcctgtttattagctgatttgtttctctgtaattgtgagcattatccagtgaccaactcagtataagactcatttctgagtcactggaccaggaagcaggcttatwggaatttacactattttgcactctcactaatctcatggacaaagtactgctttgttcaagttctgtacgttcagatagctaagctatttggaagctggataaawtgaaatctgctgttttctccatgagagttcaggtaccttttaccttcacagaatatactgatggcagtaaactccctatgcttcttaagtygcagtgtaaggaagcatctggacaactagaycttttaaaagtcatacctccaagataaaggcaatcagaatggcaacagcaatggcttagaagacagcaggaacttgggagtacaggtcacaacagaattattctatgccatgctgttaagccaaattttggaagctaaaggaagacagcacacacaaacttcaaatcagatttttcct

SEQ ID NO: 87682 - DNA, 525 bp, Chicken  19866894389802_3
cctgtttattagctgatttgtttctctgtaattgtgagcattatccagtgaccaactcagtataagactcatttctgagtcactggaccaggaagcaggcttatwggaatttacactattttgcactctcactaatctcatggacaaagtactgctttgttcaagttctgtacgttcagatagctaagctatttggaagctggataaawtgaaatctgctgttttctccatgagagttcaggtaccttttaccttcacagaatatactgatggcagtaaactccctatgcttcttaagtygcagtgtaaggaagcatctggacaactagaycttttaaaagtcatacctccaagataaaggcaatcagaatggcaacagcaatggcttagaagacagcaggaacttgggagtacaggtcacaacagaattattctatgccatgctgttaagccaaattttggaagctaaaggaagacagcacacacaaacttcaaatcagatttttcctgagatatactgcgctt

SEQ ID NO: 87683 - DNA, 494 bp, Chicken  19866894389802_4
ttgtgagcattatccagtgaccaactcagtataagactcatttctgagtcactggaccaggaagcaggcttatwggaatttacactattttgcactctcactaatctcatggacaaagtactgctttgttcaagttctgtacgttcagatagctaagctatttggaagctggataaawtgaaatctgctgttttctccatgagagttcaggtaccttttaccttcacagaatatactgatggcagtaaactccctatgcttcttaagtygcagtgtaaggaagcatctggacaactagaycttttaaaagtcatacctccaagataaaggcaatcagaatggcaacagcaatggcttagaagacagcaggaacttgggagtacaggtcacaacagaattattctatgccatgctgttaagccaaattttggaagctaaaggaagacagcacacacaaacttcaaatcagatttttcctgagatatactgcgctt

SEQ ID NO: 87684 - DNA, 600 bp, Chicken  19866894389805_1
ggagactttgttctatgtgttaagtgatatgatagacaaatcacttcgactactcgtgtgaattttgtgctttgcttcttgtttttatcactaccatcttatccattttcctttcacagaatgagtgcaaatcagacttaacgcttgaatcagtttgttctgaatcagcactgatttctgtcagctcagcaaaatggacttgaatgttgaggcactgaaagtaatggaatgagcagcctgattggtccaactgtgctatagactctagcatgctttctctgtgcactcatattcttagtygcatgggaaggacatgtagaagaaagtcatagttttggctccctttgcctgtcaggttctttcagggagtaattttgaacagctagctctcacagcagtcttctgctgactgcatgatgtcccatgtcctgggttatgatgtgagagcaccttgccttggtgttcttagagtatttcaaggatttaagaaaccttgcaaaccatgagaagtccctgcagatcaaggtttcttatgctggtgtctttcagctgggacagagttgattttcctcatggggtgtggtatgattctgtgttttg

SEQ ID NO: 87685 - DNA, 600 bp, Chicken  19866894389809_1
ttatgagaggaaaactgtaatagtggaaatacagcagaaattgtaaagcgtttctttatcagtaatggccatggatgtacagtttcctgatcctttgcctctctaacatcttaggctggaacattttttcctctctgctctcttttctatacacgttcacatgtcccagggttacaagctcttcagcaatggtttttgtaaaataagctgtgagtcacaggggcacgagagctctggcaatcgaaggagtgtattcaagagagaagcaaatacagctgtaacacacagccatgggaggaraaaaaaaaaaatcaaggagaaattacactggtttaaaatgagaaggattaaaaaaagcatttaaaattagaagtgtgaactagaaaatccatctgggcttaaatctttgaaagtctactcacaggcgttctttttcacagcacaacttcacaaagttgtggtgcaatttccatggagtacctttttctcctttgcaacatgggatcccagcctgccatccacataaacatacagaggaaaggcttccccttccagcactgacagcttctatcttcatatatcttctcctcacacaacaac

SEQ ID NO: 87686 - DNA, 600 bp, Chicken  19866894389818_1
aaaatgtttgtggttactggtgtcatacgaagaaactggttgcctgttgtatgtaaatgcagcttttactaatttccacataaaactgcctacacaggaccagatgtagaatgaaaacaggacaggcaacatttttggaaagttcctgaattcctcagtcatttctgtcacctatcatgtccatgaaaaggatttttttcctgttaagcaaagaagccttggatgaatcaaaagataatatttgctggtgagctgttgaatttctactatatttctaccaataagtttaggttactgaaraattcagcctttactaaaggcaacagaatgttattcagcattaatcttacttgccttatcgtgtcccttaattataaattacagttaatcaaatcagagatatatccctttagaatatttgcaaatcttttaaatcaggtatctccttatgtgtatttcatttataacgaggttgttttcctaagaatataattagtctgttaaaccaagctgtcctgtacatctttgaacagatttcttcttttctaatctgagacgttattttctatccttgaaacacaaagcccattcacctgcaga

SEQ ID NO: 87687 - DNA, 497 bp, Chicken  19866894389819_1
gagctatatttttaataaggaatgacagaatatttagttgtttcataaatacagaataccacatgtctgagcatgttattacaacaataacactgaaaatattgtttatgaaaaattttactgagcatcaaataaagtacaagctgtaggagtataaaaatttagcatctcatgttatctatcaatcactttaaaaatgttagcaaactaaatttcacatgataactgatataaatatctacctcttaccaattaaaaatattcagaagaaaatattcttttcatgcaatttaacttctraattaatgtaaaattttccttttttaagatttatttgcatttcacagataatcctactctttttccacatctacattttttatataactgttataaagtcagattaaagcttgtgtttcttctttttattatagttctgagtaatagtctgtcattaagctaactgagcatttctttagtctggacagaaaggtcaa

SEQ ID NO: 87688 - DNA, 599 bp, Chicken  19866894389820_1
  misc_feature (1)..(218): n is any nucleotide
nnnnnnnnnnnnnnnnnnnnnnnnnnnnnnnnnnnnnnnnnnnnnnnnnnnnnnnnnnnnnnnnnnnnnnnnnnnnnnnnnnnnnnnnnnnnnnnnnnnnnnnnnnnnnnnnnnnnnnnnnnnnnnnnnnnnnnnnnnnnnnnnnnnnnnnnnnnnnnnnnnnnnnnnnnnnnnnnnnnnnnnnnnnnnnnnnnnnnnnnnnnnnnnnnnnnnnnnnnacagcactgacacagaacgctaactggagctacaccaagatcacagctgtcctcagcagacctcattctgctgtgtcccacrgcagtgctgtgtgaggtcagtgctgcctaggcaaggaagaagccttgtcatttcgaacctcagtatgaaagcaactcttatttgcagttacacccactcatcattgtgcacaggaagagtgcgagtataaaaacgcggttatgacaggccttacaagccttcctcacctgactgcagcagaatacatgttgtgtgctatgggttggatagactgcagcagarccccataaaggtgcagagcagaccctcttaaggttcgtgcagcataaagctgccatttctgggggcacagctgatga

SEQ ID NO: 87689 - DNA, 600 bp, Chicken  19866894389820_2
cactgacacagaacgctaactggagctacaccaagatcacagctgtcctcagcagacctcattctgctgtgtcccacrgcagtgctgtgtgaggtcagtgctgcctaggcaaggaagaagccttgtcatttcgaacctcagtatgaaagcaactcttatttgcagttacacccactcatcattgtgcacaggaagagtgcgagtataaaaacgcggttatgacaggccttacaagccttcctcacctgactgcagcagaatacatgttgtgtgctatgggttggatagactgcagcagarccccataaaggtgcagagcagaccctcttaaggttcgtgcagcataaagctgccatttctgggggcacagctgatgactcaggagctctaaagagcctctctgaagtcttccagggccgggaggtgttggaggagaagggcacagcaatgagttcccctttcggtcaggacacttccactggaacacagccagcatctgtttttactccaatgtattttaagaaaaaccaaaacactacacatgaattaggagttagttagtaattgtcactctttggctttggctgatcaaacaggaca

SEQ ID NO: 87690 - DNA, 599 bp, Chicken  19866894389822_1
  misc_feature (1)..(13): n is any nucleotide
nnnnnnnnnnnnntttctatttttctatacttctattattctatactgtacaaacgctgagttttacaagattttccagtataaactttttcttgaccatgatctctgttcatgaagagttaaatgtctcatagaggtcacctttcattcagaagcaaaaccattctaagtcacattaccaacctacatgaccatggagtaggataatgcgaatagcagagctgtctgtgtgtgttctgatgtggaaggtctgatatgtgaggcagctaagaacagggatggtggaaagggaatacctcmtttcaacctaagacactctgttaaccttggtgcagttgtatgccattaaacagaaagctggaccattttctcagattggtatcttgcttacgctgcggggtaaatttgtattctgtagacaactggataaagtatagtgcctaatgtgcagtttgtaagaatctccaagcatttggtacagggttgttgacatgatatatgacaacaattgtgtacaatgtgttattaaagatcactgttttttcctgatacagcaatggtttaaggatgagaactatagacagtgggagattatagct

SEQ ID NO: 87691 - DNA, 600 bp, Chicken  19866894389825_1
ttaatttctaagagggtagacttaatttgagcctcgtgacatcagtgtgtgggcctgaaagctcagagaagcagactgacttgacagaaaggagatcagccacaatcaacttgcatgctaaaatccaatatgaggatgttccctgtagctcagataagttgggttaattgacaggtgctgaggcggctgtgtgctgtcttgcttttctgtgccagcagtcatgtgtaagataaaatttggtcctgagcagaggcccagcgtgaagctcaagcatcagtcatgctcctgagagatttcctkccaacccacttaagatttgcagactgcttcttccccaagtgctggagccttcaggagaaagagtgggagcaagagctgctgtcccatcctgaagtcctttggctgtgaatagatctggatcttacagctctgagtgygggaagtgggaggctgtcagtccaggcaaaggacatgaaattggctgagtgaaagattgagggggaaagataatgggaccaaaagatctaatggaacattcaggatgtcttttggcttccacgtgtttagcagcactttggccagtctcattttaattggtca

SEQ ID NO: 87692 - DNA, 600 bp, Chicken  19866894389825_2
gttccctgtagctcagataagttgggttaattgacaggtgctgaggcggctgtgtgctgtcttgcttttctgtgccagcagtcatgtgtaagataaaatttggtcctgagcagaggcccagcgtgaagctcaagcatcagtcatgctcctgagagatttcctkccaacccacttaagatttgcagactgcttcttccccaagtgctggagccttcaggagaaagagtgggagcaagagctgctgtcccatcctgaagtcctttggctgtgaatagatctggatcttacagctctgagtgygggaagtgggaggctgtcagtccaggcaaaggacatgaaattggctgagtgaaagattgagggggaaagataatgggaccaaaagatctaatggaacattcaggatgtcttttggcttccacgtgtttagcagcactttggccagtctcattttaattggtcagtgatgccctcctcctggtctggaagttgagtgctcgacatctcacgcattgttttgataacagaactgtacctgaggtccactctgtctcttagctacctcttgggcatggggcccgcagaagcacatccacatcc

SEQ ID NO: 87693 - DNA, 600 bp, Chicken  19866894389830_1
aatttaagaaaagtgtgtattttcactggtacaagagaggttcatggcataactgcatttggtcagatgcaaacagctacacactgtacagcctccaccaaaaaacctggtgcctccgtatctgtgcttactgcattatgttcgtgcttaaatccaaaggcaaagacgttttattctcccactacactccactcagaccagtcaagaggtctcagtcagtttgtcatcttccctagagcaaactcttagtaagccaacagaacgctgtagacaccaaaaggtaattacagaagctatttrctgcttagaatygtaacttcttagataccttggagcaagttttcagttctgtcactgcgaggctgagacagaattattcttattaaatattattattgaaaataaattataagtacgtgaaatttaatagttgtttctttcacttctctgaacaaaaacactggattcccttttcagggtgttccagcttgctctctttcacgtgttattaatggctcaaaatttatcccattgtaaaaatttagtcataacatgttttataacttaccataggagtgaattcactgcctgaactgaaga

SEQ ID NO: 87694 - DNA, 600 bp, Chicken  19866894389830_2
gtgtgtattttcactggtacaagagaggttcatggcataactgcatttggtcagatgcaaacagctacacactgtacagcctccaccaaaaaacctggtgcctccgtatctgtgcttactgcattatgttcgtgcttaaatccaaaggcaaagacgttttattctcccactacactccactcagaccagtcaagaggtctcagtcagtttgtcatcttccctagagcaaactcttagtaagccaacagaacgctgtagacaccaaaaggtaattacagaagctatttrctgcttagaatygtaacttcttagataccttggagcaagttttcagttctgtcactgcgaggctgagacagaattattcttattaaatattattattgaaaataaattataagtacgtgaaatttaatagttgtttctttcacttctctgaacaaaaacactggattcccttttcagggtgttccagcttgctctctttcacgtgttattaatggctcaaaatttatcccattgtaaaaatttagtcataacatgttttataacttaccataggagtgaattcactgcctgaactgaagagtgcttaaaaat

SEQ ID NO: 87695 - DNA, 600 bp, Chicken  19866894389846_1
aaaaacccacacagcagttgttaaattcaccatatggaaaagatccctttcactacagaaagctggcagcaggcctagtcccttaacatcagagggaatccttgctgaaaagggaggacgaggttgcagtaaagtgctcacactagctaccttgcccagggactaaatctctcgtctctagctaatgtggagtgcaagaatggccaagacttttcaatatcccatgactatgatgggtagatgagaagaggccttagagcatggagcatacaactgccttccctttttctcttcatcctycaccacagggaaaacggaggatgaaaaatagtacagaaagatgctacctagaaaagggggagaaaagagctgctgtaaagaagagctgaaaaatacacctctgcatgttcctttggagttctcactctcccagctcctgaggctgtcctcatttctcctgacacctgttcagctcctcatgaacttgcagaacgtgttttcctctctgcagtctaaggaggaattcatcgagaacttcagtttacccagtgggtttacaccagaggtccttttctgtaggaacagcagtttctatttgca

SEQ ID NO: 87696 - DNA, 600 bp, Chicken  19866894389852_1
cacccataaagtattgccatgaataaataaaagccaagcttcatttgtcagatgaacacagcactttttaggatatagtatccttgctcgatttaatatttaattgctttctaatttgcaaaaataaatcagcatctcagtcattattatcaatctttaaggttttgttccactgttcaaagcagaagctgtatagttcaaggagatttgaggcctgaggagaatggtaatatgctaaggaacttggctttgctaggtcatctttctgactgtctcgtagatccacaattaccaaaagarttacaggctgatgtggttttaatgtccattgcctgtagcttgaacttgccctctcttgtactgagtcatcttattgataaaatgtaatttgttttttgtgattttaaaaaaaacctgttgtttctaaaatacttctccggagttgcggctcttcccgagtctgccagtttttagcaggtggtgttgaaatagctagtatctctgaaatacacaggacatcgtatctcccaaggtaggaggggatgagtttaattttctttgaaagatgtcttcaatgcctaatggtagtaacatacagct

SEQ ID NO: 87697 - DNA, 599 bp, Chicken  19866894389858_1
  misc_feature (1)..(50): n is any nucleotide
nnnnnnnnnnnnnnnnnnnnnnnnnnnnnnnnnnnnnnnnnnnnnnnnnnccagctgcatccacatgacaatctgtagggttcctccaggaacaggcacaggaacagcagctagctttatctgcacttggcaagggttgatggaccactgctggggcttcttcgcataaataaataaaaaaacctgacacaacagcttcccaaggcagagaccagaggaactaatgaagtatactatcataatcccagtctaagaagcagcttagaataccaagaagcattgctgcttctaaatattttstatcagacccggggccttctggggaaacgcatgcttaccacttctggttttcgatgtcaagaaaggatcttagttgcacattttagtttcactggaagattgggcatctatttacccctataaaaagtaattttratttgcacagactgtatatttgtgcacaaagccattgcacctgtaactagaggggggaactgaaacccaatcgcttgactactagcaatagcaaacaagaaacttgatctatttcagctatatacacaaaggcaattataaaaacaaaacatttggtaccactt

SEQ ID NO: 87698 - DNA, 600 bp, Chicken  19866894389858_2
gttgatggaccactgctggggcttcttcgcataaataaataaaaaaacctgacacaacagcttcccaaggcagagaccagaggaactaatgaagtatactatcataatcccagtctaagaagcagcttagaataccaagaagcattgctgcttctaaatattttstatcagacccggggccttctggggaaacgcatgcttaccacttctggttttcgatgtcaagaaaggatcttagttgcacattttagtttcactggaagattgggcatctatttacccctataaaaagtaattttratttgcacagactgtatatttgtgcacaaagccattgcacctgtaactagaggggggaactgaaacccaatcgcttgactactagcaatagcaaacaagaaacttgatctatttcagctatatacacaaaggcaattataaaaacaaaacatttggtaccactttggggagctaaaaagaaaataaacctggcaagtattttactagaaatgcctgcttacatgatttgctacctaactgtttccaagcagagaagtagtaacatatggacacaagttatttgcagtaaattatttccat

SEQ ID NO: 87699 - DNA, 600 bp, Chicken  19866894389860_1
aggagcagaaaagttaagcgtatcaatcatcccaagatacatcaaaccatttaattttagttaaaacttacattctgtatgtatacacagtgctccaacttaaccttgcatgtttcctttccctaggatgaaatcctggttaaatacctactcctagccaaggagagctgtatgtgcacagtagcagttgggtttcaaagattaactgcaaagaagtttccttcatctaaacttaattaacgtgcactcttatcagggtttataaaattgctgagaaatcacaagcacgccacgaaacayttctagagctataaaggtctagggtttcctttctgatagacataaaagataaaaatttgtgttcctattactctctaacagtctaataaactgcaaatatccgatttcctattaaaggccagaagccaagaattcaaatagaaacatcttctatcgctatgctctgtacataaagtaacgtacagatgcaataacaaagttaattggcttcttgttgctcggagtgcatgtggaagaaaattaaaagaaccaaattgctatctctaattagaaattctgaggaacaacattgtagagatg

SEQ ID NO: 87700 - DNA, 600 bp, Chicken  19866894389862_1
caactgtcaactctcaaacttaccccaaacaacccaaaaaagaaaaccacaaaaccaaacagcaacaatacgcaccctcccagtccctgaaccgaaaaacaaacacccaacaaacagttaccacaagagaaaatctcttttggaattagagtttagtaaaggaaagtatgttttctattgtacttactttcccattttaattgcactgctgttctaagcatgctgaaagctggtggcaaatataatgttggtgaagttttggggagtggtatcaaactcaagttattcagtattcagtcrgccaaggcaatatgagttagccatgcacaggtctttgtattcttgtttatcaggcataatcatcatggctttagactggctctgatgttcttagatgtttgccagtatgcacttttcttgacaaatgtttcttttttaatctgtgtgcaggcaaagtcttggaatggggactttgcaagtaraggcaaagaaggaagaaatttctgagaaagaactgtctgagggtaatttcttgaagactgtcttcccatctctatagagttttgggggttttattttgcagaatttgtagatttttgt

SEQ ID NO: 87701 - DNA, 600 bp, Chicken  19866894389862_2
cttactttcccattttaattgcactgctgttctaagcatgctgaaagctggtggcaaatataatgttggtgaagttttggggagtggtatcaaactcaagttattcagtattcagtcrgccaaggcaatatgagttagccatgcacaggtctttgtattcttgtttatcaggcataatcatcatggctttagactggctctgatgttcttagatgtttgccagtatgcacttttcttgacaaatgtttcttttttaatctgtgtgcaggcaaagtcttggaatggggactttgcaagtaraggcaaagaaggaagaaatttctgagaaagaactgtctgagggtaatttcttgaagactgtcttcccatctctatagagttttgggggttttattttgcagaatttgtagatttttgtttgtttgtttgtttgttttaaagagtacaaatacagacacaagcatgatgtaagcctaaggcaggttatgagttccacctggtcttctccctgagctgatgggaagtagaaaggcaccatcttgtggccagcaaataagcacagtgaggacctgcaggagccctcttgtctggagtactcac

SEQ ID NO: 87702 - DNA, 600 bp, Chicken  19866894389871_1
cacagaatcccatctacacttttgtatgtgtcatctttaaagccattttcttcctctcacctctctgtagaaggtttcccaaagcttaattgctccacttaatccaagatccccataatttctgagttagatttgccagtgatctgtctgtccatttgctactgtcagctgttctttaaattagtaattttccatctccagtatattgatgggcagtgattgcaccgcctcttgtgttcattctacagcataaggtcaatctccatctgtaatactgtaatacagctgccctgatgtacrcatttctagcatttaggaatatatgcaaagctctgacctagccttaattatacaactgtggtatctgcayagcaggcaacatctgggagcaaataattgcctcaggaaagacttgtgtattccttagacttacatggtgtttgttgctataatgcccaccactttccattattatttgtgtccattttttgtcttttttcttatttgcttctgttatgcttctctgggacattttcagttgattgcttgaggtttggtgggcagttacctagctctgatacttcaatacccacaatagct

SEQ ID NO: 87703 - DNA, 600 bp, Chicken  19866894389871_2
aaggtttcccaaagcttaattgctccacttaatccaagatccccataatttctgagttagatttgccagtgatctgtctgtccatttgctactgtcagctgttctttaaattagtaattttccatctccagtatattgatgggcagtgattgcaccgcctcttgtgttcattctacagcataaggtcaatctccatctgtaatactgtaatacagctgccctgatgtacrcatttctagcatttaggaatatatgcaaagctctgacctagccttaattatacaactgtggtatctgcayagcaggcaacatctgggagcaaataattgcctcaggaaagacttgtgtattccttagacttacatggtgtttgttgctataatgcccaccactttccattattatttgtgtccattttttgtcttttttcttatttgcttctgttatgcttctctgggacattttcagttgattgcttgaggtttggtgggcagttacctagctctgatacttcaatacccacaatagcttaattagtaagcacatgaaatctaattatctgttaagcttgaaggaaaactatggaaatccttataaaag

SEQ ID NO: 87704 - DNA, 599 bp, Chicken  19866894389877_1
  misc_feature (1)..(184): n is any nucleotide
nnnnnnnnnnnnnnnnnnnnnnnnnnnnnnnnnnnnnnnnnnnnnnnnnnnnnnnnnnnnnnnnnnnnnnnnnnnnnnnnnnnnnnnnnnnnnnnnnnnnnnnnnnnnnnnnnnnnnnnnnnnnnnnnnnnnnnnnnnnnnnnnnnnnnnnnnnnnnnnnnnnnnnnnnnnnnnnnnnnnnnnnctatttagttacagtagctgtctttcaaagtaaaatgaattcattattaattttcaaaatacagtcaggggaatatctataatttgagatgcagcaagcttttggagtttaaaaargaaatgtcaaattatttcatatttttacttagtatgatatgaagccagcccaaggatgaaaagtaggtcactctgtcctggttccagaacatgtaaaagcaacgtttcatctcttgtccatcttccctagcccaaaggagaacttgacttgccccttgcaagacctgatgtttattacttagtattagcataatctaaataaggattgcatttgggcagtagcttgtttctacaacttcatcatcaaaaatctgttcacctgcctctatccattcagcagaactgcaaggtaacacaag

SEQ ID NO: 87705 - DNA, 600 bp, Chicken  19866894389877_2
catcatcaaaaatctgttcacctgcctctatccattcagcagaactgcaaggtaacacaagaagtgagccacctcccagataatctggattctgtatccctttagttcagaaggtgtatatgccctgaaattgtagctgtttctatgcatattgctttcagggactcagttatgatgatttcaaacaaaatttgtcacatattgccatttctcgctcgtgcaattttgttcttgctttgctacaggtgatcgtgattactgtgtcaggccagactgatgcagctaagcacgttgttagcrtctcaggacaaagtcaaaataatataactgtatctaaaaagaaaaaagcaactactatgagcaaaccacaacaggaagaggaaaagaaaggtaagagcactttcacctttacgggtggctgctccaaaggaaaaattgttaaacattatgcgataatagtctgtatctatcattgccttccaggtcccaaacaatcaaatttatagcatgcatgctcttaactgacaacaaatgcaaagtaggaattgccaggttaaataaaacccagtggtatttaaatcaactcttttaaatccctgt

SEQ ID NO: 87706 - DNA, 600 bp, Chicken  19866894389886_1
agtagggtgtagctttgagcttaaatgagttcagcttgggcttcaccaagagcacgtaagccatgctgcacagccagcaaaactagctaatgggtgaagtttgcacatcccaaagcgtttgcagtgtactgaaactgacgtagcctatttcagctgcatcaaacctgcgcacggacctgcctctgggaaagcctggagagaaaaagactccatgagacaaatttgttgtgacctcaaaaatagttcagacttaaatcttacagcattttacctgctcccccttttctgacaaatttcagmgtgtaacaaaactctcttgaagttttcaccaacattttgacaagcaaggtatgaagcaaagagaataggttccgtcacagatactgtggcaaaatagtgggcacagttaaggtcagagaagcggtgttaaacaggcagtggaagtgaacaggggagaatgaagtgctgtggtggcttagwctcaatctttagacacaggtcttgacatgcaccacacatgccagtccttgacctgacctttggggaagggagagagtagatttgaaacatgacgcaagcagaagaaatcagctatggtga

SEQ ID NO: 87707 - DNA, 490 bp, Chicken  19866894389886_2
ctctgggaaagcctggagagaaaaagactccatgagacaaatttgttgtgacctcaaaaatagttcagacttaaatcttacagcattttacctgctcccccttttctgacaaatttcagmgtgtaacaaaactctcttgaagttttcaccaacattttgacaagcaaggtatgaagcaaagagaataggttccgtcacagatactgtggcaaaatagtgggcacagttaaggtcagagaagcggtgttaaacaggcagtggaagtgaacaggggagaatgaagtgctgtggtggcttagwctcaatctttagacacaggtcttgacatgcaccacacatgccagtccttgacctgacctttggggaagggagagagtagatttgaaacatgacgcaagcagaagaaatcagctatggtgaatttagtgacagttcaaaagtaattctctggtgtaaccctttatttatttatttatttaaatgctttctt

SEQ ID NO: 87708 - DNA, 600 bp, Chicken  19866894389893_1
gcaattatactacgccaaaaatgagttacatttttgctattactctgtattaatgttacttaatgcgtctcatagaatgtattctctaccatgacagcaatttcaatacaccatgttaattttttttgtctcctctagaacatatttaacaaagtgttttatataaaaacatttcaagtatgaagtcagtgtttgtatcatgctcttcataatttaatctgcacacttctcttttttatcctacaggtaaagatcttaaaagaaatgagataacatcaccactaaggaaataattttcartttcttcaaaatcctctagagatgtagccaactatgcaaaaatttgcttttcttaattaattggttttcatgacttgatgaattcagtagcaattatctactatctcttcagatctacaaaatctcacaggtaaagagacaaaggtttctgaagtcaaaagcagatagtagtgttttacacttgatctttgcttaaatagtaaggttttagaatttatttatgccaaaaaaaatatttacattccaaaataaaagaatggaaatgtattgtcttctcaggttgtatttaataacaagtcg

SEQ ID NO: 87709 - DNA, 600 bp, Chicken  19866894389895_1
tgtatatacagatgcactggttgtgagagtttcagcttcttgtattattaaactaatatattatttttgcctttttggcaacctgtattggaataatctcagaaaatatgggggattgtttaaaaggataatactctggtatgcttcaaattttaaataatatcactttctggttagaagtgtatacatattaaaaatatcaatatggacagttttgcattaccaaatatccagaacacaagtctcatcattatggaccttctgaataaggtatttgcagaactgtatcgaatgtgttamactcaatttgattttctcagtaacctatatctcaccagtgaatttctataacatcaacttaaattacagttacagttttcttattcccgtttgtgagtttctaactgttgatgtttagatgcagatgtccagctggaacatctccacrtgagcacgctcaggctgctaagaccccaagcagcacatgacagtgccagtgcttccgacacagctcaggccatgctggacatctgcaccatgacatcaagggtggagggccactttcctgccctgggagtgttccaaaaccgggatgcagga

SEQ ID NO: 87710 - DNA, 463 bp, Chicken  19866894389895_2
aattttaaataatatcactttctggttagaagtgtatacatattaaaaatatcaatatggacagttttgcattaccaaatatccagaacacaagtctcatcattatggaccttctgaataaggtatttgcagaactgtatcgaatgtgttamactcaatttgattttctcagtaacctatatctcaccagtgaatttctataacatcaacttaaattacagttacagttttcttattcccgtttgtgagtttctaactgttgatgtttagatgcagatgtccagctggaacatctccacrtgagcacgctcaggctgctaagaccccaagcagcacatgacagtgccagtgcttccgacacagctcaggccatgctggacatctgcaccatgacatcaagggtggagggccactttcctgccctgggagtgttccaaaaccgggatgcaggagtgcaggatga

SEQ ID NO: 87711 - DNA, 600 bp, Chicken  19866894389896_1
tttttttttcctgaatcttacagtgttagttttggtcatcacaatgccatgagtttctggaacagattaaagagagcaggaaagtgattttgacaaagcactctgtcatctgcattactaatgcaccatgtctcagaaggagcaaagtattatgtacttcataaagtatgcatacagtgaatgcaatttatgatacatacttcatgaaacattgtgaaaatgttgtatcttgaaattatcttagaatggttctgacctccaggaaggcctttgtaagcagaatgaatgtgttaattcaasaatgtgcctagaytatgaattcaggacattctccgggagagcaaggaggtattttacatttgatacctaagagtgcagttccagaaagcaattgagtagggacaggatgttatgtactggagctgtatttgataaaatgttccctattctcaaagcattcctgctattggagtaaggagccaaggaaaggggaatcttgacaggagaaagtctgagtcaagaggtgttgccaaggctcttctattagattagaaagactaccttctgtttcattcttctgttacaaggataacctgaagc

SEQ ID NO: 87712 - DNA, 600 bp, Chicken  19866894389896_2
aatcttacagtgttagttttggtcatcacaatgccatgagtttctggaacagattaaagagagcaggaaagtgattttgacaaagcactctgtcatctgcattactaatgcaccatgtctcagaaggagcaaagtattatgtacttcataaagtatgcatacagtgaatgcaatttatgatacatacttcatgaaacattgtgaaaatgttgtatcttgaaattatcttagaatggttctgacctccaggaaggcctttgtaagcagaatgaatgtgttaattcaasaatgtgcctagaytatgaattcaggacattctccgggagagcaaggaggtattttacatttgatacctaagagtgcagttccagaaagcaattgagtagggacaggatgttatgtactggagctgtatttgataaaatgttccctattctcaaagcattcctgctattggagtaaggagccaaggaaaggggaatcttgacaggagaaagtctgagtcaagaggtgttgccaaggctcttctattagattagaaagactaccttctgtttcattcttctgttacaaggataacctgaagccttgaagtcagtc

SEQ ID NO: 87713 - DNA, 599 bp, Chicken  19866894389899_1
  misc_feature (1)..(137): n is any nucleotide
nnnnnnnnnnnnnnnnnnnnnnnnnnnnnnnnnnnnnnnnnnnnnnnnnnnnnnnnnnnnnnnnnnnnnnnnnnnnnnnnnnnnnnnnnnnnnnnnnnnnnnnnnnnnnnnnnnnnnnnnnnnnnnnnnnnnnnnnntggttttggacctgactgaaagctagatgttacaagtccgtggggcagatggattgcaccctggcgttcagaaagcaatctccctcctgcacctgctgcaggagcggcttgggttcgccggatcgactgacccggccctggtgggctcagacaggactcagtygccacgtggcatcagctggaggtcgctgctggggcggctcaggtatgccggcatggtctgcccggatccgaccaactcggccgctcracggcatcagctggaggttgcagaccagatgtctcgtgtacacctgcaaggtctacccgacgacgatctactaggccgatccgcggcggtggctagaggtcgctgactggagcggygtgggaaagscggaaaggtctacccggccccggcaggctccgtccatctcggtcgctccacggagacatctggwggtcgctgccagggcggctcgg

SEQ ID NO: 87714 - DNA, 599 bp, Chicken  19866894389899_2
  misc_feature (1)..(50): n is any nucleotide
nnnnnnnnnnnnnnnnnnnnnnnnnnnnnnnnnnnnnnnnnnnnnnnnnntggttttggacctgactgaaagctagatgttacaagtccgtggggcagatggattgcaccctggcgttcagaaagcaatctccctcctgcacctgctgcaggagcggcttgggttcgccggatcgactgacccggccctggtgggctcagacaggactcagtygccacgtggcatcagctggaggtcgctgctggggcggctcaggtatgccggcatggtctgcccggatccgaccaactcggccgctcracggcatcagctggaggttgcagaccagatgtctcgtgtacacctgcaaggtctacccgacgacgatctactaggccgatccgcggcggtggctagaggtcgctgactggagcggygtgggaaagscggaaaggtctacccggccccggcaggctccgtccatctcggtcgctccacggagacatctggwggtcgctgccagggcggctcgggctcgccgaacyggccagcccggccctgcaggccccgacaggcctcagtctcactgcaaccgcggctggagaccgcggtaggagcag

SEQ ID NO: 87715 - DNA, 600 bp, Chicken  19866894389899_3
ttcagaaagcaatctccctcctgcacctgctgcaggagcggcttgggttcgccggatcgactgacccggccctggtgggctcagacaggactcagtygccacgtggcatcagctggaggtcgctgctggggcggctcaggtatgccggcatggtctgcccggatccgaccaactcggccgctcracggcatcagctggaggttgcagaccagatgtctcgtgtacacctgcaaggtctacccgacgacgatctactaggccgatccgcggcggtggctagaggtcgctgactggagcggygtgggaaagscggaaaggtctacccggccccggcaggctccgtccatctcggtcgctccacggagacatctggwggtcgctgccagggcggctcgggctcgccgaacyggccagcccggccctgcaggccccgacaggcctcagtctcactgcaaccgcggctggagaccgcggtaggagcagctcaggctcgccggaccggtcggccagaccactgagggccccggcaggacwcagtataactgcagccgtggctggagatcgtggcaggaccggctcgggcacgccggacaggtcggc

SEQ ID NO: 87716 - DNA, 600 bp, Chicken  19866894389899_4
aatctccctcctgcacctgctgcaggagcggcttgggttcgccggatcgactgacccggccctggtgggctcagacaggactcagtygccacgtggcatcagctggaggtcgctgctggggcggctcaggtatgccggcatggtctgcccggatccgaccaactcggccgctcracggcatcagctggaggttgcagaccagatgtctcgtgtacacctgcaaggtctacccgacgacgatctactaggccgatccgcggcggtggctagaggtcgctgactggagcggygtgggaaagscggaaaggtctacccggccccggcaggctccgtccatctcggtcgctccacggagacatctggwggtcgctgccagggcggctcgggctcgccgaacyggccagcccggccctgcaggccccgacaggcctcagtctcactgcaaccgcggctggagaccgcggtaggagcagctcaggctcgccggaccggtcggccagaccactgagggccccggcaggacwcagtataactgcagccgtggctggagatcgtggcaggaccggctcgggcacgccggacaggtcggcccggccactg

SEQ ID NO: 87717 - DNA, 600 bp, Chicken  19866894389899_5
gtgggctcagacaggactcagtygccacgtggcatcagctggaggtcgctgctggggcggctcaggtatgccggcatggtctgcccggatccgaccaactcggccgctcracggcatcagctggaggttgcagaccagatgtctcgtgtacacctgcaaggtctacccgacgacgatctactaggccgatccgcggcggtggctagaggtcgctgactggagcggygtgggaaagscggaaaggtctacccggccccggcaggctccgtccatctcggtcgctccacggagacatctggwggtcgctgccagggcggctcgggctcgccgaacyggccagcccggccctgcaggccccgacaggcctcagtctcactgcaaccgcggctggagaccgcggtaggagcagctcaggctcgccggaccggtcggccagaccactgagggccccggcaggacwcagtataactgcagccgtggctggagatcgtggcaggaccggctcgggcacgccggacaggtcggcccggccactgcgggccacgacagtactcggtctcaacgcagctgcggctggaggtcactgcgggagccacggtc

SEQ ID NO: 87718 - DNA, 600 bp, Chicken  19866894389899_6
tcagctggaggtcgctgctggggcggctcaggtatgccggcatggtctgcccggatccgaccaactcggccgctcracggcatcagctggaggttgcagaccagatgtctcgtgtacacctgcaaggtctacccgacgacgatctactaggccgatccgcggcggtggctagaggtcgctgactggagcggygtgggaaagscggaaaggtctacccggccccggcaggctccgtccatctcggtcgctccacggagacatctggwggtcgctgccagggcggctcgggctcgccgaacyggccagcccggccctgcaggccccgacaggcctcagtctcactgcaaccgcggctggagaccgcggtaggagcagctcaggctcgccggaccggtcggccagaccactgagggccccggcaggacwcagtataactgcagccgtggctggagatcgtggcaggaccggctcgggcacgccggacaggtcggcccggccactgcgggccacgacagtactcggtctcaacgcagctgcggctggaggtcactgcgggagccacggtcccaccacggccactactggaggctgctgccggac

SEQ ID NO: 87719 - DNA, 495 bp, Chicken  19866894389899_7
gtctacccgacgacgatctactaggccgatccgcggcggtggctagaggtcgctgactggagcggygtgggaaagscggaaaggtctacccggccccggcaggctccgtccatctcggtcgctccacggagacatctggwggtcgctgccagggcggctcgggctcgccgaacyggccagcccggccctgcaggccccgacaggcctcagtctcactgcaaccgcggctggagaccgcggtaggagcagctcaggctcgccggaccggtcggccagaccactgagggccccggcaggacwcagtataactgcagccgtggctggagatcgtggcaggaccggctcgggcacgccggacaggtcggcccggccactgcgggccacgacagtactcggtctcaacgcagctgcggctggaggtcactgcgggagccacggtcccaccacggccactactggaggctgctgccggaccggctcgggttcgccgccctg

SEQ ID NO: 87720 - DNA, 600 bp, Chicken  19866894389900_1
tgttgcactaatagacacagactcatgtaaaatcaaaataaataatgtttccagcaacttcactttgaaattgatgtgatcaaaatattttttctccccagcatatttgtccaacatgcaccaattactagagatttctgtgtcactattaatgctataatatgccatatgcatactgtaattatggggggaaataaattttcattatttatggcttttattcctggaaacattattctttcttgttctcttgacctttctcctcttcgtttatgcaatctggtatataaaatttgtgawggagatagtgctttattcatcttattgggaatatagtattttatataatgataataatgtatttctttctagaatcagcaatgatttgctgctgtgggaaccaaccgctccatctcctgtagaaacatttgaaaacctttcttatggtgttggactatctgtggccagtcaactcatcaatactttcagtaaagacagcttcagtcaatttaaatctgcagttaattatggtaatgcacataatagatcctcttgaactgttgtgatacaagggcaaaattggctgaagtgattatcatg

SEQ ID NO: 87721 - DNA, 600 bp, Chicken  19866894389906_1
ttttctggggagaacaatgggaacacaggctggagaggagtgtgctgatctgtacatacacagcagatgtttatccagggtttttgcagtcctccaccttcccagttgctccagctgggctctatgatgtgtgaaaaccttagaatattagccaaaatcttattttgtgcctggacaaaatttctcagtgatgaagacatgtctagggagatccattaatccaaatctggttaaatccaagtctgcatctgtgtgttcaaagatgcacgcaagtgtattttccctacgagtatttttgcrtgccttcttccttctcttcccagctccctgggacaatccccccactcaagatactcctgtctactgtattctattatttcctgtcattctgaggcaaacaaaattcccattgactaaaagcacgagaataattttgcagtgggctgatttgatgttgttttttccttctcaggactggatggaacagctgaattttaaagactttcgttgcaaagtcatttctgtttgttgttccttattagatgtgagaggaggcgtatggtgagggatatctgtgggacaatgctgtgctgagaaagg

SEQ ID NO: 87722 - DNA, 580 bp, Chicken  19866894389931_1
agtctgctttgtactgcggtcagagaaataaatgtggtttcaccgtggtctgcatgaaacactgataactgatcagtattaagataagtgtcattagtgagtttgaatgtctcctgtcagtatggctaggagtagccagcacccacacaatgtagatatgagagtgcttgctttcatctgtttggtggcaaacgtaggctgtatctggaagctttttttctttagtagaaaagatgggtaactttttttaaagaaaacaagagggcttttagatcctgctgcctcggtggaatgccattkctttttcaggtatgccccagttgcagcaagatgctgcttttttggtgcctttcttgtcagaatgattgttttggtttccagaatacctagtttgttcctgtagcccttcgtcctggtcttgtctgggtacctgccctctcccagccaagcaacttggtgtctctgttacagtacgatctgacctgcttttgtgccctgccacaccttgagttctgctcagagcacctgaggtactgtctttctcaaatggaattaataattaatataaaaagcttaaaaa

SEQ ID NO: 87723 - DNA, 599 bp, Chicken  19866894389940_1
  misc_feature (1)..(13): n is any nucleotide
nnnnnnnnnnnnntcagctcatggatgacgtctcccaccgactgtgctgaatgctttatcagcccccaaaagcagggtaccatcctgtgttaattccgtgatgcccagggagctcatttatttctccaaactgatgaaggtgcacaacagcccttgaaatatcggtctttgacctctacaacttcgtcctccctcaggccaactcctttgcaagagctgatctacggcatccttctttcctacagatcaccccaaattcccccacgtgaaacttcagaactcggctggatcgctgactamtgcaagcaatgcaagcaaaaggccctcttttacaaggggcagattgcctcaagcgggcacctggggaacagaaaattaaatcaaaggcagaaaaagatggtttcttaaaaaagatcgaagggcaaaagtgcaaaacctcgtgggctgagctctgcctggctgcagctgaacctcagactcgggattcttatgggaaaaggcaggcagagcttaacagcttcactgctgagctgyccagatacacagagtgcaaggcacacgcttgtcttcaactgccacagaacgagctgttttgtctg

SEQ ID NO: 87724 - DNA, 600 bp, Chicken  19866894389940_2
ctttcctacagatcaccccaaattcccccacgtgaaacttcagaactcggctggatcgctgactamtgcaagcaatgcaagcaaaaggccctcttttacaaggggcagattgcctcaagcgggcacctggggaacagaaaattaaatcaaaggcagaaaaagatggtttcttaaaaaagatcgaagggcaaaagtgcaaaacctcgtgggctgagctctgcctggctgcagctgaacctcagactcgggattcttatgggaaaaggcaggcagagcttaacagcttcactgctgagctgyccagatacacagagtgcaaggcacacgcttgtcttcaactgccacagaacgagctgttttgtctgattaagggtatatataaaacactgacttctgactccagaaatatttaccaggacaaactattttacttaaaaacaagttagaactctattttttttttttttttacagcatggaaaggctataataaatagtctgcagtctacgaggctataataaagtcacttggggctcagatctgcagtacctctcaatttcctgaagttcaagagtgcataaactggccacatagatacac

SEQ ID NO: 87725 - DNA, 599 bp, Chicken  19866894389955_1
  misc_feature (1)..(185): n is any nucleotide
nnnnnnnnnnnnnnnnnnnnnnnnnnnnnnnnnnnnnnnnnnnnnnnnnnnnnnnnnnnnnnnnnnnnnnnnnnnnnnnnnnnnnnnnnnnnnnnnnnnnnnnnnnnnnnnnnnnnnnnnnnnnnnnnnnnnnnnnnnnnnnnnnnnnnnnnnnnnnnnnnnnnnnnnnnnnnnnnnnnnnnnnnagtaaatagggacaggtaaggatttctggatataaggacttcccttcctcagtttacagagtcaatccaaagcagccttggccagcttaggactgtaaaatctcccacaacagcwcttcaaccacccacgaagtacctaacaggctycttctcaaaatttccatcacaaaagaaccttccataaaactgcccttttcagtaaaacacaaattaacaagcttcatcatttcaccacaaaacgtgagatgtctctgtgtctctttctatctcctggtatatggaaaaattttgtctatgttctttacccatccctgactgaaacaaaaccacccagtcctttggaaagaataaaataaaaagttccatgtctccgtagggaaataaaaaccaacacaatatatatgtgttattaaa

SEQ ID NO: 87726 - DNA, 599 bp, Chicken  19866894389955_2
  misc_feature (1)..(153): n is any nucleotide
nnnnnnnnnnnnnnnnnnnnnnnnnnnnnnnnnnnnnnnnnnnnnnnnnnnnnnnnnnnnnnnnnnnnnnnnnnnnnnnnnnnnnnnnnnnnnnnnnnnnnnnnnnnnnnnnnnnnnnnnnnnnnnnnnnnnnnnnnnnnnnnnnnnnnnnnnagtaaatagggacaggtaaggatttctggatataaggacttcccttcctcagtttacagagtcaatccaaagcagccttggccagcttaggactgtaaaatctcccacaacagcwcttcaaccacccacgaagtacctaacaggctycttctcaaaatttccatcacaaaagaaccttccataaaactgcccttttcagtaaaacacaaattaacaagcttcatcatttcaccacaaaacgtgagatgtctctgtgtctctttctatctcctggtatatggaaaaattttgtctatgttctttacccatccctgactgaaacaaaaccacccagtcctttggaaagaataaaataaaaagttccatgtctccgtagggaaataaaaaccaacacaatatatatgtgttattaaaaaattacagcagtactttcttttgaggttctg

SEQ ID NO: 87727 - DNA, 600 bp, Chicken  19866894389956_1
acttcaacagttttaacattcccaacgcaaacagttctgagtggtactgaaaaattcccatctttgagaaaaactattgttcatacagggcagttgcacaacactgaagtatccctcgttattcttttggttatttgattaaaactaaagcatacaaatctttgggtttcaggtgagacctgcaattttaactttccatggctggacactgcttcattggcacacctttctgcggaacccaaagaagaacctaccaacacctgcaataacactgcacaagaggatgaacggtggagaccrggacacagaacacaaatgcatctttctgtatatatggtagtaatcaaatgcaaaacagaagaagattatttgatctgctcagtgttcttgaaataaaagcagctctggattcagaatttgacttacgggatgacattcaaggatgctcagacagtgggttaattttaaagcttttgcagaaaggtaagatgggaaacaattccttgaaagaatggaagtcaaaccatgttgaatgttgaattaaaggtctaagttggggaaaggaagaaagcaattttaaactctagtatagtgattaag

SEQ ID NO: 87728 - DNA, 600 bp, Chicken  19866894389960_1
actgagctcccgcgtcagcgttgcaaactcctgcagagatcagggcatggccattagctgggagactgtgacggagatggagccagcatcccaagccaaccgctgggacctccagcatggagcatttcccaccccagcccaggcagtgagtgaaggagatagcaacacaggcaagctggggagtgatttattcctggcctctctctgtgcttcagacaagtgaggaatgcaacatcccagtgtttaaccgcttggtttgatgcccaagaaacagctctctggctccaaaggtccacgatrgcattaaagcwtgtctccccattgcyaacagtttggccrgagccaatcagtccctgcttccatcactgatccctcatgggaagtgatatccagcaacaaagagccgtgcgcagggcgacgccacagccaagctgcaatcccagcacatccccagggatacgtggactcctcagaaacacagtgactgcatctctggctatgctggagcagaaaggaaacctgctacgaagttcccrtggtgcagaagggttcatttgctctttaaaaacaaacaccaagtacctgggttagcctgggagc

SEQ ID NO: 87729 - DNA, 600 bp, Chicken  19866894389960_2
gcgtcagcgttgcaaactcctgcagagatcagggcatggccattagctgggagactgtgacggagatggagccagcatcccaagccaaccgctgggacctccagcatggagcatttcccaccccagcccaggcagtgagtgaaggagatagcaacacaggcaagctggggagtgatttattcctggcctctctctgtgcttcagacaagtgaggaatgcaacatcccagtgtttaaccgcttggtttgatgcccaagaaacagctctctggctccaaaggtccacgatrgcattaaagcwtgtctccccattgcyaacagtttggccrgagccaatcagtccctgcttccatcactgatccctcatgggaagtgatatccagcaacaaagagccgtgcgcagggcgacgccacagccaagctgcaatcccagcacatccccagggatacgtggactcctcagaaacacagtgactgcatctctggctatgctggagcagaaaggaaacctgctacgaagttcccrtggtgcagaagggttcatttgctctttaaaaacaaacaccaagtacctgggttagcctgggagcactcacccact

SEQ ID NO: 87730 - DNA, 600 bp, Chicken  19866894389960_3
actcctgcagagatcagggcatggccattagctgggagactgtgacggagatggagccagcatcccaagccaaccgctgggacctccagcatggagcatttcccaccccagcccaggcagtgagtgaaggagatagcaacacaggcaagctggggagtgatttattcctggcctctctctgtgcttcagacaagtgaggaatgcaacatcccagtgtttaaccgcttggtttgatgcccaagaaacagctctctggctccaaaggtccacgatrgcattaaagcwtgtctccccattgcyaacagtttggccrgagccaatcagtccctgcttccatcactgatccctcatgggaagtgatatccagcaacaaagagccgtgcgcagggcgacgccacagccaagctgcaatcccagcacatccccagggatacgtggactcctcagaaacacagtgactgcatctctggctatgctggagcagaaaggaaacctgctacgaagttcccrtggtgcagaagggttcatttgctctttaaaaacaaacaccaagtacctgggttagcctgggagcactcacccactgctcccagttgccat

SEQ ID NO: 87731 - DNA, 600 bp, Chicken  19866894389960_4
tcagggcatggccattagctgggagactgtgacggagatggagccagcatcccaagccaaccgctgggacctccagcatggagcatttcccaccccagcccaggcagtgagtgaaggagatagcaacacaggcaagctggggagtgatttattcctggcctctctctgtgcttcagacaagtgaggaatgcaacatcccagtgtttaaccgcttggtttgatgcccaagaaacagctctctggctccaaaggtccacgatrgcattaaagcwtgtctccccattgcyaacagtttggccrgagccaatcagtccctgcttccatcactgatccctcatgggaagtgatatccagcaacaaagagccgtgcgcagggcgacgccacagccaagctgcaatcccagcacatccccagggatacgtggactcctcagaaacacagtgactgcatctctggctatgctggagcagaaaggaaacctgctacgaagttcccrtggtgcagaagggttcatttgctctttaaaaacaaacaccaagtacctgggttagcctgggagcactcacccactgctcccagttgccatttgaggcagcagt

SEQ ID NO: 87732 - DNA, 600 bp, Chicken  19866894389960_5
ccagtgtttaaccgcttggtttgatgcccaagaaacagctctctggctccaaaggtccacgatrgcattaaagcwtgtctccccattgcyaacagtttggccrgagccaatcagtccctgcttccatcactgatccctcatgggaagtgatatccagcaacaaagagccgtgcgcagggcgacgccacagccaagctgcaatcccagcacatccccagggatacgtggactcctcagaaacacagtgactgcatctctggctatgctggagcagaaaggaaacctgctacgaagttcccrtggtgcagaagggttcatttgctctttaaaaacaaacaccaagtacctgggttagcctgggagcactcacccactgctcccagttgccatttgaggcagcagtttgcacaggggctacacagcattttgcagctgggactttttagggtgaaaaatgcaaatggggaaacacttcatggattcacacccatttcacagcactgtcgagaggaactgaaaaggaaaagggttgcagaagaggctgagaaagatttgctcaagcattaacaaaccaggctttgactggaggctgagggtggt

SEQ ID NO: 87733 - DNA, 599 bp, Chicken  19866894389964_1
  misc_feature (1)..(11): n is any nucleotide
nnnnnnnnnnnttatagttggcttacaatggaaaccagtttccaggagcttatataatgagttttttttcctagctgaaatagcgagataagatggcatggaatgaatttccagtttaaatttctccttttttgttttctttgtcaggaaggacagtattattactacttctcatctgttcgttgttagatctaaagactttgaagtgtcatctgctcctcacacaaaataacttataaaactaagaggaccaagtgtttaactgaatccttagatctgtgcagagacctaattaagctkctatatatctccataggaatggaagtacagtctatcacagtagcaagatcaggacccaaattaggataaaaaacttttgaacaggcaagaaccataaggaatagggtggaaagtcttacaagcttatagttatttttgatcattttccaaatatccctgctttggatgatagtcacagctgaggtagttttagtcagctgaagtgtacctacaggatagagtacagactagtatggaataaattgagtttgttttcctggtagtcataccaagaaagatgcaaattagttgcatagaga

SEQ ID NO: 87734 - DNA, 600 bp, Chicken  19866894389966_1
catgatatgttgaggaaagctaaacattaaataactttaagtaagacagcataacttaagagaaaagaaaggaagatatttaataatgatactgggttaatacaatgggtgtcattctagccttttcaaaacctgttgtaggagaaaaatgtggttttgttcacccgcttccacaggaagtatccaagaatactatttggtgtttgattacagcctagcttttcttttcttaaatctattctcctcctatcattacttctcccatcaagtcatcagatatgcaccttacctgtgggaaaytcttgtgcaatcttatgagccatagcaacagcccactctggattaattatagacagtagatatgactgaattgtctgcacrgttttagttgtttccttgttaacaactgatgtatacccagtgtttctcatttcaaatatttttggtttcaattttttttgaaagacgtgctgagctgcagacatatgtagggtatccagtgaaacctagaatagcattaaagaagactgttgtcagaatgtcyatagtgagaccaaattcacacaaaagacagaagaaaaatttgtacttttttcttac

SEQ ID NO: 87735 - DNA, 600 bp, Chicken  19866894389966_2
aataatgatactgggttaatacaatgggtgtcattctagccttttcaaaacctgttgtaggagaaaaatgtggttttgttcacccgcttccacaggaagtatccaagaatactatttggtgtttgattacagcctagcttttcttttcttaaatctattctcctcctatcattacttctcccatcaagtcatcagatatgcaccttacctgtgggaaaytcttgtgcaatcttatgagccatagcaacagcccactctggattaattatagacagtagatatgactgaattgtctgcacrgttttagttgtttccttgttaacaactgatgtatacccagtgtttctcatttcaaatatttttggtttcaattttttttgaaagacgtgctgagctgcagacatatgtagggtatccagtgaaacctagaatagcattaaagaagactgttgtcagaatgtcyatagtgagaccaaattcacacaaaagacagaagaaaaatttgtacttttttcttacacaggcaaaaagggggaattcagaaacaaatcctttttaaggttcaaytttaccttcattagtttggaaatcaacagaagt

SEQ ID NO: 87736 - DNA, 600 bp, Chicken  19866894389966_3
tcctatcattacttctcccatcaagtcatcagatatgcaccttacctgtgggaaaytcttgtgcaatcttatgagccatagcaacagcccactctggattaattatagacagtagatatgactgaattgtctgcacrgttttagttgtttccttgttaacaactgatgtatacccagtgtttctcatttcaaatatttttggtttcaattttttttgaaagacgtgctgagctgcagacatatgtagggtatccagtgaaacctagaatagcattaaagaagactgttgtcagaatgtcyatagtgagaccaaattcacacaaaagacagaagaaaaatttgtacttttttcttacacaggcaaaaagggggaattcagaaacaaatcctttttaaggttcaaytttaccttcattagtttggaaatcaacagaagtgtcggaaaagattcctcactgagctctgcagctgcaaggaaaaagacagatacttatggcagtgtcacagtcctcttgcagcttcctctatgaaattaagcacttgcagtgttgttatgtgcaggccttcactgagagtgaacaaatgcaaacttaattaggc

SEQ ID NO: 87737 - DNA, 600 bp, Chicken  19866894389966_4
atagacagtagatatgactgaattgtctgcacrgttttagttgtttccttgttaacaactgatgtatacccagtgtttctcatttcaaatatttttggtttcaattttttttgaaagacgtgctgagctgcagacatatgtagggtatccagtgaaacctagaatagcattaaagaagactgttgtcagaatgtcyatagtgagaccaaattcacacaaaagacagaagaaaaatttgtacttttttcttacacaggcaaaaagggggaattcagaaacaaatcctttttaaggttcaaytttaccttcattagtttggaaatcaacagaagtgtcggaaaagattcctcactgagctctgcagctgcaaggaaaaagacagatacttatggcagtgtcacagtcctcttgcagcttcctctatgaaattaagcacttgcagtgttgttatgtgcaggccttcactgagagtgaacaaatgcaaacttaattaggcacgctggtctggcatgtaggatacaggggttactttggttttgaggtcctgagaaaatcatttcaggactgaattctgcattgtgcattgtgcatattatcttg

SEQ ID NO: 87738 - DNA, 600 bp, Chicken  19866894389966_5
agacttgaagtaaaacttcaaagttcacagttagcagagaaaggcgatcatggatatatcaagccaggaagaatactgaacatacatataatgttccagaaacactgtgcagttctgaagaatatcaaatggaagggtagtctggtttcagaagctggagataaaggaatggtgtgctctgaaacatattggtgttccaggtccacgggtggggaaattcttttatatgactccagatgtttgagaaggctcaaagcctatggaggacaaaaaaaaaaagtaaagaaaagaaaaaagccrtaagaccactctattccctcttctctctcttgagtaaaatgcctaagataggagatgtatttctctatataaatatgtaatatattttatatatacacatggagagttgctatatgtctgtagtttttatccctgctatgaattattgttgagaaactgctagagaccagtagttatgattttattttctgaatgacagctgcacagacagcataattccattaatttcaacactcttgaatgtctacactaataaatagagaaaaacaaaagaacagagtactgaagccattatcaagg

SEQ ID NO: 87739 - DNA, 599 bp, Chicken  19866894389976_1
  misc_feature (1)..(137): n is any nucleotide
nnnnnnnnnnnnnnnnnnnnnnnnnnnnnnnnnnnnnnnnnnnnnnnnnnnnnnnnnnnnnnnnnnnnnnnnnnnnnnnnnnnnnnnnnnnnnnnnnnnnnnnnnnnnnnnnnnnnnnnnnnnnnnnnnnnnnnnnnatggtgtggacatcgggttgtcttgaaagggactgagattgccagctgattgttcactaactcttgtacactgccagctggggcaggatacagagcaaaatcttgtacatcagcgttattaccctgctggtgcatcactgtaacggtgtaacaatccgctcgmagatttataaaagaattctttgtgttcatcttctgcatgctacatttcacttccccggcctgtttgttcccagtcattgcacgcctcccacacaggcatgttgtaaggcaagcgttgagtacagctgtgctagggtttttctttgctagtatttgtttctaggaaaggaaaagggagaaagtcagtccatttcctgttggtttaaaacagcagaaacatctgtttgtcttaagatagttttcccaaaagaacagtggcaagggagcttgcaggtgatgagctttgccattgccagtagc

SEQ ID NO: 87740 - DNA, 600 bp, Chicken  19866894389976_2
agctttgccattgccagtagctatcagtttagacaatagtgattagtatggtctgttaaaaaataaaaaactaaagaattcctaaatctgtcagaaaatgacagaggatatttattcctgcaataaaaattctgacagctcatgtttaatttctacagtgttttaaatcataaagaatgcattgagtatctgggatcagaaaacccagatcctgcagtggaatctatgggctccattaagctcgtcatgaaagctgtttttctgtagtcgcctcatcctgttagggtgaagtttcacagygctcacaaaatggtgttaggtgatgtgccttgacacagggaatggattcgttctgacatattcatgctattgctgccatccactacgttaatgggtgcatttaacctatcaggaatcaataaaatatatattcctaagtgtatttacaatcttacattgacagctgttaaaaatagtgttacttagcttaaaattgagctcatgggatatagggaaaactctgtggatagttttccctgtgcagcatctctgcagtagagcatttagctgcttcatacttcttcatgcctaaaatgtgat

SEQ ID NO: 87741 - DNA, 599 bp, Chicken  19866894389983_1
  misc_feature (1)..(29): n is any nucleotide
nnnnnnnnnnnnnnnnnnnnnnnnnnnnntccaatgcattaccgcactttatgagaagaaattcttcctaacacctatgcagagtgcttgctgcacaccctggcttgtaagacgatggatctgtacgatatggcacagggaggcataaaaagagatgtattaatttacagctatttttgtttgcttttcttgtttttccccacattatttccctctgtcatggcatgctctgcactccccagctcacagctagctttaatttatcctcaatcttttggctattaaaaaaaaaagaaaaawaaacccaaactttgcaaaaaattaagcaggaaacccacttgtattcacgtatagcaattattttcagctgggtaattctttttcaatagtgttaataacctatttattctacctgttcttagtatagtctcatcacaaaactctcttggtgtgctcagtgtggaaagtcagctgagatgctataatgatgtcgaaatgaaatgctgtcagtgcaaatccacaaaatgacataacgatgtcagaaatgaaagggaatcatagcagagtgtgttccagcatcgctcaaaaatttgctagag

SEQ ID NO: 87742 - DNA, 600 bp, Chicken  19866894389994_1
tagggacaaaacagcaactgtgtgctgtctgtgagtaaattcaggttagaaattagatcaaatctctaggttataaaacagccaagattatccttctaaatgggagtagtggtagaatattaaatgatcttcaagatggaatagggaaagctaatgatggtgagaggaagcaacatcatctgatgatgaaagatatttacattttgctggtagctcagtgttctggtttgcaaagaataaattaatttgagataaaaaataaaagcatgttataatgttccacatattgttgttttcctrtcttttcttttttttttattactccattaaaacatcttggcaaaagtgttagatacagtagtgaagccaacaagaaagatttatgtcacctactgtcgtttataaagaaaaaaatgtcatttcacaaacctgtcatagtatgaatcctggattttttgagtatccaataggtgattggtaggttaatgacagagttattaacagacagttttcttccacacgtgattgcagtgtcctccttgctgtgctgaaaaaactgctggaacataaccattatgcactttgtagacgttgaggtat

SEQ ID NO: 87743 - DNA, 533 bp, Chicken  19866894389997_1
ttgctccacacccgcaagcaaaacacagcacaggtcagcagggctgtgcagtgcgcaggggaaggtggtgaccgctccggaaggcagccaagggctcagggggaaggaggatgtgatgcaaaatcctgctgcagggactgggacagagcgagcacgggaggagcaccgccaacgtgccaaccccaacagcatctgtgctgccaagaaggccccgaagctgaccctgcgtgcatgcaaaccatatggagccaggcctccgtgtgtgcatccaaacagggacccaatcctgcaaaagcacayggcgtaggacagcactgcaccatrgattatactgcattttaaatatcccccagcgcagtgcagctgcacggcactcaccctctgaagctgcacggactgaggggttcgggtcggatttgcaaggtgaggaaggcatcaggtttgcaggttgcatcctcccttgctttcttccagcccagcgcacagcacagagccgtccctgtcccctctgtccccgctcactcagcacctcc

SEQ ID NO: 87744 - DNA, 509 bp, Chicken  19866894389997_2
acagcacaggtcagcagggctgtgcagtgcgcaggggaaggtggtgaccgctccggaaggcagccaagggctcagggggaaggaggatgtgatgcaaaatcctgctgcagggactgggacagagcgagcacgggaggagcaccgccaacgtgccaaccccaacagcatctgtgctgccaagaaggccccgaagctgaccctgcgtgcatgcaaaccatatggagccaggcctccgtgtgtgcatccaaacagggacccaatcctgcaaaagcacayggcgtaggacagcactgcaccatrgattatactgcattttaaatatcccccagcgcagtgcagctgcacggcactcaccctctgaagctgcacggactgaggggttcgggtcggatttgcaaggtgaggaaggcatcaggtttgcaggttgcatcctcccttgctttcttccagcccagcgcacagcacagagccgtccctgtcccctctgtccccgctcactcagcacctcc

SEQ ID NO: 87745 - DNA, 600 bp, Chicken  19866894390000_1
gattctaaatggttgactcccatcctttgtttttcttaaggatttctagtggctgccactgatttcctacaggagggcactgtggaaggaaggagaggtggtacgcatgggggtgagttggttactgagttatttctcttaatttgtagccttcactgcttgagtgtctgaagatcatcagggaagagcaaaatgtacagccttgagttttagctcacaagaaacaattaggacagaaagggaaggagagccaaagtgtgctgttggtgtaggtgggatgagaacatatagcagtattarcagggcaggttcacagatgtacactcactggttttctccatcttctgtgtatcatatttcctctgttcctgtgtcttaacttttctcactacccacatactcattctgttgggtttttttactttacatcttttttttcttttctttgcccttttggctgttcgctttccattgcctttgtaccctgtcatgctcaaaggttagacacagtgcaatggaaagagcagcacattctggctccaaattaaatgcattttggcagtactgctgggatgcctatggatctttatgggcagattt

SEQ ID NO: 87746 - DNA, 600 bp, Chicken  19866894390007_1
gaaagatgatatatctatagaaatcaatttgcagtactcccttagaagagtcatgtaccttgcttcaaatattagtccagcaatgctacattggctgttgacaggttggggaaattgtgtgtttctacatatagttccctgaaatacatcagctcagaatgaatggtgactcaaaatagccttagagtgaaatttcctcatctcaactcatacattcttctcactataaaacacacaattacttgagtttgtggaaatcaggaccctgctacaccaagatgttaattaattccaaaacaygaaacacaagaagtacaccactgtttcacactgctgttctattaatgcagcactctgtctccacacagcatcagcaatgccatttaaagcaagctcatcagcctaaccaccatgactcatcccctgcattatttctcaatatccagaagcactgtattagcagcttaagagatatctgccttcaggatacatttgtggacmtgctgycagtgaatttgatctcttttcagtcttgctgacattatccaacwctaaaycctccagcagcagggaattccaaaagtttttcacccatcacat

SEQ ID NO: 87747 - DNA, 600 bp, Chicken  19866894390007_2
ctcaactcatacattcttctcactataaaacacacaattacttgagtttgtggaaatcaggaccctgctacaccaagatgttaattaattccaaaacaygaaacacaagaagtacaccactgtttcacactgctgttctattaatgcagcactctgtctccacacagcatcagcaatgccatttaaagcaagctcatcagcctaaccaccatgactcatcccctgcattatttctcaatatccagaagcactgtattagcagcttaagagatatctgccttcaggatacatttgtggacmtgctgycagtgaatttgatctcttttcagtcttgctgacattatccaacwctaaaycctccagcagcagggaattccaaaagtttttcacccatcacataaaaaaagcaatttacctgctccaaaccaatccttccctagtttcaacacattacmtgagctctagtacagcagttcttgctaacagctctacaatctgctcagctgacaccttcctgtcctgctaacccatgagtaaaatactcctcagccaccttctctctaaactgaagagtcccagtccttttattctctcttcaaa

SEQ ID NO: 87748 - DNA, 600 bp, Chicken  19866894390007_3
tcatacattcttctcactataaaacacacaattacttgagtttgtggaaatcaggaccctgctacaccaagatgttaattaattccaaaacaygaaacacaagaagtacaccactgtttcacactgctgttctattaatgcagcactctgtctccacacagcatcagcaatgccatttaaagcaagctcatcagcctaaccaccatgactcatcccctgcattatttctcaatatccagaagcactgtattagcagcttaagagatatctgccttcaggatacatttgtggacmtgctgycagtgaatttgatctcttttcagtcttgctgacattatccaacwctaaaycctccagcagcagggaattccaaaagtttttcacccatcacataaaaaaagcaatttacctgctccaaaccaatccttccctagtttcaacacattacmtgagctctagtacagcagttcttgctaacagctctacaatctgctcagctgacaccttcctgtcctgctaacccatgagtaaaatactcctcagccaccttctctctaaactgaagagtcccagtccttttattctctcttcaaatcaaca

SEQ ID NO: 87749 - DNA, 600 bp, Chicken  19866894390007_4
tggaaatcaggaccctgctacaccaagatgttaattaattccaaaacaygaaacacaagaagtacaccactgtttcacactgctgttctattaatgcagcactctgtctccacacagcatcagcaatgccatttaaagcaagctcatcagcctaaccaccatgactcatcccctgcattatttctcaatatccagaagcactgtattagcagcttaagagatatctgccttcaggatacatttgtggacmtgctgycagtgaatttgatctcttttcagtcttgctgacattatccaacwctaaaycctccagcagcagggaattccaaaagtttttcacccatcacataaaaaaagcaatttacctgctccaaaccaatccttccctagtttcaacacattacmtgagctctagtacagcagttcttgctaacagctctacaatctgctcagctgacaccttcctgtcctgctaacccatgagtaaaatactcctcagccaccttctctctaaactgaagagtcccagtccttttattctctcttcaaatcaacaggtctgttttcacacacatttccattatcmttccctccagagca

SEQ ID NO: 87750 - DNA, 600 bp, Chicken  19866894390007_5
tcaggaccctgctacaccaagatgttaattaattccaaaacaygaaacacaagaagtacaccactgtttcacactgctgttctattaatgcagcactctgtctccacacagcatcagcaatgccatttaaagcaagctcatcagcctaaccaccatgactcatcccctgcattatttctcaatatccagaagcactgtattagcagcttaagagatatctgccttcaggatacatttgtggacmtgctgycagtgaatttgatctcttttcagtcttgctgacattatccaacwctaaaycctccagcagcagggaattccaaaagtttttcacccatcacataaaaaaagcaatttacctgctccaaaccaatccttccctagtttcaacacattacmtgagctctagtacagcagttcttgctaacagctctacaatctgctcagctgacaccttcctgtcctgctaacccatgagtaaaatactcctcagccaccttctctctaaactgaagagtcccagtccttttattctctcttcaaatcaacaggtctgttttcacacacatttccattatcmttccctccagagcaagtgga

SEQ ID NO: 87751 - DNA, 600 bp, Chicken  19866894390007_6
gtctccacacagcatcagcaatgccatttaaagcaagctcatcagcctaaccaccatgactcatcccctgcattatttctcaatatccagaagcactgtattagcagcttaagagatatctgccttcaggatacatttgtggacmtgctgycagtgaatttgatctcttttcagtcttgctgacattatccaacwctaaaycctccagcagcagggaattccaaaagtttttcacccatcacataaaaaaagcaatttacctgctccaaaccaatccttccctagtttcaacacattacmtgagctctagtacagcagttcttgctaacagctctacaatctgctcagctgacaccttcctgtcctgctaacccatgagtaaaatactcctcagccaccttctctctaaactgaagagtcccagtccttttattctctcttcaaatcaacaggtctgttttcacacacatttccattatcmttccctccagagcaagtggaggcccagcactgagcttaaatggggctcacaggcagaggtgagacggaggtgtggagaggccattcagggtcacaagggctcattgctcatgaccccaa

SEQ ID NO: 87752 - DNA, 600 bp, Chicken  19866894390007_7
gacattatccaacwctaaaycctccagcagcagggaattccaaaagtttttcacccatcacataaaaaaagcaatttacctgctccaaaccaatccttccctagtttcaacacattacmtgagctctagtacagcagttcttgctaacagctctacaatctgctcagctgacaccttcctgtcctgctaacccatgagtaaaatactcctcagccaccttctctctaaactgaagagtcccagtccttttattctctcttcaaatcaacaggtctgttttcacacacatttccattatcmttccctccagagcaagtggaggcccagcactgagcttaaatggggctcacaggcagaggtgagacggaggtgtggagaggccattcagggtcacaagggctcattgctcatgaccccaatacaaaacaactctcccagaccagccaggtttcccttatatttgccaaatgctccctgaactaatgtgtatctctttagcatgtcaagagcagagacttgcaataggtagttttcattcactatcctataatacataacagcattagaagttttgctcctaactctcccttccacttcatt

SEQ ID NO: 87753 - DNA, 600 bp, Chicken  19866894390012_1
cactcactgacatccaggtgtgcacacggcaggacaggggctggtgctctgcagctcccaaatctgcactacgtggggctcatcaaattatgaagggtaacggccttaactggcaccaggagaggttcaggttggatgtttgaagaaatctctcaaagggaggtgatgcagtggcacagtctgcccagggagtggtggggtcaccgtccctggaagggttcagaaccgtggagatgtggcactgagggacatggctatgggcacggtgggatgcgatggggttggattggccatctttayggtcttttccaactgtaatgattctacagttccatgaaatgatgcagatctctgagctgcaggggcacagatctgggtgcagctcctctagcatctcatgcacacagaggtcgtgcttccactttgctccgcagcggatgagcaaagcctcccatcgccatcctctgaaagctccccaaacacgaagcatcctttgcacaccacagagctgaaattttcccagcgttctgccagaaatcacacttttttagatttatttttcctatttttttccccttctctgccctcaaagtcaacaca

SEQ ID NO: 87754 - DNA, 506 bp, Chicken  19866894390017_1
agaattttcttgtttagagagccaagaaactaaagagaaagacaagcccagccaggcctcaatgttcctaggtagtcacaatgtgaacgtacatattgtgcagaggtcacaatttgtcttaatgcggcatgaaagttcaaggttgttcctcacgtgaaagagaaacagcatatacaagctatcatcaacttcaacagacttatctggaaaaataaaagcttcctctagaaaaacaacttggctctaagatgtccagcactgctctgcttggaacaattagataaccaactctgttatgcyggatctttatcttcactgcctactgctttgtgtccttccctgccacaaaggaaaaacactgcaggtgtgcagttttctcctttgccrggccccaagaagtgaacagcctggcaaagcagtgtggtccagcagcagtgtgtaaactgcatgtacttctagcaaacaaactagactaacacagcaagaaactgttcagatttccatgt

SEQ ID NO: 87755 - DNA, 419 bp, Chicken  19866894390017_2
cgtacatattgtgcagaggtcacaatttgtcttaatgcggcatgaaagttcaaggttgttcctcacgtgaaagagaaacagcatatacaagctatcatcaacttcaacagacttatctggaaaaataaaagcttcctctagaaaaacaacttggctctaagatgtccagcactgctctgcttggaacaattagataaccaactctgttatgcyggatctttatcttcactgcctactgctttgtgtccttccctgccacaaaggaaaaacactgcaggtgtgcagttttctcctttgccrggccccaagaagtgaacagcctggcaaagcagtgtggtccagcagcagtgtgtaaactgcatgtacttctagcaaacaaactagactaacacagcaagaaactgttcagatttccatgt

SEQ ID NO: 87756 - DNA, 599 bp, Chicken  19866894390024_1
  misc_feature (1)..(69): n is any nucleotide
nnnnnnnnnnnnnnnnnnnnnnnnnnnnnnnnnnnnnnnnnnnnnnnnnnnnnnnnnnnnnnnnnnnnnacacaaatcctaacaagtgaaactaatcttgatgaaatttccagttgcctttttggaaagttttgtgaattttatagaatgactcaatttgcttagcagaaattcacaatcagtctttttttgtcactgaataaacagattctgcatgagtagtaatttgcatatcccagctataaacgtaattcattatttttaagtccattttgtaataattattctaggattgatgtwctaactcttactcggcttttacaattgcaaccttagataattcttgctagctaaaaagataccaaagtagtggttctgttttggaatagcaatgggaggtgcctgtcttgaggtcagcaagtaggtcagtgtaagggccagaactgggaatgaaaaagcttgagaaatttttttttgcatctcaatcttccagtctcaagcaaatgttgccttaataagatagattttcacatttttatttgtatgaaaacagcagaggtatgatcaggagttaatgctgtagtctacttgcagattat

SEQ ID NO: 87757 - DNA, 600 bp, Chicken  19866894390036_1
ctctgatgtgaagcactgttgtgagggccattacagataaatgggttttcctatatgctgtatgttctagacatatttcaagatatttttttatatttatctagggtttgcagtcatctagtaagtctaacacacatccacctagggtataaatgatcaagcaggtctgacatctttcagaaaaatggtattataggctcttgcaaatgggttgcttacaaatggaagttcccgtgccatttcttgcatatttataagtatctgattaatgaataaccatagatagtggacagcagtggraacagcaatggagttgcaaatgacctgagtaattttagagaaggccacattgacctgtttgtaaatccccttgtttcgtttagttacacaggyaagctaaactgaaatcagtcactctctttagcgacctggtgtgatgacagcataattcactaatgaagtattagcacatcattctctgatggaaatcaactgtgctgtttctagctaaacagtggagttttgaagttcactcctaataataacaggcagggaaagaagaaaagaagaagcttctactatctctagaagcttctttag

SEQ ID NO: 87758 - DNA, 600 bp, Chicken  19866894390036_2
tatttatctagggtttgcagtcatctagtaagtctaacacacatccacctagggtataaatgatcaagcaggtctgacatctttcagaaaaatggtattataggctcttgcaaatgggttgcttacaaatggaagttcccgtgccatttcttgcatatttataagtatctgattaatgaataaccatagatagtggacagcagtggraacagcaatggagttgcaaatgacctgagtaattttagagaaggccacattgacctgtttgtaaatccccttgtttcgtttagttacacaggyaagctaaactgaaatcagtcactctctttagcgacctggtgtgatgacagcataattcactaatgaagtattagcacatcattctctgatggaaatcaactgtgctgtttctagctaaacagtggagttttgaagttcactcctaataataacaggcagggaaagaagaaaagaagaagcttctactatctctagaagcttctttaggtttctgcttcctgatgagttttatttgaagttttggagatggtggtcaaccagatgtccaatactaccagaaacagtgaaaatctctttact

SEQ ID NO: 87759 - DNA, 599 bp, Chicken  19866894390037_1
  misc_feature (1)..(127): n is any nucleotide
nnnnnnnnnnnnnnnnnnnnnnnnnnnnnnnnnnnnnnnnnnnnnnnnnnnnnnnnnnnnnnnnnnnnnnnnnnnnnnnnnnnnnnnnnnnnnnnnnnnnnnnnnnnnnnnnnnnnnnnnnnnnnnntccttggtccttagtctcctggccttcttctcttaaatgagaggatttctatggaaacaagttctttctccctctccatgatggcaaactttttggcctcaaatgtattcccccctccaagttcacctggtgcctgtcttcagtgagcagaaattaaggcagaggagctcatytggaaaggaaagcaaagaaaatgcaaagcattagcttaactgccagggtgggtccagcggtgcttccttattgcatccttgcagaaaggtgctgattcctaccatatactctactcatttaagcaattaacacattagatgtttatcttctctcccattaattatttaagttgctgcttgatgtgaaagttgagaccattaatgtattggcagtgttaatatttaatgatctaaggcatagggaataaaagggaaatcaatatttgtgcagtgcttttcttcctgttaagaaagccaca

SEQ ID NO: 87760 - DNA, 600 bp, Chicken  19866894390037_2
tgattcctaccatatactctactcatttaagcaattaacacattagatgtttatcttctctcccattaattatttaagttgctgcttgatgtgaaagttgagaccattaatgtattggcagtgttaatatttaatgatctaaggcatagggaataaaagggaaatcaatatttgtgcagtgcttttcttcctgttaagaaagccacagaaaatttgctctcttctataaagccatggatagtgctaatgttaatggaagcaagtgggtttacttggtgctgaagctgtgctttgcttcayagttatttaattctagctcttcctactgctagatgaaaaccagaggctgcccaacttcttaaacacagatatgttaaaagtgctgaaaacaattctctgaaagaggctgttttttctcttatgaagcttcctggtcttgataaattcttaagtcttcagggattaaactctttggacttcaaagattagcatgacgtgtttcaggaagataaattttaagagctgtggaaaaaagagggtagaaatccagcaacaaacaggaaaactcttgaggctgaaatctgttgtatctgttttcag

SEQ ID NO: 87761 - DNA, 600 bp, Chicken  19866894390039_1
ggcaggaagaacaagggcaggagcactggaagcagtttaactgtgggatttgtgagtaactatggcaatcctccgttcaatcacacagagtttctggttaaaagcgagtgatgcactttgctggcacatagaaatgaggattcttttaacctttctgctctgcgcctctggctgtcataattagcctcgctgctcacctccaactgcccttcttaagtcctatagaaatttaacactgaatacgatttctatttgcatttctatgccggctcatatgttccacaacgaaataaagcagcyctgcttctcccctgacctcctgctgccgagcactcgagagaatcagcgaaggacaacccctgcgtgtctcccaagtttgctcaaaggtttcccrtyctgtttcagagcacatccacaggcagccatagcgtggcagtgtaagccgggctgtcagcgggtgcgatgcccgagcggggagatacagcccaggattcccacagcagcacaaaggcaatagtttgcttttttggaaagaaagacagacaaacagagagaaagaagaccttaaatgcatctttgccacagccctcttctaaggta

SEQ ID NO: 87762 - DNA, 600 bp, Chicken  19866894390039_2
tggttaaaagcgagtgatgcactttgctggcacatagaaatgaggattcttttaacctttctgctctgcgcctctggctgtcataattagcctcgctgctcacctccaactgcccttcttaagtcctatagaaatttaacactgaatacgatttctatttgcatttctatgccggctcatatgttccacaacgaaataaagcagcyctgcttctcccctgacctcctgctgccgagcactcgagagaatcagcgaaggacaacccctgcgtgtctcccaagtttgctcaaaggtttcccrtyctgtttcagagcacatccacaggcagccatagcgtggcagtgtaagccgggctgtcagcgggtgcgatgcccgagcggggagatacagcccaggattcccacagcagcacaaaggcaatagtttgcttttttggaaagaaagacagacaaacagagagaaagaagaccttaaatgcatctttgccacagccctcttctaaggtaataaaagaacakctgtagatgattaagaggaacagatgattactaaagcactccaggctcagcacatgtaccaaagttgtggcacttcagcccg

SEQ ID NO: 87763 - DNA, 600 bp, Chicken  19866894390039_3
gttaaaagcgagtgatgcactttgctggcacatagaaatgaggattcttttaacctttctgctctgcgcctctggctgtcataattagcctcgctgctcacctccaactgcccttcttaagtcctatagaaatttaacactgaatacgatttctatttgcatttctatgccggctcatatgttccacaacgaaataaagcagcyctgcttctcccctgacctcctgctgccgagcactcgagagaatcagcgaaggacaacccctgcgtgtctcccaagtttgctcaaaggtttcccrtyctgtttcagagcacatccacaggcagccatagcgtggcagtgtaagccgggctgtcagcgggtgcgatgcccgagcggggagatacagcccaggattcccacagcagcacaaaggcaatagtttgcttttttggaaagaaagacagacaaacagagagaaagaagaccttaaatgcatctttgccacagccctcttctaaggtaataaaagaacakctgtagatgattaagaggaacagatgattactaaagcactccaggctcagcacatgtaccaaagttgtggcacttcagcccgtg

SEQ ID NO: 87764 - DNA, 600 bp, Chicken  19866894390039_4
tgacctcctgctgccgagcactcgagagaatcagcgaaggacaacccctgcgtgtctcccaagtttgctcaaaggtttcccrtyctgtttcagagcacatccacaggcagccatagcgtggcagtgtaagccgggctgtcagcgggtgcgatgcccgagcggggagatacagcccaggattcccacagcagcacaaaggcaatagtttgcttttttggaaagaaagacagacaaacagagagaaagaagaccttaaatgcatctttgccacagccctcttctaaggtaataaaagaacakctgtagatgattaagaggaacagatgattactaaagcactccaggctcagcacatgtaccaaagttgtggcacttcagcccgtgaggaaattcggatttttctcaggcaggagcttcacacagagttcgtctcggttctcgtcagagaccataacggcactgcagggaccctttgcgaggaattcggctctgtgtcccacccagcagccccacatccccgcctttatctgccacccacagccgggggggacggcggccgagagcagcgcaatccttgagcaggcagcagtgaccttagca

SEQ ID NO: 87765 - DNA, 599 bp, Chicken  19866894390049_1
  misc_feature (1)..(57): n is any nucleotide
nnnnnnnnnnnnnnnnnnnnnnnnnnnnnnnnnnnnnnnnnnnnnnnnnnnnnnnnnggatgaaaaatgagaatgctctggcagtcgagagagatagggttcaaactccagggccaggagttatattagtctccaggaaaaaaaggctgactttcattataggcagtgatggtactcgctgccttaaaaaaaattgtatatatatatgtatgtataaattaggacttgggagcttcatttgtacaatgtcatatactcatacaattaccataaagaaaatgtcagtaagctaccagcttyggtaagtttcctctagattcttattcactcttgtgtatgtttgtttgatgatcagatatcaagattacacggcagtcaaaccttgatgatgccaattaaaccagttctgtggcaaataaatggaatttaagtgaataacattgtttatggagttgctgagctaaaccttaaggcaaaccaacaaagcaaggcagactgctgcctgcattctatacacttgggatttcatttagttggtcacccaamgaagagttgccttggacgtttcctgtgtgcctaaagaattagggatcttctgc

SEQ ID NO: 87766 - DNA, 582 bp, Chicken  19866894390049_2
tgtcatatactcatacaattaccataaagaaaatgtcagtaagctaccagcttyggtaagtttcctctagattcttattcactcttgtgtatgtttgtttgatgatcagatatcaagattacacggcagtcaaaccttgatgatgccaattaaaccagttctgtggcaaataaatggaatttaagtgaataacattgtttatggagttgctgagctaaaccttaaggcaaaccaacaaagcaaggcagactgctgcctgcattctatacacttgggatttcatttagttggtcacccaamgaagagttgccttggacgtttcctgtgtgcctaaagaattagggatcttctgcagaagaaaaaaaccaatacaaaattggaagctatgtgtataattttacttaggcacagtagtaatacttcctttgttggttacagagataggcacaataaaaacataagcaaaccaaatgaaacaaacaaaaaagatgaaattttaattgctgccagttcagtaaaacttgctccatgtagccacagggataatatgtgccttattggcctctatagcacattagatga

SEQ ID NO: 87767 - DNA, 600 bp, Chicken  19866894390050_1
ggagcgggttgtatttatagacactgatcgagaggaccttggaagggttttggcttcccagagggcaagttctctgagaagaggaaccaaaatagctgaagcacagtggtggacgaaggggcgggcatggggtcagggcagcagccaggagcacacactgcagatggtggcccacatgctctttcctttgccagcctggctgggatctcccgcagcaccaccattgtcgtcgcctacgttatggctgtcacagagatgagctctcaggaggtgctggaggccatcagaagcgtgcgaccygttgccaaccccaaccccggcttcaagcaacagctggaggagttcagcggcagtgcagcccgcaaggtgggatgcaggacagagcaggggcagtgcatcagatcccttccctatgccccttgcttgtgagctcggactcgcacactgacacaggcatgctactctgcttctccctctctccccagatgcgcaggcacctgaagcagaggtatgggacgtcccctttcaatgacgaggaagaaattaaggccctgctaccagtggggagaggaagagcatcccgagcagagggagctcggc

SEQ ID NO: 87768 - DNA, 600 bp, Chicken  19866894390054_1
aaatggatgggcgtttatgagctgtgcctttccaagccacggccccaaggacaaagagaaactcacaatcgcacctgcactccctcatgttggccagagaaagaacacacccaggcctggtctgcatgagccagaaggcgcatattttcagtcttctgaaatgcattttgagacagaagtgcaaattttcaccctgctttgtttgcctcactactttcctcacctcttccgtgctttcagcctgtgatgtttcagaaagggaaagatttctttggaaatttcttcatcttgtgttttccyagagctggaaggggatggaatatgagtgcagactgttccagatgaacagaagtaaacatgatgagctgaagcccatttgtaatttgaaaaatgtcatattagcaaagcttcccttctgtcctctgtcttttcttgaagcaacttgtattttctactggattctggtaaaagctaacttctgtgctgcacgtgatgttgacaaaagatatcactgagcagtactaggcaccacatctacctgcctattaacaccattcccagtcctacaacaggtatgtcgagatgtagaatcttacccat

SEQ ID NO: 87769 - DNA, 600 bp, Chicken  19866894390056_1
agatctttagtaaaaactacagacatctcattaaaagttatgatattatgcagtgccctttacaaggagcaaataccattgttaatatcatttagcaacaggagaaagtgagccctttaagcttaaggtttagaaatcaattttacttggatcctatttaaggaaacactcaaaaatcaaacctcagttactaccaattctctgctttttccactactgaacgaacaatggttctagcatcttcttagtaggcacaatgacagacacgtcaataacgttagagcccacataaagcaccaratgcagagttaggtcattacctgttatattgcaaaaaacccggagcggtccaagtggtccacttccatcagaatcaatgtagaagaaatctgatgtcttcccttggtgccggtaagcctcacatgactgctcatagatagcttaaaaaagagatatagaaaatgaaaatgtatcacataaacgaggggagaaacttttatacataacagcattgcttgaaacactgctgtaatgaaaacttttgattcactgctgcctagcatgtgaaaatttactgcatttagtcctgagtttgtgctc

SEQ ID NO: 87770 - DNA, 600 bp, Chicken  19866894390056_2
gtccacttccatcagaatcaatgtagaagaaatctgatgtcttcccttggtgccggtaagcctcacatgactgctcatagatagcttaaaaaagagatatagaaaatgaaaatgtatcacataaacgaggggagaaacttttatacataacagcattgcttgaaacactgctgtaatgaaaacttttgattcactgctgcctagcatgtgaaaatttactgcatttagtcctgagtttgtgctcaaactcaggcatgtaggtaactgccttcatgaacttgagtagacgctgctttaatratatgaatgttgttcttattrtaaagtatgtaaaarcataaggaaataaataagaattttcagacgtgttcccatttaattaggggagtgatacatacacgcatccacaaaatgatatttcagatacatatatacaaacacacacatatacatgatttatcactaggacaagcacttaagtcttgtcaagataaaagacaattttttgtcagtgctcagcttccttgtatcacttctaccactccaaacaaaaataagccatttactctagcaaaaaagcctaagctcaggtacgttctc

SEQ ID NO: 87771 - DNA, 600 bp, Chicken  19866894390056_3
tgtagaagaaatctgatgtcttcccttggtgccggtaagcctcacatgactgctcatagatagcttaaaaaagagatatagaaaatgaaaatgtatcacataaacgaggggagaaacttttatacataacagcattgcttgaaacactgctgtaatgaaaacttttgattcactgctgcctagcatgtgaaaatttactgcatttagtcctgagtttgtgctcaaactcaggcatgtaggtaactgccttcatgaacttgagtagacgctgctttaatratatgaatgttgttcttattrtaaagtatgtaaaarcataaggaaataaataagaattttcagacgtgttcccatttaattaggggagtgatacatacacgcatccacaaaatgatatttcagatacatatatacaaacacacacatatacatgatttatcactaggacaagcacttaagtcttgtcaagataaaagacaattttttgtcagtgctcagcttccttgtatcacttctaccactccaaacaaaaataagccatttactctagcaaaaaagcctaagctcaggtacgttctccattcagggtgacatctttat

SEQ ID NO: 87772 - DNA, 600 bp, Chicken  19866894390056_4
atgtcttcccttggtgccggtaagcctcacatgactgctcatagatagcttaaaaaagagatatagaaaatgaaaatgtatcacataaacgaggggagaaacttttatacataacagcattgcttgaaacactgctgtaatgaaaacttttgattcactgctgcctagcatgtgaaaatttactgcatttagtcctgagtttgtgctcaaactcaggcatgtaggtaactgccttcatgaacttgagtagacgctgctttaatratatgaatgttgttcttattrtaaagtatgtaaaarcataaggaaataaataagaattttcagacgtgttcccatttaattaggggagtgatacatacacgcatccacaaaatgatatttcagatacatatatacaaacacacacatatacatgatttatcactaggacaagcacttaagtcttgtcaagataaaagacaattttttgtcagtgctcagcttccttgtatcacttctaccactccaaacaaaaataagccatttactctagcaaaaaagcctaagctcaggtacgttctccattcagggtgacatctttatgctttagacctattt

SEQ ID NO: 87773 - DNA, 599 bp, Chicken  19866894390067_1
  misc_feature (1)..(68): n is any nucleotide
nnnnnnnnnnnnnnnnnnnnnnnnnnnnnnnnnnnnnnnnnnnnnnnnnnnnnnnnnnnnnnnnnnnnttcagtgtttgaaatagcccagctatatgaatcaagtgattgtatgtgatactcaagtttgtaaaatgaaagaaaagagtgaaaccgtgacacagacctctcttagtggttctaaatctgtaagacaattaaaagtaatgattattttaaatgaaaaggtctaaaaagagaaagggaagtaaaagtatcaacattttagtccctgtgattttccagcacctggcagatgatrtttgagcacttagggatgcatgtatcacaggctgtttacctcatcactgtctgaatcctccgcttgcaatccagggccagtggctctttctgacgtgtctctatgaacttctgggcatgtttcagcagtgacttgctgggggggaacaggccagtgcagagccacaagagctgccagcccttggtcacgctatacctgcgggcacaaagcaaatgcatctgctgcagccacacaattcttcctttgaccacacagcagctatagggtaaagaaacacagtcccatcacggtacttcgtg

SEQ ID NO: 87774 - DNA, 599 bp, Chicken  19866894390068_1
  misc_feature (1)..(162): n is any nucleotide
nnnnnnnnnnnnnnnnnnnnnnnnnnnnnnnnnnnnnnnnnnnnnnnnnnnnnnnnnnnnnnnnnnnnnnnnnnnnnnnnnnnnnnnnnnnnnnnnnnnnnnnnnnnnnnnnnnnnnnnnnnnnnnnnnnnnnnnnnnnnnnnnnnnnnnnnnnnnnnnnnntacaatctagaggtcaagaggatagagcatgggggtactgggcagctgtacatgaggcagcaatgtaccctcacagccttgaactgcatccaaagcagcacagccagcagggcagggaagggatctgcccctctgctyggtgctaggttgccacacctagagacaccagagaggtggcagtggcctgtctctgcagatagccaaggttaggctgcatggggctccgagcactgatggagctgtgggtgtccctgctcactgcagggagtgggaccagatggcctctaaggtcctttccaactgaaacaattccatgattctatgagtggtggtttcccttgtctcccggcagccagtgcgagaggaacccytgccccacggacagccgagcctgccgcctggccgccacctccatctccttccactacctgccactc

SEQ ID NO: 87775 - DNA, 600 bp, Chicken  19866894390068_2
cacagccttgaactgcatccaaagcagcacagccagcagggcagggaagggatctgcccctctgctyggtgctaggttgccacacctagagacaccagagaggtggcagtggcctgtctctgcagatagccaaggttaggctgcatggggctccgagcactgatggagctgtgggtgtccctgctcactgcagggagtgggaccagatggcctctaaggtcctttccaactgaaacaattccatgattctatgagtggtggtttcccttgtctcccggcagccagtgcgagaggaacccytgccccacggacagccgagcctgccgcctggccgccacctccatctccttccactacctgccactccaggccaaccgcaccgtgccccgtgtcctcttcaagatgtccaccacccgcttcgtgggtgacagcctgcgcttcgccatcataggtggccggggccagggcgtctttgccgtgcggcgctccgaccggcagacgggagagctggtgctcagcagcccggtggtggggccagccacactagaggtggagctggagatgagcgagttctcccgcaaggtgctgctgggcaagcac

SEQ ID NO: 87776 - DNA, 599 bp, Chicken  19866894390071_1
  misc_feature (1)..(203): n is any nucleotide
nnnnnnnnnnnnnnnnnnnnnnnnnnnnnnnnnnnnnnnnnnnnnnnnnnnnnnnnnnnnnnnnnnnnnnnnnnnnnnnnnnnnnnnnnnnnnnnnnnnnnnnnnnnnnnnnnnnnnnnnnnnnnnnnnnnnnnnnnnnnnnnnnnnnnnnnnnnnnnnnnnnnnnnnnnnnnnnnnnnnnnnnnnnnnnnnnnnnnnnnnnnctgggtgctacgtgaaagcaaaggagtttgtcttcagtgctccttgtttacttaaagcatgttctccatgctgctgtgttggtttagaataaaggayattgtcacgtgtgtttgtagcccgtgcagtgagtctttccttcagtggtggcagtttgctggagcagtgtaaaggctgccctgctgttggcagcattcagagtacaaagcacagaagcgactggcaaacttcctcctacagcaggttaataactatctgctaaataaagtgttactgttgtggaattctcaagacttcttttttttttttttttccctgaataagtgtcaacttgttggtttcattctttgatggtcaagaagtgctctgtattacttatttccctgtcaggatttttg

SEQ ID NO: 87777 - DNA, 600 bp, Chicken  19866894390072_1
atgggagccacagaggtggcaccgttagcctgcagctctcagtggttacttcagatggaaagcagacacgagcaatctgggggctcactggctgtgccttctgccttgttgggatgtatttatgctgccattaggcatgggtcaggaccagaccgacctgtgcgtgtacttcagccccgccaggctgcagctatccaggaaagcctgttagttgtccctataggggaacccagcagcatgcggatgcactgatgcaagagctatcactgagctaaagtcagcagcacccaccgagtgcaygcaggtctcagctctgcactgagacagacattccccaggactcacatctctcccttagagaacccaggagcaggagctgcatcagataatcaaaacagagtttgaaaataggtttcacactccctccktggtttttttttttccccctcctgagagggggagtggcaagactcccatcacaaagaacgttactcagaaccagaacagatcttaaggcacaacactaaaaacctgtatgcaatgcagaaggactgggtggctcgagggattggtaatggtataaagagcttttcaccacta

SEQ ID NO: 87778 - DNA, 600 bp, Chicken  19866894390072_2
cattaggcatgggtcaggaccagaccgacctgtgcgtgtacttcagccccgccaggctgcagctatccaggaaagcctgttagttgtccctataggggaacccagcagcatgcggatgcactgatgcaagagctatcactgagctaaagtcagcagcacccaccgagtgcaygcaggtctcagctctgcactgagacagacattccccaggactcacatctctcccttagagaacccaggagcaggagctgcatcagataatcaaaacagagtttgaaaataggtttcacactccctccktggtttttttttttccccctcctgagagggggagtggcaagactcccatcacaaagaacgttactcagaaccagaacagatcttaaggcacaacactaaaaacctgtatgcaatgcagaaggactgggtggctcgagggattggtaatggtataaagagcttttcaccactaggcttctggcttcagtccagaggtagtaactgaaagccacagtcatctgatgcctgcatcgtgggctgtgcaaaatgagttgttggtctctgcgtagatcctaccaagcgggatccagatcacaaagc

SEQ ID NO: 87779 - DNA, 600 bp, Chicken  19866894390073_1
tgtgaataagccaccagaacaagcctttgttgctttggttcagtttaatctcacaaatttgtgtcaactctttgtttctagaagaattttatcatttgatctcatggttacactttagtagacttcagtacatattttatttccctctccagaatataaaattccatcttgtgtcaaaatattcttattagtatctatttatatttcagagatacttagaatcttcagctgagagcggggtcgtcttgtagaagatgatacagaggcacacaataaaggactgctggtcccaggagcctrgcaagctaagcaaggggagagaggaaatatcaccactgttttgcagatggaaaaccagagctctgagaatctgtgcaacttgttgcagtgtcacacagcaatattggcaagggagttctgtaaaagtgtcgaagtccagactcagygcatactaaaggtggatataaaccccgttttcttggcragcatcaatataagctcacataaattacaggtatgtacactggtgtcatctgcacactgagcatgccaaggctcccttggtctcctytgcgcctgtttcttcccccayctccatcc

SEQ ID NO: 87780 - DNA, 600 bp, Chicken  19866894390073_2
ctccagaatataaaattccatcttgtgtcaaaatattcttattagtatctatttatatttcagagatacttagaatcttcagctgagagcggggtcgtcttgtagaagatgatacagaggcacacaataaaggactgctggtcccaggagcctrgcaagctaagcaaggggagagaggaaatatcaccactgttttgcagatggaaaaccagagctctgagaatctgtgcaacttgttgcagtgtcacacagcaatattggcaagggagttctgtaaaagtgtcgaagtccagactcagygcatactaaaggtggatataaaccccgttttcttggcragcatcaatataagctcacataaattacaggtatgtacactggtgtcatctgcacactgagcatgccaaggctcccttggtctcctytgcgcctgtttcttcccccayctccatccttcaaagcagcagatactgctttttgatgctgtcctcctaggctcataaaagttagtctaccactgcttcctctagcacttaacaaaaatttacctctggccctgagatgccacagtggtgtcaaatctctctgactgcagcagct

SEQ ID NO: 87781 - DNA, 600 bp, Chicken  19866894390073_3
ttattagtatctatttatatttcagagatacttagaatcttcagctgagagcggggtcgtcttgtagaagatgatacagaggcacacaataaaggactgctggtcccaggagcctrgcaagctaagcaaggggagagaggaaatatcaccactgttttgcagatggaaaaccagagctctgagaatctgtgcaacttgttgcagtgtcacacagcaatattggcaagggagttctgtaaaagtgtcgaagtccagactcagygcatactaaaggtggatataaaccccgttttcttggcragcatcaatataagctcacataaattacaggtatgtacactggtgtcatctgcacactgagcatgccaaggctcccttggtctcctytgcgcctgtttcttcccccayctccatccttcaaagcagcagatactgctttttgatgctgtcctcctaggctcataaaagttagtctaccactgcttcctctagcacttaacaaaaatttacctctggccctgagatgccacagtggtgtcaaatctctctgactgcagcagcttccaggcacagaagagagacaccaaaggtcctttagtt

SEQ ID NO: 87782 - DNA, 600 bp, Chicken  19866894390073_4
aataaaggactgctggtcccaggagcctrgcaagctaagcaaggggagagaggaaatatcaccactgttttgcagatggaaaaccagagctctgagaatctgtgcaacttgttgcagtgtcacacagcaatattggcaagggagttctgtaaaagtgtcgaagtccagactcagygcatactaaaggtggatataaaccccgttttcttggcragcatcaatataagctcacataaattacaggtatgtacactggtgtcatctgcacactgagcatgccaaggctcccttggtctcctytgcgcctgtttcttcccccayctccatccttcaaagcagcagatactgctttttgatgctgtcctcctaggctcataaaagttagtctaccactgcttcctctagcacttaacaaaaatttacctctggccctgagatgccacagtggtgtcaaatctctctgactgcagcagcttccaggcacagaagagagacaccaaaggtcctttagtttctccttccaagcacccaaggagtaatgcaattgttttgtccttgaacatagcctggaatctcctgcattagaatacttttcctcat

SEQ ID NO: 87783 - DNA, 600 bp, Chicken  19866894390073_5
ggagcctrgcaagctaagcaaggggagagaggaaatatcaccactgttttgcagatggaaaaccagagctctgagaatctgtgcaacttgttgcagtgtcacacagcaatattggcaagggagttctgtaaaagtgtcgaagtccagactcagygcatactaaaggtggatataaaccccgttttcttggcragcatcaatataagctcacataaattacaggtatgtacactggtgtcatctgcacactgagcatgccaaggctcccttggtctcctytgcgcctgtttcttcccccayctccatccttcaaagcagcagatactgctttttgatgctgtcctcctaggctcataaaagttagtctaccactgcttcctctagcacttaacaaaaatttacctctggccctgagatgccacagtggtgtcaaatctctctgactgcagcagcttccaggcacagaagagagacaccaaaggtcctttagtttctccttccaagcacccaaggagtaatgcaattgttttgtccttgaacatagcctggaatctcctgcattagaatacttttcctcatttaatctgctcttgccagcag

SEQ ID NO: 87784 - DNA, 600 bp, Chicken  19866894390088_1
gaagaagcagactgtacaaaattatttgatagaactggggaataaaggagacaagcaagtttccttttcttggtgccttctcagagcttaacttgtaacactagttccctgcttccctttctcctttcagtctcttaactctttgtagctgattgaactccccatttcagttatgtactccccacttcagttcagtaacaatacagtttcttcactgtattgttaacaaacaaacaaacaaaaacccaacatatcaaaacaggttaatcatatctgtcactctgcaaacttccccctttytccccccgagttttagacatcattgttttcaactacattaaaaactctttaagtacttcagtctttcagccctcttgagaagcattatcaatcattgaattttatagggaggatcccaaatgttgatgtaagtgtgaaggttgacagattaaggcaagaataaataaactagtacactattgcagcaaggatgcagccaatgttgtgtgaaatgaggtggtctctgttttgaattgccttgggaggccagaaaatgtgcagccattcttctgagcacagtcaaggcccacttaacatcaa

SEQ ID NO: 87785 - DNA, 600 bp, Chicken  19866894390092_1
tttgtcataatctggtggcacttcggatttctaaggaagaaacacttccaaataggtgactgaaacaaaacgcagcagacagagaggcagttcacacaaaaaaagggaaaagagatcaatgagcttaccgaaaggggatgaaggttttcatcaaaaatatctaagagcattcttccgtctgtatccctaaaaagtattaaaaccaaagcagtgtcattatcagaacacagcaacacgcggctctcacagatgcaagcgtatcattaaggctccaatacttcctatgctgtgaggtacttwgaaatgctgtagaaatgtgactttggacacactccatcataaagctcacgtgtaatatgaaatccatactacgaagtatgcaaaaattttcaactttcaacacccaaaatataaaaagcttttgtgctctctactgtaggctttttttccacagcccaaagatgtactacgataaacttctaacataatgaaatcaactcagcttgctcttcctttcttaacttcatcctgttgatcctcaccacatctcytctttcaattaatttatcctcctcctttattgtcaaggccacgaacatt

SEQ ID NO: 87786 - DNA, 482 bp, Chicken  19866894390092_2
gcaagcgtatcattaaggctccaatacttcctatgctgtgaggtacttwgaaatgctgtagaaatgtgactttggacacactccatcataaagctcacgtgtaatatgaaatccatactacgaagtatgcaaaaattttcaactttcaacacccaaaatataaaaagcttttgtgctctctactgtaggctttttttccacagcccaaagatgtactacgataaacttctaacataatgaaatcaactcagcttgctcttcctttcttaacttcatcctgttgatcctcaccacatctcytctttcaattaatttatcctcctcctttattgtcaaggccacgaacatttgcaaatacacaatgttatctttacacttataccttctttaaaatatatgtacttcaattttgtttctttggaagacttcatgctattaatgatttctgagagcagaaagtatacaaaaaatacttaaaaaaa

SEQ ID NO: 87787 - DNA, 600 bp, Chicken  19866894390100_1
tcagagaggctaagtgcttttgcttgcctgtttatctctgcttatttcagcattttgatgcctacagtcaaaagcagatatcagttcagtaccatgctttttaaagctccagtacttgagaaatataaatggaaccacgtctctgattttccacatactctattgcaaagattaagaattcaaaacttatagtaaaggtccgtgcatcgtgggaggacataaagagaatgataacagcgcattactttccatacacactccagttgcactataggggatgcatacgtgatatacagcaastttacttgtacataatcccttgaatttacaasgaaacacacaggtcttgcagaccttaaaacctaaacaaggcagagatgacaacacataaggaaacaccttccgggaggagaaaatgggaggattatttacaatgagaaaagaagcaagactgcttgaagatgaagcttaattacaagggaggatttgaaggaagacagaaaatgcttgacaaaraacaagctaaaaatcatggcagtgacataaaaggatgtgcagagctgaaaagaatgaagtgggaatagatgawgtgaatgcaca

SEQ ID NO: 87788 - DNA, 600 bp, Chicken  19866894390100_2
tatctctgcttatttcagcattttgatgcctacagtcaaaagcagatatcagttcagtaccatgctttttaaagctccagtacttgagaaatataaatggaaccacgtctctgattttccacatactctattgcaaagattaagaattcaaaacttatagtaaaggtccgtgcatcgtgggaggacataaagagaatgataacagcgcattactttccatacacactccagttgcactataggggatgcatacgtgatatacagcaastttacttgtacataatcccttgaatttacaasgaaacacacaggtcttgcagaccttaaaacctaaacaaggcagagatgacaacacataaggaaacaccttccgggaggagaaaatgggaggattatttacaatgagaaaagaagcaagactgcttgaagatgaagcttaattacaagggaggatttgaaggaagacagaaaatgcttgacaaaraacaagctaaaaatcatggcagtgacataaaaggatgtgcagagctgaaaagaatgaagtgggaatagatgawgtgaatgcacattagcctctctttttgtcccaaagacttactc

SEQ ID NO: 87789 - DNA, 600 bp, Chicken  19866894390100_3
acataaagagaatgataacagcgcattactttccatacacactccagttgcactataggggatgcatacgtgatatacagcaastttacttgtacataatcccttgaatttacaasgaaacacacaggtcttgcagaccttaaaacctaaacaaggcagagatgacaacacataaggaaacaccttccgggaggagaaaatgggaggattatttacaatgagaaaagaagcaagactgcttgaagatgaagcttaattacaagggaggatttgaaggaagacagaaaatgcttgacaaaraacaagctaaaaatcatggcagtgacataaaaggatgtgcagagctgaaaagaatgaagtgggaatagatgawgtgaatgcacattagcctctctttttgtcccaaagacttactccaaagttaaaaagtactactggatatttgccattcagctggtgaatacgagaacacacccctgcaggcccatcatggatctacattggcctcataaatcacttgtcccaagacaatgcaattaagcctaattagccgatgcctttattcctaaacagtcttttcccaagggaggtattaacttc

SEQ ID NO: 87790 - DNA, 600 bp, Chicken  19866894390100_4
tatacagcaastttacttgtacataatcccttgaatttacaasgaaacacacaggtcttgcagaccttaaaacctaaacaaggcagagatgacaacacataaggaaacaccttccgggaggagaaaatgggaggattatttacaatgagaaaagaagcaagactgcttgaagatgaagcttaattacaagggaggatttgaaggaagacagaaaatgcttgacaaaraacaagctaaaaatcatggcagtgacataaaaggatgtgcagagctgaaaagaatgaagtgggaatagatgawgtgaatgcacattagcctctctttttgtcccaaagacttactccaaagttaaaaagtactactggatatttgccattcagctggtgaatacgagaacacacccctgcaggcccatcatggatctacattggcctcataaatcacttgtcccaagacaatgcaattaagcctaattagccgatgcctttattcctaaacagtcttttcccaagggaggtattaacttctggtttctaaattagctcaaggatctaaattgctctcatctccttggcaaagaaacagttcgtttctacctca

SEQ ID NO: 87791 - DNA, 600 bp, Chicken  19866894390100_5
gtgaatacgagaacacacccctgcaggcccatcatggatctacattggcctcataaatcacttgtcccaagacaatgcaattaagcctaattagccgatgcctttattcctaaacagtcttttcccaagggaggtattaacttctggtttctaaattagctcaaggatctaaattgctctcatctccttggcaaagaaacagttcgtttctacctcaatacagaacacttcatgcactccggggacacgtgttgcactccacaaagatgctgcctatacatcactccacaatttgaatgyactgggaccacgacaggcccttctgyacacagcagcacacacactatcatctgtgacccctgactttccatcacactgtgttcagtgcrgtgtcctggaagcctcaacattgcttcytcagatcaacttggccaggccagggtgctctactcagttttcagcagtgtcaagatattcagatctgatagactccaagggcaacaactggaacatcagtctgctgctcccagaaatatttcaaccaactttacttctttctggcactatagttataaagcaaccttcctaacattttctgtt

SEQ ID NO: 87792 - DNA, 600 bp, Chicken  19866894390100_6
gcccatcatggatctacattggcctcataaatcacttgtcccaagacaatgcaattaagcctaattagccgatgcctttattcctaaacagtcttttcccaagggaggtattaacttctggtttctaaattagctcaaggatctaaattgctctcatctccttggcaaagaaacagttcgtttctacctcaatacagaacacttcatgcactccggggacacgtgttgcactccacaaagatgctgcctatacatcactccacaatttgaatgyactgggaccacgacaggcccttctgyacacagcagcacacacactatcatctgtgacccctgactttccatcacactgtgttcagtgcrgtgtcctggaagcctcaacattgcttcytcagatcaacttggccaggccagggtgctctactcagttttcagcagtgtcaagatattcagatctgatagactccaagggcaacaactggaacatcagtctgctgctcccagaaatatttcaaccaactttacttctttctggcactatagttataaagcaaccttcctaacattttctgttattctccctcactcctaacagtaatc

SEQ ID NO: 87793 - DNA, 592 bp, Chicken  19866894390100_7
attagccgatgcctttattcctaaacagtcttttcccaagggaggtattaacttctggtttctaaattagctcaaggatctaaattgctctcatctccttggcaaagaaacagttcgtttctacctcaatacagaacacttcatgcactccggggacacgtgttgcactccacaaagatgctgcctatacatcactccacaatttgaatgyactgggaccacgacaggcccttctgyacacagcagcacacacactatcatctgtgacccctgactttccatcacactgtgttcagtgcrgtgtcctggaagcctcaacattgcttcytcagatcaacttggccaggccagggtgctctactcagttttcagcagtgtcaagatattcagatctgatagactccaagggcaacaactggaacatcagtctgctgctcccagaaatatttcaaccaactttacttctttctggcactatagttataaagcaaccttcctaacattttctgttattctccctcactcctaacagtaatcatctcactccaaagctatattgctctcagcatcaaaaaagcctgagctacttcat

SEQ ID NO: 87794 - DNA, 564 bp, Chicken  19866894390100_8
tcttttcccaagggaggtattaacttctggtttctaaattagctcaaggatctaaattgctctcatctccttggcaaagaaacagttcgtttctacctcaatacagaacacttcatgcactccggggacacgtgttgcactccacaaagatgctgcctatacatcactccacaatttgaatgyactgggaccacgacaggcccttctgyacacagcagcacacacactatcatctgtgacccctgactttccatcacactgtgttcagtgcrgtgtcctggaagcctcaacattgcttcytcagatcaacttggccaggccagggtgctctactcagttttcagcagtgtcaagatattcagatctgatagactccaagggcaacaactggaacatcagtctgctgctcccagaaatatttcaaccaactttacttctttctggcactatagttataaagcaaccttcctaacattttctgttattctccctcactcctaacagtaatcatctcactccaaagctatattgctctcagcatcaaaaaagcctgagctacttcat

SEQ ID NO: 87795 - DNA, 599 bp, Chicken  19866894390108_1
  misc_feature (1)..(17): n is any nucleotide
nnnnnnnnnnnnnnnnngctttacagtaagctaatgcccccttgaccatctgcatatcatcaatcaggtcatccaagaaaaagatctataaataacctatctgaccaactctgaaaaggcttttgatacaatccttcataagtggaaatggcagcatttagactaccttatttgtgagcacaagagtcatttgtccctagctggtcaaaaaatcatttatgcttccatttgattgtatccacagaacgtttcaaacaacaaattacagtgaggcagctgaaatccttccctgagacctgwtagtaccaacagaagagcagaastcttaacccagaaggtccatgcatccagctggactgaggttctttgcctcacattgctcaaatgcagtagagtcacatccattttctatcagtctccttcatttgttaatcagggggcatcgtttaaacaatgctttctacaaaagtagcaagcacgtgaagcataagaaagctcccaaggtcatcagccaatagagcataaattaagaaatacccattcacttctttaasagttgccaggtgagcagagaggtgctaacctgggaaatctctttg

SEQ ID NO: 87796 - DNA, 600 bp, Chicken  19866894390108_2
cagtaagctaatgcccccttgaccatctgcatatcatcaatcaggtcatccaagaaaaagatctataaataacctatctgaccaactctgaaaaggcttttgatacaatccttcataagtggaaatggcagcatttagactaccttatttgtgagcacaagagtcatttgtccctagctggtcaaaaaatcatttatgcttccatttgattgtatccacagaacgtttcaaacaacaaattacagtgaggcagctgaaatccttccctgagacctgwtagtaccaacagaagagcagaastcttaacccagaaggtccatgcatccagctggactgaggttctttgcctcacattgctcaaatgcagtagagtcacatccattttctatcagtctccttcatttgttaatcagggggcatcgtttaaacaatgctttctacaaaagtagcaagcacgtgaagcataagaaagctcccaaggtcatcagccaatagagcataaattaagaaatacccattcacttctttaasagttgccaggtgagcagagaggtgctaacctgggaaatctctttgtcctgagacattcatggaggaaag

SEQ ID NO: 87797 - DNA, 508 bp, Chicken  19866894390108_3
acaacaaattacagtgaggcagctgaaatccttccctgagacctgwtagtaccaacagaagagcagaastcttaacccagaaggtccatgcatccagctggactgaggttctttgcctcacattgctcaaatgcagtagagtcacatccattttctatcagtctccttcatttgttaatcagggggcatcgtttaaacaatgctttctacaaaagtagcaagcacgtgaagcataagaaagctcccaaggtcatcagccaatagagcataaattaagaaatacccattcacttctttaasagttgccaggtgagcagagaggtgctaacctgggaaatctctttgtcctgagacattcatggaggaaaggcattcagggaagaaccaaggctgaactccaatagaaacgatggcataagaacctattaggttgtaacttctcactcctgctcaggactgcactgcatgtacgttccatgctacaggcctgcccgcggctccaggtcat

SEQ ID NO: 87798 - DNA, 600 bp, Chicken  19866894390111_1
attcaccataacttagcacacatggaaaaagcctccgtctcagttcagctccgaaactgaagttcatacaaacactgtgcattcactgttttgtagacagagcaaaacaatcattagaacatttccatccaaaaggaaatagataaacaacttaaccatttatttgactgcattgtatttagacagcttgtacatttcataaccccactgtttttgttctcatcgaaaaggataaagggacagaagaatataatccactcaaaacagcagtccagtatttggagatacacttgatatttycatagatgcccgtctgatacctgaactccaatacaggttgcaatgcttatacaagacctgaacattttgaacaaagcactcggtttgagcaatgtcttgcggtgccctggaaaagtttgcgatgcactatgcaatgccaattagactatgcctgctttccttgtaggtgatgaacctgatcatttccttaaaaacaaaaacaaaaacaaaccataatgcaaacatccatacctgacatgtcagcaaacagcagcgtttgggcaaatccraacaaaaacgattgactccttagttagattt

SEQ ID NO: 87799 - DNA, 600 bp, Chicken  19866894390111_2
gtccagtatttggagatacacttgatatttycatagatgcccgtctgatacctgaactccaatacaggttgcaatgcttatacaagacctgaacattttgaacaaagcactcggtttgagcaatgtcttgcggtgccctggaaaagtttgcgatgcactatgcaatgccaattagactatgcctgctttccttgtaggtgatgaacctgatcatttccttaaaaacaaaaacaaaaacaaaccataatgcaaacatccatacctgacatgtcagcaaacagcagcgtttgggcaaatccraacaaaaacgattgactccttagttagatttgtcaatgcaaaaggtgagggggagcggactgtgtttgaacaacagacatgagaaaaaaaccaaacttctccttgctagatttgttttgaacatctgttttcatctctctgcaattcgtgacttcccacttgagacccaattccaagcaacacagagaataaatctgttccatttaatataagccaatgcatacagcttcagtatcttccgtagtgaactgtgtgttacacagcagcaatatgagaacctttcaggcaatgtgctctttg

SEQ ID NO: 87800 - DNA, 600 bp, Chicken  19866894390129_1
tttaatggcttttcagagaccctttttgcttgagaatgaacagattgttatccatatttcacattaacgttttacccatgattccaagttcagtggccaagttgacaggtccattactatttgaagaaaagctctcccaagggcctttttccaatggatccagctagaaacatttatacaacagtagagatgggcagagaaaggcagaagtaagcataaatacagtgaataatcagcctgaagttacagtatgtttttttcaactactgtttagaaaatttgagtacagagatgattttrttaayatgcattaagwaaatttaacatgtaaaataagattcttaaagataaggccagaggaacaatatcttttgactgctaataacttggtttcacaactctaagatttatgcccctgcatgatacactgccactcttaatgkacagcttctgcagcatttctggacagcgtgaaaatgctattgtctcttctagaggaagatggactagataaagtgatatgatcaaaatcatacaggcagcctgtgactaatctaggattatactcttttaagtgccttatccattcaactccctcct

SEQ ID NO: 87801 - DNA, 600 bp, Chicken  19866894390129_2
tggcttttcagagaccctttttgcttgagaatgaacagattgttatccatatttcacattaacgttttacccatgattccaagttcagtggccaagttgacaggtccattactatttgaagaaaagctctcccaagggcctttttccaatggatccagctagaaacatttatacaacagtagagatgggcagagaaaggcagaagtaagcataaatacagtgaataatcagcctgaagttacagtatgtttttttcaactactgtttagaaaatttgagtacagagatgattttrttaayatgcattaagwaaatttaacatgtaaaataagattcttaaagataaggccagaggaacaatatcttttgactgctaataacttggtttcacaactctaagatttatgcccctgcatgatacactgccactcttaatgkacagcttctgcagcatttctggacagcgtgaaaatgctattgtctcttctagaggaagatggactagataaagtgatatgatcaaaatcatacaggcagcctgtgactaatctaggattatactcttttaagtgccttatccattcaactccctccttaaag

SEQ ID NO: 87802 - DNA, 600 bp, Chicken  19866894390129_3
agaccctttttgcttgagaatgaacagattgttatccatatttcacattaacgttttacccatgattccaagttcagtggccaagttgacaggtccattactatttgaagaaaagctctcccaagggcctttttccaatggatccagctagaaacatttatacaacagtagagatgggcagagaaaggcagaagtaagcataaatacagtgaataatcagcctgaagttacagtatgtttttttcaactactgtttagaaaatttgagtacagagatgattttrttaayatgcattaagwaaatttaacatgtaaaataagattcttaaagataaggccagaggaacaatatcttttgactgctaataacttggtttcacaactctaagatttatgcccctgcatgatacactgccactcttaatgkacagcttctgcagcatttctggacagcgtgaaaatgctattgtctcttctagaggaagatggactagataaagtgatatgatcaaaatcatacaggcagcctgtgactaatctaggattatactcttttaagtgccttatccattcaactccctccttaaagattcagctcct

SEQ ID NO: 87803 - DNA, 497 bp, Chicken  19866894390129_4
cctttttccaatggatccagctagaaacatttatacaacagtagagatgggcagagaaaggcagaagtaagcataaatacagtgaataatcagcctgaagttacagtatgtttttttcaactactgtttagaaaatttgagtacagagatgattttrttaayatgcattaagwaaatttaacatgtaaaataagattcttaaagataaggccagaggaacaatatcttttgactgctaataacttggtttcacaactctaagatttatgcccctgcatgatacactgccactcttaatgkacagcttctgcagcatttctggacagcgtgaaaatgctattgtctcttctagaggaagatggactagataaagtgatatgatcaaaatcatacaggcagcctgtgactaatctaggattatactcttttaagtgccttatccattcaactccctccttaaagattcagctcctgataacaatcacataagtgcagtt

SEQ ID NO: 87804 - DNA, 600 bp, Chicken  19866894390131_1
ataaaaaagcattgacatcatgtctatctcaggggttgatttggctgcccgtgaaacaacctttttattttcattgtgtttcagttatgttgtcagattgggtatatttctttcctactttgctctattactatattgtgctgacctactctaccaaactgcaggagggggagctaccaagagagtatttgagcaaactgttagcaaagagaagaaagcagcaaaaagcaaataaacaactacgctcctgacacatgcagccctccaaacaaaataataggacagacaaaacagaagtamgttcagacctggaaccttccattaacccttcctttatatttctggtatttagcatttcagaccaagatttctgaaagataataattatctctcactgatatcaatgagaattctacatctgacaaagaacaccaaagataaaaaagaatttgtgagtgatctaaggataaggacaaaccttgctatttttgaaggtggatatattcataacatactaggttgtaactgcaacctgggagtaaaatcacagaaacaaatccagaatccagaataagataacaacaaagcagaaggaatccg

SEQ ID NO: 87805 - DNA, 599 bp, Chicken  19866894390135_1
  misc_feature (1)..(92): n is any nucleotide
nnnnnnnnnnnnnnnnnnnnnnnnnnnnnnnnnnnnnnnnnnnnnnnnnnnnnnnnnnnnnnnnnnnnnnnnnnnnnnnnnnnnnnnnnnnntcttgcttccaaacacatcagcataagtggcttagatctgtatcagccataagtgcagctttactgtgataaagtaggctctgtcagcccaagactcttagcaacatctactttaatgggctggagtttattttcctgggctgccacacacagccactgctgaaggactttgagaggacctgatggaactcggagagcacacagacartcctttgcagctttaaaactgatttagtgttagcacrtacataaggctcctgcatggttttaattcagagatgttgctcagacggttgtgctgaggatgtccagaagaaagttttgtttgagtaattaaaacacagagacaaaccaccctaaccagcacagcaaccctgctttggaataagtcagataaatattacttggtcttggtggttatagaccatttggtagcaccccaacactcaagcccttagcaaagccaactccaagagcacagttttcyttccagctgttattaaacaa

SEQ ID NO: 87806 - DNA, 599 bp, Chicken  19866894390135_2
  misc_feature (1)..(55): n is any nucleotide
nnnnnnnnnnnnnnnnnnnnnnnnnnnnnnnnnnnnnnnnnnnnnnnnnnnnnnntcttgcttccaaacacatcagcataagtggcttagatctgtatcagccataagtgcagctttactgtgataaagtaggctctgtcagcccaagactcttagcaacatctactttaatgggctggagtttattttcctgggctgccacacacagccactgctgaaggactttgagaggacctgatggaactcggagagcacacagacartcctttgcagctttaaaactgatttagtgttagcacrtacataaggctcctgcatggttttaattcagagatgttgctcagacggttgtgctgaggatgtccagaagaaagttttgtttgagtaattaaaacacagagacaaaccaccctaaccagcacagcaaccctgctttggaataagtcagataaatattacttggtcttggtggttatagaccatttggtagcaccccaacactcaagcccttagcaaagccaactccaagagcacagttttcyttccagctgttattaaacaaggccctggatattctgaatattccctccccctccccc

SEQ ID NO: 87807 - DNA, 600 bp, Chicken  19866894390135_3
actcggagagcacacagacartcctttgcagctttaaaactgatttagtgttagcacrtacataaggctcctgcatggttttaattcagagatgttgctcagacggttgtgctgaggatgtccagaagaaagttttgtttgagtaattaaaacacagagacaaaccaccctaaccagcacagcaaccctgctttggaataagtcagataaatattacttggtcttggtggttatagaccatttggtagcaccccaacactcaagcccttagcaaagccaactccaagagcacagttttcyttccagctgttattaaacaaggccctggatattctgaatattccctccccctccccccaaacacacacctttttttttttctcttttccttctgcacctcttttccaataatttttacacaggaatgtgaagttcaacttctgcaaatactcacgcctgcgacattgaggcctcaaagctttaatgttgctgccagtgaaaccggaatgactgagatcagtgaaaattggatacaaagggcacggtcattgcctgggcaaattcatgtaacaatcccaatcaatatttatgatgttttgt

SEQ ID NO: 87808 - DNA, 600 bp, Chicken  19866894390135_4
attgcctgggcaaattcatgtaacaatcccaatcaatatttatgatgttttgtggcattcagccattctgggtgcttctgaagtccgtacctctaagaatattttctcttgttatttaaaaattgttgggtatttctacttcactgatacgagctttgttgactctgaaagagaaaacctgtagtgggtgaagaaaagccacattttcttctctcagcttcaggcacctgaaatatcatttccaaagactcttctccattgggataaattgtgtttactttctctagtgaatgcaacaaygcaaccagtttaagcacaccatgaaaatkgcgtatgccayggctacaatgctgccagggcagttctcctgtgatacatcaagamaccggttcaaatccctaaaatgtgycatttccttgtgaaaatgacttctaggaggttaataaaccagctgttgaaaaagtaagggtgcctctggacagcaccacctcaatccacaccttgctggatgtgcaaggttggtctcaaacacctggtacaatatagaggtgcccaccaagggatgctggtaggagcatggctgtgagccaagcacctgaa

SEQ ID NO: 87809 - DNA, 600 bp, Chicken  19866894390135_5
caatcaatatttatgatgttttgtggcattcagccattctgggtgcttctgaagtccgtacctctaagaatattttctcttgttatttaaaaattgttgggtatttctacttcactgatacgagctttgttgactctgaaagagaaaacctgtagtgggtgaagaaaagccacattttcttctctcagcttcaggcacctgaaatatcatttccaaagactcttctccattgggataaattgtgtttactttctctagtgaatgcaacaaygcaaccagtttaagcacaccatgaaaatkgcgtatgccayggctacaatgctgccagggcagttctcctgtgatacatcaagamaccggttcaaatccctaaaatgtgycatttccttgtgaaaatgacttctaggaggttaataaaccagctgttgaaaaagtaagggtgcctctggacagcaccacctcaatccacaccttgctggatgtgcaaggttggtctcaaacacctggtacaatatagaggtgcccaccaagggatgctggtaggagcatggctgtgagccaagcacctgaaggcatttgggagccactgacatttttttg

SEQ ID NO: 87810 - DNA, 600 bp, Chicken  19866894390135_6
tatgatgttttgtggcattcagccattctgggtgcttctgaagtccgtacctctaagaatattttctcttgttatttaaaaattgttgggtatttctacttcactgatacgagctttgttgactctgaaagagaaaacctgtagtgggtgaagaaaagccacattttcttctctcagcttcaggcacctgaaatatcatttccaaagactcttctccattgggataaattgtgtttactttctctagtgaatgcaacaaygcaaccagtttaagcacaccatgaaaatkgcgtatgccayggctacaatgctgccagggcagttctcctgtgatacatcaagamaccggttcaaatccctaaaatgtgycatttccttgtgaaaatgacttctaggaggttaataaaccagctgttgaaaaagtaagggtgcctctggacagcaccacctcaatccacaccttgctggatgtgcaaggttggtctcaaacacctggtacaatatagaggtgcccaccaagggatgctggtaggagcatggctgtgagccaagcacctgaaggcatttgggagccactgacatttttttgagtcataatct

SEQ ID NO: 87811 - DNA, 600 bp, Chicken  19866894390135_7
ccgtacctctaagaatattttctcttgttatttaaaaattgttgggtatttctacttcactgatacgagctttgttgactctgaaagagaaaacctgtagtgggtgaagaaaagccacattttcttctctcagcttcaggcacctgaaatatcatttccaaagactcttctccattgggataaattgtgtttactttctctagtgaatgcaacaaygcaaccagtttaagcacaccatgaaaatkgcgtatgccayggctacaatgctgccagggcagttctcctgtgatacatcaagamaccggttcaaatccctaaaatgtgycatttccttgtgaaaatgacttctaggaggttaataaaccagctgttgaaaaagtaagggtgcctctggacagcaccacctcaatccacaccttgctggatgtgcaaggttggtctcaaacacctggtacaatatagaggtgcccaccaagggatgctggtaggagcatggctgtgagccaagcacctgaaggcatttgggagccactgacatttttttgagtcataatctgagcctttttcatgtcatctgttactgacattctttctaatccc

SEQ ID NO: 87812 - DNA, 600 bp, Chicken  19866894390135_8
tgttatttaaaaattgttgggtatttctacttcactgatacgagctttgttgactctgaaagagaaaacctgtagtgggtgaagaaaagccacattttcttctctcagcttcaggcacctgaaatatcatttccaaagactcttctccattgggataaattgtgtttactttctctagtgaatgcaacaaygcaaccagtttaagcacaccatgaaaatkgcgtatgccayggctacaatgctgccagggcagttctcctgtgatacatcaagamaccggttcaaatccctaaaatgtgycatttccttgtgaaaatgacttctaggaggttaataaaccagctgttgaaaaagtaagggtgcctctggacagcaccacctcaatccacaccttgctggatgtgcaaggttggtctcaaacacctggtacaatatagaggtgcccaccaagggatgctggtaggagcatggctgtgagccaagcacctgaaggcatttgggagccactgacatttttttgagtcataatctgagcctttttcatgtcatctgttactgacattctttctaatccctccacttcatgaagcatactaactg

SEQ ID NO: 87813 - DNA, 600 bp, Chicken  19866894390137_1
acatttatctacttccagtattttccccaaagtgcccattaagccaatgcatttcaactgtttaaatagctactgtaatctaaaatgatcccaatagtaaatgaagcaaaactcagcatgccatacagatgagatttatttaaccaaataaagctgtttacatggatgtgtaaatcgaggtaacccaaactcccttcagtgattcatctcatgtctattcacatgtcagatgaatcatgtcctaaaagtacctgtgcaagcagtgaagtgtatgaagtgtattaaagaaaaaaaaaaaawttacagattcttctcagtagtatacattggcaggaaaagaaacaatgagtacaaattaaagaaaatgaaattccaccttagtacaatactcttactttgagagtaataaagcactgaaggacattgcccagaggttatgaagtctccatctgtggagacattgaaaaaaaacaactggacacaaaactgggtcactgttgtaggttcaccttgctttgatagggagattggactatctgatctcagtaattaccaggggaagaaaagcaacatcaccctttcctcctttttctcaccccc

SEQ ID NO: 87814 - DNA, 600 bp, Chicken  19866894390137_2
gtatacattggcaggaaaagaaacaatgagtacaaattaaagaaaatgaaattccaccttagtacaatactcttactttgagagtaataaagcactgaaggacattgcccagaggttatgaagtctccatctgtggagacattgaaaaaaaacaactggacacaaaactgggtcactgttgtaggttcaccttgctttgatagggagattggactatctgatctcagtaattaccaggggaagaaaagcaacatcaccctttcctcctttttctcacccccttctactttgtttttttcytcttatttttttctcttttagagtcaaaggctttttttttttttttttttgtattttctctcatatcccatgtttagaagcatgcaaaagaggaagtgaagacaaaggcaaagttgtattttcatgcttttgactgttaaaatagtcaaagtaaagattttctttcaatttctatatttgcagctgttaaaatatgtaattagacattgcctttgaaatataaattagattacttcttactaaaattcttagtattcttagatgctacgttgcattcttaaagaatattttgaaaaacag

SEQ ID NO: 87815 - DNA, 599 bp, Chicken  19866894390138_1
  misc_feature (1)..(129): n is any nucleotide
nnnnnnnnnnnnnnnnnnnnnnnnnnnnnnnnnnnnnnnnnnnnnnnnnnnnnnnnnnnnnnnnnnnnnnnnnnnnnnnnnnnnnnnnnnnnnnnnnnnnnnnnnnnnnnnnnnnnnnnnnnnnnnnnntcgtagtgggagtccttgccgatgcgctcctgccctgaacatcacatacacagaaggacagtaaggagcagtgttttccttttgtcccctggagtacatggaaagcaatgtgtgttttaggcaatgcaatataaaacgttatgattttactaattaaaacaacttaaaaakatatctttcattcttgacagcagaaccatcaacgcttgcaagttactctacaaatcctaccagtatcacaaacttggaactgtaacccacagggaccacctcagacagagaacaccaggctctgtgcgctcccaaagcgtggctttgaaagaagaaagcgtttaaaaataaagcacagccggtatttgaaagtctgatggtttgttgtgcttcaaatcccagtytctaattgaaagtcacagccagaccgggggaagaaagcaccacttcagacgcagccaaaggggcactccagagag

SEQ ID NO: 87816 - DNA, 600 bp, Chicken  19866894390138_2
acatggaaagcaatgtgtgttttaggcaatgcaatataaaacgttatgattttactaattaaaacaacttaaaaakatatctttcattcttgacagcagaaccatcaacgcttgcaagttactctacaaatcctaccagtatcacaaacttggaactgtaacccacagggaccacctcagacagagaacaccaggctctgtgcgctcccaaagcgtggctttgaaagaagaaagcgtttaaaaataaagcacagccggtatttgaaagtctgatggtttgttgtgcttcaaatcccagtytctaattgaaagtcacagccagaccgggggaagaaagcaccacttcagacgcagccaaaggggcactccagagagctgtgcgaacacgcctgctattagcgcagcctcaggaagctccagttgtttgcactgacttacagcccttccytgtacctacagagatcgaaacatccttcagaatccactgatagcctttaaaatgttatgacagctgagagcttaaggaatgcaaacccttaatgccatacgaactgcagcagctttggcagttgtttgtcaccgcagcacccagcacggcag

SEQ ID NO: 87817 - DNA, 600 bp, Chicken  19866894390138_3
cttggaactgtaacccacagggaccacctcagacagagaacaccaggctctgtgcgctcccaaagcgtggctttgaaagaagaaagcgtttaaaaataaagcacagccggtatttgaaagtctgatggtttgttgtgcttcaaatcccagtytctaattgaaagtcacagccagaccgggggaagaaagcaccacttcagacgcagccaaaggggcactccagagagctgtgcgaacacgcctgctattagcgcagcctcaggaagctccagttgtttgcactgacttacagcccttccytgtacctacagagatcgaaacatccttcagaatccactgatagcctttaaaatgttatgacagctgagagcttaaggaatgcaaacccttaatgccatacgaactgcagcagctttggcagttgtttgtcaccgcagcacccagcacggcaggaagtgcaaccctcagtgctcctctcatctgctgggccgggcatcaaatgtaacaggcaggagaactgttttgcagatggaaaatgggaactcggaaattagaccacagagaccccaaacgctcagcagcagagatgagtggaatgcc

SEQ ID NO: 87818 - DNA, 600 bp, Chicken  19866894390139_1
gtcatttgcacaagcaaggagcgaagagcaactgaaaaacagcacgctgaatatattcactatgtgcaagtacaagcaactgtggaagctgtaaaagagcaaagatttaggtcttaagcagaggacttataacactagagttgcaaacgatggtatttgaggtcctactaaataaattcatctaaatgttcaagaagtaggaagatatatgtagaagactagcaaggggaaaaggttctggctactgtcaaattctgaattcactttacaacactctgttttcctaaaatttcaaatttstttcacagctttgytttctttttcacttctacagctacatcaaattgtwtgcacgctggttatccgaacatcaggggatatgttcttaagtgcttaggcagagataacaagaaacagaatataaattgcatagaagattgtgtttcagacaattataacttattccaaatcaggtttttcaaacaatagggagtggtttcttcaggccagtcattatgtctacatctggtatgaaacaagctttaaacatcatttcggaactaggttcaagtcatcaaatcacaacatatatgtggagca

SEQ ID NO: 87819 - DNA, 600 bp, Chicken  19866894390139_2
caaggagcgaagagcaactgaaaaacagcacgctgaatatattcactatgtgcaagtacaagcaactgtggaagctgtaaaagagcaaagatttaggtcttaagcagaggacttataacactagagttgcaaacgatggtatttgaggtcctactaaataaattcatctaaatgttcaagaagtaggaagatatatgtagaagactagcaaggggaaaaggttctggctactgtcaaattctgaattcactttacaacactctgttttcctaaaatttcaaatttstttcacagctttgytttctttttcacttctacagctacatcaaattgtwtgcacgctggttatccgaacatcaggggatatgttcttaagtgcttaggcagagataacaagaaacagaatataaattgcatagaagattgtgtttcagacaattataacttattccaaatcaggtttttcaaacaatagggagtggtttcttcaggccagtcattatgtctacatctggtatgaaacaagctttaaacatcatttcggaactaggttcaagtcatcaaatcacaacatatatgtggagcatacttgtatttgca

SEQ ID NO: 87820 - DNA, 600 bp, Chicken  19866894390139_3
aatatattcactatgtgcaagtacaagcaactgtggaagctgtaaaagagcaaagatttaggtcttaagcagaggacttataacactagagttgcaaacgatggtatttgaggtcctactaaataaattcatctaaatgttcaagaagtaggaagatatatgtagaagactagcaaggggaaaaggttctggctactgtcaaattctgaattcactttacaacactctgttttcctaaaatttcaaatttstttcacagctttgytttctttttcacttctacagctacatcaaattgtwtgcacgctggttatccgaacatcaggggatatgttcttaagtgcttaggcagagataacaagaaacagaatataaattgcatagaagattgtgtttcagacaattataacttattccaaatcaggtttttcaaacaatagggagtggtttcttcaggccagtcattatgtctacatctggtatgaaacaagctttaaacatcatttcggaactaggttcaagtcatcaaatcacaacatatatgtggagcatacttgtatttgcaaaacaacgtttcactttctaagtgatctgtctgca

SEQ ID NO: 87821 - DNA, 422 bp, Chicken  19866894390145_1
gctggagtgtttggactttcttgcacaagtcggcagaggtgggaggtctgtgttcttatggtgtaagtgcacgatgtcagctggtgcaggtcagaaggatgactcccatcctggaaactctgagctcactttgggtgggatgagagtggggatcatgccaggcaggctctgctgtgcattcctccagggcatttcatgctctgaactttttctccactgtgaccctctctgcctggaggctccttgttttcaggcagtaagagtaggcagtgcccatggggctgaacctttacatcactyatctgtcatcttttcccatatcagttttttttttttcttcttcttgctttaggaggatggggarcacagccttctgaattgttttaaattgagcctccacgtgcccatgtcccagacagcca

SEQ ID NO: 87822 - DNA, 358 bp, Chicken  19866894390145_2
aagtgcacgatgtcagctggtgcaggtcagaaggatgactcccatcctggaaactctgagctcactttgggtgggatgagagtggggatcatgccaggcaggctctgctgtgcattcctccagggcatttcatgctctgaactttttctccactgtgaccctctctgcctggaggctccttgttttcaggcagtaagagtaggcagtgcccatggggctgaacctttacatcactyatctgtcatcttttcccatatcagttttttttttttcttcttcttgctttaggaggatggggarcacagccttctgaattgttttaaattgagcctccacgtgcccatgtcccagacagcca

SEQ ID NO: 87823 - DNA, 600 bp, Chicken  19866894390148_1
ctacatcctgggtcttgttactgaacctgtggagatgttggctgtatcacccaagccatcccactcaggtcctcatccccatggggggttgcaaatagggattacaaaacagcaggttttcctggatcaacctgggactagtgtgtgaagagcacgtgactgcggcctttgacttccaaaattcagatcaaggtagaatatgtgctactgatggttattcaaaaggggagcaagatgatctccctaaaggaaaaggagtgaggtgaaaacatctagataacatcagctgagtttttcacrtcatctgcagggagctcttagcccagcttttaatggacatctggatgcacagcgctgctctgagaacaccaactttcacctccatccttggggacatggargagggcagaggaaccacctcctataggtaagatgcagctgtgataataaggaggccactgcagccataaataatctgcttcccacagtctccacagcccgcatggtgtgaaaagctggacaaggatttgtaaatgaattgagcccaagagtaattacacgttcctgcagattacttggtgccataattgcacttagtat

SEQ ID NO: 87824 - DNA, 600 bp, Chicken  19866894390148_2
ttacaaaacagcaggttttcctggatcaacctgggactagtgtgtgaagagcacgtgactgcggcctttgacttccaaaattcagatcaaggtagaatatgtgctactgatggttattcaaaaggggagcaagatgatctccctaaaggaaaaggagtgaggtgaaaacatctagataacatcagctgagtttttcacrtcatctgcagggagctcttagcccagcttttaatggacatctggatgcacagcgctgctctgagaacaccaactttcacctccatccttggggacatggargagggcagaggaaccacctcctataggtaagatgcagctgtgataataaggaggccactgcagccataaataatctgcttcccacagtctccacagcccgcatggtgtgaaaagctggacaaggatttgtaaatgaattgagcccaagagtaattacacgttcctgcagattacttggtgccataattgcacttagtatttaccatgtgacctaagccagaaataatcatgtatttactttatatttatattgtaacgtgccatgtactgtaattatactgccactccatggtacttaac

SEQ ID NO: 87825 - DNA, 599 bp, Chicken  19866894390158_1
  misc_feature (1)..(67): n is any nucleotide
nnnnnnnnnnnnnnnnnnnnnnnnnnnnnnnnnnnnnnnnnnnnnnnnnnnnnnnnnnnnnnnnnnntagtacccatcaaagcgtacccatctggcactgtcatagaatatggagtaccgaggttggaaatgacctccaaggtcatccagtccaaccacccaccagggcttccctactaaaccacatccctcagtacagcatctgaacctttcttgtacacctccagggaaatctccagccagaaagcagctcacagcagttgcaggaggccagcactattggtgggtgtgcatttctgmaggtggggtgctgagaacttgctttgtacctgtagatgtcaatgaaatttataacatgagattgaagcgttattttctgttagcccctgcggcctgtctctccatcttactttctgtcaggccccatggcctgtttctccacatcagggcagttaccccacgcygagctgtgctgagcgctgtgtttggacctctcccrgttcagctcagtcctcctgcccagcagctgtaatctgagtcctacagttgatttctacatgtgcaaatatttgaatgtaacctcggtagctggaaaatgg

SEQ ID NO: 87826 - DNA, 600 bp, Chicken  19866894390158_2
agggcttccctactaaaccacatccctcagtacagcatctgaacctttcttgtacacctccagggaaatctccagccagaaagcagctcacagcagttgcaggaggccagcactattggtgggtgtgcatttctgmaggtggggtgctgagaacttgctttgtacctgtagatgtcaatgaaatttataacatgagattgaagcgttattttctgttagcccctgcggcctgtctctccatcttactttctgtcaggccccatggcctgtttctccacatcagggcagttaccccacgcygagctgtgctgagcgctgtgtttggacctctcccrgttcagctcagtcctcctgcccagcagctgtaatctgagtcctacagttgatttctacatgtgcaaatatttgaatgtaacctcggtagctggaaaatggtgtttgcacccttttaaagtacttctatttccaacaagactttcatgtaaaaaaaaacccttcatttttgttctattttttttttcttctaccaagaatgcagtctgaaatacagaaatgctggactgactcaagtagcagcaggcgatcttgttgttgcaggtg

SEQ ID NO: 87827 - DNA, 600 bp, Chicken  19866894390158_3
catctgaacctttcttgtacacctccagggaaatctccagccagaaagcagctcacagcagttgcaggaggccagcactattggtgggtgtgcatttctgmaggtggggtgctgagaacttgctttgtacctgtagatgtcaatgaaatttataacatgagattgaagcgttattttctgttagcccctgcggcctgtctctccatcttactttctgtcaggccccatggcctgtttctccacatcagggcagttaccccacgcygagctgtgctgagcgctgtgtttggacctctcccrgttcagctcagtcctcctgcccagcagctgtaatctgagtcctacagttgatttctacatgtgcaaatatttgaatgtaacctcggtagctggaaaatggtgtttgcacccttttaaagtacttctatttccaacaagactttcatgtaaaaaaaaacccttcatttttgttctattttttttttcttctaccaagaatgcagtctgaaatacagaaatgctggactgactcaagtagcagcaggcgatcttgttgttgcaggtgctgtcatcacattgacagaaatcattacaaaattc

SEQ ID NO: 87828 - DNA, 600 bp, Chicken  19866894390166_1
aacagaactcacagtaccatcaaacaatgcctgagagtgctttcttgtgtctgtgttcatatttactccttcccacttggaaatatgcacaagcagactaaaaaagcagcttagtggcttctagcatttagtcaagtgactgttggcttttttcaggggttcaccaaactcgacgaaaaagcaggttgttatgtgttagcctggagcccttttgttcagccttagatgtttttattccctttggggtatttactgaaagaacgagaagaaaataactcaaggtggcatcatgcaaaaaayttcacgttgagaatgagagtgctgcattttggctttttggggaacacaagtgtgatgctttgccccccctttcaagtcaagtaccagtttagaggcaaagaaagaaaaagggaaraaaaccctcaatcaaaattctgctgaaagaaaacactccatttcacaattttcctcttgtgtgtctgcggagaggtggcagggggaggctggctcagcagggtgcaagagaaggtactgcatgaggcagatgttggtcgtgygctttgacgctcatcctgcactcacgtggcatcagcgaggata

SEQ ID NO: 87829 - DNA, 600 bp, Chicken  19866894390166_2
ggcttctagcatttagtcaagtgactgttggcttttttcaggggttcaccaaactcgacgaaaaagcaggttgttatgtgttagcctggagcccttttgttcagccttagatgtttttattccctttggggtatttactgaaagaacgagaagaaaataactcaaggtggcatcatgcaaaaaayttcacgttgagaatgagagtgctgcattttggctttttggggaacacaagtgtgatgctttgccccccctttcaagtcaagtaccagtttagaggcaaagaaagaaaaagggaaraaaaccctcaatcaaaattctgctgaaagaaaacactccatttcacaattttcctcttgtgtgtctgcggagaggtggcagggggaggctggctcagcagggtgcaagagaaggtactgcatgaggcagatgttggtcgtgygctttgacgctcatcctgcactcacgtggcatcagcgaggataaggagacacagggaggtaagcaaaactgtcaatagttgatcataattgaacttgctcgtccgattcacttctacctgatcacgcagcagaagtacttttattatttaaatttagg

SEQ ID NO: 87830 - DNA, 600 bp, Chicken  19866894390166_3
agaacgagaagaaaataactcaaggtggcatcatgcaaaaaayttcacgttgagaatgagagtgctgcattttggctttttggggaacacaagtgtgatgctttgccccccctttcaagtcaagtaccagtttagaggcaaagaaagaaaaagggaaraaaaccctcaatcaaaattctgctgaaagaaaacactccatttcacaattttcctcttgtgtgtctgcggagaggtggcagggggaggctggctcagcagggtgcaagagaaggtactgcatgaggcagatgttggtcgtgygctttgacgctcatcctgcactcacgtggcatcagcgaggataaggagacacagggaggtaagcaaaactgtcaatagttgatcataattgaacttgctcgtccgattcacttctacctgatcacgcagcagaagtacttttattatttaaatttaggatgcgtgtcattaagggataaagtgaaacatacgtttaatagctgggaagtattcctaacctggtttgcagctcagaatccccaaagcttcttgactaggaaactccattcttaactgtacacgctggacctttgccttgat

SEQ ID NO: 87831 - DNA, 599 bp, Chicken  19866894390173_1
  misc_feature (1)..(77): n is any nucleotide
nnnnnnnnnnnnnnnnnnnnnnnnnnnnnnnnnnnnnnnnnnnnnnnnnnnnnnnnnnnnnnnnnnnnnnnnnnnnncccccggatgtggtgctgggcacgctgttcggattggcctgctggagtaggtttggaccagaggcaactggagatactgtgcaaccctcaacaattctgagcatatggtaactgaatccttttagtgatggattatctcacatcatttgtcaatatcagatcagtgcagagtttgtcagttgttattctatttgctttgaaatatttttgcacagagcaatcyaacctgtgctattcccatattcacttcttcagagtggataagtatctcttgcaatgtgatttaacatatattcacatayatccactgcagttccttaggrcataactttctctaatctcttttttgcaggaagwtaggattttgtacagaactggaaaccttgtaaaccttggtcagaaatgagcctgaagcaaaaaattcttgcccaaagagtgtcccttagctttgctctctactaccataacttacttgtatttgggacaacttaagaaagtacaaaaaagaaagtttatagttac

SEQ ID NO: 87832 - DNA, 600 bp, Chicken  19866894390173_2
cccggatgtggtgctgggcacgctgttcggattggcctgctggagtaggtttggaccagaggcaactggagatactgtgcaaccctcaacaattctgagcatatggtaactgaatccttttagtgatggattatctcacatcatttgtcaatatcagatcagtgcagagtttgtcagttgttattctatttgctttgaaatatttttgcacagagcaatcyaacctgtgctattcccatattcacttcttcagagtggataagtatctcttgcaatgtgatttaacatatattcacatayatccactgcagttccttaggrcataactttctctaatctcttttttgcaggaagwtaggattttgtacagaactggaaaccttgtaaaccttggtcagaaatgagcctgaagcaaaaaattcttgcccaaagagtgtcccttagctttgctctctactaccataacttacttgtatttgggacaacttaagaaagtacaaaaaagaaagtttatagttacctagaaaagttctctacatacatagctctatatgctacagaccttcttccaaggagaggcaggtcaacagtatatacaga

SEQ ID NO: 87833 - DNA, 600 bp, Chicken  19866894390173_3
gctgttcggattggcctgctggagtaggtttggaccagaggcaactggagatactgtgcaaccctcaacaattctgagcatatggtaactgaatccttttagtgatggattatctcacatcatttgtcaatatcagatcagtgcagagtttgtcagttgttattctatttgctttgaaatatttttgcacagagcaatcyaacctgtgctattcccatattcacttcttcagagtggataagtatctcttgcaatgtgatttaacatatattcacatayatccactgcagttccttaggrcataactttctctaatctcttttttgcaggaagwtaggattttgtacagaactggaaaccttgtaaaccttggtcagaaatgagcctgaagcaaaaaattcttgcccaaagagtgtcccttagctttgctctctactaccataacttacttgtatttgggacaacttaagaaagtacaaaaaagaaagtttatagttacctagaaaagttctctacatacatagctctatatgctacagaccttcttccaaggagaggcaggtcaacagtatatacagagaatcatcatagaatcttaga

SEQ ID NO: 87834 - DNA, 600 bp, Chicken  19866894390173_4
ccagaggcaactggagatactgtgcaaccctcaacaattctgagcatatggtaactgaatccttttagtgatggattatctcacatcatttgtcaatatcagatcagtgcagagtttgtcagttgttattctatttgctttgaaatatttttgcacagagcaatcyaacctgtgctattcccatattcacttcttcagagtggataagtatctcttgcaatgtgatttaacatatattcacatayatccactgcagttccttaggrcataactttctctaatctcttttttgcaggaagwtaggattttgtacagaactggaaaccttgtaaaccttggtcagaaatgagcctgaagcaaaaaattcttgcccaaagagtgtcccttagctttgctctctactaccataacttacttgtatttgggacaacttaagaaagtacaaaaaagaaagtttatagttacctagaaaagttctctacatacatagctctatatgctacagaccttcttccaaggagaggcaggtcaacagtatatacagagaatcatcatagaatcttagaatcatttgagaggagatgctctgtttgatgatag

SEQ ID NO: 87835 - DNA, 599 bp, Chicken  19866894390175_1
  misc_feature (1)..(76): n is any nucleotide
nnnnnnnnnnnnnnnnnnnnnnnnnnnnnnnnnnnnnnnnnnnnnnnnnnnnnnnnnnnnnnnnnnnnnnnnnnnntaagaatgaatgactgtgcccatttcaattcctaccaattccaaatgatctgggatttctgtttctgcttcaaaaatcacagtttaaaaaaataacagtaattgctttgaaacaaagaaaggggtttccatttgtgagttaagtctaccacagtcaaaactgagaggtctcagatgtaccctcctcgccagctcctcctgtaagcttccactacctgtgctgcycaaagctaacctggcaaaaaatagtccaagagagtattttcttctgttctggtggactaatcagcttaccatggactagacaatcacaagagccaactcagggcaagaagagggcagaaaacaaaacactgcagcagaaggttaatttagctgaaggcgcaacatgaactccrttggacaaaatctagccaagagcataactgatattccagcattaaatacaaattaggagattgcaagcaaggaactgaaattcacaccttgcagcaggaattaaataataagcagcagtatctacc

SEQ ID NO: 87836 - DNA, 600 bp, Chicken  19866894390175_2
gtaattgctttgaaacaaagaaaggggtttccatttgtgagttaagtctaccacagtcaaaactgagaggtctcagatgtaccctcctcgccagctcctcctgtaagcttccactacctgtgctgcycaaagctaacctggcaaaaaatagtccaagagagtattttcttctgttctggtggactaatcagcttaccatggactagacaatcacaagagccaactcagggcaagaagagggcagaaaacaaaacactgcagcagaaggttaatttagctgaaggcgcaacatgaactccrttggacaaaatctagccaagagcataactgatattccagcattaaatacaaattaggagattgcaagcaaggaactgaaattcacaccttgcagcaggaattaaataataagcagcagtatctaccttctagttagtctatgggttgcccagcagaagctcatttgccataagatcatgtaaagctctcccaaaaaaatgagaggtaatttttttctatttgttttcattttccacttggcttctgggcaattttgtttcaatctagttcacagtacaattggtgaatggactgaaacag

SEQ ID NO: 87837 - DNA, 600 bp, Chicken  19866894390183_1
caacataggcacagcagaggaggaagggccaccagggttgtaacgtaggtccatgatcaggttctctgtattttgtaggggctcccagactttttttacaatgtaaggtcccagcttaacaagaacagaggcatcagcaaactcatcaaagcgcatgtagcccacattgcctggcaacactgacaccttgaagacagtatccaccaaggcatgcagcaattgctcattatcaggcaaattggctgccattgcaattggcatctcagcaggaggggcagcagcttcaccaggcatcatggygcggaccaacaggcgagggtcctcagacaaggtctgcatctcagtgttgagcttggtggccaggtcctctgctgactgcacagaagagaagtcagaggtagtgaggtgcctcagcagcactggcactcgctccactaagctgtaatagtcctttagtatgtctgtgaggcgacttagggtgccaggcactgctctgcgcactgccaggatgtccaaggatttcttcaaggcttgctctgcctcagaagccacacatggcatcaccccactcacctcccagctctgtccacccccactcaa

SEQ ID NO: 87838 - DNA, 600 bp, Chicken  19866894390187_1
cacaaagacttgaaccaccagaagccaatatttcctcaaaaagaagcaatttctgtcttccctccctcccaactcaaatccgtacattcttcccttcctttgtgggagaatatttgcaaaccctggtggtgaatcagatcagcaagcctaaccaaactaaaaccaatctggtctctgacagtttaatataaaatacctaaatattttgattaaagtatttcaacacccaatgcacagctacataaatgctttaaagccagttacggtgccaaactaccgttataagtatatatatatatycacacatatatatacatatatgtacacacacactacttttccagagagccccaccacaggaaccagacagttagaaaatgttataagtccaagatgttagtatgacatctataaatatttgagaattcactagtgggaaacagcaccagggatttttactcccacggtatgaaatagtacagtttaagttgtctaatgagagcaacagaagaactaagtggaatttgatatttkgcttaatgaggtatgcagaaaattgctaatggacttaatctgcataaatttctttcagcacagata

SEQ ID NO: 87839 - DNA, 600 bp, Chicken  19866894390187_2
acaaagacttgaaccaccagaagccaatatttcctcaaaaagaagcaatttctgtcttccctccctcccaactcaaatccgtacattcttcccttcctttgtgggagaatatttgcaaaccctggtggtgaatcagatcagcaagcctaaccaaactaaaaccaatctggtctctgacagtttaatataaaatacctaaatattttgattaaagtatttcaacacccaatgcacagctacataaatgctttaaagccagttacggtgccaaactaccgttataagtatatatatatatayacacatatatatacatatatgtacacacacactacttttccagagagccccaccacaggaaccagacagttagaaaatgttataagtccaagatgttagtatgacatctataaatatttgagaattcactagtgggaaacagcaccagggatttttactcccacggtatgaaatagtacagtttaagttgtctaatgagagcaacagaagaactaagtggaatttgatatttkgcttaatgaggtatgcagaaaattgctaatggacttaatctgcataaatttctttcagcacagatat

SEQ ID NO: 87840 - DNA, 600 bp, Chicken  19866894390187_3
cagctacataaatgctttaaagccagttacggtgccaaactaccgttataagtatatatatatatacacacatatatatacatatatgtacacacacactacttttccagagagccccaccacaggaaccagacagttagaaaatgttataagtccaagatgttagtatgacatctataaatatttgagaattcactagtgggaaacagcaccagggatttttactcccacggtatgaaatagtacagtttaagttgtctaatgagagcaacagaagaactaagtggaatttgatatttkgcttaatgaggtatgcagaaaattgctaatggacttaatctgcataaatttctttcagcacagatatttccatgccccacacaagttcactctaaaactcaattgttaatgatgaatttcatttgttcccacatcagaattaagaatacttaataaatataatgtacagtcagttatcacattcatagcttagaccccatattaatgctggactgggggacaaggctgccccttgttataccttacaccaaagtacttagtgtggcaaacatatagcataaataccagcacttaaagatg

SEQ ID NO: 87841 - DNA, 600 bp, Chicken  19866894390189_1
aggttgtaatggtttatagcagagatcatcaggccttgctaacaggaagtgtctgtggtgctcagcacacagtgagggagctcctttgccttggaattagcagcaatgacttgtggactgattaattccagaaggcattaccttgttggtgctgaggaagtgtgttacgttaacacgaagaatttccatcaacaaaagtaaaacacgttaatcaataagcataaataataacacactattcctaaatagaaatatagtagtgcatgagcccctgtagggcttttgtttgctttaaggctstrtatggctgcagatgatggttctgggcacgacctggactggctcrcaaatgcaaacagcggagctaactggaataaaggatgcactggctggtagtgagttggtacagccattctgcaagacttccagaatccacacaaatgcactctggctattcccctgaattttaagttagcccatcagaaggtaatggagtgcagtctcaagagagaaatactggcctgtgagggatttatgactttctgaagtccaaagaaagggactttctctattgatttttaaaaacttgttttaaaaccc

SEQ ID NO: 87842 - DNA, 600 bp, Chicken  19866894390189_2
gttgtaatggtttatagcagagatcatcaggccttgctaacaggaagtgtctgtggtgctcagcacacagtgagggagctcctttgccttggaattagcagcaatgacttgtggactgattaattccagaaggcattaccttgttggtgctgaggaagtgtgttacgttaacacgaagaatttccatcaacaaaagtaaaacacgttaatcaataagcataaataataacacactattcctaaatagaaatatagtagtgcatgagcccctgtagggcttttgtttgctttaaggctstrtatggctgcagatgatggttctgggcacgacctggactggctcrcaaatgcaaacagcggagctaactggaataaaggatgcactggctggtagtgagttggtacagccattctgcaagacttccagaatccacacaaatgcactctggctattcccctgaattttaagttagcccatcagaaggtaatggagtgcagtctcaagagagaaatactggcctgtgagggatttatgactttctgaagtccaaagaaagggactttctctattgatttttaaaaacttgttttaaaacccag

SEQ ID NO: 87843 - DNA, 600 bp, Chicken  19866894390189_3
aagtgtctgtggtgctcagcacacagtgagggagctcctttgccttggaattagcagcaatgacttgtggactgattaattccagaaggcattaccttgttggtgctgaggaagtgtgttacgttaacacgaagaatttccatcaacaaaagtaaaacacgttaatcaataagcataaataataacacactattcctaaatagaaatatagtagtgcatgagcccctgtagggcttttgtttgctttaaggctstrtatggctgcagatgatggttctgggcacgacctggactggctcrcaaatgcaaacagcggagctaactggaataaaggatgcactggctggtagtgagttggtacagccattctgcaagacttccagaatccacacaaatgcactctggctattcccctgaattttaagttagcccatcagaaggtaatggagtgcagtctcaagagagaaatactggcctgtgagggatttatgactttctgaagtccaaagaaagggactttctctattgatttttaaaaacttgttttaaaacccagmatcctaagtactgaaggtttacagatgacactcttaggcctca

SEQ ID NO: 87844 - DNA, 600 bp, Chicken  19866894390189_4
atggctgcagatgatggttctgggcacgacctggactggctcrcaaatgcaaacagcggagctaactggaataaaggatgcactggctggtagtgagttggtacagccattctgcaagacttccagaatccacacaaatgcactctggctattcccctgaattttaagttagcccatcagaaggtaatggagtgcagtctcaagagagaaatactggcctgtgagggatttatgactttctgaagtccaaagaaagggactttctctattgatttttaaaaacttgttttaaaacccagmatcctaagtactgaaggtttacagatgacactcttaggcctcacctgaacagctctggaatggttttggtgtgttttttttggtccatccagatgcaagagaaaatagaatagaaagaatagagtttttgcaacacacatgagcagagtttggaaaaggatggctggtggctcctgctgagaaggcactcagctgtacagccagcatcacagcacgtgctgtgtcctcccagcccagagagcagcagggaaacactcagtgtgcttgtacctgtaagcactgcaaaagtcaccttctgtc

SEQ ID NO: 87845 - DNA, 600 bp, Chicken  19866894390190_1
ggctacagcttcacacccctgtgctgtgctgtaggctggctgccaggtgccgagcatgattaatgagctaagcaagcacctcctgggcagcagggtctggcagagagggtggctgagctcggagggttagaagacctctgcacttctgagcttgaaaatgagaaggtgctttgtgtcttgagcaagtagagcagtggttttgctgaggtgcttggtgtgatagtgtggcacttcagcatctatctctcaaatctatttcctttaaaaacatcaggtattgcagttctaaaaaaaaaaaawgtgtgtgtatatatatatatttaatgctttatractgacacacttgacacatttctactgaaagcaatttgatgaactgaaaagaattgccaaatgaagcataaattgtttttttttgattattttccctgtttctacctccatccttgcattgatggctttggcctttgaaaatttcaggtaaactttgcaaggctgagaactgaattaaaaaaacgataagctaagagaacagaaaagaaaatgtggagcatttagtgaatggattttgtaatggaataaaggttcgataaaaaggaa

SEQ ID NO: 87846 - DNA, 600 bp, Chicken  19866894390190_2
ggctggctgccaggtgccgagcatgattaatgagctaagcaagcacctcctgggcagcagggtctggcagagagggtggctgagctcggagggttagaagacctctgcacttctgagcttgaaaatgagaaggtgctttgtgtcttgagcaagtagagcagtggttttgctgaggtgcttggtgtgatagtgtggcacttcagcatctatctctcaaatctatttcctttaaaaacatcaggtattgcagttctaaaaaaaaaaaawgtgtgtgtatatatatatatttaatgctttatractgacacacttgacacatttctactgaaagcaatttgatgaactgaaaagaattgccaaatgaagcataaattgtttttttttgattattttccctgtttctacctccatccttgcattgatggctttggcctttgaaaatttcaggtaaactttgcaaggctgagaactgaattaaaaaaacgataagctaagagaacagaaaagaaaatgtggagcatttagtgaatggattttgtaatggaataaaggttcgataaaaaggaaaaaaaatacaaatagaagttattaatattctgg

SEQ ID NO: 87847 - DNA, 600 bp, Chicken  19866894390190_3
wgtgtgtgtatatatatatatttaatgctttatractgacacacttgacacatttctactgaaagcaatttgatgaactgaaaagaattgccaaatgaagcataaattgtttttttttgattattttccctgtttctacctccatccttgcattgatggctttggcctttgaaaatttcaggtaaactttgcaaggctgagaactgaattaaaaaaacgataagctaagagaacagaaaagaaaatgtggagcatttagtgaatggattttgtaatggaataaaggttcgataaaaaggraaaaaaatacaaatagaagttattaatattctggttcagttctgatttcatgcttaattgcattgatcatgtaaccttctgaaagaccctccctgactttgcactcactgcgatttattagcttagtgcacaacaaaataaatgaatgaggagctacgcttgcttgtatggctacctctgcattacaggaataattttctggaartgaaaatttaaaagaaattatggatgaagtgcagctactcataagaaagcataaaagggaatacaatttcttgtagcccttatagaagcaatagc

SEQ ID NO: 87848 - DNA, 600 bp, Chicken  19866894390190_4
gaattaaaaaaacgataagctaagagaacagaaaagaaaatgtggagcatttagtgaatggattttgtaatggaataaaggttcgataaaaaggaaaaaaaatacaaatagaagttattaatattctggttcagttctgatttcatgcttaattgcattgatcatgtaaccttctgaaagaccctccctgactttgcactcactgcgatttattagcttagtgcacaacaaaataaatgaatgaggagctacgcttgcttgtatggctacctctgcattacaggaataattttctggaartgaaaatttaaaagaaattatggatgaagtgcagctactcataagaaagcataaaagggaatacaatttcttgtagcccttatagaagcaatagcagtgaaaaattatgttactgtactgcatgtgaatatacaaagtaaagaagaggaaataagtaatctttccacaagtacagtggtccttaaagtgagttgagctactgcatctagctcagctgtgctgtggagcatatgttgaaatgcttcagttggagaaaggcctacaagtagtgggtggctgtatgtggcctaataatctaca

SEQ ID NO: 87849 - DNA, 600 bp, Chicken  19866894390191_1
ccacagatgctttaatcctatttactaaaaatagcaataatcattaagttacaaatggagactacatttcatatttcaagctcaacctgtgctatgcttaacagttcactctttcatggtgagacaggtaaactaaatcagtctatattaaataagtcttgttaaagtcctgttgaaaaactaagcatcatttttaaatatattcaatatgctagcaacaacgtatttatccttctattaactaaaattcccatgaatttttctctgccatttgaggtagataatattcacgatctcctrggattaaacaatttactctttctgaatgatttttaaaagataaaattagtttctaaatataacctgaggagacattatagtcacatgatgaaattagaaatgaaagttacctattagcaggatatcaaacttgctttcatcatggtgatatggactccctcaggaatcctcctttatgaaaaatactctttctcactcttacttgaaatcacacttycaaaaactcaagacractctgtaacagagcttccagccatctaaacagaagagtactgtcatgcctatgaccatgagctctga

SEQ ID NO: 87850 - DNA, 544 bp, Chicken  19866894390191_2
acaacgtatttatccttctattaactaaaattcccatgaatttttctctgccatttgaggtagataatattcacgatctcctrggattaaacaatttactctttctgaatgatttttaaaagataaaattagtttctaaatataacctgaggagacattatagtcacatgatgaaattagaaatgaaagttacctattagcaggatatcaaacttgctttcatcatggtgatatggactccctcaggaatcctcctttatgaaaaatactctttctcactcttacttgaaatcacacttycaaaaactcaagacractctgtaacagagcttccagccatctaaacagaagagtactgtcatgcctatgaccatgagctctgagagataaagatcaagaccataactttgtacaatgatttaattcctaacatgctgtgctttgtcacttattcagtcagaccacccaaactactaatatatatatatatatatatatatatatatatgaagagctacaataacattttcattgtgatttaatt

SEQ ID NO: 87851 - DNA, 529 bp, Chicken  19866894390191_3
ttctattaactaaaattcccatgaatttttctctgccatttgaggtagataatattcacgatctcctrggattaaacaatttactctttctgaatgatttttaaaagataaaattagtttctaaatataacctgaggagacattatagtcacatgatgaaattagaaatgaaagttacctattagcaggatatcaaacttgctttcatcatggtgatatggactccctcaggaatcctcctttatgaaaaatactctttctcactcttacttgaaatcacacttycaaaaactcaagacractctgtaacagagcttccagccatctaaacagaagagtactgtcatgcctatgaccatgagctctgagagataaagatcaagaccataactttgtacaatgatttaattcctaacatgctgtgctttgtcacttattcagtcagaccacccaaactactaatatatatatatatatatatatatatatatatgaagagctacaataacattttcattgtgatttaatt

SEQ ID NO: 87852 - DNA, 600 bp, Chicken  19866894390210_1
tcatcacttgaacacagttactgcttatttaccactgtgctgcctgtccttctgtcttcaccttcatcaggacagaaagtgaaattcttatgaaccctggctactcagtacaattagctactatttcaagtaggctatttaccacaagaaatgcaatgtcagctatttttattgttctagaactcaaattgtttggtagcttttatattcctcaagtaattgcgtgactcacaccatttcttctaaaatctactgaacacttttaaaacaatactccagtcaacagagcaaaaagaataygactgagctgtatctgtactccctgcacacactctaatcattaacaagctctaattattaacaaggtgcaacaacacatttaagaagtgctaaaatcaaagtaaacatactttaccaaggagagcaaaaacatcattcccttcctgaagcgcttcatcaaagtacttcaaagcttttttaatatgagtttctttcccacaagtgagatcaagccatgctttcagaatcaatccctgcagaaaaacttgtattcattggtgctcttagtagccggttaattagaaagaagtatgctatgca

SEQ ID NO: 87853 - DNA, 600 bp, Chicken  19866894390213_1
attccaattaacacaggcctgctcccttttcattctgaagtcatttaagagaggtttttttggttttttttttatgccttcctcatgaaaagaaatgaaagctgttaaggacatagacaagaaagcagaaagaatgtaacgtctaatgagacagaggaagtttttagagctagatatttttcattaagggatgcatgtggagaccataatgcggtagggtgacattagcataaataaatgataagtggaatcgagccacagatatggtttgaaccattatcctaatgctggaattaaaayactgtgatcaggcttcatttcccgcctgcctttatgtgtgcaagcttacctgatgttcaagcaacaccactggatgactacatgcaactgagttgatcaactgcagggataactatgtcaacttctgcccaggtattgctagtggttaattctgttgcagtgtgatttataagyatcaccgcatgaggaatgccatgtaagagcagattttcttatctttcaaaagctgattaaaacaaagtgcctggagaagaattctcactttgaaataactcttctaaaaagtcgactgagtttctt

SEQ ID NO: 87854 - DNA, 600 bp, Chicken  19866894390213_2
tatttttcattaagggatgcatgtggagaccataatgcggtagggtgacattagcataaataaatgataagtggaatcgagccacagatatggtttgaaccattatcctaatgctggaattaaaayactgtgatcaggcttcatttcccgcctgcctttatgtgtgcaagcttacctgatgttcaagcaacaccactggatgactacatgcaactgagttgatcaactgcagggataactatgtcaacttctgcccaggtattgctagtggttaattctgttgcagtgtgatttataagyatcaccgcatgaggaatgccatgtaagagcagattttcttatctttcaaaagctgattaaaacaaagtgcctggagaagaattctcactttgaaataactcttctaaaaagtcgactgagtttcttctggtccacaaaggcattattgacagtggaactggatcaactcaattagttttccattaatgtaaaacaaacagtatctgggggagttataatgctcctgattttgtagtgtgactatggaatggagactaaagtgtttgagcgtgtgacagtcagaagaaaaggaaaaatcgg

SEQ ID NO: 87855 - DNA, 600 bp, Chicken  19866894390214_1
taatctcctcgcactgccttccttttgccttggatgaacactgaacaaaacccaaatgcaccagtgcaaataaagcgcctacaaacaaagcacatgaagtgcactgctttgtgatatccatctccctagctcttttgcatacgtgtggttgaatttagacgatctcacaaatgttaactagggagtgcggagctcactgccagtagtcttagaagcactgcaaatggaggacgactggatgcttgtgccaagttcaagcagaaaaacaacacagaaacccaccttatgaaacatgtctayctatacggctactacagttgtagcatcttcacctaccaacaagtctatatttttacattttcagcaatgcaattaaaattttcttcctactcccttaaagggaatgtggtcactcttgtacacaagggttgctctgttttattatgttgggccaggacgtcagaagtggatgttggtagtgtggcagtagaggttgaaccttcccaccaatatcccgttccattttgttgctgtgtgacagacggcagcagaggggcaggctgccatgacaaagtggtgtctgacatgaagtgtgtatga

SEQ ID NO: 87856 - DNA, 600 bp, Chicken  19866894390214_2
ttattactgtacccaggtcttatttaattaggaaggtctcctgcctagacatcaatgtatgctggaaaaaagtttagcaccacgtttctcataatctgtactacacacagattgactccagtaaatacaaccacttggctgctgcggtttgataccaagatatgctgctacacagcctatctctgaagcccaaaatctcgtcggtcactcctttgcttctcaggcgccctgaaaagatgggcttcaaacatgctcccgctgccatcaggttggatattagggaaaatttattctcagaargagcggtgaggcagyggcayaggctgctcagagaggtgctgcagccaccatcccgggagctgttcaagaaacgtgcagatgtagcactgagggacacggtcggtgggcacggtggggatgggctgatggccggaccaggtgatctcagaaggtttttccaaccgcaatgattctgtgattctatgaaataatgaatcactgagtccatgagctttacggccactccagcgacaacatccgacgcaccctgaccacagaccgcctcacagcccggcgctgacgggaaaagcgcygctcccg

SEQ ID NO: 87857 - DNA, 600 bp, Chicken  19866894390214_3
ggtcttatttaattaggaaggtctcctgcctagacatcaatgtatgctggaaaaaagtttagcaccacgtttctcataatctgtactacacacagattgactccagtaaatacaaccacttggctgctgcggtttgataccaagatatgctgctacacagcctatctctgaagcccaaaatctcgtcggtcactcctttgcttctcaggcgccctgaaaagatgggcttcaaacatgctcccgctgccatcaggttggatattagggaaaatttattctcagaargagcggtgaggcagyggcayaggctgctcagagaggtgctgcagccaccatcccgggagctgttcaagaaacgtgcagatgtagcactgagggacacggtcggtgggcacggtggggatgggctgatggccggaccaggtgatctcagaaggtttttccaaccgcaatgattctgtgattctatgaaataatgaatcactgagtccatgagctttacggccactccagcgacaacatccgacgcaccctgaccacagaccgcctcacagcccggcgctgacgggaaaagcgcygctcccggcggcagcgcrccgc

SEQ ID NO: 87858 - DNA, 600 bp, Chicken  19866894390214_4
tatttaattaggaaggtctcctgcctagacatcaatgtatgctggaaaaaagtttagcaccacgtttctcataatctgtactacacacagattgactccagtaaatacaaccacttggctgctgcggtttgataccaagatatgctgctacacagcctatctctgaagcccaaaatctcgtcggtcactcctttgcttctcaggcgccctgaaaagatgggcttcaaacatgctcccgctgccatcaggttggatattagggaaaatttattctcagaargagcggtgaggcagyggcayaggctgctcagagaggtgctgcagccaccatcccgggagctgttcaagaaacgtgcagatgtagcactgagggacacggtcggtgggcacggtggggatgggctgatggccggaccaggtgatctcagaaggtttttccaaccgcaatgattctgtgattctatgaaataatgaatcactgagtccatgagctttacggccactccagcgacaacatccgacgcaccctgaccacagaccgcctcacagcccggcgctgacgggaaaagcgcygctcccggcggcagcgcrccgcccact

SEQ ID NO: 87859 - DNA, 388 bp, Chicken  19866894390214_5
tcagaargagcggtgaggcagyggcayaggctgctcagagaggtgctgcagccaccatcccgggagctgttcaagaaacgtgcagatgtagcactgagggacacggtcggtgggcacggtggggatgggctgatggccggaccaggtgatctcagaaggtttttccaaccgcaatgattctgtgattctatgaaataatgaatcactgagtccatgagctttacggccactccagcgacaacatccgacgcaccctgaccacagaccgcctcacagcccggcgctgacgggaaaagcgcygctcccggcggcagcgcrccgcccactcgctctgaggaggaaaagccgccgcgggcccggggccgtaccaccccgagcgggaggggtg

SEQ ID NO: 87860 - DNA, 370 bp, Chicken  19866894390214_6
cagyggcayaggctgctcagagaggtgctgcagccaccatcccgggagctgttcaagaaacgtgcagatgtagcactgagggacacggtcggtgggcacggtggggatgggctgatggccggaccaggtgatctcagaaggtttttccaaccgcaatgattctgtgattctatgaaataatgaatcactgagtccatgagctttacggccactccagcgacaacatccgacgcaccctgaccacagaccgcctcacagcccggcgctgacgggaaaagcgcygctcccggcggcagcgcrccgcccactcgctctgaggaggaaaagccgccgcgggcccggggccgtaccaccccgagcgggaggggtg

SEQ ID NO: 87861 - DNA, 600 bp, Chicken  19866894390216_1
ttaaactaaagctttactagctgtattaatgctgttcctttttcctagtctgtgtagtttttttcccctcatctcaggttgatttatccagaaaaatttaaatactttagaaggaagaaagagagtgagttagatctatctatctttctgtataagttaggtgattgtagttgtagtctctgagtatggcaaagatattttgaggttaggccttagtgactagcctgtgaaatgcatccatttttaggttcatagaatccccacctgagaccagtcatgcttcaagcaaatgtaagccaytgtaagctcttaatatgacactgtcattatcagaatcgtcatttagtcattattcagattggcctctggaaacctccaggtggattctaatttgcttggcctcagttgcatttaatgaataagtttgtaagtgccattaagtaatctttttcttttcctgcagctgcttttatagcagaaatattttctaaatgtggtttccccaagtgttcctaccctgcctttaacgcctttgaaaggttcctaggcattgcaagttctaaaaagatagaacaaagtggccagatacccctaatatgc

SEQ ID NO: 87862 - DNA, 600 bp, Chicken  19866894390218_1
gttgagcacgactacaactatggtttgtagtttcgttcccagctgggaatctcattgttcacctctgaagttgtgcaaatgtgcagacttacaggatgtatgtgttgtgtttgagtctcagttacaacattggtttgagccagtgagccactgtgagaattgggattaaagcatgtcctcttccaccttccgctattcaggtgtatgacttcagaggcaacgaggcaatggttatgtgtatgtttataacatactgcttctgatccttaaaatacaagctataggcatagtgagattttmtcttaaattatcaagttctgaagacaaaaatygctttctatttttaaataacaaagctgtgtttcagtgtgcagctgtcaggacttctcacatttttttcctatccttctactggttgaaactgtcattgtaacatttgaaataaaacttggatttaggggatttaggcaacctatattgatatgtttgccaaatctgtgacttatgtagggattcctatggaaatacctacattggaagctctcttgatgagaaaggtactctacatagtgtttctttcagtatttgtctgttgcatag

SEQ ID NO: 87863 - DNA, 600 bp, Chicken  19866894390218_2
tcgttcccagctgggaatctcattgttcacctctgaagttgtgcaaatgtgcagacttacaggatgtatgtgttgtgtttgagtctcagttacaacattggtttgagccagtgagccactgtgagaattgggattaaagcatgtcctcttccaccttccgctattcaggtgtatgacttcagaggcaacgaggcaatggttatgtgtatgtttataacatactgcttctgatccttaaaatacaagctataggcatagtgagattttmtcttaaattatcaagttctgaagacaaaaatygctttctatttttaaataacaaagctgtgtttcagtgtgcagctgtcaggacttctcacatttttttcctatccttctactggttgaaactgtcattgtaacatttgaaataaaacttggatttaggggatttaggcaacctatattgatatgtttgccaaatctgtgacttatgtagggattcctatggaaatacctacattggaagctctcttgatgagaaaggtactctacatagtgtttctttcagtatttgtctgttgcatagagttaaattttgcaaaccaatagttgtaaaat

SEQ ID NO: 87864 - DNA, 600 bp, Chicken  19866894390220_1
tccgatataggtcaaaagtttatgcagctcaactcagcaatggcagaatgtttccaatggtaagaaattgtgatcactgtgccagaattaaacagaagtctgaatatgttactgctgcctcaattaggtgatgtgtggctagcaggcagcagcatttatctatgctgaagaacagtaagtacttggtattaagtcttgactgatatttatgtaagctgacacttagtcgagaatcagcatttcagatttggttacaccttttcttgtgtttccttgggcatatggatctatattgttccygcagttcatggcataattcagttgggtttgccctgggctagagaaatcacgttagcaagtactgtatccttttggcactgacacttttactgtagattatttaccagaccattaaggaaaaaaaaaaagagagagaattgagctgatcatgtgctgtcaatctgcttagggacacacatcatgtgtccctgcgaatgactgtatttcactttctgtgatgatgtctgtggattcaaaattctctcttaactgactattactgtgtattgccccaataaactgatgtacggacatacttga

SEQ ID NO: 87865 - DNA, 600 bp, Chicken  19866894390220_2
gatgtgtggctagcaggcagcagcatttatctatgctgaagaacagtaagtacttggtattaagtcttgactgatatttatgtaagctgacacttagtcgagaatcagcatttcagatttggttacaccttttcttgtgtttccttgggcatatggatctatattgttccygcagttcatggcataattcagttgggtttgccctgggctagagaaatcacgttagcaagtactgtatccttttggcactgacacttttactgtagattatttaccagaccattaaggaaaaaaaaaaayagagagaattgagctgatcatgtgctgtcaatctgcttagggacacacatcatgtgtccctgcgaatgactgtatttcactttctgtgatgatgtctgtggattcaaaattctctcttaactgactattactgtgtattgccccaataaactgatgtacggacatacttgatacaagcaattccaatcacactggagtgtgggagaatactggttgcagggatggctgaagtttgagtaccactgctagtggtaggagtggtggaacttatggcattgtgatcacaagatctcgtagcat

SEQ ID NO: 87866 - DNA, 599 bp, Chicken  19866894390221_1
  misc_feature (1)..(204): n is any nucleotide
nnnnnnnnnnnnnnnnnnnnnnnnnnnnnnnnnnnnnnnnnnnnnnnnnnnnnnnnnnnnnnnnnnnnnnnnnnnnnnnnnnnnnnnnnnnnnnnnnnnnnnnnnnnnnnnnnnnnnnnnnnnnnnnnnnnnnnnnnnnnnnnnnnnnnnnnnnnnnnnnnnnnnnnnnnnnnnnnnnnnnnnnnnnnnnnnnnnnnnnnnnnnatgtactccatatgttgttcttctgttaccaacttacatgtaaacagaggttttccttgtggaaccatcaagcaaatgcaactgccataacagagragccttaaaatagagtcaaaatgactgttctccttttactttttttgtttgcagatctaaaaataaaattccattttgaatcattgtgaaacatatatctgccctgtaaaagtcacatacatcactgaaatgcacgtgtttagraagcacaggagatctctaaaagagatctttaaaacaaatgcatgttatttttaatatgtactttgtaactgctctaagtttttcttgttctatttctatttatgawattttaaaatyagataccagaaaacaattatttggcaactgttcaccaa

SEQ ID NO: 87867 - DNA, 599 bp, Chicken  19866894390221_2
  misc_feature (1)..(60): n is any nucleotide
nnnnnnnnnnnnnnnnnnnnnnnnnnnnnnnnnnnnnnnnnnnnnnnnnnnnnnnnnnnnatgtactccatatgttgttcttctgttaccaacttacatgtaaacagaggttttccttgtggaaccatcaagcaaatgcaactgccataacagagragccttaaaatagagtcaaaatgactgttctccttttactttttttgtttgcagatctaaaaataaaattccattttgaatcattgtgaaacatatatctgccctgtaaaagtcacatacatcactgaaatgcacgtgtttagraagcacaggagatctctaaaagagatctttaaaacaaatgcatgttatttttaatatgtactttgtaactgctctaagtttttcttgttctatttctatttatgawattttaaaatyagataccagaaaacaattatttggcaactgttcaccaaaactcagtgaaacaytgggccttagcatcaacctttttcccagattacattttgcaacatgctccgtgttgcatctataccttctgcatgaagcagagtaaatttattaccagcacagttgctattatggatctgcagggtcac

SEQ ID NO: 87868 - DNA, 600 bp, Chicken  19866894390221_3
gaggttttccttgtggaaccatcaagcaaatgcaactgccataacagagragccttaaaatagagtcaaaatgactgttctccttttactttttttgtttgcagatctaaaaataaaattccattttgaatcattgtgaaacatatatctgccctgtaaaagtcacatacatcactgaaatgcacgtgtttagraagcacaggagatctctaaaagagatctttaaaacaaatgcatgttatttttaatatgtactttgtaactgctctaagtttttcttgttctatttctatttatgawattttaaaatyagataccagaaaacaattatttggcaactgttcaccaaaactcagtgaaacaytgggccttagcatcaacctttttcccagattacattttgcaacatgctccgtgttgcatctataccttctgcatgaagcagagtaaatttattaccagcacagttgctattatggatctgcagggtcacccagaacatcttctattttctgtcttgcctttttgttcttccttcagtttccatttcctttctgctcgtacagtagaagcaactacccctctttgcaagggacctat

SEQ ID NO: 87869 - DNA, 600 bp, Chicken  19866894390221_4
tgtggaaccatcaagcaaatgcaactgccataacagagragccttaaaatagagtcaaaatgactgttctccttttactttttttgtttgcagatctaaaaataaaattccattttgaatcattgtgaaacatatatctgccctgtaaaagtcacatacatcactgaaatgcacgtgtttagraagcacaggagatctctaaaagagatctttaaaacaaatgcatgttatttttaatatgtactttgtaactgctctaagtttttcttgttctatttctatttatgawattttaaaatyagataccagaaaacaattatttggcaactgttcaccaaaactcagtgaaacaytgggccttagcatcaacctttttcccagattacattttgcaacatgctccgtgttgcatctataccttctgcatgaagcagagtaaatttattaccagcacagttgctattatggatctgcagggtcacccagaacatcttctattttctgtcttgcctttttgttcttccttcagtttccatttcctttctgctcgtacagtagaagcaactacccctctttgcaagggacctatcttaaagcaar

SEQ ID NO: 87870 - DNA, 600 bp, Chicken  19866894390221_5
gtcaaaatgactgttctccttttactttttttgtttgcagatctaaaaataaaattccattttgaatcattgtgaaacatatatctgccctgtaaaagtcacatacatcactgaaatgcacgtgtttagraagcacaggagatctctaaaagagatctttaaaacaaatgcatgttatttttaatatgtactttgtaactgctctaagtttttcttgttctatttctatttatgawattttaaaatyagataccagaaaacaattatttggcaactgttcaccaaaactcagtgaaacaytgggccttagcatcaacctttttcccagattacattttgcaacatgctccgtgttgcatctataccttctgcatgaagcagagtaaatttattaccagcacagttgctattatggatctgcagggtcacccagaacatcttctattttctgtcttgcctttttgttcttccttcagtttccatttcctttctgctcgtacagtagaagcaactacccctctttgcaagggacctatcttaaagcaartatcaaacctgttactgcctataaaataaactattaaactttttgccctaatt

SEQ ID NO: 87871 - DNA, 474 bp, Chicken  19866894390221_6
agataccagaaaacaattatttggcaactgttcaccaaaactcagtgaaacaytgggccttagcatcaacctttttcccagattacattttgcaacatgctccgtgttgcatctataccttctgcatgaagcagagtaaatttattaccagcacagttgctattatggatctgcagggtcacccagaacatcttctattttctgtcttgcctttttgttcttccttcagtttccatttcctttctgctcgtacagtagaagcaactacccctctttgcaagggacctatcttaaagcaartatcaaacctgttactgcctataaaataaactattaaactttttgccctaattagcaggagccactctagttctaattaacagaagccatcccaattcccatgccctacaacttaataatgacatgtgagtaatttaaaaattcacctcaattttgccattttttaataagcaa

SEQ ID NO: 87872 - DNA, 556 bp, Chicken  19866894390222_1
acacaggcacctcccccttcccaatcactgtgcccagagctcctggggcactcattccgggcagcacagagatctggaacgtatctcaattcgtgcaaagatgaagagaagggaagagaacactccgtttctcctcttctacattcaaaccaaggaaaaagaaagaactattgagaacagcccaaagcggtgacacagttattcttttgcccaagaaataaaagcaccaaaacaattacagactgaattcagatcactctcttaagtgctcagcctgcagaacttggagaaatgtttggytaacggttcactgcattaaaatcaggtgtagctgctaatgaaggaacgacttccctcggctcagctcttcctagccaggctgtgcttcaggtctccatcctcagctcagccctcaggctccagccaggctgcaaggtgccacaagccaccccttccataggatcccattcaccaacacgccagctgcacgcccagcatggcaggaggtgccctgcgagcccctctccccccattcagccccaaacaagaggtcagc

SEQ ID NO: 87873 - DNA, 599 bp, Chicken  19866894390225_1
  misc_feature (1)..(225): n is any nucleotide
nnnnnnnnnnnnnnnnnnnnnnnnnnnnnnnnnnnnnnnnnnnnnnnnnnnnnnnnnnnnnnnnnnnnnnnnnnnnnnnnnnnnnnnnnnnnnnnnnnnnnnnnnnnnnnnnnnnnnnnnnnnnnnnnnnnnnnnnnnnnnnnnnnnnnnnnnnnnnnnnnnnnnnnnnnnnnnnnnnnnnnnnnnnnnnnnnnnnnnnnnnnnnnnnnnnnnnnnnnnnnnnnncctaacaggttcagaccagaacagctccgtgctaaaatgctgatgtttgcttttggcaacgcactggcaaaggcraaggtgctgtatggggtatgtattggagactgctgctgtcttgctgggcctttgttctttccctagcaccacagccagcgggaagggttgtggaattcccttgctgtagcatgttagaatagttttcaaagctgtactggggatactgtatcatagcttcccactacagaggtcttagtccaaccttcagstatggctgctgctatctgctgatccagaacaccacctcagcagtgagcacgttcatgatgcgacatgcactgaggtggtaataggtaggagccagggagaaggtttaa

SEQ ID NO: 87874 - DNA, 599 bp, Chicken  19866894390225_2
  misc_feature (1)..(34): n is any nucleotide
nnnnnnnnnnnnnnnnnnnnnnnnnnnnnnnnnncctaacaggttcagaccagaacagctccgtgctaaaatgctgatgtttgcttttggcaacgcactggcaaaggcraaggtgctgtatggggtatgtattggagactgctgctgtcttgctgggcctttgttctttccctagcaccacagccagcgggaagggttgtggaattcccttgctgtagcatgttagaatagttttcaaagctgtactggggatactgtatcatagcttcccactacagaggtcttagtccaaccttcagstatggctgctgctatctgctgatccagaacaccacctcagcagtgagcacgttcatgatgcgacatgcactgaggtggtaataggtaggagccagggagaaggtttaactgtaaaactctaacccttcccacatctcagtatgcaaattgatacttcattgctggctgaaggaggaattttaattaaaataccaaatctacattcaaaacttgtttgactagagtaattttctgggcaaggtaacaatacatttattaaaatcttggctttaaaccaagaagaatatgcagaatcagca

SEQ ID NO: 87875 - DNA, 600 bp, Chicken  19866894390232_1
tttgatacagctgtggggggagtaatgattaaacacataaaggcacagatgagggatatatggctatttctcaggcagatctgagaccacaggtacttccattgacagctgtaggaggctgaggaaggaccctttctgtgggaaaagttttctctctctcatctgcactaccaaatatatggccaccccccctaactgtggggctgaaatacttacagtgccattattttcccccaggtggttactgtttatgctcaaggcaaaattaagcaacttagtttggaggggcttcatttcagrttggatgttagraataatttattctcggagtgatgatgcactggaacyggctgcctggggaggtggtagagtcactgcccctggaggtcaagaaacacatagatgtggaactttgggaataggttagtgggcatggtggtgataactacttgatcttactggtcttctccaaccttaatgatcctatgattaccaaatcttctgcatgtcaaaaggaacttcgccatctcaagtattcatagcagcccatcctaacttagaggcacccacatgtgagtttccctggaggagctgcttttc

SEQ ID NO: 87876 - DNA, 600 bp, Chicken  19866894390232_2
gtggggggagtaatgattaaacacataaaggcacagatgagggatatatggctatttctcaggcagatctgagaccacaggtacttccattgacagctgtaggaggctgaggaaggaccctttctgtgggaaaagttttctctctctcatctgcactaccaaatatatggccaccccccctaactgtggggctgaaatacttacagtgccattattttcccccaggtggttactgtttatgctcaaggcaaaattaagcaacttagtttggaggggcttcatttcagrttggatgttagraataatttattctcggagtgatgatgcactggaacyggctgcctggggaggtggtagagtcactgcccctggaggtcaagaaacacatagatgtggaactttgggaataggttagtgggcatggtggtgataactacttgatcttactggtcttctccaaccttaatgatcctatgattaccaaatcttctgcatgtcaaaaggaacttcgccatctcaagtattcatagcagcccatcctaacttagaggcacccacatgtgagtttccctggaggagctgcttttccacaaccatctt

SEQ ID NO: 87877 - DNA, 600 bp, Chicken  19866894390232_3
atgagggatatatggctatttctcaggcagatctgagaccacaggtacttccattgacagctgtaggaggctgaggaaggaccctttctgtgggaaaagttttctctctctcatctgcactaccaaatatatggccaccccccctaactgtggggctgaaatacttacagtgccattattttcccccaggtggttactgtttatgctcaaggcaaaattaagcaacttagtttggaggggcttcatttcagrttggatgttagraataatttattctcggagtgatgatgcactggaacyggctgcctggggaggtggtagagtcactgcccctggaggtcaagaaacacatagatgtggaactttgggaataggttagtgggcatggtggtgataactacttgatcttactggtcttctccaaccttaatgatcctatgattaccaaatcttctgcatgtcaaaaggaacttcgccatctcaagtattcatagcagcccatcctaacttagaggcacccacatgtgagtttccctggaggagctgcttttccacaaccatcttgacattgcttttatctaccagctctggaagcagtac

SEQ ID NO: 87878 - DNA, 600 bp, Chicken  19866894390235_1
gtagtagatgtgtgtcttcagtgccttttcatgtcagaaacgaactccactttcagtgtaccaagaaaatatatatattttttcagaattaatatccaaatgatgactaaattatgtaaacaagtgaaggggactattggtaagccatcaatagtggataagtgccaactgtcaaaggtgttttaatatccataggtggtaattactttaaaatattataaaaatacccagtaggaaataccaaacctgatcacagatggtgaaactcaaactagtttcgctgtgagctccagttcctarttctaatttaatagggcagccacataattaaaatgtgattaatacaatttatttgggattaagagacacatctgtagcgaatatgaaatatatgtttctaatgaaatataaaaatatgtgaaatatatgtttctaaccagcttctatttacccttatttctttcttaacatgaactcaaatgaatgagacagactggaacagtggacaactggaactagtgacagcatgaagttcaacaaaagaaaatgctgggttctgcacctgggatggagtaacaccagatacaggtacagactagg

SEQ ID NO: 87879 - DNA, 600 bp, Chicken  19866894390236_1
aactggtggaatacaactttaatgtactgcaggcctgatgagatccatttgtttttgatagcagtattttgtaccatgtagtagatggtacacagatttggacctaatcacagaaagttaaggaacttaattatttagctccaaaactttaatggattcttgaaacaaatactgtctggatctaataaagtagagaatcctccctttttgcatctctagagtcagttggcacagctgcatgaaacacagccttcaaaataagagtctgatgcttcatagtgctcacagaagccatactcygggttcttacttttgaggtgatcccatacagtaagtggaacagaacractcctgactctgaatcttcttttgtagtcaggtactattgtaaagtagcaactccagcaagagatgggagctgtttgtcactccttcgtatgtatcgttttacttactatatccataatgtgctactgctggtctcttgcaagtctaacttagcagtccagtgactgtttccataacattagactgaggactttgttgcagtggaaagctacttcgtgaaagttgcctgataaacttcaagacagatttaat

SEQ ID NO: 87880 - DNA, 600 bp, Chicken  19866894390236_2
tttgtttttgatagcagtattttgtaccatgtagtagatggtacacagatttggacctaatcacagaaagttaaggaacttaattatttagctccaaaactttaatggattcttgaaacaaatactgtctggatctaataaagtagagaatcctccctttttgcatctctagagtcagttggcacagctgcatgaaacacagccttcaaaataagagtctgatgcttcatagtgctcacagaagccatactcygggttcttacttttgaggtgatcccatacagtaagtggaacagaacractcctgactctgaatcttcttttgtagtcaggtactattgtaaagtagcaactccagcaagagatgggagctgtttgtcactccttcgtatgtatcgttttacttactatatccataatgtgctactgctggtctcttgcaagtctaacttagcagtccagtgactgtttccataacattagactgaggactttgttgcagtggaaagctacttcgtgaaagttgcctgataaacttcaagacagatttaattattcttcatctatcccatgtgctgtagtctttactcgatatttatt

SEQ ID NO: 87881 - DNA, 600 bp, Chicken  19866894390237_1
gttggctggctttcacaggtccaacgacatgcttcatgcttctctgtaacctcttgactgtcgccttttgttcttatttttgttcacctctttctttgtgaatcatcttgagtaatttatttaagtagcgcttatcgcttgcttcagcctttccccagagcaccctccttttctctcttcaatctgttgttggattaaatggcccagaaatacaacacaaattaccatcctcacgctagtcacagttcttaccctgacgtttcacgctcattttcttcttctctgaactaaaaacctgcygctgcatcatcttgtggaggttaagttgaactcattcatatagcttgaaaacaagtgcagccaaatcgagctgggtgcgttttgactatttctctttaattaaggaaaaccattccactgtatttgttctgccagtctgccgttatggatttgtcttcaactgggtgtctttcttgtaaagcatcacagagattgtttttttctgctcagatacgtaaatcttccaaatcttctaaaattacatctagctttgtcccatttctgtctcgaaaactcattgtattctatgatgtcctgtct

SEQ ID NO: 87882 - DNA, 600 bp, Chicken  19866894390238_1
gtactgctctacagtactaaggcactggcgagatgctccatcgtaaccccccacagcatagagcttacctgcaagagacacatgttggcatcagcatcacggctacaactgatgtatgatgctcccaccgtgcctggcagaaccactgaggtcagatcctggctgggaaggccctagcagagctgcctgagcctgctggcatgtctggggcaaaccctactgaaaggatctgaagcaggctcacagacagtgggcctgtttgcttttaaggctgtcagccaagacagggaaccatctctwcacaacagcttcattagaagcccaaagccctgagggttttctgaatgacttgctggcctaggagatgagttaataccaagcacgttctttcaatcagcatttcctcctgttcaggtgccacatagcaaggtgagctgacaaaggtaaacagtgtacattaattacagtgtcacacgagcaataaatctgcaatagcctcttaatatactacctccatggaaatgtagacccaattttgaagatcctaggacaaaccaaagctgctagtacagctgaagtcactctgttcactcatgccaa

SEQ ID NO: 87883 - DNA, 600 bp, Chicken  19866894390239_1
caggctgtaaaggatccaaataaaccaacaggatttatcagataaataataaattttcagaagtaaaatacatgtttaactaaacaaataatgcacttaaatgctgactgaaagatcctaaacactgacaaagatgaccctaaacatagtaggtatttggcaattactggaagtcagtgatctaggaaaaaagacttggagtagttaaaacctgaatatgaaatagtaagtaagtagaggtgatggttttccttcctcattttgaacagattttcattcacgtgtctgaaatatctgtgraaaatcaaaccccatattcaaacagcctaagtagctactattaaaactgtgcataagaaaagcaactacagatgcaacaaaccttttaggggttctgaaggctgtcacatttctcaagtgctctgcacttcatgggacatcctgttattaagccattttcctgaccaggtcccaggacgctgctctcacatcacgtctctgttatctctggactgtctgatctcctcacactttcctctcagctttgcttgaagcatgwagcaatacarggagggaagcaccgatcaaaagcattaagaa

SEQ ID NO: 87884 - DNA, 600 bp, Chicken  19866894390239_10
atttaacaagacctacatttagacacatcaccgaaaagcattcttctatttcccttaaactgtttggagaacacttcctaacgggaaggtggcaaaacttgtatagttatgattttcaaaaaggacccctctctgaatgatttctttcatgtctggatgaaatgacaaaatgaggaaggaataaccaaatgarcaagattatccaagggamgcrttgcaactcttcgtttctgacagtcaacaataattattaaaacaatgtctgtaaaaattgtcatttttgctccaggtacaaaagarattctacattaaatcttgacttcatttagcaacatkcagatctcacccttgacactcaacagactacaacagggcattttgtctatttatttttgctttaagaaaattaacagtttcttcgcacaggagggccaaggtttttgaagctaaaatcactactttttatattaaattgtaacctctgatgcactctgaggaatatacaaggttgttgtcctgcaattagccaataataaaaattagcagaacaaaattaaagggtaaaataaagtttccttttccaagaaaaaaatattaacc

SEQ ID NO: 87885 - DNA, 600 bp, Chicken  19866894390239_11
agcattcttctatttcccttaaactgtttggagaacacttcctaacgggaaggtggcaaaacttgtatagttatgattttcaaaaaggacccctctctgaatgatttctttcatgtctggatgaaatgacaaaatgaggaaggaataaccaaatgarcaagattatccaagggamgcrttgcaactcttcgtttctgacagtcaacaataattattaaaacaatgtctgtaaaaattgtcatttttgctccaggtacaaaagarattctacattaaatcttgacttcatttagcaacatkcagatctcacccttgacactcaacagactacaacagggcattttgtctatttatttttgctttaagaaaattaacagtttcttcgcacaggagggccaaggtttttgaagctaaaatcactactttttatattaaattgtaacctctgatgcactctgaggaatatacaaggttgttgtcctgcaattagccaataataaaaattagcagaacaaaattaaagggtaaaataaagtttccttttccaagaaaaaaatattaacctcttctgagtagagctggtaacaaggtgttaagcaa

SEQ ID NO: 87886 - DNA, 600 bp, Chicken  19866894390239_2
ttttgaacagattttcattcacgtgtctgaaatatctgtgraaaatcaaaccccatattcaaacagcctaagtagctactattaaaactgtgcataagaaaagcaactacagatgcaacaaaccttttaggggttctgaaggctgtcacatttctcaagtgctctgcacttcatgggacatcctgttattaagccattttcctgaccaggtcccaggacgctgctctcacatcacgtctctgttatctctggactgtctgatctcctcacactttcctctcagctttgcttgaagcatgwagcaatacarggagggaagcaccgatcaaaagcattaagaattaacctgacgatgttgggaaatgatgaacagtgatcccaatgcttggggaggggagataacacagagatggtgcagacagcaccaaggaggaaggaacaacaacaaaaaaaactaaaggggaagaagctgatggcaaagacaaaaggcagaagaggaaaggaaagataaaaggaccacatacattaaaaaaagaaagggggggaagaggtcccacacttcagaacttgagattctgcagagcaattttttactctcct

SEQ ID NO: 87887 - DNA, 600 bp, Chicken  19866894390239_3
attttcattcacgtgtctgaaatatctgtgraaaatcaaaccccatattcaaacagcctaagtagctactattaaaactgtgcataagaaaagcaactacagatgcaacaaaccttttaggggttctgaaggctgtcacatttctcaagtgctctgcacttcatgggacatcctgttattaagccattttcctgaccaggtcccaggacgctgctctcacatcacgtctctgttatctctggactgtctgatctcctcacactttcctctcagctttgcttgaagcatgwagcaatacarggagggaagcaccgatcaaaagcattaagaattaacctgacgatgttgggaaatgatgaacagtgatcccaatgcttggggaggggagataacacagagatggtgcagacagcaccaaggaggaaggaacaacaacaaaaaaaactaaaggggaagaagctgatggcaaagacaaaaggcagaagaggaaaggaaagataaaaggaccacatacattaaaaaaagaaagggggggaagaggtcccacacttcagaacttgagattctgcagagcaattttttactctcctacaagtttca

SEQ ID NO: 87888 - DNA, 600 bp, Chicken  19866894390239_4
gcaccgatcaaaagcattaagaattaacctgacgatgttgggaaatgatgaacagtgatcccaatgcttggggaggggagataacacagagatggtgcagacagcaccaaggaggaaggaacaacaacaaaaaaaactaaaggggaagaagctgatggcaaagacaaaaggcagaagaggaaaggaaagataaaaggaccacatacattaaaaaaagaaagggggggaagaggtcccacacttcagaacttgagattctgcagagcaattttttactctcctacaagtttcagaaactaygaagcaaggctragcagcaakaacaagcaagaataaggaattcaagtataacaccaaaaccaacttaaagaactctaatgaaccagttctactttgagcatgatttttttaaggatcattttaaacatgcaaggtaactttgcttaatttaagctgcagtatctgatgatgcaaacgaagcaatgtgtaacacctcctgttctcacacaggggcaaatacggtctagtcacatcaatactggcagatcccattcaaaattaatcaagttacaaataatggctttagaactgacaggatga

SEQ ID NO: 87889 - DNA, 600 bp, Chicken  19866894390239_5
agcattaagaattaacctgacgatgttgggaaatgatgaacagtgatcccaatgcttggggaggggagataacacagagatggtgcagacagcaccaaggaggaaggaacaacaacaaaaaaaactaaaggggaagaagctgatggcaaagacaaaaggcagaagaggaaaggaaagataaaaggaccacatacattaaaaaaagaaagggggggaagaggtcccacacttcagaacttgagattctgcagagcaattttttactctcctacaagtttcagaaactaygaagcaaggctragcagcaakaacaagcaagaataaggaattcaagtataacaccaaaaccaacttaaagaactctaatgaaccagttctactttgagcatgatttttttaaggatcattttaaacatgcaaggtaactttgcttaatttaagctgcagtatctgatgatgcaaacgaagcaatgtgtaacacctcctgttctcacacaggggcaaatacggtctagtcacatcaatactggcagatcccattcaaaattaatcaagttacaaataatggctttagaactgacaggatgaactgatcaacta

SEQ ID NO: 87890 - DNA, 600 bp, Chicken  19866894390239_6
aattaacctgacgatgttgggaaatgatgaacagtgatcccaatgcttggggaggggagataacacagagatggtgcagacagcaccaaggaggaaggaacaacaacaaaaaaaactaaaggggaagaagctgatggcaaagacaaaaggcagaagaggaaaggaaagataaaaggaccacatacattaaaaaaagaaagggggggaagaggtcccacacttcagaacttgagattctgcagagcaattttttactctcctacaagtttcagaaactaygaagcaaggctragcagcaakaacaagcaagaataaggaattcaagtataacaccaaaaccaacttaaagaactctaatgaaccagttctactttgagcatgatttttttaaggatcattttaaacatgcaaggtaactttgcttaatttaagctgcagtatctgatgatgcaaacgaagcaatgtgtaacacctcctgttctcacacaggggcaaatacggtctagtcacatcaatactggcagatcccattcaaaattaatcaagttacaaataatggctttagaactgacaggatgaactgatcaactaaactgaaga

SEQ ID NO: 87891 - DNA, 600 bp, Chicken  19866894390239_7
aaagagaggctgcagcagttggcaagaattgtgttatttttgtcctgcagcccaggtaaacctttacagttgggtgaagaggggatagatagtgaagtaagccaaatatttaacaagacctacatttagacacatcaccgaaaagcattcttctatttcccttaaactgtttggagaacacttcctaacgggaaggtggcaaaacttgtatagttatgattttcaaaaaggacccctctctgaatgatttctttcatgtctggatgaaatgacaaaatgaggaaggaataaccaaatgarcaagattatccaagggamgcrttgcaactcttcgtttctgacagtcaacaataattattaaaacaatgtctgtaaaaattgtcatttttgctccaggtacaaaagarattctacattaaatcttgacttcatttagcaacatkcagatctcacccttgacactcaacagactacaacagggcattttgtctatttatttttgctttaagaaaattaacagtttcttcgcacaggagggccaaggtttttgaagctaaaatcactactttttatattaaattgtaacctctgatgcactct

SEQ ID NO: 87892 - DNA, 600 bp, Chicken  19866894390239_8
ttggcaagaattgtgttatttttgtcctgcagcccaggtaaacctttacagttgggtgaagaggggatagatagtgaagtaagccaaatatttaacaagacctacatttagacacatcaccgaaaagcattcttctatttcccttaaactgtttggagaacacttcctaacgggaaggtggcaaaacttgtatagttatgattttcaaaaaggacccctctctgaatgatttctttcatgtctggatgaaatgacaaaatgaggaaggaataaccaaatgarcaagattatccaagggamgcrttgcaactcttcgtttctgacagtcaacaataattattaaaacaatgtctgtaaaaattgtcatttttgctccaggtacaaaagarattctacattaaatcttgacttcatttagcaacatkcagatctcacccttgacactcaacagactacaacagggcattttgtctatttatttttgctttaagaaaattaacagtttcttcgcacaggagggccaaggtttttgaagctaaaatcactactttttatattaaattgtaacctctgatgcactctgaggaatatacaaggttg

SEQ ID NO: 87893 - DNA, 600 bp, Chicken  19866894390239_9
gcaagaattgtgttatttttgtcctgcagcccaggtaaacctttacagttgggtgaagaggggatagatagtgaagtaagccaaatatttaacaagacctacatttagacacatcaccgaaaagcattcttctatttcccttaaactgtttggagaacacttcctaacgggaaggtggcaaaacttgtatagttatgattttcaaaaaggacccctctctgaatgatttctttcatgtctggatgaaatgacaaaatgaggaaggaataaccaaatgarcaagattatccaagggamgcrttgcaactcttcgtttctgacagtcaacaataattattaaaacaatgtctgtaaaaattgtcatttttgctccaggtacaaaagarattctacattaaatcttgacttcatttagcaacatkcagatctcacccttgacactcaacagactacaacagggcattttgtctatttatttttgctttaagaaaattaacagtttcttcgcacaggagggccaaggtttttgaagctaaaatcactactttttatattaaattgtaacctctgatgcactctgaggaatatacaaggttgttg

SEQ ID NO: 87894 - DNA, 600 bp, Chicken  19866894390241_1
ttcctaatttcgacaacatcattatttattgatgataatagtgcctaaaaaatcccaaatagcaacttctgaaatggaagtacagataaacagagatctgaaagccctgtagatgaaagacccagagacacaatcgagtaacagcagctgaaattactgcaggtcaacagaactgcagttactgagcatgcacatattcctaatccattgcaagagaatagaaagtgcattaagtccgacctcttgttctgagtttgaagtgaatgtattttgtcttgtttttcttgcaggtacaagcayggtcccaatggcaaagcaccacttagctctgatattaaatagggtaactcagtagggcaccccgtgcatcatccagggtggcacgtaatcaccccatacaccttgtgaatatggggtactgtgaagcacgaggtcagaaacgtgtgcttcccactaccctctgcaaaaagggcagattaatagataattaacatgtattgacgtgccttgtggcgcttacaaaatgtgttttgagttatgtttttgtaacagttggccagcaaaccttgacctgcaagggttaggatgaatacctgcaca

SEQ ID NO: 87895 - DNA, 600 bp, Chicken  19866894390250_1
attaaatgtatgcagcaaaaccaaatggcttctcaaaatgacagtgcaaaaagatttgtaagaatagataacgtctcctattgggcattttaggttgtgataaatacataaaaaaggatataaatgcaaaaagatctgaagcagtaatggtaaactttggaacagtgttgttgaggagtgtcagtctatgaaatactttttccaggtcgtttgcctttagaaaaatcttcacggtcttgaaataaacttaaaattattgggtaaaggcttaaatatatcattaagagaattacagccttytttctcctttatcacgtgactcggtcaaataaarcattgaagctgtagtttcagattgtaagttcagtcagctgacactgtcagttgatttacagaatatttattttcaaagtatttcttcacaaccaaatccataagaaacataagatttcaattagcattctgcaaaccttgctgtactgcgtggctaatcttatggctacaataatcaatgcattctcatttgtagctttagttatttgggatcttttattataaaatattgatcaacagcactgtattcagttaaatttctgtgtt

SEQ ID NO: 87896 - DNA, 600 bp, Chicken  19866894390250_2
aaaatgacagtgcaaaaagatttgtaagaatagataacgtctcctattgggcattttaggttgtgataaatacataaaaaaggatataaatgcaaaaagatctgaagcagtaatggtaaactttggaacagtgttgttgaggagtgtcagtctatgaaatactttttccaggtcgtttgcctttagaaaaatcttcacggtcttgaaataaacttaaaattattgggtaaaggcttaaatatatcattaagagaattacagccttytttctcctttatcacgtgactcggtcaaataaarcattgaagctgtagtttcagattgtaagttcagtcagctgacactgtcagttgatttacagaatatttattttcaaagtatttcttcacaaccaaatccataagaaacataagatttcaattagcattctgcaaaccttgctgtactgcgtggctaatcttatggctacaataatcaatgcattctcatttgtagctttagttatttgggatcttttattataaaatattgatcaacagcactgtattcagttaaatttctgtgttctatttgatgggtgtagtcaggctttgagagtag

SEQ ID NO: 87897 - DNA, 600 bp, Chicken  19866894390254_1
aatctcatgagcccaagggaagccccatgagttgttaaattcaaatctaatctaagggtttcattgagaacagtttataagctcttattaaatgagaggcaaagcttgattctgcagatctagctttccaaacccaaaaagaggtgaaaggtgcaagtctgtcgagctcccacctgcagctgttggaaatggcacagagaaggtaactaaaaggaggtaaatcatctgcctgacataatccattacctaactgtcttctgcagaaaaattaatgctcctgagctattttctgctaagcgkaacaaagctctgcttggattgaagtgcctgaatctgtatcatttccacgttcagaccctgctagaatggaaagacccccaaaacagcaygtaaagccaactagcatcagcatcttaatacaaatacctctgagtgaaaaagaaaagcctatcccccttccaaaacactgactgccattttaccacaaatcgccaagaataattagtatgacttcagatttcacacaacaaatttctctgcttatcagtaacagtcgcaagaaagagctctgtattctcatctgagaatggctgataaagt

SEQ ID NO: 87898 - DNA, 592 bp, Chicken  19866894390254_2
aaatgagaggcaaagcttgattctgcagatctagctttccaaacccaaaaagaggtgaaaggtgcaagtctgtcgagctcccacctgcagctgttggaaatggcacagagaaggtaactaaaaggaggtaaatcatctgcctgacataatccattacctaactgtcttctgcagaaaaattaatgctcctgagctattttctgctaagcgkaacaaagctctgcttggattgaagtgcctgaatctgtatcatttccacgttcagaccctgctagaatggaaagacccccaaaacagcaygtaaagccaactagcatcagcatcttaatacaaatacctctgagtgaaaaagaaaagcctatcccccttccaaaacactgactgccattttaccacaaatcgccaagaataattagtatgacttcagatttcacacaacaaatttctctgcttatcagtaacagtcgcaagaaagagctctgtattctcatctgagaatggctgataaagttatatatgtttatggcttttacttccccccaggacgtttttccttgatgatatttcgcttctgattatctgcctacccaaa

SEQ ID NO: 87899 - DNA, 600 bp, Chicken  19866894390256_1
ttacctgggtaaccagtgataggatgagaggtaatggctttaagttgaaccaggggaggttcaggttggatatttggaaacacttctgcttggaaagagtggtgatgcagtggcacagctgcccagggaggtggtggggtcaccattcctggaggtgttcaaggaatgtggagatgtggcactgaaggacatggtcagcgggcatgggttgacagttggactcaatgactttagaggccttttccaacattaatgattctgtgattcagaccatgcctgtgcccctgctgaactctcagygcaycgaagcccactgctgtgcaagcaagaagacaggatcataatctgatatgctcataacctggtcatattaattcaatttcattaccccaatccagcagtggctaatccttgatgatttaaataaaagaaaatgaactgctgatccctggtgtgacctgatagcatgctgaagtcagagatttgattacttttgttttcaggcaaggtatgcttttggaagctacctaaagtgacaggtttcaagaacatagctctacctcctgcgctatggaagtctttttccttgtctttgatcta

SEQ ID NO: 87900 - DNA, 600 bp, Chicken  19866894390256_2
ctgggtaaccagtgataggatgagaggtaatggctttaagttgaaccaggggaggttcaggttggatatttggaaacacttctgcttggaaagagtggtgatgcagtggcacagctgcccagggaggtggtggggtcaccattcctggaggtgttcaaggaatgtggagatgtggcactgaaggacatggtcagcgggcatgggttgacagttggactcaatgactttagaggccttttccaacattaatgattctgtgattcagaccatgcctgtgcccctgctgaactctcagygcaycgaagcccactgctgtgcaagcaagaagacaggatcataatctgatatgctcataacctggtcatattaattcaatttcattaccccaatccagcagtggctaatccttgatgatttaaataaaagaaaatgaactgctgatccctggtgtgacctgatagcatgctgaagtcagagatttgattacttttgttttcaggcaaggtatgcttttggaagctacctaaagtgacaggtttcaagaacatagctctacctcctgcgctatggaagtctttttccttgtctttgatctactta

SEQ ID NO: 87901 - DNA, 600 bp, Chicken  19866894390256_3
tcaatttcattaccccaatccagcagtggctaatccttgatgatttaaataaaagaaaatgaactgctgatccctggtgtgacctgatagcatgctgaagtcagagatttgattacttttgttttcaggcaaggtatgcttttggaagctacctaaagtgacaggtttcaagaacatagctctacctcctgcgctatggaagtctttttccttgtctttgatctacttagcttaaactggaccttgttagataactgttccctttcacctctaaatttcaacacagtcaagcctaacagrgatgcgagatgtaagtaaacacaggtgggtcgcacgcaccagcatcttacaagcagttgcatgacagctgcatggctgcagatgggtctagcccaagcaagagaggtggttagtctgtcattccttggataacattcacaggatttgtagttgtgtctggaaattatgtgagtgaggagcccacactacagtaaatagagatgctgtcagcgtgggagaggagcgagaggttaagtgattctgcacagtgtcttggtgagctgcagccattatgaggcagaagcttcacttctgtatggt

SEQ ID NO: 87902 - DNA, 600 bp, Chicken  19866894390258_1
tttctttatcaaatagtcttattgcacactttcatggttttcatggaaataagtaggagatgttactttcagagtgacttatgtatacacctgaaggttattagaaggttattagaattgtggaagttcatcttgagatatgtttactttgcatgctttaagattagctttgaaatcatcttcccagcatttcaactacacagctctggaattttgtgtttctactaaaaaaaatgagatgttcccctcaggtatatgaaataaacaactgttgtttcatctgagatataattacactgkcagtgtcaatgttcttacagacttgcaaatcttcagtacccattatcatattttgccatttgacacaaggtatttgctgaaacaggtggaaatgaatgaagcatttgcatagcaatctatccaaatctttcagccataaaaccatgacaagagcagcacaataatcccattcaaaaactttgagtttggtcagtggctggtaccataatttaccaaagatttgctagctaggctgtgctatcactttgtgatatcatcagcaatcgctgcatttcgttacaaagatagtgaaacttcttg

SEQ ID NO: 87903 - DNA, 600 bp, Chicken  19866894390261_1
aaatattttttaatgaaaattagtctttaagcctaaaataatctcttaacaaacatggttatagcagtaaactgaatggctttattttgctctagcaatcctcacactttgtttatttcaacaataatatttcaggttattttcagacatttccaaaacactatttatctacttttacttattcttcttgctaaactgaaatcctaagcctgtgagtttttcttggtttgtttcctttaaagttcttcagaagtattttataaacttttagtatacttctttaatctatccagttacagraaggtgttttctcaccacctctaagtcagtrtgatgttcatgaaacaaaaagaactgcaaaagccaattgataggctgtggaagaaactccttttgaagcactctaacttttttttcattcctgggtacatgttcagctttcttcaatgttttgtgaggcagaacacaytaaaggtagagtttttacctcaggagcaactttcttcattctcaagggagagaaaaagtgaggtttagtagattaataaaggaacatcatatcaagggagtgagaacatgtaactcatgccaaaactgaca

SEQ ID NO: 87904 - DNA, 600 bp, Chicken  19866894390261_2
cctaaaataatctcttaacaaacatggttatagcagtaaactgaatggctttattttgctctagcaatcctcacactttgtttatttcaacaataatatttcaggttattttcagacatttccaaaacactatttatctacttttacttattcttcttgctaaactgaaatcctaagcctgtgagtttttcttggtttgtttcctttaaagttcttcagaagtattttataaacttttagtatacttctttaatctatccagttacagraaggtgttttctcaccacctctaagtcagtrtgatgttcatgaaacaaaaagaactgcaaaagccaattgataggctgtggaagaaactccttttgaagcactctaacttttttttcattcctgggtacatgttcagctttcttcaatgttttgtgaggcagaacacaytaaaggtagagtttttacctcaggagcaactttcttcattctcaagggagagaaaaagtgaggtttagtagattaataaaggaacatcatatcaagggagtgagaacatgtaactcatgccaaaactgacagcaattctgcattagcatttctgcttgggtc

SEQ ID NO: 87905 - DNA, 600 bp, Chicken  19866894390261_3
tacttttacttattcttcttgctaaactgaaatcctaagcctgtgagtttttcttggtttgtttcctttaaagttcttcagaagtattttataaacttttagtatacttctttaatctatccagttacagraaggtgttttctcaccacctctaagtcagtrtgatgttcatgaaacaaaaagaactgcaaaagccaattgataggctgtggaagaaactccttttgaagcactctaacttttttttcattcctgggtacatgttcagctttcttcaatgttttgtgaggcagaacacaytaaaggtagagtttttacctcaggagcaactttcttcattctcaagggagagaaaaagtgaggtttagtagattaataaaggaacatcatatcaagggagtgagaacatgtaactcatgccaaaactgacagcaattctgcattagcatttctgcttgggtcaggaacaaactttcagtgcaaatctcttaaaatttctcaattaaaatgttctgtattgcactcagagttgtttcagaccacactaaatggatttctttagatgaaattaaaccagggagatgtgcatcttattaattt

SEQ ID NO: 87906 - DNA, 600 bp, Chicken  19866894390269_1
tgctgcaacacaaggaagaacaggcaaagcaaagtgatttgttccaaagtggacttaaggcagcagttctgcaagtcaggatgtcaggtagatggctgtgacccgctgattttagcagaagcatcttagggctataaacagtgataagcatgcctatccaattacagccaccagactcaagtctgtctgaaatagtttcacttcttctgtcctgtaggtaatctggcagtgatgcagcagctgcatttctttttttggttatgccaagactgtttgcaatggatttcacttgtatgcttwtcaratataaacttgcatagcaatattacactaaatgaatttactctcagcagatccagctgtaagactcactgtcctgggctacttgctgcttacacaggggaagcagtgtagttctgtgatgtatttctgtgatgtatttctgcctttcaatcatacgagccagtatcaaatccacatgctggctagcttccaaaagagaaggagatggctctttaaagactccttcataaaaataaaaagtctgttctctttttaaaattaaaaattgatttataacaagttggaaagggttgcttt

SEQ ID NO: 87907 - DNA, 600 bp, Chicken  19866894390269_2
gcaacacaaggaagaacaggcaaagcaaagtgatttgttccaaagtggacttaaggcagcagttctgcaagtcaggatgtcaggtagatggctgtgacccgctgattttagcagaagcatcttagggctataaacagtgataagcatgcctatccaattacagccaccagactcaagtctgtctgaaatagtttcacttcttctgtcctgtaggtaatctggcagtgatgcagcagctgcatttctttttttggttatgccaagactgtttgcaatggatttcacttgtatgcttwtcaratataaacttgcatagcaatattacactaaatgaatttactctcagcagatccagctgtaagactcactgtcctgggctacttgctgcttacacaggggaagcagtgtagttctgtgatgtatttctgtgatgtatttctgcctttcaatcatacgagccagtatcaaatccacatgctggctagcttccaaaagagaaggagatggctctttaaagactccttcataaaaataaaaagtctgttctctttttaaaattaaaaattgatttataacaagttggaaagggttgcttttgtc

SEQ ID NO: 87908 - DNA, 599 bp, Chicken  19866894390281_1
  misc_feature (1)..(23): n is any nucleotide
nnnnnnnnnnnnnnnnnnnnnnntgatttatacagaagctgagttggcaaagagctcagctcagaggtgggtggaaggggaaccaaaaaagcaaatctgtgatgcacgggcgtactcccccccccggggtggtgccagccagcgcagcagccaaggccggtggagcagctctgcaggttccctgcgtgctcctatcgccatgcaaacacacacccacggtctggggttaatttaattttaaaatgacattagagataacacaggccagctcattggcactaggcaaaacacgtggatccytgtgtaagcacagcacggtttctgctcagggagargagagtgggccacaaccgaggggttatgtcgtatattcagtctgagctggggtcagttctcagatgagaaggacacaattcaggtaggaggagcgagaggattaaagacataaaaagaaagaaagaaaaagagccttatgctgcaattgaggcaccgtagtgtgttcttctggcaaaaatcgtaatatcaggtccattaagccatattacaatatataatagttctttctacctatatttttagttcatggaagacaatgtaca

SEQ ID NO: 87909 - DNA, 600 bp, Chicken  19866894390281_2
aagctgagttggcaaagagctcagctcagaggtgggtggaaggggaaccaaaaaagcaaatctgtgatgcacgggcgtactcccccccccggggtggtgccagccagcgcagcagccaaggccggtggagcagctctgcaggttccctgcgtgctcctatcgccatgcaaacacacacccacggtctggggttaatttaattttaaaatgacattagagataacacaggccagctcattggcactaggcaaaacacgtggatccytgtgtaagcacagcacggtttctgctcagggagargagagtgggccacaaccgaggggttatgtcgtatattcagtctgagctggggtcagttctcagatgagaaggacacaattcaggtaggaggagcgagaggattaaagacataaaaagaaagaaagaaaaagagccttatgctgcaattgaggcaccgtagtgtgttcttctggcaaaaatcgtaatatcaggtccattaagccatattacaatatataatagttctttctacctatatttttagttcatggaagacaatgtacagaaagaaaccaaaaggagccctagttctgtatttga

SEQ ID NO: 87910 - DNA, 504 bp, Chicken  19866894390281_3
atgtcgtatattcagtctgagctggggtcagttctcagatgagaaggacacaattcaggtaggaggagcgagaggattaaagacataaaaagaaagaaagaaaaagagccttatgctgcaattgaggcaccgtagtgtgttcttctggcaaaaatcgtaatatcaggtccattaagccatattacaatatataatagttctttctacctatatttttagttcatggaagacaatgtacagaaagaaaccaaaaggagccctagttctgtatttgaatgtttgaggactgatcatggtacraggacagcaagagcacgggcaggacacatgggattgttccttcccatcctaatcaagtggtgtgtttggactcagtgatcttttgggtcttttaaccgaactgtcctagttctgattctcatatcttgtctccagcattaggtaccacacagctgttctgaaatacttcaactgtggtctgttctgtccttttctttccagttt

SEQ ID NO: 87911 - DNA, 600 bp, Chicken  19866894390282_1
tcttttaaaattcaggtgttaaattaagttttagcttgcttcatccaagcaagctttccctcgctctctcttctatctagtttagccaggtgtacatgtccttgggatgagcaagtcatatttaacaaaaacgtagttaatgtgtgtctaagccatgttttcttggaagacagcaaaagatataccaagccctggttaacccgttatcactgtgagaagttttcaccctgtttccttcttctgtcacctgaattatcttactctatttctggtccttttgttgttctccccttgaagaaygcttttagtgcctgttgtctctttcccattaaggcacttgyataccctaatgaactcaccattcagcctttctcttcaaatatattaaacaagactttacacmgcatgtggtattttccttattccatagaatcacagaatagctaagataagaagacacctggagatctcccagtccaaccccagcwcaaagtatggtaacatagagcaagctgcttaggaccatgtctagtcaggttttgaatagaactaaaataacaacaacaataatataaaagaataatagatgaatactttcca

SEQ ID NO: 87912 - DNA, 600 bp, Chicken  19866894390282_2
catccaagcaagctttccctcgctctctcttctatctagtttagccaggtgtacatgtccttgggatgagcaagtcatatttaacaaaaacgtagttaatgtgtgtctaagccatgttttcttggaagacagcaaaagatataccaagccctggttaacccgttatcactgtgagaagttttcaccctgtttccttcttctgtcacctgaattatcttactctatttctggtccttttgttgttctccccttgaagaaygcttttagtgcctgttgtctctttcccattaaggcacttgyataccctaatgaactcaccattcagcctttctcttcaaatatattaaacaagactttacacmgcatgtggtattttccttattccatagaatcacagaatagctaagataagaagacacctggagatctcccagtccaaccccagcwcaaagtatggtaacatagagcaagctgcttaggaccatgtctagtcaggttttgaatagaactaaaataacaacaacaataatataaaagaataatagatgaatactttccatgttagggtttggtttggttcaattagatttggtttggttt

SEQ ID NO: 87913 - DNA, 600 bp, Chicken  19866894390282_3
gggatgagcaagtcatatttaacaaaaacgtagttaatgtgtgtctaagccatgttttcttggaagacagcaaaagatataccaagccctggttaacccgttatcactgtgagaagttttcaccctgtttccttcttctgtcacctgaattatcttactctatttctggtccttttgttgttctccccttgaagaaygcttttagtgcctgttgtctctttcccattaaggcacttgyataccctaatgaactcaccattcagcctttctcttcaaatatattaaacaagactttacacmgcatgtggtattttccttattccatagaatcacagaatagctaagataagaagacacctggagatctcccagtccaaccccagcwcaaagtatggtaacatagagcaagctgcttaggaccatgtctagtcaggttttgaatagaactaaaataacaacaacaataatataaaagaataatagatgaatactttccatgttagggtttggtttggttcaattagatttggtttggtttgtttctccagcaatttaaaaatggctctgcaagataaccccttgtgcttcttttgtgagcac

SEQ ID NO: 87914 - DNA, 600 bp, Chicken  19866894390282_4
gccctggttaacccgttatcactgtgagaagttttcaccctgtttccttcttctgtcacctgaattatcttactctatttctggtccttttgttgttctccccttgaagaaygcttttagtgcctgttgtctctttcccattaaggcacttgyataccctaatgaactcaccattcagcctttctcttcaaatatattaaacaagactttacacmgcatgtggtattttccttattccatagaatcacagaatagctaagataagaagacacctggagatctcccagtccaaccccagcwcaaagtatggtaacatagagcaagctgcttaggaccatgtctagtcaggttttgaatagaactaaaataacaacaacaataatataaaagaataatagatgaatactttccatgttagggtttggtttggttcaattagatttggtttggtttgtttctccagcaatttaaaaatggctctgcaagataaccccttgtgcttcttttgtgagcacaataatttatggcaaggattgtttctgtttattgttagtcagacaagaagaaattagagcattacaaaaatccagcagcatcatg

SEQ ID NO: 87915 - DNA, 600 bp, Chicken  19866894390288_1
gcagagctcgacggccccatactctgcagggaggaaatgccagtgggaaggggaatggcgcagccctacagtgtttaccaccgggcagctgctgtttgctctcctcgctgtcccaggctgatatttttgttggcaccgggagagcatcacgcttttccctgcaaggtggaaaacaagacagccgcaagcccccttgatggagccagcagccagcagggccacgcgtgcctggccccacgtgcttcaacaacacggccccgcacaccaccattgttcccgtgttgtgacaatggtggctgycgtgaccccgcgccgccgggaccttcatcagcacacgccaacaacaacagccagagctcacctgcaccgcagcagcggggatggggcaggcgtgggatcccctgaaggcgggcgggcagccctaagacaaataaaagtttgcagctgataagcgtgctggctggcccggaggagcccttttggacagatagcagcagggtagacatgcatggcctttctcacacctctgtgttgcctcctgaataaacagctccctccggtccccttctgggaatggcgcttcgctgtcccaaagcccgg

SEQ ID NO: 87916 - DNA, 594 bp, Chicken  19866894390290_1
tccactgccatacctgctcagctgctgccaggcctacgtgggatgccacccccaaccaccgcaaggactggctagaccctctggggctgaggcagtgcttcttgcacgcagccctggatcttggcagaatcaagagctttatttttcccagctaggagcagaggacagcacctttccccttccctcctagtgtggcacaactcacttccttgcacttctgggacctctgatccctggggcagcgcaggccttgtgaccttgcgttacttccaaaccagcattttgtgtcccccacccacycagggcaggggtgttcttcactttgggtgctttgagacagaatagggcagggttggctagctggagagtagaagtgggggtgttgtttggttgggatactaggctaaaggggagtgtcgtaccacttccagcagcagatgagtggcctttggtgatgctgagcagaggtggtaagtggcatgtatgatgctggggcagtgtttgcaggggttggggcagtgaccccagtgagggcttagaatgcttttgtagtagatggagtgcctgggagaggaggtagaagtgaggagtgag

SEQ ID NO: 87917 - DNA, 599 bp, Chicken  19866894390292_1
  misc_feature (1)..(105): n is any nucleotide
nnnnnnnnnnnnnnnnnnnnnnnnnnnnnnnnnnnnnnnnnnnnnnnnnnnnnnnnnnnnnnnnnnnnnnnnnnnnnnnnnnnnnnnnnnnnnnnnnnnnnnnnnaccagctagcagaagggccagagaagatatgtgctcacatcctgcaggtgtgcagccagaaagctctggagaatctgcaagaggctgatgggcagaaagagggtgagggaaaaaaagctggtgaagcaaacctgtacccgtggtttctggtgctatgatcgggtggtctgggataactgtgggaggagaagagtwggggctagtagagatgctggcatggaggaatgcaagtgctgtgaagggggtctgtggaccatggaggtgggttatatagttactgaggttgggcagtaactgatatgtgtagattccaaatcaatgctgaactgcaataatttttcctccactagagtcaggggcttctcccagcagagtctctgatggtgctagcagtcttcctacgttcctgctgctgcacctggtggcccttgtgggacaggtggcactgcggcaggtagcacatttggaagtgtctgtgagcgcrgagctgcgca

SEQ ID NO: 87918 - DNA, 600 bp, Chicken  19866894390292_2
ggagaagagtwggggctagtagagatgctggcatggaggaatgcaagtgctgtgaagggggtctgtggaccatggaggtgggttatatagttactgaggttgggcagtaactgatatgtgtagattccaaatcaatgctgaactgcaataatttttcctccactagagtcaggggcttctcccagcagagtctctgatggtgctagcagtcttcctacgttcctgctgctgcacctggtggcccttgtgggacaggtggcactgcggcaggtagcacatttggaagtgtctgtgagcgcrgagctgcgcaggcgccgcatcctcagggaggaggagaagaccaagaagcataaagagcgttctgacagcagcacaataaagaagagacctcgggtgagatttgtttgttttcctatgagctcttctaatgtcccagctactgccacagcaagcttctagtggacatgaatttgtcaaggattctgttaagtgaaactccagccattctcgggtttggaacaggcagggggggaggaagcaaagggtaatagcctgactaggtttatcttcttcgttagtttcctctctacccatcaccta

SEQ ID NO: 87919 - DNA, 600 bp, Chicken  19866894390298_1
agaatttgaaaaaaaaaaaaaaaaaaaaaaagccttgttataaataaaaaagcattttcctacaactgttgattctcttctgatttgtttcctagaaacagaacttcaacggaatctttacagatgactcttgagtcatcttgaggcttgaggtccttggggttttttttgcttctgattgacatgctaacataaacaaaccaagaagttcccttctacacttcaaaagttcccatggaaattacttttacaaggcccattcaaacaaatgttcagacttttaaaataataaacaataayaagtagtttagggattaactatctgcacttacaatcccatttctttttttttttttcctgaggaataattactcttcattttaaaaatgtgattttaaaattataatcactgccctatctatcaatcttctctaatcactcatccacagacacattagtacgtactgcatctccttcctcacagcacagctctcacaacaggggcagacccatgctatacattgaaattctcttctggtgggaacagcagctgtagcctatcaacagaagtactgctggaagcagagattcacctgcaga

SEQ ID NO: 87920 - DNA, 600 bp, Chicken  19866894390300_1
aaaattttaaaagactgaacccttaagttcatgggcaaatctacacagtttccctgcttcacgcatcttcttttaaatgtggatctaatgtaaaagccagcatgtaaaagccattaaaatctctgtggcttggagacgtatttctctacaaagtgctcagcagccaggctcacatctccatgcacgcccagatgtggaagctagccagcatttccctaatgctgtgaagatgatttcatggtattctcacaaggagatctagcaattcatttgaattagtgtcatggctttttatccccrctgtgattcaggcttgacatcttggcactgctgtcccattggtttcacctgaaggctgcagcaggtgaggtgtttggccttctcagttgctggtctctgcaggtggtgcttcccagggaagagctgactaaatgcagcctgggtgttaaactggaggtgtgaatcaccaaagctcatctgtgacagtccatgctctcccagtctctgcttctgacagtgtctcccataccccagtaggttgcttttgaatagcatcaggagatgcttaagtacaatttcatatttggactgttttacata

SEQ ID NO: 87921 - DNA, 600 bp, Chicken  19866894390302_1
cttgttagtctgaaacaatgcaacaattatacctataaaatttcccaataacaatagctgaagaaatactgagaaaaaactccacaacctaaagatttttccttttctttgtgactgggtgcatttgccagaccacattttcctctgaggattaactttgaactgccaattaaaagttattgctaaatcctgttacagcagaaagcctttaggttctcactgttgagacttggccattgtttctctcacagagtagattaagctgctgggacttcagcaaattacatttgcagtacatcrttaatagtgccatgaagtttgcttatttgatacagtgacgactcaggttctttttcaagagctttacaaaaccacgccagcctgccatacttatcaaagaaaactagtgaagtctgcgtgccaatggttggatgatctttgctgtgattttggggcaaacaggacagaacactgcaaaaaccccactgttttctgacaggcaccagctgttatggttagggattgcacgctgtgtgtgtctctactctgagtggggacaaatggagcattatttcagaaaccactccgtggtaacggttg

SEQ ID NO: 87922 - DNA, 600 bp, Chicken  19866894390303_1
gaattgaaagagttagcagactggaaaatggagggcagctatctcacccaaaaaaaggaaggagaaatattgtgtgccttcatattgccacacattccatttgttttctgtttgtgcgttttttttctttctaattttcctaatgaacctacaccagctgtctgaataccacagaggcccaaagaaaattgcagtttccctactatgtactgaccctgatactgtgttttaagtctagtcagtgagggaaatggtaattgaaatcaccataaattaattgctctgttttcaggcagtacrsagaaaaattagtactaggtataacagaatgcagaacaactcatgaaaaaaaggtgcaggtatgcttactaagtgacccttatctttctcttttatcaggagaattattcattagcaaagaaaatttgcattcatacatcagtgcccatagctatattgtgcttcaccagccatcttatgtatagaccctgattgcacagatatgtacacatatgtttaaatttactcccagaagtggtctcaagtaaatctaatggggtcattgcagaagcatgcttttttgcagaatagtttacaata

SEQ ID NO: 87923 - DNA, 600 bp, Chicken  19866894390303_2
aattgaaagagttagcagactggaaaatggagggcagctatctcacccaaaaaaaggaaggagaaatattgtgtgccttcatattgccacacattccatttgttttctgtttgtgcgttttttttctttctaattttcctaatgaacctacaccagctgtctgaataccacagaggcccaaagaaaattgcagtttccctactatgtactgaccctgatactgtgttttaagtctagtcagtgagggaaatggtaattgaaatcaccataaattaattgctctgttttcaggcagtacrsagaaaaattagtactaggtataacagaatgcagaacaactcatgaaaaaaaggtgcaggtatgcttactaagtgacccttatctttctcttttatcaggagaattattcattagcaaagaaaatttgcattcatacatcagtgcccatagctatattgtgcttcaccagccatcttatgtatagaccctgattgcacagatatgtacacatatgtttaaatttactcccagaagtggtctcaagtaaatctaatggggtcattgcagaagcatgcttttttgcagaatagtttacaataa

SEQ ID NO: 87924 - DNA, 600 bp, Chicken  19866894390303_3
ctaagtgacccttatctttctcttttatcaggagaattattcattagcaaagaaaatttgcattcatacatcagtgcccatagctatattgtgcttcaccagccatcttatgtatagaccctgattgcacagatatgtacacatatgtttaaatttactcccagaagtggtctcaagtaaatctaatggggtcattgcagaagcatgcttttttgcagaatagtttacaataatgtatcagagctttacatactgggctcacatttgtaatcagacatttttattcactaaggcagagarggcagattcaacttacgtcatattacctagaaaagccccgatcacccctaaaarwtacccacctaaggaaatcaggtgatttctattgctatcctctgtatgaaacataaaaaacttatcctctacagatttttttgtatgttctgacccaccacgctaacttcaggatatgtacttgccatctgcggtctctaaccatcttgcctcatgccctcatggaagaaggttgtggctgtttcatgctttcaccatcttctgcctggcagacactgtgatcttggagatctgccctgtgagttt

SEQ ID NO: 87925 - DNA, 600 bp, Chicken  19866894390303_4
aatttgcattcatacatcagtgcccatagctatattgtgcttcaccagccatcttatgtatagaccctgattgcacagatatgtacacatatgtttaaatttactcccagaagtggtctcaagtaaatctaatggggtcattgcagaagcatgcttttttgcagaatagtttacaataatgtatcagagctttacatactgggctcacatttgtaatcagacatttttattcactaaggcagagarggcagattcaacttacgtcatattacctagaaaagccccgatcacccctaaaarwtacccacctaaggaaatcaggtgatttctattgctatcctctgtatgaaacataaaaaacttatcctctacagatttttttgtatgttctgacccaccacgctaacttcaggatatgtacttgccatctgcggtctctaaccatcttgcctcatgccctcatggaagaaggttgtggctgtttcatgctttcaccatcttctgcctggcagacactgtgatcttggagatctgccctgtgagtttctccaataaaagccagtagaaatgcaagattaattcagacaaagaagtaagcta

SEQ ID NO: 87926 - DNA, 600 bp, Chicken  19866894390303_5
atttgcattcatacatcagtgcccatagctatattgtgcttcaccagccatcttatgtatagaccctgattgcacagatatgtacacatatgtttaaatttactcccagaagtggtctcaagtaaatctaatggggtcattgcagaagcatgcttttttgcagaatagtttacaataatgtatcagagctttacatactgggctcacatttgtaatcagacatttttattcactaaggcagagarggcagattcaacttacgtcatattacctagaaaagccccgatcacccctaaaarwtacccacctaaggaaatcaggtgatttctattgctatcctctgtatgaaacataaaaaacttatcctctacagatttttttgtatgttctgacccaccacgctaacttcaggatatgtacttgccatctgcggtctctaaccatcttgcctcatgccctcatggaagaaggttgtggctgtttcatgctttcaccatcttctgcctggcagacactgtgatcttggagatctgccctgtgagtttctccaataaaagccagtagaaatgcaagattaattcagacaaagaagtaagctac

SEQ ID NO: 87927 - DNA, 600 bp, Chicken  19866894390314_1
agaaccgcagggctacaggtaatgggatgttacataactcacccagcatgctccgttcttgtcatcttttcattctaatgctaattccagcacagacattcacctgactcattcccagatagaacctagctgctgtgtcacccaggagaagtttggcccctgtttgtttttaccacctccaaactgaaaatggcacagacgaacggcagagcacgatgcgtggggtatacgtttgtgcgagtggatgtaacaggaaccaaaactgactttaaatgtatgacgtgctatgatgtaagcctmatcrtcatcgatttttagagagctaaaaagatattgcacaagaactctctaaaacaagaagctctcagaaaattaatccacaccaacagccgattatgctgaactacaaagcgttcacacatcgtgcatcgcagaaattaggaaactcaaagcattaggggaaagccagatcagaatgaacagtgaagtacaaataaagcatttgctatgtcatacaaactctcaaatcgatgggtttttgttacaaataggtcactgcaataagggcaggcaagtatggcgacagcactacatgcatta

SEQ ID NO: 87928 - DNA, 600 bp, Chicken  19866894390314_2
ccgcagggctacaggtaatgggatgttacataactcacccagcatgctccgttcttgtcatcttttcattctaatgctaattccagcacagacattcacctgactcattcccagatagaacctagctgctgtgtcacccaggagaagtttggcccctgtttgtttttaccacctccaaactgaaaatggcacagacgaacggcagagcacgatgcgtggggtatacgtttgtgcgagtggatgtaacaggaaccaaaactgactttaaatgtatgacgtgctatgatgtaagcctmatcrtcatcgatttttagagagctaaaaagatattgcacaagaactctctaaaacaagaagctctcagaaaattaatccacaccaacagccgattatgctgaactacaaagcgttcacacatcgtgcatcgcagaaattaggaaactcaaagcattaggggaaagccagatcagaatgaacagtgaagtacaaataaagcatttgctatgtcatacaaactctcaaatcgatgggtttttgttacaaataggtcactgcaataagggcaggcaagtatggcgacagcactacatgcattacgta

SEQ ID NO: 87929 - DNA, 600 bp, Chicken  19866894390314_3
gaaattaggaaactcaaagcattaggggaaagccagatcagaatgaacagtgaagtacaaataaagcatttgctatgtcatacaaactctcaaatcgatgggtttttgttacaaataggtcactgcaataagggcaggcaagtatggcgacagcactacatgcattacgtagcaatacctggactttgactttacgaaacgatgacaacatgatggaggaatgcagagtctaaaagggagggggaaatcgagataacattcagctcactatgagtgcaaggacacggcttcgttctctcrtttcttttgctaaaacacaaactccatcacagcacacaccccacgcttcccctttggttctttgccacacacagcagttgggtgttattgttccacaagcgactgcaggcaacagaaccccccccatgcaaacaggttacgatcaccagcaggaagattgaacgtggtcagtgctaacccttccagttaactgaaacaaaccaagccctaccataatctgaaggtcaaaacagacactgaaggaagttatctggacttggcaaatgacgcttctcgcgacacagcaatcaaatggggtgg

SEQ ID NO: 87930 - DNA, 599 bp, Chicken  19866894390324_1
  misc_feature (1)..(90): n is any nucleotide
nnnnnnnnnnnnnnnnnnnnnnnnnnnnnnnnnnnnnnnnnnnnnnnnnnnnnnnnnnnnnnnnnnnnnnnnnnnnnnnnnnnnnnnnnnaaaaaatgaagaagatggactctttttgacaaagttaagaaatccaaagatagcattattccatgttttacttaactgctatattttttccttagtcacaaatatataattccagatagactgatatacttgcttgccaatttacatggtcttccacagaaaaggccttgctgacatccgttgggaacgctggcctggtatggaataacrctgggtttgctctctctccacagaraacagctgccttcagagaattttatgctataatgccatattgaaaactgtttgctttccagcattgttctgtgctgcatccctgacaggacgcggatgtgcccttatagcgcagtgcagcactgtgataactctgtgcaagggagggagattgaaggaagacgttagaaataagaaacagcagccgaagtctttttaaggagaatgctttcttactgacacctttggtacaacacctttctaaattgcattttttgcacatgtttgcaggaagg

SEQ ID NO: 87931 - DNA, 599 bp, Chicken  19866894390324_2
  misc_feature (1)..(65): n is any nucleotide
nnnnnnnnnnnnnnnnnnnnnnnnnnnnnnnnnnnnnnnnnnnnnnnnnnnnnnnnnnnnnnnnnaaaaaatgaagaagatggactctttttgacaaagttaagaaatccaaagatagcattattccatgttttacttaactgctatattttttccttagtcacaaatatataattccagatagactgatatacttgcttgccaatttacatggtcttccacagaaaaggccttgctgacatccgttgggaacgctggcctggtatggaataacrctgggtttgctctctctccacagaraacagctgccttcagagaattttatgctataatgccatattgaaaactgtttgctttccagcattgttctgtgctgcatccctgacaggacgcggatgtgcccttatagcgcagtgcagcactgtgataactctgtgcaagggagggagattgaaggaagacgttagaaataagaaacagcagccgaagtctttttaaggagaatgctttcttactgacacctttggtacaacacctttctaaattgcattttttgcacatgtttgcaggaagggcttgagaaaaagcattatttagat

SEQ ID NO: 87932 - DNA, 600 bp, Chicken  19866894390339_1
aaacatattgtctttttcttgtatgatttcaaaatgctgggatagtatcaacaaaggaaaacaaaagctctcatgatttattctctgcttttagccattaagtggactcatccattaaaaaataagtaaattaacaagctgaattaacttgctaggttaaatttatgagatggaacaaagtggagttgacatgtgcctctagggaggcattcagtttagaaagcaaatgctggcatagcatctttaaagctgcttgagatgtctgtttctccttttagtaatgtgaaatttatttagacrtataaaaagaccctgaaccagtcagtggccatagaggcatctatgcaatatacagtagaaagtaccctaaacatggcactaacygayatgcataataggggatagggaagaatttgcataccaatttcatttcagaaaggaacagcaaagcttccaactgagctgatgcttcacaacaggccataaagttagatactgcttatagtcacacttcttacagctcctataaaaataaaaacctgcggaagagaaactcgtttgctttggaaagcaaataaagaatgggttaaaggataggct

SEQ ID NO: 87933 - DNA, 600 bp, Chicken  19866894390339_2
ctgcttttagccattaagtggactcatccattaaaaaataagtaaattaacaagctgaattaacttgctaggttaaatttatgagatggaacaaagtggagttgacatgtgcctctagggaggcattcagtttagaaagcaaatgctggcatagcatctttaaagctgcttgagatgtctgtttctccttttagtaatgtgaaatttatttagacrtataaaaagaccctgaaccagtcagtggccatagaggcatctatgcaatatacagtagaaagtaccctaaacatggcactaacygayatgcataataggggatagggaagaatttgcataccaatttcatttcagaaaggaacagcaaagcttccaactgagctgatgcttcacaacaggccataaagttagatactgcttatagtcacacttcttacagctcctataaaaataaaaacctgcggaagagaaactcgtttgctttggaaagcaaataaagaatgggttaaaggataggctaaagtcaaggtccctctccagcttttattgcaaggctcygagaaatacraaacattgatggtactcctgcaatttttgtacatc

SEQ ID NO: 87934 - DNA, 600 bp, Chicken  19866894390339_3
cttttagccattaagtggactcatccattaaaaaataagtaaattaacaagctgaattaacttgctaggttaaatttatgagatggaacaaagtggagttgacatgtgcctctagggaggcattcagtttagaaagcaaatgctggcatagcatctttaaagctgcttgagatgtctgtttctccttttagtaatgtgaaatttatttagacrtataaaaagaccctgaaccagtcagtggccatagaggcatctatgcaatatacagtagaaagtaccctaaacatggcactaacygayatgcataataggggatagggaagaatttgcataccaatttcatttcagaaaggaacagcaaagcttccaactgagctgatgcttcacaacaggccataaagttagatactgcttatagtcacacttcttacagctcctataaaaataaaaacctgcggaagagaaactcgtttgctttggaaagcaaataaagaatgggttaaaggataggctaaagtcaaggtccctctccagcttttattgcaaggctcygagaaatacraaacattgatggtactcctgcaatttttgtacatcagc

SEQ ID NO: 87935 - DNA, 600 bp, Chicken  19866894390339_4
tctatgcaatatacagtagaaagtaccctaaacatggcactaacygayatgcataataggggatagggaagaatttgcataccaatttcatttcagaaaggaacagcaaagcttccaactgagctgatgcttcacaacaggccataaagttagatactgcttatagtcacacttcttacagctcctataaaaataaaaacctgcggaagagaaactcgtttgctttggaaagcaaataaagaatgggttaaaggataggctaaagtcaaggtccctctccagcttttattgcaaggctcygagaaatacraaacattgatggtactcctgcaatttttgtacatcagcagcattaagatgaagtgctatcattgcagtgcacgtaggttggtccctggatggtgccaagaggaatatttggctatctcatgatcgtgcatgacttctgaagagagaaactgcagcaattatacaagggagtagggaaatgctaacctaaaccttgcatgagtccgctgagagttcagtgtgtgccccttacactccaggagaggaggtatgtgtgaatgacgatccccacttctaaaaaagcttccatta

SEQ ID NO: 87936 - DNA, 600 bp, Chicken  19866894390339_5
atacagtagaaagtaccctaaacatggcactaacygayatgcataataggggatagggaagaatttgcataccaatttcatttcagaaaggaacagcaaagcttccaactgagctgatgcttcacaacaggccataaagttagatactgcttatagtcacacttcttacagctcctataaaaataaaaacctgcggaagagaaactcgtttgctttggaaagcaaataaagaatgggttaaaggataggctaaagtcaaggtccctctccagcttttattgcaaggctcygagaaatacraaacattgatggtactcctgcaatttttgtacatcagcagcattaagatgaagtgctatcattgcagtgcacgtaggttggtccctggatggtgccaagaggaatatttggctatctcatgatcgtgcatgacttctgaagagagaaactgcagcaattatacaagggagtagggaaatgctaacctaaaccttgcatgagtccgctgagagttcagtgtgtgccccttacactccaggagaggaggtatgtgtgaatgacgatccccacttctaaaaaagcttccattagaaatcacaa

SEQ ID NO: 87937 - DNA, 589 bp, Chicken  19866894390346_1
tggcagccccgttctactgatgctgtaataggattagcgttgtagctgccactgcccccagggtaagcataataaactcttcccctctggggttgttcctgggtatggtcattttttggcactttatgaacctgaagactgtgcaaatcgattcccagggagtctgacctccctgttgggaatgacaaagagctgacccagaggcttagacatagctgtcccgggtggctgcctggccttaatcctgctgatcaccttgtgatcctgacagctccctctcccacagggctgccaccactyccaaggcaccaggagtcagggaggtgcccacataggccatgggcaccaggtaacaccacaacagggctccctggggctgggatgcccagtgggaacaggaggagatggcccaaaagctctgctcagcctaagtttctcctccaggcacttggagcccacgccagatgtattttcttccccgagcgccaaaggggagaggaataatgagcgtgatggctctgactcacccatctgctcagctgagataggtactgcctcattaagccatgataagagcaaagaagcaaag

SEQ ID NO: 87938 - DNA, 599 bp, Chicken  19866894390349_1
  misc_feature (1)..(139): n is any nucleotide
nnnnnnnnnnnnnnnnnnnnnnnnnnnnnnnnnnnnnnnnnnnnnnnnnnnnnnnnnnnnnnnnnnnnnnnnnnnnnnnnnnnnnnnnnnnnnnnnnnnnnnnnnnnnnnnnnnnnnnnnnnnnnnnnnnnnnnnnnnntcgctcggccttgccgggtgctccgccgttgtcacgtcgctgctgtaaggcgctgtgaggtctgccgtctcacagcactgcctgctgggacgttgctgcattctcagctatctctagcaatttcccacctcgtgtgcggcccgtgattgctgggcaggccygtggagataaggcaggtcaaagatcaagccaaaaactcccatccgtaggcacttgtctccagctgcttccagatccaattttgtcagagttgggctaggaaggaatatgacttttgcccatcaatcttatcgctgtaggacactgaacttactgacactcttattgcatattggcaattttttttcacataacagcatgcaaagagaagcatgcctggcggctgctggctccttgcacaggcccaagcgtacctccagctccctgccagcactgtgcatagctgggctcccagcaatga

SEQ ID NO: 87939 - DNA, 600 bp, Chicken  19866894390351_1
attatatcacaaaagtgaaagttgctttccaggatacttttgtcctttatgccacattgcactgagcccatcaaaatataaaatcagctgacaagacacagatcatgagagttcctagtttgtaaacattcacattattaggcaaagggaaaggacaaactcagcagcctgagaggactagaccatgagcttcaaagatctcatgtgtttttgtttgggatgggaaagctagtcatttaagcagatgtggacccagaatcacagaatcgcaggggttggaagggacctcaagagaccgcygagtccaaccccctgctaaagcaggtaccctacagtaggtcacacmggtagrcatccagagaggtattgaatatctccatagaaggagacttcacagcgtctctgggcaacctgttccagtgctcaatcatccttacataaaacagttcttctgcatgtcagtatggaacttcctacattcaagttttaggccaatagtctctgtcttattgctacacaacagtaagaagaacctggtatcccacctccctttagatatttataaacatttgtcagatcccctctcagtcttcttttccc

SEQ ID NO: 87940 - DNA, 600 bp, Chicken  19866894390351_2
ttatgccacattgcactgagcccatcaaaatataaaatcagctgacaagacacagatcatgagagttcctagtttgtaaacattcacattattaggcaaagggaaaggacaaactcagcagcctgagaggactagaccatgagcttcaaagatctcatgtgtttttgtttgggatgggaaagctagtcatttaagcagatgtggacccagaatcacagaatcgcaggggttggaagggacctcaagagaccgcygagtccaaccccctgctaaagcaggtaccctacagtaggtcacacmggtagrcatccagagaggtattgaatatctccatagaaggagacttcacagcgtctctgggcaacctgttccagtgctcaatcatccttacataaaacagttcttctgcatgtcagtatggaacttcctacattcaagttttaggccaatagtctctgtcttattgctacacaacagtaagaagaacctggtatcccacctccctttagatatttataaacatttgtcagatcccctctcagtcttcttttccccaggctgaacagatacaggttactcagtctttcctcatatgagaga

SEQ ID NO: 87941 - DNA, 600 bp, Chicken  19866894390351_3
cacattgcactgagcccatcaaaatataaaatcagctgacaagacacagatcatgagagttcctagtttgtaaacattcacattattaggcaaagggaaaggacaaactcagcagcctgagaggactagaccatgagcttcaaagatctcatgtgtttttgtttgggatgggaaagctagtcatttaagcagatgtggacccagaatcacagaatcgcaggggttggaagggacctcaagagaccgcygagtccaaccccctgctaaagcaggtaccctacagtaggtcacacmggtagrcatccagagaggtattgaatatctccatagaaggagacttcacagcgtctctgggcaacctgttccagtgctcaatcatccttacataaaacagttcttctgcatgtcagtatggaacttcctacattcaagttttaggccaatagtctctgtcttattgctacacaacagtaagaagaacctggtatcccacctccctttagatatttataaacatttgtcagatcccctctcagtcttcttttccccaggctgaacagatacaggttactcagtctttcctcatatgagagatgctcc

SEQ ID NO: 87942 - DNA, 600 bp, Chicken  19866894390352_1
agggaccatgctgtgtgctggagtttatttttttctcacaatgaaaaacaatactgagtttaaaacatagatcaactagtactttaagactttgcattgaaggagcttgctctaactctgcagttcacttttatatccaggattttcttttcccctgaaaaatgtaaagcaagacatgctaggcagaagagaaagcacaagcatgattctctatagccatttgctactctgtatgatggagctgcactgggtaagtacactctacctctgccaaaagcccagtcagttatttccacagcrttgctggagacatcgaagtgtcattccaggccttgtcaagtgttatacctcatttagaaacatcttcatcctctattgcatgttatggctcttgccataaagacctgaagttgattggaagttagtgagagttgacaatatgaagggattctgattggagagctttgtcttccattatgcaaacgaatcttgtattaatatcgagtcctttcttggttctgtgttttaaaggcagtacttacagcctttcagactttaatttcaggtttttagtattcctaactttctttgtcctctctt

SEQ ID NO: 87943 - DNA, 600 bp, Chicken  19866894390359_1
tcctgtggagcgtcggtgtctcagacacggtctccctgcttgggtagatgctgaagagccctctccagggaagcgaagcacacagcaaagccccccagggtcagaaggagatcatccagcagagaccagaccccaccccgtgccgggtggaggatttaatggcacgctattgggacaagcagaggcacaaggacggctccagctctgcctgcagatgcccacgtgccctgtgggagctcacctgaccgagcccggagcacgccctggtggggagaacatctctttgtcctcattcagatkaccaacttgctaagcacactccctccttgcaaagtgaaagggaaaacatgggagaaactagcattattagaagaaaccagaaagttgtctttgatcactggagctgttggggtgtgctcctgctgccccagtattccctcaagacagatggaggcacgtgcagaagagcatcaggcagttacgctccttgccctttaagccttgacctgaaatgtaatacttcaggaatatcatggcttaaacaattttagtcagtgagtcagttcaggattagcagcctacagagggagggtagtcact

SEQ ID NO: 87944 - DNA, 600 bp, Chicken  19866894390375_1
ttaactatatccttccttgaatagcaggccctcaggagaagataaacatattctctctgttgaagagccttcgcgctttgaaagattgactgggagcacaggaatatttatttaaaatttagttgggtttatccagagcaaaatgttttattaggagcatgtacatcagtctaaacacactttcagaatcctcatctctcttcccttgacatctcttcctggtctctagttactatataacacatttctcactgtgcattgcttttatgggcagatggtctatcttttatgactggcaayttggttataaaacagtaagttcattataatcataaaaaaaatgtcaaagaaataaagaaaaatattaagggaaataggtatgttgtggcacaatgagagcgagcagtgctttgtaaattattaacacatttttaaaagtttagctacagaatctattccagccagaggaagcaattttctatgttgtgaatattaaaggtcaaggcttgtgtgtgtttttcctaaaattcagaacatcaacaattatattttatttacatgaatggattttttttcccagcgattctaattcttccttag

SEQ ID NO: 87945 - DNA, 600 bp, Chicken  19866894390377_1
cattcaaaaaaaggattcccaaaactgtatataaaagtttcctgtcttagagaactatgagtagaattatcttttctctcctccttttaaagaatctagaacatagccttacttcaaacaaataaaaaaaaaatagtgcatggtattcagttatcatagtgataatttccacagtaggtattcatagatggctagcaagaaagctcagtagaccgatgaattcttacataactgtttttcagggtctgtcatcttacacaaatgggattacaaaatcatttgtttgttttaaaaaaatcrgattgcaaaggaactcgttccattatccttccaaaatcagcattttgaagtaatgcttaggtctagatcttccttttgtcttgtgaactgatcacatgatatataaccaaaatctagcatgtaaatgcttgttatgttcaactgaaaacaacagaggaacatgttctggaggagcaacccttgctgcatgttacycgtgtgtttttttttttttttttaagccagctgattctgctctctatggtgtgttcagataaaattgtgttttatcattgcagaaagccacacaccttctgtgta

SEQ ID NO: 87946 - DNA, 600 bp, Chicken  19866894390377_2
caagaaagctcagtagaccgatgaattcttacataactgtttttcagggtctgtcatcttacacaaatgggattacaaaatcatttgtttgttttaaaaaaatcrgattgcaaaggaactcgttccattatccttccaaaatcagcattttgaagtaatgcttaggtctagatcttccttttgtcttgtgaactgatcacatgatatataaccaaaatctagcatgtaaatgcttgttatgttcaactgaaaacaacagaggaacatgttctggaggagcaacccttgctgcatgttacycgtgtgtttttttttttttttttaagccagctgattctgctctctatggtgtgttcagataaaattgtgttttatcattgcagaaagccacacaccttctgtgtatggcagaaattcaatctcaatggatcccacaacaattccatcaagatactaaacaagaccaagaaaaggcatggtgttgtcaagcactacagatgaaagatctgggagcaaagaactagacatccactatgtgtcacaggcttttcaacatatttccattttttcctgggtttggttgaatcraagagcttggca

SEQ ID NO: 87947 - DNA, 600 bp, Chicken  19866894390377_3
gctcagtagaccgatgaattcttacataactgtttttcagggtctgtcatcttacacaaatgggattacaaaatcatttgtttgttttaaaaaaatcrgattgcaaaggaactcgttccattatccttccaaaatcagcattttgaagtaatgcttaggtctagatcttccttttgtcttgtgaactgatcacatgatatataaccaaaatctagcatgtaaatgcttgttatgttcaactgaaaacaacagaggaacatgttctggaggagcaacccttgctgcatgttacycgtgtgyttttttttttttttttaagccagctgattctgctctctatggtgtgttcagataaaattgtgttttatcattgcagaaagccacacaccttctgtgtatggcagaaattcaatctcaatggatcccacaacaattccatcaagatactaaacaagaccaagaaaaggcatggtgttgtcaagcactacagatgaaagatctgggagcaaagaactagacatccactatgtgtcacaggcttttcaacatatttccattttttcctgggtttggttgaatcraagagcttggcaaccaaat

SEQ ID NO: 87948 - DNA, 380 bp, Chicken  19866894390377_4
ctgcatgttacycgtgtgtttttttttttttttttaagccagctgattctgctctctatggtgtgttcagataaaattgtgttttatcattgcagaaagccacacaccttctgtgtatggcagaaattcaatctcaatggatcccacaacaattccatcaagatactaaacaagaccaagaaaaggcatggtgttgtcaagcactacagatgaaagatctgggagcaaagaactagacatccactatgtgtcacaggcttttcaacatatttccattttttcctgggtttggttgaatcraagagcttggcaaccaaatatatgtctctgcttagagagaactaaacagaatgaggatggattacttcccttattttatg

SEQ ID NO: 87949 - DNA, 600 bp, Chicken  19866894390383_1
tgagcttttacagcacctcagtctgcatggctgagagcagcccctgtcctactggatcaatctgaatggggatccatctccactccccagtagcactccttgcagccccgtttcctggtgcacatgagaggcactggttcagagcacacagggctgtgactgtctgtgtgacaaggggttggtggaaccctcctatgggcatcgtgctgcagagttgggaacttgtggggtttggaggttgcaaggctccagctgccccatctgctgctctgccttcctgtgggagcaggctggtttagytgggcttttgcacttgtttaataattgccagcgtggcttttttaatgcggtaggatttctgttgtatcttcagaaaggtctttcaaaagcatatgtggctcaggaatagcaaatggctgtttggaagccagagctctgcaggctgtgccctgctgcaggagccaacgcaggcacttctcagggcagtgcctytctctgactttggtttaaaacagtgatcaggcgtggaggtgccaggaatgtcggagtgtttccatgccagccctgcagctgttaaaggacgcagacttgggataaggc

SEQ ID NO: 87950 - DNA, 490 bp, Chicken  19866894390383_2
ctatgggcatcgtgctgcagagttgggaacttgtggggtttggaggttgcaaggctccagctgccccatctgctgctctgccttcctgtgggagcaggctggtttagytgggcttttgcacttgtttaataattgccagcgtggcttttttaatgcggtaggatttctgttgtatcttcagaaaggtctttcaaaagcatatgtggctcaggaatagcaaatggctgtttggaagccagagctctgcaggctgtgccctgctgcaggagccaacgcaggcacttctcagggcagtgcctytctctgactttggtttaaaacagtgatcaggcgtggaggtgccaggaatgtcggagtgtttccatgccagccctgcagctgttaaaggacgcagacttgggataaggctgaaataaacatccactttttttctttctattgaatgtttaaatgaatgaaagctgagctcttaaccttctgtgttttccaa

SEQ ID NO: 87951 - DNA, 600 bp, Chicken  19866894390386_1
gtctttgtatctattttgaatgtaggcctagttccctttctctactttttgcacaataataccacatgtcatctgaattactggtgcgggatgttaaaagttctcacaaaatctaccaagtatctcaagacagttatctggcaattatcctgttactgatcaataaaacaaacaaccaaaacaaacaaacaaaaagcaacaaaacatccctcaaccagtctttttttgttgttttcaaagtaacgttgccatcatttttcttatgacctcatacaacaggctgtagcatatatatatttytagtggcaaagcgtttaaatacagtttgagattatattgtctgagcgtgatggtactcacccacacgtttagaaagtgagccagtgacagcagtatatagctgtgtcctataaaggtgcttctacatagtgcaacaggttgtgaaatttctgcattaatgaaaagggttttagttccatcattactgctttgcatgatgaaaactgcaaagttgagtgtcactattcatcatgcaagtagaaacataaagcacaatgaaggtaatacagccttgaagaacatcaagtctcactactgcaa

SEQ ID NO: 87952 - DNA, 600 bp, Chicken  19866894390400_1
attctgttcccttctgtcacaaccattacctggtgtttcaggctggtacagacactactgcttgacacacccacaaaagccttgtgcaaagctggaacagcttttctttcccccctttctcagtctccccatataacttgcacatccttcaaaatgcaggaaaaaaagtagttcaactccagcagactcagtgcaatccaattggctcagttcttatttccccaggtaaaaggcaggctctcaagtttccttctagggccccaacactcctgcacagatcggtcccatggtccatcttcrattcttccacacttttactatggtgctaactctctccaaagcttttacataatgccgataataagaacattaaggttgtacattcaacctcttacccattgacacatcctgcttcaactgcctccattgtgacatttggagatttatcatcaattttcagatatccttaaatgcagtcacacaactcagcaagacaggaaattaatgggtgaccaatctgcctccatcaggagggggataaacatcagaactgtacaagctcaccctactgtgttttttgtgaagcgagggatagaggat

SEQ ID NO: 87953 - DNA, 599 bp, Chicken  19866894390402_1
  misc_feature (1)..(155): n is any nucleotide
nnnnnnnnnnnnnnnnnnnnnnnnnnnnnnnnnnnnnnnnnnnnnnnnnnnnnnnnnnnnnnnnnnnnnnnnnnnnnnnnnnnnnnnnnnnnnnnnnnnnnnnnnnnnnnnnnnnnnnnnnnnnnnnnnnnnnnnnnnnnnnnnnnnnnnnnnnnaattgtagctgatagacattctcacagaatgagaacaccctggaactgaaaattgtttgaggtttgaatgttataggtgactgtgcctttggtaataagtacttcaaggctgaggaggaggtgtgtttgtggagttgccgctacragcaagctgctattgcttttgggtaattgttgccaaatgtagctgaaayatcrtcmttagaatrttcttttggatttaaaggaaaattgaaaaagaatcttcttgctaacctatgcttcttgataggtaagcgagggaaatatcttcaaatacaacagaaagtagaggtcagtattgtagctgaaaactgttctctttgtcctctacttagacagaagtcaaaacttggtttactgtttctgtggtgtactgctggatgacatgggaatgatatctactcggtgtggtataaatatagc

SEQ ID NO: 87954 - DNA, 599 bp, Chicken  19866894390402_2
  misc_feature (1)..(106): n is any nucleotide
nnnnnnnnnnnnnnnnnnnnnnnnnnnnnnnnnnnnnnnnnnnnnnnnnnnnnnnnnnnnnnnnnnnnnnnnnnnnnnnnnnnnnnnnnnnnnnnnnnnnnnnnnnaattgtagctgatagacattctcacagaatgagaacaccctggaactgaaaattgtttgaggtttgaatgttataggtgactgtgcctttggtaataagtacttcaaggctgaggaggaggtgtgtttgtggagttgccgctacragcaagctgctattgcttttgggtaattgttgccaaatgtagctgaaayatcrtcmttagaatrttcttttggatttaaaggaaaattgaaaaagaatcttcttgctaacctatgcttcttgataggtaagcgagggaaatatcttcaaatacaacagaaagtagaggtcagtattgtagctgaaaactgttctctttgtcctctacttagacagaagtcaaaacttggtttactgtttctgtggtgtactgctggatgacatgggaatgatatctactcggtgtggtataaatatagctactaatgaaataaaggaaacagatgactgtgtcccacagtgacaagtc

SEQ ID NO: 87955 - DNA, 599 bp, Chicken  19866894390402_3
  misc_feature (1)..(102): n is any nucleotide
nnnnnnnnnnnnnnnnnnnnnnnnnnnnnnnnnnnnnnnnnnnnnnnnnnnnnnnnnnnnnnnnnnnnnnnnnnnnnnnnnnnnnnnnnnnnnnnnnnnnnnaattgtagctgatagacattctcacagaatgagaacaccctggaactgaaaattgtttgaggtttgaatgttataggtgactgtgcctttggtaataagtacttcaaggctgaggaggaggtgtgtttgtggagttgccgctacragcaagctgctattgcttttgggtaattgttgccaaatgtagctgaaayatcrtcmttagaatrttcttttggatttaaaggaaaattgaaaaagaatcttcttgctaacctatgcttcttgataggtaagcgagggaaatatcttcaaatacaacagaaagtagaggtcagtattgtagctgaaaactgttctctttgtcctctacttagacagaagtcaaaacttggtttactgtttctgtggtgtactgctggatgacatgggaatgatatctactcggtgtggtataaatatagctactaatgaaataaaggaaacagatgactgtgtcccacagtgacaagtcttgg

SEQ ID NO: 87956 - DNA, 599 bp, Chicken  19866894390402_4
  misc_feature (1)..(99): n is any nucleotide
nnnnnnnnnnnnnnnnnnnnnnnnnnnnnnnnnnnnnnnnnnnnnnnnnnnnnnnnnnnnnnnnnnnnnnnnnnnnnnnnnnnnnnnnnnnnnnnnnnnaattgtagctgatagacattctcacagaatgagaacaccctggaactgaaaattgtttgaggtttgaatgttataggtgactgtgcctttggtaataagtacttcaaggctgaggaggaggtgtgtttgtggagttgccgctacragcaagctgctattgcttttgggtaattgttgccaaatgtagctgaaayatcrtcmttagaatrttcttttggatttaaaggaaaattgaaaaagaatcttcttgctaacctatgcttcttgataggtaagcgagggaaatatcttcaaatacaacagaaagtagaggtcagtattgtagctgaaaactgttctctttgtcctctacttagacagaagtcaaaacttggtttactgtttctgtggtgtactgctggatgacatgggaatgatatctactcggtgtggtataaatatagctactaatgaaataaaggaaacagatgactgtgtcccacagtgacaagtcttggaaa

SEQ ID NO: 87957 - DNA, 599 bp, Chicken  19866894390402_5
  misc_feature (1)..(91): n is any nucleotide
nnnnnnnnnnnnnnnnnnnnnnnnnnnnnnnnnnnnnnnnnnnnnnnnnnnnnnnnnnnnnnnnnnnnnnnnnnnnnnnnnnnnnnnnnnnaattgtagctgatagacattctcacagaatgagaacaccctggaactgaaaattgtttgaggtttgaatgttataggtgactgtgcctttggtaataagtacttcaaggctgaggaggaggtgtgtttgtggagttgccgctacragcaagctgctattgcttttgggtaattgttgccaaatgtagctgaaayatcrtcmttagaatrttcttttggatttaaaggaaaattgaaaaagaatcttcttgctaacctatgcttcttgataggtaagcgagggaaatatcttcaaatacaacagaaagtagaggtcagtattgtagctgaaaactgttctctttgtcctctacttagacagaagtcaaaacttggtttactgtttctgtggtgtactgctggatgacatgggaatgatatctactcggtgtggtataaatatagctactaatgaaataaaggaaacagatgactgtgtcccacagtgacaagtcttggaaaactgtgaa

SEQ ID NO: 87958 - DNA, 576 bp, Chicken  19866894390402_6
ggatgacatgggaatgatatctactcggtgtggtataaatatagctactaatgaaataaaggaaacagatgactgtgtcccacagtgacaagtcttggaaaactgtgaactggaattatcctcagaagattctctacagttgtgtagaaagcctaaaataaacactttctgcagagaatagtttgttgggctgcactcatgatatcttttagcataacagatgatcataacagcaggaaaacaaaattgagctttcaaaaatgcgtatttttcccttttccttctccaagtgcacattayaaacaaaacttagaacctggactgaccttttacacggtcctccagttgttaccaaatgacagtgttcataatgcctgcatttcagatatcatagatttatccttccatcacaagcatacctctagctagcatagattgagctgggcttgctctgttttcttcagtacatatctcagaacgaggagatgttaagtggcctctgttgggtttatgtcttgcttgaactaagagaagactgaacctgtgaagacaactcaatagcagtggctgctggtg

SEQ ID NO: 87959 - DNA, 600 bp, Chicken  19866894390403_1
ggggaatgcccaaagtactgaaaacccccaactacggccatttgcatgcttcatgcaaacatttgcctgcactgggatagagactcgcagccctgctgttccctgatctttgttcagtaggtgcagaggtgaggcagaggtgagttgggagcagcagagcgcgggcggcacttggatgcccccaccccactgcagacctctgacagtgctgcagatgtgtgcgccctctgagcacgcgggtgcagccacaggaagcaaacagagcgagcggcagtgtttgcttttgcaatgcaggaagcygaggctgaggcagcctgtcagaaagcaagctgtgctcgggcaccgttggcacccagagcagcagtgaggctaacggcgctgttagggacagggtgagccatcgttcccttttcctcttcttccyccttccccagaaatcaggggagctggttgccgtcaaggtcttcaacaaagccagctacctgcgcccgcaggaggtgcagatgcgggagttcgagatgctgcggaagctgaaccataagaacattgtcaagttattcgcagtggaggagacggtgagcgggaccggggccctccctc

SEQ ID NO: 87960 - DNA, 600 bp, Chicken  19866894390403_2
agaggtgaggcagaggtgagttgggagcagcagagcgcgggcggcacttggatgcccccaccccactgcagacctctgacagtgctgcagatgtgtgcgccctctgagcacgcgggtgcagccacaggaagcaaacagagcgagcggcagtgtttgcttttgcaatgcaggaagcygaggctgaggcagcctgtcagaaagcaagctgtgctcgggcaccgttggcacccagagcagcagtgaggctaacggcgctgttagggacagggtgagccatcgttcccttttcctcttcttccyccttccccagaaatcaggggagctggttgccgtcaaggtcttcaacaaagccagctacctgcgcccgcaggaggtgcagatgcgggagttcgagatgctgcggaagctgaaccataagaacattgtcaagttattcgcagtggaggagacggtgagcgggaccggggccctccctcctgcactgctgtgtccaagcagaatcccacggccccattcctgacgggtgcctggtctttctgggggggatggggaggtgggggctgtacagccaccctgcctttgctctgctccccgcagggc

SEQ ID NO: 87961 - DNA, 599 bp, Chicken  19866894390407_1
  misc_feature (1)..(45): n is any nucleotide
nnnnnnnnnnnnnnnnnnnnnnnnnnnnnnnnnnnnnnnnnnnnntttcccttgaagaagggttttctggaatagggatggatgagagtttgacacagaaaacaactcttagaacatttgcaagccggccaagcacaaatgctgagaacttgtcatcttaccatctggaaccgtgccctaacaagctactgagccctgtgttgggctacatgatttgaattttatttatttttttaatgcaaaagcaggaggttgaccttgtacagatctttccagtcccataagctacctcaggaactycaacattaaagtaggartttaaaaaacagttgataaaacaggggtggaagaagtttctgcctttagctggatcagatgaagtttggataagtctgtactgagaagaaggtgcaactgaaacatgctcaggcgtcagcgaagacrtgcctttatcttggtgacaggatcaccaactaaactagaaaacgttctagaaagacagctcttcgaagtccaagaagaacctccataccctagagagtgagactaaaggcataaaaaataaccaagtaygcagatactgtattccaacttgytaa

SEQ ID NO: 87962 - DNA, 599 bp, Chicken  19866894390407_2
  misc_feature (1)..(28): n is any nucleotide
nnnnnnnnnnnnnnnnnnnnnnnnnnnntttcccttgaagaagggttttctggaatagggatggatgagagtttgacacagaaaacaactcttagaacatttgcaagccggccaagcacaaatgctgagaacttgtcatcttaccatctggaaccgtgccctaacaagctactgagccctgtgttgggctacatgatttgaattttatttatttttttaatgcaaaagcaggaggttgaccttgtacagatctttccagtcccataagctacctcaggaactycaacattaaagtaggartttaaaaaacagttgataaaacaggggtggaagaagtttctgcctttagctggatcagatgaagtttggataagtctgtactgagaagaaggtgcaactgaaacatgctcaggcgtcagcgaagacrtgcctttatcttggtgacaggatcaccaactaaactagaaaacgttctagaaagacagctcttcgaagtccaagaagaacctccataccctagagagtgagactaaaggcataaaaaataaccaagtaygcagatactgtattccaacttgytaacagattttaaaatattc

SEQ ID NO: 87963 - DNA, 600 bp, Chicken  19866894390407_3
agaacttgtcatcttaccatctggaaccgtgccctaacaagctactgagccctgtgttgggctacatgatttgaattttatttatttttttaatgcaaaagcaggaggttgaccttgtacagatctttccagtcccataagctacctcaggaactycaacattaaagtaggartttaaaaaacagttgataaaacaggggtggaagaagtttctgcctttagctggatcagatgaagtttggataagtctgtactgagaagaaggtgcaactgaaacatgctcaggcgtcagcgaagacrtgcctttatcttggtgacaggatcaccaactaaactagaaaacgttctagaaagacagctcttcgaagtccaagaagaacctccataccctagagagtgagactaaaggcataaaaaataaccaagtaygcagatactgtattccaacttgytaacagattttaaaatattcatctcaatcagggcgacatgggtggtatcaaagagcaagtgacattactcagtaaaaccaaaaattatctctcaaggatatattaagatgaaactgaaaatttggttgtacaaggaagtacctgagag

SEQ ID NO: 87964 - DNA, 600 bp, Chicken  19866894390407_4
cagtcccataagctacctcaggaactycaacattaaagtaggartttaaaaaacagttgataaaacaggggtggaagaagtttctgcctttagctggatcagatgaagtttggataagtctgtactgagaagaaggtgcaactgaaacatgctcaggcgtcagcgaagacrtgcctttatcttggtgacaggatcaccaactaaactagaaaacgttctagaaagacagctcttcgaagtccaagaagaacctccataccctagagagtgagactaaaggcataaaaaataaccaagtaygcagatactgtattccaacttgytaacagattttaaaatattcatctcaatcagggcgacatgggtggtatcaaagagcaagtgacattactcagtaaaaccaaaaattatctctcaaggatatattaagatgaaactgaaaatttggttgtacaaggaagtacctgagagagcctgcacatccaaaatttcaccatgttttacacattaacacaatcattcaaggtaagtcaagaaggaataataagcagaagcaagtcccgtcctgaacaacctcttcccatagcaaagccaggacta

SEQ ID NO: 87965 - DNA, 600 bp, Chicken  19866894390407_5
actycaacattaaagtaggartttaaaaaacagttgataaaacaggggtggaagaagtttctgcctttagctggatcagatgaagtttggataagtctgtactgagaagaaggtgcaactgaaacatgctcaggcgtcagcgaagacrtgcctttatcttggtgacaggatcaccaactaaactagaaaacgttctagaaagacagctcttcgaagtccaagaagaacctccataccctagagagtgagactaaaggcataaaaaataaccaagtaygcagatactgtattccaacttgytaacagattttaaaatattcatctcaatcagggcgacatgggtggtatcaaagagcaagtgacattactcagtaaaaccaaaaattatctctcaaggatatattaagatgaaactgaaaatttggttgtacaaggaagtacctgagagagcctgcacatccaaaatttcaccatgttttacacattaacacaatcattcaaggtaagtcaagaaggaataataagcagaagcaagtcccgtcctgaacaacctcttcccatagcaaagccaggactaaaattgcagatactgagcttcac

SEQ ID NO: 87966 - DNA, 600 bp, Chicken  19866894390410_1
tctggggacattgcatgtttgggctgggaaagaaggtggtgggagccaggaccaagaactgcaaggagactgaacagccacctaaggagaagctctaccactccaaataacttctccccatagctacttagggacagtgacattctctattggtcttatagctgtaacttttttagagcttttattttttaatagctttcaatttttgtgaaaaatagtggctacatatttgtgttcctactactggtcatttatatcagccataaatagtctattacatttgtgatattagcagtgttkttctattgtgctaatagtaactgtttgctacaggcctactttaagcagcacactgagttgagttgacttttggtgactgaaagcagaacttcaaacactagacgaagcacaaagcaaatatgagtgctgcaaagccatcagacagagagttcaggtattgcagaccaactgcatggtaccatttgaagaataatctaatgcaaggaacccaaaggtagagtccagtgactgccttgaaaacaagagctgctcagtgctgctgtcatgacatgctcaatggagtgctaggtttattttgga

SEQ ID NO: 87967 - DNA, 600 bp, Chicken  19866894390410_2
gtgctgctgtcatgacatgctcaatggagtgctaggtttattttggaagaataaattctatagctaagacgacttagggaaaaacagagctttcttagtgtttttttggaactactgcattttttttatgccccttgttagtgcatccctacagacagagccgtactggttgatatatctgctatccagaaaacagaaggtatcacgaaggaacttacagttggctgatgtgttttcctgaagtactttattttctatgaagcactctaattgcatatcagaagttgcattaaccttcartgtgctcaaaacactgtaagtgccgtcgggatgttgggtgatattaaaatctgactgagacaggcgtgtgttgtctgttctatttatccaataaacattcggttcagggtaaccgttgtcagatctgcagctgaaagtcacctcttctccagtgctgtaactgtttcttattggcccactgagtattggttggctgtaactagctggagagaaagggaaaaggaaagctctgggttatatgagactctcacaacttgaaaggaaaacctatttgtaggcttggtacataagccgaaggtc

SEQ ID NO: 87968 - DNA, 599 bp, Chicken  19866894390420_1
  misc_feature (1)..(1): n is any nucleotide
ntacaactcctaaaacagcaaaaaggacactattttgcatttgagtagtaacagatcagtaagaactgatgaccacagaaaacccttgtgcagaatctacatctctgaatccacaatatcttaattttaaatttgtttctccaagcatgtcctgggttttttgtttccttgaattccagttaaattcatatttgaggcacacttcaaggaatttccaacctacgtgatcctaacattttaatatgggaagaaaaaattagttccggtcaaataattccaagtatgctatcaggcacaatkaatatccattattcagcagatttgggaatataaatatcacattaaagatgattaagcgtctgaaaataaaagtaatactcactacatacccactaggcaattgattttagtgataaatacacctgtatttgtgaaaagactatttcagcctcaagttctcatcacaaatgtcaccaataacacaatgctttgctttcattagtataacagtcaacataaaagtatggaatttgtaattgggtttcatcaaaaatttgcttaagtttatattaagatataattctatataccataattct

SEQ ID NO: 87969 - DNA, 600 bp, Chicken  19866894390420_2
attattcagcagatttgggaatataaatatcacattaaagatgattaagcgtctgaaaataaaagtaatactcactacatacccactaggcaattgattttagtgataaatacacctgtatttgtgaaaagactatttcagcctcaagttctcatcacaaatgtcaccaataacacaatgctttgctttcattagtataacagtcaacataaaagtatggaatttgtaattgggtttcatcaaaaatttgcttaagtttatattaagatataattctatataccataattcttaaagagraggccatacaaacattttgaaattagtatattgatttacttctgtaataactaaccttcagccccttcctttttattatcatccagcaaactaccaaactatctcttatttcctttttttattcattttagagctatttttatagtttatccaaccaagtaataggagagatttttcctaagtagctattgtttctttgtctttcttccttaattggacataactgtgctttttttgaaaactgtttcttacaagaggagtaataacttttcagcctctaaactactaaaagatcaatta

SEQ ID NO: 87970 - DNA, 599 bp, Chicken  19866894390429_1
  misc_feature (1)..(47): n is any nucleotide
nnnnnnnnnnnnnnnnnnnnnnnnnnnnnnnnnnnnnnnnnnnnnnnaccctgaaagccacaagaagatacaagtcctaatattgactttgagtacatgtgaaatattaaatgtgaacgctatatcaatttatatagttttaagcactgctaacttttggtgttgagaagtcctgaggttagtgccaagaattattatcttacatcaagttttaatttgaatgactgggagttggaactagatgatctttgaggtcccttccaacccaggccattctgtgattctacaaatagtaaacayattttttattcacctcccgtgtttagagctgccactctgtagacactctgcaactccaggagataaacacttgcctgaaatgtggatgttggtgttttcaagcaaggagacactgctaggtcctggggagattctcaggattatctctaaaatcctgtgatttacaatgaagtcgtgagtggtggtggcctcacatttctttctgataggtcagtgtgtgcattttatatcctagggtatagcagtaaaatatttcaaaaagaaaataaatgtaatgtattcataattgctaatgtgat

SEQ ID NO: 87971 - DNA, 599 bp, Chicken  19866894390438_1
  misc_feature (1)..(161): n is any nucleotide
nnnnnnnnnnnnnnnnnnnnnnnnnnnnnnnnnnnnnnnnnnnnnnnnnnnnnnnnnnnnnnnnnnnnnnnnnnnnnnnnnnnnnnnnnnnnnnnnnnnnnnnnnnnnnnnnnnnnnnnnnnnnnnnnnnnnnnnnnnnnnnnnnnnnnnnnnnnnnnnnntacagactagcccttaaaaaaaaaggcattacggctgatgggagagtttgctgttatgcatataaccatttttaaatgtaaatctactggaaacaataaggacgcacatctataagccaaataagtgaataaaggtctygtttttgaacttcttataactattctagctatatataaacaataaggaaataactgtcagatttatcatagtgaacagtatttacctcaaacagtattagaaacataatttgagttgccaacagtaaactccagaaaactcctccccaaataattcttatagatttagctggaactcaagatatgcattttagtatacagtgtaatagcaaccaccatgttttaagtgacaaaaaagtaaagatgttataggaggacatttcattttaaatggaaaatggtttactaacaaccagtgat

SEQ ID NO: 87972 - DNA, 600 bp, Chicken  19866894390442_1
ataaatcagatatcagctcattctgaaatactgctgcaattacatcgccagcaaaatgcagcaccgccgtatacaaacagctccagctgccgtctcttggtgtcaatggaaaattctcagcagcattgatgagtgtgttctgtgcccttaggaaactgaaaagctttagaaaacagttctgctgctgtgatctgagttcatgcaaagcacatcaggctaactgggatgtaaaacacggatgtgtaaaacacagaataaatgtctataatttgatctgaggtgacatacatcattgactcrtagctatccaaaccaatcacatgttctgtgtacagaggaataccatcatttagttactctgagtttacrgggagcagtggagttgaggaaaaaaaaacactgmtgtaattccattttctagcttctcaggaaaacaacttctcagaacttcaacctatctacattgggatctccatgtaaatcgggccaagctccatgaggcaccacacgcgagcaggaaatgaactgattttgcaagggcagaaataaaaagtatcagctctgggaatcagccaggatgagcgtgtctttacatgatgg

SEQ ID NO: 87973 - DNA, 600 bp, Chicken  19866894390442_2
tatacaaacagctccagctgccgtctcttggtgtcaatggaaaattctcagcagcattgatgagtgtgttctgtgcccttaggaaactgaaaagctttagaaaacagttctgctgctgtgatctgagttcatgcaaagcacatcaggctaactgggatgtaaaacacggatgtgtaaaacacagaataaatgtctataatttgatctgaggtgacatacatcattgactcrtagctatccaaaccaatcacatgttctgtgtacagaggaataccatcatttagttactctgagtttacrgggagcagtggagttgaggaaaaaaaaacactgmtgtaattccattttctagcttctcaggaaaacaacttctcagaacttcaacctatctacattgggatctccatgtaaatcgggccaagctccatgaggcaccacacgcgagcaggaaatgaactgattttgcaagggcagaaataaaaagtatcagctctgggaatcagccaggatgagcgtgtctttacatgatggctagcagaactacacaggccaaaaaaaatcagatcgggtagaagatttaaaagcagttttggagaccgg

SEQ ID NO: 87974 - DNA, 600 bp, Chicken  19866894390442_3
caatggaaaattctcagcagcattgatgagtgtgttctgtgcccttaggaaactgaaaagctttagaaaacagttctgctgctgtgatctgagttcatgcaaagcacatcaggctaactgggatgtaaaacacggatgtgtaaaacacagaataaatgtctataatttgatctgaggtgacatacatcattgactcrtagctatccaaaccaatcacatgttctgtgtacagaggaataccatcatttagttactctgagtttacrgggagcagtggagttgaggaaaaaaaaacactgmtgtaattccattttctagcttctcaggaaaacaacttctcagaacttcaacctatctacattgggatctccatgtaaatcgggccaagctccatgaggcaccacacgcgagcaggaaatgaactgattttgcaagggcagaaataaaaagtatcagctctgggaatcagccaggatgagcgtgtctttacatgatggctagcagaactacacaggccaaaaaaaatcagatcgggtagaagatttaaaagcagttttggagaccggctctgtaactggaaggtgtatttgcactctacga

SEQ ID NO: 87975 - DNA, 538 bp, Chicken  19866894390445_1
ggcacattccattaaccattcgagcgtaacctgaaaaaagagagatatttgtccattccctgctgggatttcagtgctcagcactggaagctgtttattggcagcttgcgtcacttgctatgtatttgaatgatgtcttgcctacttgcaaatgaggcaggctgtgtgaatggggcagagatgggggcaacccaggggggatgagtagcttgcttatttccacaaagattgttaaattttcttcaggaaaaagattatgttagcccttttcaccccataacatcctctttgtggcacctkcactttataataacaataagaaatactcagaataaagtaaacaggaaagagatgagagcctgaatctgtgagcagtgatgactgacaaacttcttctagtgtgatagatataggaatatttttcagaactacttggaatatcatcatatgcctataataatatcagagagacaggcttcagtgtattgatgacaataatgtataataaaatacatattatacaccaagaaaagataaa

SEQ ID NO: 87976 - DNA, 600 bp, Chicken  19866894390450_1
gtagttttggaaagcagttttaaattttgaaaagtaaacagattttctgtttgaagttttccttttccttccagaacaactcaatttccagtttgactgctctcaaggtcctcaaaacaaaatgagatgttctgcattttctgaattattctaatgtcataacctagtttccataaaaaacaacggaagttctaccaagtttttgctttaatggaatctcaaatggaaaaaccctacctatagctaatcagcttttgtgcatatgctagctctcccaagctgagttatactggggagccmscctagaactagcagaataccagacgctgcagttgccatccagattgtcagaagtcattctcatcagaaagttgtgctacactactatcacttgaaactaccttatttcatttgctgtaaaagctgatgtgttcaagygctctgacagaaaaagtcctgggtttatgatggacaatatgaataaaaatttctaggaktattaaagaccaaatttaggatttgtttaatcttttcttagcagtacaaatacatgcaatctaagcagtaatctgtgtagacttctagagtcaawggagggag

SEQ ID NO: 87977 - DNA, 600 bp, Chicken  19866894390450_2
tagttttggaaagcagttttaaattttgaaaagtaaacagattttctgtttgaagttttccttttccttccagaacaactcaatttccagtttgactgctctcaaggtcctcaaaacaaaatgagatgttctgcattttctgaattattctaatgtcataacctagtttccataaaaaacaacggaagttctaccaagtttttgctttaatggaatctcaaatggaaaaaccctacctatagctaatcagcttttgtgcatatgctagctctcccaagctgagttatactggggagccmscctagaactagcagaataccagacgctgcagttgccatccagattgtcagaagtcattctcatcagaaagttgtgctacactactatcacttgaaactaccttatttcatttgctgtaaaagctgatgtgttcaagygctctgacagaaaaagtcctgggtttatgatggacaatatgaataaaaatttctaggaktattaaagaccaaatttaggatttgtttaatcttttcttagcagtacaaatacatgcaatctaagcagtaatctgtgtagacttctagagtcaawggagggaga

SEQ ID NO: 87978 - DNA, 600 bp, Chicken  19866894390450_3
ttctgaattattctaatgtcataacctagtttccataaaaaacaacggaagttctaccaagtttttgctttaatggaatctcaaatggaaaaaccctacctatagctaatcagcttttgtgcatatgctagctctcccaagctgagttatactggggagccmscctagaactagcagaataccagacgctgcagttgccatccagattgtcagaagtcattctcatcagaaagttgtgctacactactatcacttgaaactaccttatttcatttgctgtaaaagctgatgtgttcaagygctctgacagaaaaagtcctgggtttatgatggacaatatgaataaaaatttctaggaktattaaagaccaaatttaggatttgtttaatcttttcttagcagtacaaatacatgcaatctaagcagtaatctgtgtagacttctagagtcaawggagggagatggtaaatcatgcttgactaatctgattgccttttatggtaaagtgcattggtctctggcaagaagagagcagtggatgttataaatatgagttttagtagtgccttygatgtgaatgccagttaataaataggtga

SEQ ID NO: 87979 - DNA, 600 bp, Chicken  19866894390450_4
agtttttgctttaatggaatctcaaatggaaaaaccctacctatagctaatcagcttttgtgcatatgctagctctcccaagctgagttatactggggagccmscctagaactagcagaataccagacgctgcagttgccatccagattgtcagaagtcattctcatcagaaagttgtgctacactactatcacttgaaactaccttatttcatttgctgtaaaagctgatgtgttcaagygctctgacagaaaaagtcctgggtttatgatggacaatatgaataaaaatttctaggaktattaaagaccaaatttaggatttgtttaatcttttcttagcagtacaaatacatgcaatctaagcagtaatctgtgtagacttctagagtcaawggagggagatggtaaatcatgcttgactaatctgattgccttttatggtaaagtgcattggtctctggcaagaagagagcagtggatgttataaatatgagttttagtagtgccttygatgtgaatgccagttaataaataggtgatactttatttgaaggccagtaactagtgagtatcacaagggtctaaacagggatatgcc

SEQ ID NO: 87980 - DNA, 600 bp, Chicken  19866894390450_5
gggagccmscctagaactagcagaataccagacgctgcagttgccatccagattgtcagaagtcattctcatcagaaagttgtgctacactactatcacttgaaactaccttatttcatttgctgtaaaagctgatgtgttcaagygctctgacagaaaaagtcctgggtttatgatggacaatatgaataaaaatttctaggaktattaaagaccaaatttaggatttgtttaatcttttcttagcagtacaaatacatgcaatctaagcagtaatctgtgtagacttctagagtcaawggagggagatggtaaatcatgcttgactaatctgattgccttttatggtaaagtgcattggtctctggcaagaagagagcagtggatgttataaatatgagttttagtagtgccttygatgtgaatgccagttaataaataggtgatactttatttgaaggccagtaactagtgagtatcacaagggtctaaacagggatatgccctctttaacacctttacctgtgagctggaagaaggaatggagtgcactcacatgtttgcagatgataacaaacaggggacacaagtgtgttcacc

SEQ ID NO: 87981 - DNA, 600 bp, Chicken  19866894390450_6
atttgctgtaaaagctgatgtgttcaagygctctgacagaaaaagtcctgggtttatgatggacaatatgaataaaaatttctaggaktattaaagaccaaatttaggatttgtttaatcttttcttagcagtacaaatacatgcaatctaagcagtaatctgtgtagacttctagagtcaawggagggagatggtaaatcatgcttgactaatctgattgccttttatggtaaagtgcattggtctctggcaagaagagagcagtggatgttataaatatgagttttagtagtgccttygatgtgaatgccagttaataaataggtgatactttatttgaaggccagtaactagtgagtatcacaagggtctaaacagggatatgccctctttaacacctttacctgtgagctggaagaaggaatggagtgcactcacatgtttgcagatgataacaaacaggggacacaagtgtgttcacctgaaatcagagctgttgtctagagcatactgtcagtttgaggagtgcgtcagcagaaacctttgaaatccaacaaaatcaagttctgaacctaggaagaagaaccccttgtgatgac

SEQ ID NO: 87982 - DNA, 600 bp, Chicken  19866894390458_1
tttttaaaactgtaactctgctatgcaaagctatcacagaaaatagtgttgggtttctggtcataaaaagacccttctgtgctgctcaaatctttcaaccaaaagcacaaaacatgcttcatacccctctatggcagctcaagcaatatactcctttctttcctttgcagctccctgaaactggtgccactactcccatatttctgtaggggtagaagtttcctagcatgatctaagactggaacacttgcaaacactcttctcagttgttgcatgttgtggacaggctggaatccaagwtttagctgccatgtgaggacccaggatttgggtaaatacattggcctctattcaggtgaaattatagattctacatacatcataacaggtgccacagtgcactaaaattggtgtattcacatcctaaagtatctctactttgtaaggtgactctagacaggtaagaccaagacacttgatctctggctaccctcccttgaggctttcaaagctttagaggaatctccagacaccatcacttgtgccaaggacaagaaagagttgtccactctctgagccaacagctctgctcctgatgga

SEQ ID NO: 87983 - DNA, 600 bp, Chicken  19866894390464_1
tgcagatcagacgctgcctcggggtccctccttcgccacggggctggcttgagcaaggcaagatactgctgtcctcactgtattgctgctggggaagggcagcccagcagcaggaatggggtgcaggtttgtttcaagtccttttaaaggcagcaggaaaatgtctttgccactggcagatgggtctggaaacccacaggggaactccctcgcagggacaggccgagctgatttagaggctcccaaagcatcactgagcctttcctaggagcactgcagtcacttcagacccacgacatycccatagtacaggcacacggacaccaggcagcgcaggcaaatcctgcaggatgcagccccagggtgtcctctgcaagcacatctgtgcagatggcattttaaatgcaygttccaggctgctggaaatrtcattagtgcctggaaaatgagagtccttctgctgcagtgggaggcatctcctgctcctgcagctgarggagcagtgggtcagccccacgtggccccaggaacatcagcaatggacacgtggggctgttcagtgcatggggatggcatgggctggtgcactgagctcagcaa

SEQ ID NO: 87984 - DNA, 600 bp, Chicken  19866894390464_2
agcaggaatggggtgcaggtttgtttcaagtccttttaaaggcagcaggaaaatgtctttgccactggcagatgggtctggaaacccacaggggaactccctcgcagggacaggccgagctgatttagaggctcccaaagcatcactgagcctttcctaggagcactgcagtcacttcagacccacgacatycccatagtacaggcacacggacaccaggcagcgcaggcaaatcctgcaggatgcagccccagggtgtcctctgcaagcacatctgtgcagatggcattttaaatgcaygttccaggctgctggaaatrtcattagtgcctggaaaatgagagtccttctgctgcagtgggaggcatctcctgctcctgcagctgarggagcagtgggtcagccccacgtggccccaggaacatcagcaatggacacgtggggctgttcagtgcatggggatggcatgggctggtgcactgagctcagcaatagaaactcaagcagacagcaaagcaaatgggaaacctaggaggcgctcacagggcttattatttgcaacccatagatagatttcttgctctgaagtgtctccatgct

SEQ ID NO: 87985 - DNA, 600 bp, Chicken  19866894390464_3
ttgtttcaagtccttttaaaggcagcaggaaaatgtctttgccactggcagatgggtctggaaacccacaggggaactccctcgcagggacaggccgagctgatttagaggctcccaaagcatcactgagcctttcctaggagcactgcagtcacttcagacccacgacatycccatagtacaggcacacggacaccaggcagcgcaggcaaatcctgcaggatgcagccccagggtgtcctctgcaagcacatctgtgcagatggcattttaaatgcaygttccaggctgctggaaatrtcattagtgcctggaaaatgagagtccttctgctgcagtgggaggcatctcctgctcctgcagctgarggagcagtgggtcagccccacgtggccccaggaacatcagcaatggacacgtggggctgttcagtgcatggggatggcatgggctggtgcactgagctcagcaatagaaactcaagcagacagcaaagcaaatgggaaacctaggaggcgctcacagggcttattatttgcaacccatagatagatttcttgctctgaagtgtctccatgctcagtgggccatcatctttaa

SEQ ID NO: 87986 - DNA, 600 bp, Chicken  19866894390464_4
caggggaactccctcgcagggacaggccgagctgatttagaggctcccaaagcatcactgagcctttcctaggagcactgcagtcacttcagacccacgacatycccatagtacaggcacacggacaccaggcagcgcaggcaaatcctgcaggatgcagccccagggtgtcctctgcaagcacatctgtgcagatggcattttaaatgcaygttccaggctgctggaaatrtcattagtgcctggaaaatgagagtccttctgctgcagtgggaggcatctcctgctcctgcagctgarggagcagtgggtcagccccacgtggccccaggaacatcagcaatggacacgtggggctgttcagtgcatggggatggcatgggctggtgcactgagctcagcaatagaaactcaagcagacagcaaagcaaatgggaaacctaggaggcgctcacagggcttattatttgcaacccatagatagatttcttgctctgaagtgtctccatgctcagtgggccatcatctttaaggtgtacatatgccaccaaagccactcagggtttggctgccctacagccttcccagaaggaatcactg

SEQ ID NO: 87987 - DNA, 600 bp, Chicken  19866894390464_5
actgagctcagcaatagaaactcaagcagacagcaaagcaaatgggaaacctaggaggcgctcacagggcttattatttgcaacccatagatagatttcttgctctgaagtgtctccatgctcagtgggccatcatctttaaggtgtacatatgccaccaaagccactcagggtttggctgccctacagccttcccagaaggaatcactggggcttggatgcagtgttgtctccacatctgctttgtgttatcaccagcagtcaccgttgcactcagcaccaggaccctgctgggatccygagctgccccaaaaccctctgcagcgacggctgcaagcacagagcagcagattaatgtcacaggcagccagctcggaaaagtgatggcaaggggcaggagaagacttaccacagacattaacagagcccggagtacattaatactatcgacgtgctgtccatcaagctaaggaggctccagcatcctccgggctggatgcacaggcggcagcgatgctcggcactgctcccgtgcagctccgcttgccctttgcaggcacgcggctgtgccaggcagcggcagtgggtgctccctgaccc

SEQ ID NO: 87988 - DNA, 600 bp, Chicken  19866894390471_1
tccagtggaaaaaaaacaaacaaacaaacaaaatcatttgagacaaccccagagcagcactctgaaattctgtagaatcatagctgctctttgttaattaaaactaatctggaatgacatcatctaattatttgcaaaggcctgttttactctgtatttacacaaatacgtcaggtgtgacatgcaactatcccttaattcaaggtgagcatgacatgaggacagggctgagatcacccctcaagcaatccaggaagcactgaggctgccttcaattacacctggctgtccactgtctcraagactcataaagacatcctcagaacaccttgatttctgcgcctctgtacaggtcacgcagtcctaaaaaagcttagctttttcttctcaaaggggaattcctgggtgcccatctgcttcttcaatacagaagcattagaaacataaagcagggatgtgccctatctgttgtgcacgctattttaaaccaacacccagcaattctacaggtgctattctaagcccgtgatcattgcatctatttcagtggatgtagtccaagtcttgtgtttgttaatgagcatgaattatgatgagctc

SEQ ID NO: 87989 - DNA, 600 bp, Chicken  19866894390471_2
cataaagacatcctcagaacaccttgatttctgcgcctctgtacaggtcacgcagtcctaaaaaagcttagctttttcttctcaaaggggaattcctgggtgcccatctgcttcttcaatacagaagcattagaaacataaagcagggatgtgccctatctgttgtgcacgctattttaaaccaacacccagcaattctacaggtgctattctaagcccgtgatcattgcatctatttcagtggatgtagtccaagtcttgtgtttgttaatgagcatgaattatgatgagctcagaggrgtggatgagtagaggtgaacatctaaattgcactcagcttctctcytccttcaagcagcaatgtaatctgggataggaggtggggaacatctgcctttccttgtgactgtattctgcagtttcccacagtcattttttattttccagcaaacaagaaccagcaaaaaaaaagtctttgtattctttcctccwgggtacataatacacacctgtgtataagtaaataaactgaaagcaactgcaatggggctattatgtaaacagcaaaagtatttctaccttttcatttctttgtcaaca

SEQ ID NO: 87990 - DNA, 600 bp, Chicken  19866894390471_3
gtcacgcagtcctaaaaaagcttagctttttcttctcaaaggggaattcctgggtgcccatctgcttcttcaatacagaagcattagaaacataaagcagggatgtgccctatctgttgtgcacgctattttaaaccaacacccagcaattctacaggtgctattctaagcccgtgatcattgcatctatttcagtggatgtagtccaagtcttgtgtttgttaatgagcatgaattatgatgagctcagaggrgtggatgagtagaggtgaacatctaaattgcactcagcttctctcytccttcaagcagcaatgtaatctgggataggaggtggggaacatctgcctttccttgtgactgtattctgcagtttcccacagtcattttttattttccagcaaacaagaaccagcaaaaaaaaagtctttgtattctttcctccwgggtacataatacacacctgtgtataagtaaataaactgaaagcaactgcaatggggctattatgtaaacagcaaaagtatttctaccttttcatttctttgtcaacacttgaaytgattcttaagtgttttaatctgatactgtatttcacaa

SEQ ID NO: 87991 - DNA, 600 bp, Chicken  19866894390471_4
caattctacaggtgctattctaagcccgtgatcattgcatctatttcagtggatgtagtccaagtcttgtgtttgttaatgagcatgaattatgatgagctcagaggrgtggatgagtagaggtgaacatctaaattgcactcagcttctctcytccttcaagcagcaatgtaatctgggataggaggtggggaacatctgcctttccttgtgactgtattctgcagtttcccacagtcattttttattttccagcaaacaagaaccagcaaaaaaaaagtctttgtattctttcctccwgggtacataatacacacctgtgtataagtaaataaactgaaagcaactgcaatggggctattatgtaaacagcaaaagtatttctaccttttcatttctttgtcaacacttgaaytgattcttaagtgttttaatctgatactgtatttcacaaatgaattgattcaaagtgtttctgtccttgcaatctgactttcgccagctctagcagagtggaagtcagtaaagacttcactctcctgaataggccttctacacaaatagcaggggcagtcgtgtgcatcaaaatgtctatgggat

SEQ ID NO: 87992 - DNA, 600 bp, Chicken  19866894390471_5
agtagaggtgaacatctaaattgcactcagcttctctcytccttcaagcagcaatgtaatctgggataggaggtggggaacatctgcctttccttgtgactgtattctgcagtttcccacagtcattttttattttccagcaaacaagaaccagcaaaaaaaaagtctttgtattctttcctccwgggtacataatacacacctgtgtataagtaaataaactgaaagcaactgcaatggggctattatgtaaacagcaaaagtatttctaccttttcatttctttgtcaacacttgaaytgattcttaagtgttttaatctgatactgtatttcacaaatgaattgattcaaagtgtttctgtccttgcaatctgactttcgccagctctagcagagtggaagtcagtaaagacttcactctcctgaataggccttctacacaaatagcaggggcagtcgtgtgcatcaaaatgtctatgggatgatgaaacgtgttctgtatgacaccagatagcagttgttaggggaatggtaaggaaagcaaagtcttaggcttccagcatatttgctccaagtatgactttgccccactctatca

SEQ ID NO: 87993 - DNA, 600 bp, Chicken  19866894390474_1
aaattagctttagtgatctgccagtgccctgtgttattttgtttgcctgagttgctgttagaaataacagaggaagaaatacaagccaagaatcattacctatcctagaatcactgcgtatcatagtagtttttgtgttcatttctgaggctctcttttaaaatttgcagcatctggggggagctaatcagataagtgaacacggatttattcagagttaatattttcttttagtatcaatgaatttctagaagagacagctagccgagcactctaggtacattttcactttctctactkcatcgtcctttatgcctttcctcacctggcaagctattctaagtgatgactttgaggattttgattaaacccttttgaagactgaacacagccttccccgactgcagtgtttgcagtggtgagcgtttcaacctaataatgcaatcattaacgctgaatggtcagaataagtttccacaggccttagtcaatacttgaatctcgtaagaataaatattggtgctcttgtcaacgtcacaygtacagctacaggaaaagccagatcaggtaattttccttatccttctgaaagttaaccag

SEQ ID NO: 87994 - DNA, 600 bp, Chicken  19866894390474_2
tgaatttctagaagagacagctagccgagcactctaggtacattttcactttctctactkcatcgtcctttatgcctttcctcacctggcaagctattctaagtgatgactttgaggattttgattaaacccttttgaagactgaacacagccttccccgactgcagtgtttgcagtggtgagcgtttcaacctaataatgcaatcattaacgctgaatggtcagaataagtttccacaggccttagtcaatacttgaatctcgtaagaataaatattggtgctcttgtcaacgtcacaygtacagctacaggaaaagccagatcaggtaattttccttatccttctgaaagttaaccagatggataataaaggtagtcacttttcagcagagaggccatgtcttgatgaacatcagaaggagaacatgaatgcctccayaggcaaggagaaggtgaacagcagtgtggaactacatcacactgaattgttcatacatgagtgaaaacaaagaaatgaatacaaggtgaagacagtgtaatattttttttcctctggcattttcttaaaggaaaatggctagttttccctctgctcctac

SEQ ID NO: 87995 - DNA, 600 bp, Chicken  19866894390474_3
actgaacacagccttccccgactgcagtgtttgcagtggtgagcgtttcaacctaataatgcaatcattaacgctgaatggtcagaataagtttccacaggccttagtcaatacttgaatctcgtaagaataaatattggtgctcttgtcaacgtcacaygtacagctacaggaaaagccagatcaggtaattttccttatccttctgaaagttaaccagatggataataaaggtagtcacttttcagcagagaggccatgtcttgatgaacatcagaaggagaacatgaatgcctccayaggcaaggagaaggtgaacagcagtgtggaactacatcacactgaattgttcatacatgagtgaaaacaaagaaatgaatacaaggtgaagacagtgtaatattttttttcctctggcattttcttaaaggaaaatggctagttttccctctgctcctactccccatccaaatgaaacatttggagtttcaatgaatttagttatttttaaatcagaaatcctgatgatttgaaaaaagatctttatttgtggaattgctttgattttttttttctgtaggtgatacatgtaaacgggaa

SEQ ID NO: 87996 - DNA, 600 bp, Chicken  19866894390474_4
ttagtcaatacttgaatctcgtaagaataaatattggtgctcttgtcaacgtcacaygtacagctacaggaaaagccagatcaggtaattttccttatccttctgaaagttaaccagatggataataaaggtagtcacttttcagcagagaggccatgtcttgatgaacatcagaaggagaacatgaatgcctccayaggcaaggagaaggtgaacagcagtgtggaactacatcacactgaattgttcatacatgagtgaaaacaaagaaatgaatacaaggtgaagacagtgtaataytttttttcctctggcattttcttaaaggaaaatggctagttttccctctgctcctactccccatccaaatgaaacatttggagtttcaatgaatttagttatttttaaatcagaaatcctgatgatttgaaaaaagatctttatttgtggaattgctttgattttttttttctgtaggtgatacatgtaaacgggaagagtagaacttccaattaagctaaactttactaataacctttaaagaaggtttatagttaggtataatgcagaattaagtccttacattgaagtttctaagac

SEQ ID NO: 87997 - DNA, 600 bp, Chicken  19866894390476_1
aatatccaaagtaaaaggagacacctcaagattgctggatggggagcattgataaggacacatagctgattttacagcatttcatgatatgaactgtgtatttattggactcttatgtccaataaagacagaagttcaccagctacacatgttattctttaaattattcttctgtattcagaggctttatttgataaatgttccaagctgacattgtacttgagactgaaaaacagcatttttcatgctcttatatgccctaaaaatctttcagttagtctatacacttaatagaaaacrgcaaagatcatgatagagtatgtatctgaagatgtcagatgtgcaactctgatgttcaacttttatagtacagtgaataaaacatttttctagtggcttgctgcctgctacagagttaattccttctgtgaaaaattagggaagttacattctctaacaaaataataatgttcaaacagcattttatgtaaaagaaactacagaataaaccaatttatctaagcactgcatggatttgttaagactgatttatcagttttaattcatctaaactcaaaaacttcctgagctcttaatgga

SEQ ID NO: 87998 - DNA, 600 bp, Chicken  19866894390476_2
tatctaagcactgcatggatttgttaagactgatttatcagttttaattcatctaaactcaaaaacttcctgagctcttaatggatgtaaaatattacttctatttggcttcaaaataaaacataaatccaggtcagtttttcttgagatttgttaaaatagttttatgacttcttcaagactctttgattccttcaaagttaagttaaaaataaatcacaaatgagaaggacaaatcatactagaacttcaggaaagctgaaattagtcatattggaatttgtccaagagtttacattwcacacaccttttctttcaaaaagtagcacaggataatayggtctgcccgattctttagcrtggccttttatcctgagcattggaggtcaaatagcatactactttcaaacactattacagtacaaatgaaaaaggaagaggacaactcacattatttctagcagcacttatgttgattctagaatccatggttaaaccttattaagcttttgaaatcccgtagaagcacaacagagattagtagtggtaaatatagttattctggatatcaaactatgcygaagaaatttggtttagtta

SEQ ID NO: 87999 - DNA, 600 bp, Chicken  19866894390476_3
agttttaattcatctaaactcaaaaacttcctgagctcttaatggatgtaaaatattacttctatttggcttcaaaataaaacataaatccaggtcagtttttcttgagatttgttaaaatagttttatgacttcttcaagactctttgattccttcaaagttaagttaaaaataaatcacaaatgagaaggacaaatcatactagaacttcaggaaagctgaaattagtcatattggaatttgtccaagagtttacattwcacacaccttttctttcaaaaagtagcacaggataatayggtctgcccgattctttagcrtggccttttatcctgagcattggaggtcaaatagcatactactttcaaacactattacagtacaaatgaaaaaggaagaggacaactcacattatttctagcagcacttatgttgattctagaatccatggttaaaccttattaagcttttgaaatcccgtagaagcacaacagagattagtagtggtaaatatagttattctggatatcaaactatgcygaagaaatttggtttagttagattaattcaggtttgataacatcaaaacttcgggtcat

SEQ ID NO: 88000 - DNA, 600 bp, Chicken  19866894390476_4
aaaaacttcctgagctcttaatggatgtaaaatattacttctatttggcttcaaaataaaacataaatccaggtcagtttttcttgagatttgttaaaatagttttatgacttcttcaagactctttgattccttcaaagttaagttaaaaataaatcacaaatgagaaggacaaatcatactagaacttcaggaaagctgaaattagtcatattggaatttgtccaagagtttacattwcacacaccttttctttcaaaaagtagcacaggataatayggtctgcccgattctttagcrtggccttttatcctgagcattggaggtcaaatagcatactactttcaaacactattacagtacaaatgaaaaaggaagaggacaactcacattatttctagcagcacttatgttgattctagaatccatggttaaaccttattaagcttttgaaatcccgtagaagcacaacagagattagtagtggtaaatatagttattctggatatcaaactatgcygaagaaatttggtttagttagattaattcaggtttgataacatcaaaacttcgggtcattttgctggttatagatgctat

SEQ ID NO: 88001 - DNA, 536 bp, Chicken  19866894390476_5
ttgtccaagagtttacattwcacacaccttttctttcaaaaagtagcacaggataatayggtctgcccgattctttagcrtggccttttatcctgagcattggaggtcaaatagcatactactttcaaacactattacagtacaaatgaaaaaggaagaggacaactcacattatttctagcagcacttatgttgattctagaatccatggttaaaccttattaagcttttgaaatcccgtagaagcacaacagagattagtagtggtaaatatagttattctggatatcaaactatgcygaagaaatttggtttagttagattaattcaggtttgataacatcaaaacttcgggtcattttgctggttatagatgctatgtggctaaggtttaaagaggtattaaagatttaacatgcaaggtgcagttatttcattggttttactctctgataacagtgtctttaggtcaataacaatgtacatattggcccagtaaattaattaataacatactttaatttatcaattacagg

SEQ ID NO: 88002 - DNA, 600 bp, Chicken  19866894390479_1
ctgcgcgtcgctgctgggtttgatgtacggcggcgctcatagagaagagagcaggggagcagcggtactgctgataaggcacgggctgcacttacgccgccgttctaccgcaattacagtggaattatgctttttgataactaaattatcactaatgcacataatcgttgggttatgtggatacacaaattacaggactgcctcagccccggattaatacgcgtgcatttcggctccgtgtacactcgtttatactgcaattacgccatcatatcattaaccatctggttatagcagtgygcatcaaccacaggtatctccaaccaggagggctgcagtgggaccaccactcccaacaccagtccttactggtgtgtcacggaggctctgaatgatgcccagtccccctggctccctccaccccacacccagacccacagagggctgctgggctggcagagcatccttgcatggcatccttgcatccttgcatccatgcaatgctacgcttgttccaaaataaggggtagggctagatgagcccgatgccatgccacctctccatgtcatgaagcagacccatcagcccttcccctgcca

SEQ ID NO: 88003 - DNA, 600 bp, Chicken  19866894390482_1
gtacgtgactcccgttctggttgtagcgctcggcgttggagaacacctgtttcatgtcagagaggaactcctgcactgagcggtaattgccacaagagcacttgctctgcatagtctggaagtccatggggttgctgatgacctcacagtaatcttcggcttcttctgtggtcactggctccctgatgaatgaagagccacaaagaagaagaaaatgaggagccctggcactgcgcagtgcagagctgtcaatgtgaacagcagccccaacccacaccccaccacagtgccatagcaaamccaagtacctcwgcagcagcagacatgtcaaccctgcagtgggcacagaaccgatgacaggaaggagagtagtacagggacacagcaggtatggctccgtgcagcactgcctgcaaaccctgggggctgctgaaaactgatcccatcctcctgcccttgtcccacaacctaccacgctctgttatcctgcaccagagggaccccaggtctccagtccagcagaggactgagaccatggtgctttagagcagattcgctcccttttcttcccaagtgtaacttgtaagacctaactcagga

SEQ ID NO: 88004 - DNA, 600 bp, Chicken  19866894390482_2
cgttctggttgtagcgctcggcgttggagaacacctgtttcatgtcagagaggaactcctgcactgagcggtaattgccacaagagcacttgctctgcatagtctggaagtccatggggttgctgatgacctcacagtaatcttcggcttcttctgtggtcactggctccctgatgaatgaagagccacaaagaagaagaaaatgaggagccctggcactgcgcagtgcagagctgtcaatgtgaacagcagccccaacccacaccccaccacagtgccatagcaaamccaagtacctcwgcagcagcagacatgtcaaccctgcagtgggcacagaaccgatgacaggaaggagagtagtacagggacacagcaggtatggctccgtgcagcactgcctgcaaaccctgggggctgctgaaaactgatcccatcctcctgcccttgtcccacaacctaccacgctctgttatcctgcaccagagggaccccaggtctccagtccagcagaggactgagaccatggtgctttagagcagattcgctcccttttcttcccaagtgtaacttgtaagacctaactcaggattcaggaccaga

SEQ ID NO: 88005 - DNA, 600 bp, Chicken  19866894390486_1
aagctgatcttagagtttcatccagtccacctgtagccatgagaaaagccatactttctgtgagatcctgctttctctgttttcctttgcctgttgcagaaggctgctgtgacttctctgaaggtcgctttcctaaggaaggttggtctgttctgaacaatttttacaaacctaaagtcacagtctggtggagttactgcatcactggacaagagaagagctgctgatgtcagctatctggacttcagtaaggcctttgacattgtaccccacaacatcctcatttccaaattggaaacyatatgagtttgctgggtagactctgatgggtatggaaatggttgtgaggtaggacccagatggtggtggtcagtggctcagtgttttgatggaggtcagtgataaattgtgtccctcaggagtcggtactgtttatcatcttcatcaatgatactaagaatgggatcgagtgcactctcagcagtttgtggataacaccaaactgtgtggtgtgatctaagtgcctgagggttgggatgccatctagaaagacctaggcaggctcaaayggagggcccaggagaacctcataaagttaaa

SEQ ID NO: 88006 - DNA, 336 bp, Chicken  19866894390486_2
ccacaacatcctcatttccaaattggaaacyatatgagtttgctgggtagactctgatgggtatggaaatggttgtgaggtaggacccagatggtggtggtcagtggctcagtgttttgatggaggtcagtgataaattgtgtccctcaggagtcggtactgtttatcatcttcatcaatgatactaagaatgggatcgagtgcactctcagcagtttgtggataacaccaaactgtgtggtgtgatctaagtgcctgagggttgggatgccatctagaaagacctaggcaggctcaaayggagggcccaggagaacctcataaagttaaataaag

SEQ ID NO: 88007 - DNA, 600 bp, Chicken  19866894390488_1
attaacattaaaccaaaaatatttaagctcacctactgagagaagacgccacgtaacagcaggggtagcaaagcaagcaaacacatcgtcagtgcaggcaaagtgagtgaggtggggaaggaccacagactggccgcggcactggccccacatgtacacctggccgctctgcgtcttggcagccgaagtgtgagcagagtggcaggctgcaatctctataactctatatttataagcagaaaaagaagaaaagcaagtcactgtcataagaacaaaacgcagcgaaaaagctcatacttyccgcatttcccyrgtgcaaaacgcatctacaagcacacatgcacttcagatggcaagaacattttcctatcataagtagcaaaattaaaacagttatcagtgtttctttaaacagtgtgcactcagaatgtttcttggtgagaaagcatctggggagtcaggcaagtaggacaggacaagcagtgctgcagcagagcactaggctgcagtacgtgctctgctgaccccttggctccctcagacaaagccacggtgagttccaagtctgctcgccttcggtggtcctgcacagcgagggtg

SEQ ID NO: 88008 - DNA, 600 bp, Chicken  19866894390488_2
ccaaaaatatttaagctcacctactgagagaagacgccacgtaacagcaggggtagcaaagcaagcaaacacatcgtcagtgcaggcaaagtgagtgaggtggggaaggaccacagactggccgcggcactggccccacatgtacacctggccgctctgcgtcttggcagccgaagtgtgagcagagtggcaggctgcaatctctataactctatatttataagcagaaaaagaagaaaagcaagtcactgtcataagaacaaaacgcagcgaaaaagctcatacttyccgcatttcccyrgtgcaaaacgcatctacaagcacacatgcacttcagatggcaagaacattttcctatcataagtagcaaaattaaaacagttatcagtgtttctttaaacagtgtgcactcagaatgtttcttggtgagaaagcatctggggagtcaggcaagtaggacaggacaagcagtgctgcagcagagcactaggctgcagtacgtgctctgctgaccccttggctccctcagacaaagccacggtgagttccaagtctgctcgccttcggtggtcctgcacagcgagggtgagctgttgcatt

SEQ ID NO: 88009 - DNA, 600 bp, Chicken  19866894390488_3
caaaaatatttaagctcacctactgagagaagacgccacgtaacagcaggggtagcaaagcaagcaaacacatcgtcagtgcaggcaaagtgagtgaggtggggaaggaccacagactggccgcggcactggccccacatgtacacctggccgctctgcgtcttggcagccgaagtgtgagcagagtggcaggctgcaatctctataactctatatttataagcagaaaaagaagaaaagcaagtcactgtcataagaacaaaacgcagcgaaaaagctcatacttyccgcatttcccyrgtgcaaaacgcatctacaagcacacatgcacttcagatggcaagaacattttcctatcataagtagcaaaattaaaacagttatcagtgtttctttaaacagtgtgcactcagaatgtttcttggtgagaaagcatctggggagtcaggcaagtaggacaggacaagcagtgctgcagcagagcactaggctgcagtacgtgctctgctgaccccttggctccctcagacaaagccacggtgagttccaagtctgctcgccttcggtggtcctgcacagcgagggtgagctgttgcatta

SEQ ID NO: 88010 - DNA, 600 bp, Chicken  19866894390488_4
aaaaaaagtaaaaccaaacagagcgctgaaagctgtttccaaatgcattctagttacggtaggctatcacagtaatcctaaagttgatttaggatttcataaatcccgctgtgtacagcactgcacagtcctctgttctgcagtctgaactaccacttgtttgcttgtttttccagctgcctggggaaagtagctgggaaacaactggtttaaggctgcatgtacaaatcctgcaggctttagcgaggtaatattctcactcacaccaggaatatatattctggcaaagagaagggaaargcaatacagagtattaaaatccatactaaaacgtggtaacatttcaactgcagccaaagtgtctgggaaaaaaaaaatcactttaattttaagcaaaagcacaaacacaaagaaatagcaatgtgcaaaatcaggccatgtctcatcgccgcagaggagytccctctctcttcattacagtaacagtcacagacatctttaaagggtcatcacacttttcttattatccacagtaggaggccaaagtcaataccccagcagcacagaacagacttaaacatcagcccatataaatacgtg

SEQ ID NO: 88011 - DNA, 600 bp, Chicken  19866894390488_5
acagtaatcctaaagttgatttaggatttcataaatcccgctgtgtacagcactgcacagtcctctgttctgcagtctgaactaccacttgtttgcttgtttttccagctgcctggggaaagtagctgggaaacaactggtttaaggctgcatgtacaaatcctgcaggctttagcgaggtaatattctcactcacaccaggaatatatattctggcaaagagaagggaaargcaatacagagtattaaaatccatactaaaacgtggtaacatttcaactgcagccaaagtgtctgggraaaaaaaaatcactttaattttaagcaaaagcacaaacacaaagaaatagcaatgtgcaaaatcaggccatgtctcatcgccgcagaggagytccctctctcttcattacagtaacagtcacagacatctttaaagggtcatcacacttttcttattatccacagtaggaggccaaagtcaataccccagcagcacagaacagacttaaacatcagcccatataaatacgtggttttgaattagcaayagaaagaatcaccccactacccatcaatgactgaggtaaagtatttgatctg

SEQ ID NO: 88012 - DNA, 600 bp, Chicken  19866894390488_6
ttgcttgtttttccagctgcctggggaaagtagctgggaaacaactggtttaaggctgcatgtacaaatcctgcaggctttagcgaggtaatattctcactcacaccaggaatatatattctggcaaagagaagggaaargcaatacagagtattaaaatccatactaaaacgtggtaacatttcaactgcagccaaagtgtctgggaaaaaaaaaatcactttaattttaagcaaaagcacaaacacaaagaaatagcaatgtgcaaaatcaggccatgtctcatcgccgcagaggagytccctctctcttcattacagtaacagtcacagacatctttaaagggtcatcacacttttcttattatccacagtaggaggccaaagtcaataccccagcagcacagaacagacttaaacatcagcccatataaatacgtggttttgaattagcaayagaaagaatcaccccactacccatcaatgactgaggtaaagtatttgatctgtaaaaatctaagcttaattttcaaccagcgacagcaagaggaaacacttccctttctctctcccctgggctatgagctgggtttaatagcag

SEQ ID NO: 88013 - DNA, 600 bp, Chicken  19866894390488_7
aaatccatactaaaacgtggtaacatttcaactgcagccaaagtgtctgggaaaaaaaaaatcactttaattttaagcaaaagcacaaacacaaagaaatagcaatgtgcaaaatcaggccatgtctcatcgccgcagaggagytccctctctcttcattacagtaacagtcacagacatctttaaagggtcatcacacttttcttattatccacagtaggaggccaaagtcaataccccagcagcacagaacagacttaaacatcagcccatataaatacgtggttttgaattagcaayagaaagaatcaccccactacccatcaatgactgaggtaaagtatttgatctgtaaaaatctaagcttaattttcaaccagcgacagcaagaggaaacacttccctttctctctcccctgggctatgagctgggtttaatagcagatataacacaaattgcagatgtccactccttgtgtgtattccttgtcaagcgtagcatattagaatacaatttctgttcagaggcaataaagcttttattgttgacttcaaacaatgcaatgaccaaagagaaaatgcaattaagacctacgtggt

SEQ ID NO: 88014 - DNA, 600 bp, Chicken  19866894390508_1
taaatagttagcgttcttgatcaacatttatcaatagccaaattggaggagaaggaaatactatcaggaactgattgaaaaggtcactgtggaattgcaagtgtgaaatgtagatcagcaggagacagtttggattttctgccaatagaggaggatgctggtaatggatttttctgtagtttaactatactttaacagtaaatggaacagaaatttctgtatcaattagctcttgttttcaaattcagctgtatatttttctgaatgtatttccctttaaatattcctccaaacacagaykggagctttgttgartctgttttacaattctgatatttcagacagacatgtgttccccgaaactacatgtaggatcaaacatggttttacagatcagggtctctgtcccaactccgcagcgctcaggtgatactctttctttcctgcagacaagttgcctcaggttgttttaatcctggcgcctctgtgaacaaagctttaaagaggaatttgttttagaattttttagtccaaagcatgaaatactaatattatcagatcataaacaacttttctttctataagagaaggttgtttctt

SEQ ID NO: 88015 - DNA, 600 bp, Chicken  19866894390508_2
aaatagttagcgttcttgatcaacatttatcaatagccaaattggaggagaaggaaatactatcaggaactgattgaaaaggtcactgtggaattgcaagtgtgaaatgtagatcagcaggagacagtttggattttctgccaatagaggaggatgctggtaatggatttttctgtagtttaactatactttaacagtaaatggaacagaaatttctgtatcaattagctcttgttttcaaattcagctgtatatttttctgaatgtatttccctttaaatattcctccaaacacagaykggagctttgttgartctgttttacaattctgatatttcagacagacatgtgttccccgaaactacatgtaggatcaaacatggttttacagatcagggtctctgtcccaactccgcagcgctcaggtgatactctttctttcctgcagacaagttgcctcaggttgttttaatcctggcgcctctgtgaacaaagctttaaagaggaatttgttttagaattttttagtccaaagcatgaaatactaatattatcagatcataaacaacttttctttctataagagaaggttgtttctta

SEQ ID NO: 88016 - DNA, 600 bp, Chicken  19866894390508_3
cttgatcaacatttatcaatagccaaattggaggagaaggaaatactatcaggaactgattgaaaaggtcactgtggaattgcaagtgtgaaatgtagatcagcaggagacagtttggattttctgccaatagaggaggatgctggtaatggatttttctgtagtttaactatactttaacagtaaatggaacagaaatttctgtatcaattagctcttgttttcaaattcagctgtatatttttctgaatgtatttccctttaaatattcctccaaacacagaykggagctttgttgartctgttttacaattctgatatttcagacagacatgtgttccccgaaactacatgtaggatcaaacatggttttacagatcagggtctctgtcccaactccgcagcgctcaggtgatactctttctttcctgcagacaagttgcctcaggttgttttaatcctggcgcctctgtgaacaaagctttaaagaggaatttgttttagaattttttagtccaaagcatgaaatactaatattatcagatcataaacaacttttctttctataagagaaggttgtttcttattactatctgataa

SEQ ID NO: 88017 - DNA, 600 bp, Chicken  19866894390513_1
gcctgttttcttacatcggcctacactggagctgaagttggtccgtagatatgtaggtagtgttgataacaagttgcagcataccctatgctgttactgcaagtgtgaaataataaacgtggagtaattgcttggtgctttacatgctgcagatttcagagccagctttagaacagcgcaatctaattctcaatcatccaattctgaaaactggtctcttctaattttatttgagtgaaagcattaaatgaaaactttagtctggaaaaggtttgtatttttgatgctcttgtcatttgyctgaaaactagagatcactgattcatcactatcagttctcttaattgtgcactcagaaaattaaatacagtcatattcaaccatgttacaatgtctttcactttaaatcacctatgctttgactttttcacacttctgacaatctgtagctaactgcagcacaaaatgttatcagccttgcacaggctgttgtaccaattttgcattaaagctcaatggtaatttggaagacaatagattctcttttgatctttatgtagaactagggctttttctttctttctgagtgtagctaaatgg

SEQ ID NO: 88018 - DNA, 600 bp, Chicken  19866894390513_2
acctatgctttgactttttcacacttctgacaatctgtagctaactgcagcacaaaatgttatcagccttgcacaggctgttgtaccaattttgcattaaagctcaatggtaatttggaagacaatagattctcttttgatctttatgtagaactagggctttttctttctttctgagtgtagctaaatggtgatattaaaagtacagtaatttatatgtgcctcaattgatcattaatgtgcaataaaaatctttctttgtttcatctatgtactgagagctttgtcatatgaacaccrtgtgttttctgtggacccagctgcttttgttttggattgccttgacaacaattttatgcttgaataatcctgtagataaaaaccgctgtcagtcacaacatctgtatcagtgtattgaatcagtttgaaagtttagtactaacaatgttattgttcatcgaaatgaaaagcatattctattcatagtgtctcagtgaaatataatcttgtttgccattgcccatagttgtaactactagaaatcttgggaataatctgtttattagatatctgttcatcagttattcataatcactactc

SEQ ID NO: 88019 - DNA, 600 bp, Chicken  19866894390514_1
ctcttattttcaagaccctttcagactcccgcaactctcaattattatttaaaaattttatactaatatttctgtctattgtcagaagttgagtctggcttcatgtttcttttaacaacaatgtttattactacaatgcagaaacaacatgtgttccaaaaggaggtgggaaatcattctaatctagtttgctgatgttgtaagaaactattcttatgagcacttgccagtacatcgcataggctagcactttaatgagtttgactctccattctaactaattcagtttttatgaagtgraaattaagctataagaattatgcaggctctttgataagtaagtttaattttcaccaacttttgaatcaaccgtggcagtacaggacctatgaaacagtatttgctgaaaaattcttctattttctaaatgtactctgtgaaacagaagctcttcctccctactgccatctcagagaaaacgagctccttgagggattgctctattctgttctactatacattagatcttttatattaatataatacatttaatctattacttaaagaaataatttcgctttccttttcccttaacagagt

SEQ ID NO: 88020 - DNA, 600 bp, Chicken  19866894390514_2
gagaaaacgagctccttgagggattgctctattctgttctactatacattagatcttttatattaatataatacatttaatctattacttaaagaaataatttcgctttccttttcccttaacagagttaataacctagcataaagagctaaagtcctttatccacaaagataaagttctacttgttcacagtgcttaagttctggataatagtcaccaggtgaacatatttttcaccatgagatttgagctattaacaaactgtattatatttcatgtataccaaaccaaatgaaaacycacaaaactctggcatgacatttaccatagaaagaaaatacagaatttagagcatctgatattacggtgacattgaaactattttaataatacgaaaacatagagaaaaagaagctgaataaagacctactgttggattagaggaaaaagaaataaaatttagatattgaaataaaaaccatacttagtttttatctgaaataataataatatctctatggatatttatgtattttttcttgtaatgtgagtagaataattgccattcttatcacaaggtcatattgtcagatattttga

SEQ ID NO: 88021 - DNA, 600 bp, Chicken  19866894390520_1
ctctcttgaaagagaaaggtctttgctatttgcgtatctattattcttcagtggtaaaacaaaacatctgataaacgaggactctaaaatgttataaaacattgtttcctttctgtacatgcgtattgactttctttgtcctggcatgggctcaaatctgctttttggatgcagtgatttttatatttccttttgtttttttccattctgcttacatggaattcatccaatacttaggatattcagattgtttttacagcagcagagaggggctcaaatttaccagaagtccaaccctcyctgcaaaatactgtatgatttctgcttggtaagatgagaacatccaatatcctgcagaacttgtctatgtgaatggctctcaaggcaacatccaaagggttatgagcttctgttgttgggtggtttttcttttctaataggttgtgaaatgggtcctgacattgtttcagctgtgatattgtagcttgaattggaaccactggcctatgagattcttcattagcatcagttcaacatcttttcttcctctcctctgcaaaattttatgaacttgaccacccttatctcggcgaaggctct

SEQ ID NO: 88022 - DNA, 600 bp, Chicken  19866894390520_2
atgagcttctgttgttgggtggtttttcttttctaataggttgtgaaatgggtcctgacattgtttcagctgtgatattgtagcttgaattggaaccactggcctatgagattcttcattagcatcagttcaacatcttttcttcctctcctctgcaaaattttatgaacttgaccacccttatctcggcgaaggctctatgtgcagattgaggcagtaaaagtgattagcagtccaaagagtcttcccagaaagggagactgaagaaaaagaacagaccatttaatctagaagcaagaraaaccccatggaagggacgcagtgagatatgttctgtgggataggaaaaatacatctgtactactatttatcctctcacttaatgaagtcacaatcaattgatccgaaaggcaacaaactaacagctgataaaaaattaaaagaaaacagcatgagccactgcagcactaaccaaaatgaaagatcaatccaaaaccagattagatatgcaaataatgtgaatgtggatagttacactacagagaatcacaattgattttattcacatgaagtaaaaattactgtgatacaggttataag

SEQ ID NO: 88023 - DNA, 600 bp, Chicken  19866894390520_3
ctgactgtcagtctcagctgctggaatccgtgtttctggagaaggaactacaggaattgctcgatctgaaatggaccctaccagtcaattttttcttttctttttttttcccaacttttcagctttatttgtctacactgcagactgcatagttcatttatttaggtgacacagtacctcagtaaacaatatttggacttaggacttcaaaactgattttttttctctcccagcctcttcttaccagatttttttttttaactctgtaggcacaaaaaggtgtattcttgctttcagttycaagagctcaaagcacagttgcctaaggctgctttgtcaggagagaaagactgtgttagcaccatctttcctgttctctccctatatatagtactgctataatgatgataatgtgatcagtgatgctgaagaaggattaagggcttgacctagtcagactttatggtttcccagctggcagtgagaaattacttcttgtgttcccagtgccaaagaatgacttaactggaggaattggatttttttgctttcttttaagataggcagaaggagggagtcctgatgtctttatgagaagaa

SEQ ID NO: 88024 - DNA, 599 bp, Chicken  19866894390522_1
  misc_feature (1)..(44): n is any nucleotide
nnnnnnnnnnnnnnnnnnnnnnnnnnnnnnnnnnnnnnnnnnnntaaatatgccctcagaaggtcaaagctctcatgaagtggtgagaagtctcttttacacagtcacctctttggccacaaaggactagagccttggacaagtgcaaacctaacttccagaacagtgcctggccaccagcgagtacagcttcctgagttacatggccctgaacagcctttcagtatccaaagtggagccccaggaaagaaggggacagactcttttgcaggatctgttgtgacaggacaagaggaaatygtttcaaacaaagagaggaaatctagattagatttaaggaattttttttccagtwagtgtggtgaggcactggaataggctgcccagattggtggtgaacgctccatcctttgagaaattcaaggtcaggcaggacaggactccgagcaccctgatctagctgtaggggagttggacaagatgacctttaagagtcccttctgactccaatggttctatgattctatgaagagtgaaacccatgatgctgggaggatttgaaagaatgaattcacttctggaaagagtgtttcatatgg

SEQ ID NO: 88025 - DNA, 600 bp, Chicken  19866894390522_2
tcagaaggtcaaagctctcatgaagtggtgagaagtctcttttacacagtcacctctttggccacaaaggactagagccttggacaagtgcaaacctaacttccagaacagtgcctggccaccagcgagtacagcttcctgagttacatggccctgaacagcctttcagtatccaaagtggagccccaggaaagaaggggacagactcttttgcaggatctgttgtgacaggacaagaggaaatygtttcaaacaaagagaggaaatctagattagatttaaggaattttttttccagtwagtgtggtgaggcactggaataggctgcccagattggtggtgaacgctccatcctttgagaaattcaaggtcaggcaggacaggactccgagcaccctgatctagctgtaggggagttggacaagatgacctttaagagtcccttctgactccaatggttctatgattctatgaagagtgaaacccatgatgctgggaggatttgaaagaatgaattcacttctggaaagagtgtttcatatggagagaaaccaccattttctgcaaggaagggctgatatagctcaagggctcagctga

SEQ ID NO: 88026 - DNA, 600 bp, Chicken  19866894390522_3
aatagactgtggtaaggatccaggagggaatttaaatttatgacagctgtgatacaagaaacacattttgcttttaaaactgtattttttttttctactgaaagagaaaaaaaaaaggtagagtaaaatgcggagaaaaatgttttgctagaactggaccatcagttgttatctcttctaagctaagccttctcctacagagaccattcaacagaagcacagaaaaagccttttgttacactgcacaatacctccaacaaaccaatttcttgcaagtgggtcactttgcacataagacamgattcttaagtccacgaggtaaattctmatttgaatattctgttcttcttttctataatggggagctaaatgatgacaataatgaagcagaacatgaaaatattataactggcacttcaaatggctcttttttttctttcccccartgtgaacatgcattattttcagtctagcttccagtagatggctacatacatgtgaaatgtcaccaggctaatgctattgtactaattggccaaataatgaacaattgcagagcctactctaagcacgcctggagggtgactcttccaaagcaga

SEQ ID NO: 88027 - DNA, 600 bp, Chicken  19866894390522_4
aatttaaatttatgacagctgtgatacaagaaacacattttgcttttaaaactgtattttttttttctactgaaagagaaaaaaaaaaggtagagtaaaatgcggagaaaaatgttttgctagaactggaccatcagttgttatctcttctaagctaagccttctcctacagagaccattcaacagaagcacagaaaaagccttttgttacactgcacaatacctccaacaaaccaatttcttgcaagtgggtcactttgcacataagacamgattcttaagtccacgaggtaaattctmatttgaatattctgttcttcttttctataatggggagctaaatgatgacaataatgaagcagaacatgaaaatattataactggcacttcaaatggctcttttttttctttcccccartgtgaacatgcattattttcagtctagcttccagtagatggctacatacatgtgaaatgtcaccaggctaatgctattgtactaattggccaaataatgaacaattgcagagcctactctaagcacgcctggagggtgactcttccaaagcagagctaagacacactgccagtgcaccagct

SEQ ID NO: 88028 - DNA, 600 bp, Chicken  19866894390522_5
gctagaactggaccatcagttgttatctcttctaagctaagccttctcctacagagaccattcaacagaagcacagaaaaagccttttgttacactgcacaatacctccaacaaaccaatttcttgcaagtgggtcactttgcacataagacamgattcttaagtccacgaggtaaattctmatttgaatattctgttcttcttttctataatggggagctaaatgatgacaataatgaagcagaacatgaaaatattataactggcacttcaaatggctcttttttttctttcccccartgtgaacatgcattattttcagtctagcttccagtagatggctacatacatgtgaaatgtcaccaggctaatgctattgtactaattggccaaataatgaacaattgcagagcctactctaagcacgcctggagggtgactcttccaaagcagagctaagacacactgccagtgcaccagctgcacaggaaaaggctgtgcctattcaatatccaaagggaagagagcaaacacccagggcaattcagcacactctctgtcagaatctctgcatctatcgaaaaaaaatttagaagggtg

SEQ ID NO: 88029 - DNA, 599 bp, Chicken  19866894390524_1
  misc_feature (1)..(199): n is any nucleotide
nnnnnnnnnnnnnnnnnnnnnnnnnnnnnnnnnnnnnnnnnnnnnnnnnnnnnnnnnnnnnnnnnnnnnnnnnnnnnnnnnnnnnnnnnnnnnnnnnnnnnnnnnnnnnnnnnnnnnnnnnnnnnnnnnnnnnnnnnnnnnnnnnnnnnnnnnnnnnnnnnnnnnnnnnnnnnnnnnnnnnnnnnnnnnnnnnnnnnnncagcagtgctccagctgtgccctgctccaacccatgccccagcagtgccactgctcatctccaggggggctgcacgcactgagaggggagaatggggaggratttggtgccacggtgctttgctccgtgcaggtgagtctgcatcgctccccctatgcttccgcccgcctccacccaggaggtttacatgccacgttccctgcaattaaagcacttcgctaatcagagcacgtcagcccggctgtcagcgcagtgccgcggccccggagcacgtggcagcacagagctgcccggcccacacggaactcacagcagcaacccgagggctgggatttctcatggaaatcatggcaacgttggcaacatcccaagaaaaacgaaggctccaagtcacataatt

SEQ ID NO: 88030 - DNA, 600 bp, Chicken  19866894390536_1
ctgggacagtataagcttaatttactgcaagagctttttagattagtaccaggagctgttcttttagacagagcagggcactggcacaggctgaaatactgtgctgtgttgcagcatatggatgtttgatcgacccatagggagaatgaaactcggcagccagcccagtttctttgccaactcttaggtcagaggcaggcaaggtaaatatgccagctgggagtcaaggcagtgatcaaggccttttgtttcccttctgggaactggaaatggtcccaccttcctcaagacattgttgcygtaggatgcctgtcctcaaatggttaagtgctgaagcttgtctgagatatttctctcttctggggaaygygttaagcactaaatgatgcatgagccccgttggagggaagtgttacattctgtacacagactatttatttttcactgatgattttattctgaagccaggtgtggttccaggcaaatgtgacaaggtaagcaggccctgaagcaaggcagtcatttgcgttcctctaaacaaacacatcccctaattactgttttaaagatgatctaacrtagtaagaagtaatagcaaat

SEQ ID NO: 88031 - DNA, 600 bp, Chicken  19866894390536_2
cagagcagggcactggcacaggctgaaatactgtgctgtgttgcagcatatggatgtttgatcgacccatagggagaatgaaactcggcagccagcccagtttctttgccaactcttaggtcagaggcaggcaaggtaaatatgccagctgggagtcaaggcagtgatcaaggccttttgtttcccttctgggaactggaaatggtcccaccttcctcaagacattgttgcygtaggatgcctgtcctcaaatggttaagtgctgaagcttgtctgagatatttctctcttctggggaaygygttaagcactaaatgatgcatgagccccgttggagggaagtgttacattctgtacacagactatttatttttcactgatgattttattctgaagccaggtgtggttccaggcaaatgtgacaaggtaagcaggccctgaagcaaggcagtcatttgcgttcctctaaacaaacacatcccctaattactgttttaaagatgatctaacrtagtaagaagtaatagcaaataattctgtagggtgggacacgtcaaactggcactggagtgaaagaggttgtcttgaagttgtaacaac

SEQ ID NO: 88032 - DNA, 600 bp, Chicken  19866894390536_3
gagcagggcactggcacaggctgaaatactgtgctgtgttgcagcatatggatgtttgatcgacccatagggagaatgaaactcggcagccagcccagtttctttgccaactcttaggtcagaggcaggcaaggtaaatatgccagctgggagtcaaggcagtgatcaaggccttttgtttcccttctgggaactggaaatggtcccaccttcctcaagacattgttgcygtaggatgcctgtcctcaaatggttaagtgctgaagcttgtctgagatatttctctcttctggggaaygygttaagcactaaatgatgcatgagccccgttggagggaagtgttacattctgtacacagactatttatttttcactgatgattttattctgaagccaggtgtggttccaggcaaatgtgacaaggtaagcaggccctgaagcaaggcagtcatttgcgttcctctaaacaaacacatcccctaattactgttttaaagatgatctaacrtagtaagaagtaatagcaaataattctgtagggtgggacacgtcaaactggcactggagtgaaagaggttgtcttgaagttgtaacaactt

SEQ ID NO: 88033 - DNA, 600 bp, Chicken  19866894390536_4
cttcctcaagacattgttgcygtaggatgcctgtcctcaaatggttaagtgctgaagcttgtctgagatatttctctcttctggggaaygygttaagcactaaatgatgcatgagccccgttggagggaagtgttacattctgtacacagactatttatttttcactgatgattttattctgaagccaggtgtggttccaggcaaatgtgacaaggtaagcaggccctgaagcaaggcagtcatttgcgttcctctaaacaaacacatcccctaattactgttttaaagatgatctaacrtagtaagaagtaatagcaaataattctgtagggtgggacacgtcaaactggcactggagtgaaagaggttgtcttgaagttgtaacaacttgtctttatatttggcatgctgctttgcctatcccaaatttaagaaaatcgtgggtgatatttcttaggaaggattgctatcttaagaatcagtgtctgtcccaactgcaaaacaaaacaaaacaaaacaaaaaaaaggcatctttttctcattagtttatctctgctttatgattttgctttcattatttctctttttccacatatatc

SEQ ID NO: 88034 - DNA, 600 bp, Chicken  19866894390540_1
ggagtggtgtattacctcccatgaagggaagcagtgctgtgtgactgctgaaagcagccatgtcgaatccaccacctcaaggccctttcttgcagcagcagcttttccccaccacctgcgggttcctgacctgcatctgtggttggatggagcaggcagtgagatggggagccgtgcaagggcacgactaaagaagccattagaagttcacagttcagtgcactgaactgaacgaaatctctaaacttagagtccagtttgccttgggcagcagacagctgtttgttgtattatttagcrtctgtctgctggtgatggatgatgtgacacgagaatccagaggatgttctaaattcatccccagctrcacggcgcggtgcggcacagcgcttctcccagctgtccctgctgaaggcsgtgggtggagcagcagacaattagcacccctgtgcctaattacttgcattgcagtatcagaggatcttgcctgtatcctgaggtctggctcttccgtgttcaacactgaggccatcttctgtgctctggtaatcggtcgtggtggaggtgggtggacttggaagtgtgttccttgtgagccta

SEQ ID NO: 88035 - DNA, 600 bp, Chicken  19866894390540_2
tccaccacctcaaggccctttcttgcagcagcagcttttccccaccacctgcgggttcctgacctgcatctgtggttggatggagcaggcagtgagatggggagccgtgcaagggcacgactaaagaagccattagaagttcacagttcagtgcactgaactgaacgaaatctctaaacttagagtccagtttgccttgggcagcagacagctgtttgttgtattatttagcrtctgtctgctggtgatggatgatgtgacacgagaatccagaggatgttctaaattcatccccagctrcacggcgcggtgcggcacagcgcttctcccagctgtccctgctgaaggcsgtgggtggagcagcagacaattagcacccctgtgcctaattacttgcattgcagtatcagaggatcttgcctgtatcctgaggtctggctcttccgtgttcaacactgaggccatcttctgtgctctggtaatcggtcgtggtggaggtgggtggacttggaagtgtgttccttgtgagcctatttgtgcaggacgctttgtggtggatgcggtgtgttcttatttagcaacaaggacatgttgtgcctc

SEQ ID NO: 88036 - DNA, 600 bp, Chicken  19866894390540_3
gcgggttcctgacctgcatctgtggttggatggagcaggcagtgagatggggagccgtgcaagggcacgactaaagaagccattagaagttcacagttcagtgcactgaactgaacgaaatctctaaacttagagtccagtttgccttgggcagcagacagctgtttgttgtattatttagcrtctgtctgctggtgatggatgatgtgacacgagaatccagaggatgttctaaattcatccccagctrcacggcgcggtgcggcacagcgcttctcccagctgtccctgctgaaggcsgtgggtggagcagcagacaattagcacccctgtgcctaattacttgcattgcagtatcagaggatcttgcctgtatcctgaggtctggctcttccgtgttcaacactgaggccatcttctgtgctctggtaatcggtcgtggtggaggtgggtggacttggaagtgtgttccttgtgagcctatttgtgcaggacgctttgtggtggatgcggtgtgttcttatttagcaacaaggacatgttgtgcctccactgtgcgaggaacgtgagtctgtgattcatgagtgcrtcttccaggct

SEQ ID NO: 88037 - DNA, 600 bp, Chicken  19866894390540_4
tgctgaaggcsgtgggtggagcagcagacaattagcacccctgtgcctaattacttgcattgcagtatcagaggatcttgcctgtatcctgaggtctggctcttccgtgttcaacactgaggccatcttctgtgctctggtaatcggtcgtggtggaggtgggtggacttggaagtgtgttccttgtgagcctatttgtgcaggacgctttgtggtggatgcggtgtgttcttatttagcaacaaggacatgttgtgcctccactgtgcgaggaacgtgagtctgtgattcatgagtgcrtcttccaggctaagtggacatccttcagtcacgctctcaaggttatgcagccagagagtgaagcgccaacaacagatgatgtttttctaagggctgcacagtgctgctgctcagctccatggtggccctccgcctcctggaagggctcagcacacgggcagtgctgcggggcacagccaggctcagtccttccaaacagcaccagattttctgtcactgggaaagaaaaatgtttgtatccataatgactaacgcagaaaaaatgtggattctcagagagagagtctattttcaaacact

SEQ ID NO: 88038 - DNA, 599 bp, Chicken  19866894390544_1
  misc_feature (1)..(55): n is any nucleotide
nnnnnnnnnnnnnnnnnnnnnnnnnnnnnnnnnnnnnnnnnnnnnnnnnnnnnnnggtatggctttgtgaggccactgccgctgctctgagcatcctcctgtgggtcttcccccatgaaaattgctccattccgcctcgagtttaccattccttataaatattttatggctcttaagtaagaaaatgttacgcagccgttaagtgtgctggatggctctttaagcctccagtgttttaacactaggcggtttatcattactaattccttcggtaattatggtaggaacaataatcagagygcgctcgtttggttttaatgggggtgtattggttccacgaggactgcactcgggtggttggtaggatgcggcccttcggggcaggagcatcaccagggcagcagtacagcacagagggcaaagggacagcaaagtggtggggtccccatccccagtgcagagatgyggcactgagggctgcggtcagtgggcacagtgggatggggttggactcggagggtcttcgaggtctttcccactgttgttctatggaggagagcgccgctcccggcctggctgagcatcaccccctccctcca

SEQ ID NO: 88039 - DNA, 600 bp, Chicken  19866894390544_2
tggctcttaagtaagaaaatgttacgcagccgttaagtgtgctggatggctctttaagcctccagtgttttaacactaggcggtttatcattactaattccttcggtaattatggtaggaacaataatcagagygcgctcgtttggttttaatgggggtgtattggttccacgaggactgcactcgggtggttggtaggatgcggcccttcggggcaggagcatcaccagggcagcagtacagcacagagggcaaagggacagcaaagtggtggggtccccatccccagtgcagagatgyggcactgagggctgcggtcagtgggcacagtgggatggggttggactcggagggtcttcgaggtctttcccactgttgttctatggaggagagcgccgctcccggcctggctgagcatcaccccctccctccatcccctcagcacaccccgtgccttcgcctctacaagcaccccaagtgctttatcagagagctgttttgttttttaacaagtgaagcaggagagcaggggagcgcggcgccggggctgtgtttggctgtgtaatgttcatttcatgctccgcaagcagtttgccgtat

SEQ ID NO: 88040 - DNA, 600 bp, Chicken  19866894390550_1
gtatgatctgtgactggcataagcaaaagctttcaatgtggctgcaggtaaacaggtaaaaatacctattgccattctcacttcattcagtggggctgagaaaagttattgtattgaaagtgaagctttgttgctacaagtggtttatccagcataatgattggatgtttgtacgccagcaaaaccctccaagcatggattgaattatgcccatgtaaattgagcctaattctgttgcagacttgcagcaaagatcctgctcacccttggtctatgccatgtagataggtttgccagggyaaacctttctgttctctgagaaaagaagacctgttctggcagttcaccacagctctctctgagatgaggtcactactcatcaggtcaccatgttcccaaaatgtagagctgagacagcgtgacaacctcttgcaggcatcctattctcacatgctttctgttatgcctcttcactttgatctgctctgcctgcaccagtgagatcaaagaaaagctgagctctgcctcttatctttgtgctcctgtgtcttttctttccttttttyycctctttatttctgacaatggtatggtggaggg

SEQ ID NO: 88041 - DNA, 600 bp, Chicken  19866894390550_2
ttggtctatgccatgtagataggtttgccagggyaaacctttctgttctctgagaaaagaagacctgttctggcagttcaccacagctctctctgagatgaggtcactactcatcaggtcaccatgttcccaaaatgtagagctgagacagcgtgacaacctcttgcaggcatcctattctcacatgctttctgttatgcctcttcactttgatctgctctgcctgcaccagtgagatcaaagaaaagctgagctctgcctcttatctttgtgctcctgtgtcttttctttccttttttyycctctttatttctgacaatggtatggtggagggaaagcaagacatggagggaactcctctaacaaccccagccactgccaaccccartgtattgcatcagaaggaggctttttccctattgcctgaagtagttgactgctgaaagatgtgagaggmtcggtaagctagatttcagcatttagcttcacaggagcaatatctcaattcttatcaagttcacaaggctgaaagaaagcattaataatgttgtaggcagtttgttctgaagaggtaacaggaggcttaaaaagttgtgatga

SEQ ID NO: 88042 - DNA, 600 bp, Chicken  19866894390550_3
tggtctatgccatgtagataggtttgccagggyaaacctttctgttctctgagaaaagaagacctgttctggcagttcaccacagctctctctgagatgaggtcactactcatcaggtcaccatgttcccaaaatgtagagctgagacagcgtgacaacctcttgcaggcatcctattctcacatgctttctgttatgcctcttcactttgatctgctctgcctgcaccagtgagatcaaagaaaagctgagctctgcctcttatctttgtgctcctgtgtcttttctttccttttttyycctctttatttctgacaatggtatggtggagggaaagcaagacatggagggaactcctctaacaaccccagccactgccaaccccartgtattgcatcagaaggaggctttttccctattgcctgaagtagttgactgctgaaagatgtgagaggmtcggtaagctagatttcagcatttagcttcacaggagcaatatctcaattcttatcaagttcacaaggctgaaagaaagcattaataatgttgtaggcagtttgttctgaagaggtaacaggaggcttaaaaagttgtgatgat

SEQ ID NO: 88043 - DNA, 600 bp, Chicken  19866894390550_4
ctctctgagatgaggtcactactcatcaggtcaccatgttcccaaaatgtagagctgagacagcgtgacaacctcttgcaggcatcctattctcacatgctttctgttatgcctcttcactttgatctgctctgcctgcaccagtgagatcaaagaaaagctgagctctgcctcttatctttgtgctcctgtgtcttttctttccttttttyycctctttatttctgacaatggtatggtggagggaaagcaagacatggagggaactcctctaacaaccccagccactgccaaccccartgtattgcatcagaaggaggctttttccctattgcctgaagtagttgactgctgaaagatgtgagaggmtcggtaagctagatttcagcatttagcttcacaggagcaatatctcaattcttatcaagttcacaaggctgaaagaaagcattaataatgttgtaggcagtttgttctgaagaggtaacaggaggcttaaaaagttgtgatgatttagttaatgagtgtgacagctgtacttttctagaatagaactttatgagatactgatagttttttttataaaaagctgattcctgg

SEQ ID NO: 88044 - DNA, 600 bp, Chicken  19866894390550_5
aacctcttgcaggcatcctattctcacatgctttctgttatgcctcttcactttgatctgctctgcctgcaccagtgagatcaaagaaaagctgagctctgcctcttatctttgtgctcctgtgtcttttctttccttttttyycctctttatttctgacaatggtatggtggagggaaagcaagacatggagggaactcctctaacaaccccagccactgccaaccccartgtattgcatcagaaggaggctttttccctattgcctgaagtagttgactgctgaaagatgtgagaggmtcggtaagctagatttcagcatttagcttcacaggagcaatatctcaattcttatcaagttcacaaggctgaaagaaagcattaataatgttgtaggcagtttgttctgaagaggtaacaggaggcttaaaaagttgtgatgatttagttaatgagtgtgacagctgtacttttctagaatagaactttatgagatactgatagttttttttataaaaagctgattcctggataggaagcattctctgacagctggaagagacctcacctaagtcaggtcagtttggagatgtccctgtc

SEQ ID NO: 88045 - DNA, 600 bp, Chicken  19866894390552_1
cccttatcctgggattcacagccatctaactataagagatcttgaaccagcaagggaagatgacataagagcgagacagcacttgagaacatgggaattagctattctgatgttagctgttcattgaatttctacagttcagcgaatccctcagtataaacaacattccccaaagacattcacttctctcagtatagggacccttttcttttaccccttggtttgcaaactgcaacactgcagtcaggcagcttcagacattcacttttagaagcacctctcaaatcttacgatttagargaacaaattggtccatgataatgtgacgaatgccccacttcacactttctgtcgagaaaagagagttaagcctcaaggcaactctgcagcccacccaggtactctgctcaacaggcaggaatctttccatttttagcactacctacagcgcgcacacatacatttctgatctttcttttgcaccaaaagaaaccaaactactgcatatgcccgagatggctgacctctgtaacaggatctttaaccaatgactgttcaatattttaacttccaggtccccagcaatgctatttaaggagc

SEQ ID NO: 88046 - DNA, 600 bp, Chicken  19866894390553_1
ttattataaaaataggattgttatcaatgtggatccagacgttacctgagtcaggtttccagaccaattgtgaatgctgtgctctctgctcatttacggtagccagaaaaactaccagcagtgaggataatgaatacactgaatgtaaattagcatgtaaactcacaaaaccagtctggaagtgaggaaatcacatcaggcttcctcatcttccgtcagaaagtagaatcccagattggcttagattggaagcaaccttaaagatctagctccaaatgcctcccataggcagggttaagywgtcaaatcacttgataatgttcacactaatgctttggctttatttagctggataggaagaagccatgtatccttctcccacaccaactccagaatccaccttacttacattatcctcygtcagcagccagacaggcacaaacccttgactaacttgaacattttaataacttgctacaagcaggaggagtcacaaacactagctcagtcacaaactgtgcagtgataaatccagtttcacatgcaacctgcagcatcagtaagagtccttggtaatctggcaagaactttcctgagacc

SEQ ID NO: 88047 - DNA, 600 bp, Chicken  19866894390553_2
tattataaaaataggattgttatcaatgtggatccagacgttacctgagtcaggtttccagaccaattgtgaatgctgtgctctctgctcatttacggtagccagaaaaactaccagcagtgaggataatgaatacactgaatgtaaattagcatgtaaactcacaaaaccagtctggaagtgaggaaatcacatcaggcttcctcatcttccgtcagaaagtagaatcccagattggcttagattggaagcaaccttaaagatctagctccaaatgcctcccataggcagggttaagywgtcaaatcacttgataatgttcacactaatgctttggctttatttagctggataggaagaagccatgtatccttctcccacaccaactccagaatccaccttacttacattatcctcygtcagcagccagacaggcacaaacccttgactaacttgaacattttaataacttgctacaagcaggaggagtcacaaacactagctcagtcacaaactgtgcagtgataaatccagtttcacatgcaacctgcagcatcagtaagagtccttggtaatctggcaagaactttcctgagacca

SEQ ID NO: 88048 - DNA, 600 bp, Chicken  19866894390553_3
agtgaggataatgaatacactgaatgtaaattagcatgtaaactcacaaaaccagtctggaagtgaggaaatcacatcaggcttcctcatcttccgtcagaaagtagaatcccagattggcttagattggaagcaaccttaaagatctagctccaaatgcctcccataggcagggttaagywgtcaaatcacttgataatgttcacactaatgctttggctttatttagctggataggaagaagccatgtatccttctcccacaccaactccagaatccaccttacttacattatcctcygtcagcagccagacaggcacaaacccttgactaacttgaacattttaataacttgctacaagcaggaggagtcacaaacactagctcagtcacaaactgtgcagtgataaatccagtttcacatgcaacctgcagcatcagtaagagtccttggtaatctggcaagaactttcctgagaccactttggaagacttgacactgttgcctaacacaagtatatcttctgatgaggcacaagaacatgagaattccacagaattttttgaatcaaaaatataggaaattggcaccatactaat

SEQ ID NO: 88049 - DNA, 599 bp, Chicken  19866894390554_1
  misc_feature (1)..(164): n is any nucleotide
nnnnnnnnnnnnnnnnnnnnnnnnnnnnnnnnnnnnnnnnnnnnnnnnnnnnnnnnnnnnnnnnnnnnnnnnnnnnnnnnnnnnnnnnnnnnnnnnnnnnnnnnnnnnnnnnnnnnnnnnnnnnnnnnnnnnnnnnnnnnnnnnnnnnnnnnnnnnnnnnnnnncccccccccgcctcagtggggtggggaagagaatcagaagagtaaaagtgggaaaactggtgggctgagataaagacattttaatagataaatcaaaagcagcatgtgaaatcaaagcaaaataaggaattcatgyactacttccatcagcaggcaaatgtttgatcasttccaagaaaacagggctcatcacatctaccagtttattaggaaatcaaacacsattaatccaaacatttcctttcttcctcctctcctcagcttttagagctgagcatgacaccatgtggtagaggttatccctttggtcactttgggtcagcagtcctgtgtccccttgctgctccttgtgcacccccagccctttactgtcaggacagagtgaggagctgaacgtccttggctctgtgtaagcaccactttgcagcaattaaa

SEQ ID NO: 88050 - DNA, 599 bp, Chicken  19866894390554_2
  misc_feature (1)..(131): n is any nucleotide
nnnnnnnnnnnnnnnnnnnnnnnnnnnnnnnnnnnnnnnnnnnnnnnnnnnnnnnnnnnnnnnnnnnnnnnnnnnnnnnnnnnnnnnnnnnnnnnnnnnnnnnnnnnnnnnnnnnnnnnnnnnnnnnnnnncccccccccgcctcagtggggtggggaagagaatcagaagagtaaaagtgggaaaactggtgggctgagataaagacattttaatagataaatcaaaagcagcatgtgaaatcaaagcaaaataaggaattcatgyactacttccatcagcaggcaaatgtttgatcasttccaagaaaacagggctcatcacatctaccagtttattaggaaatcaaacacsattaatccaaacatttcctttcttcctcctctcctcagcttttagagctgagcatgacaccatgtggtagaggttatccctttggtcactttgggtcagcagtcctgtgtccccttgctgctccttgtgcacccccagccctttactgtcaggacagagtgaggagctgaacgtccttggctctgtgtaagcaccactttgcagcaattaaaccacccatgtgtcagcactacatcagttcctat

SEQ ID NO: 88051 - DNA, 599 bp, Chicken  19866894390554_3
  misc_feature (1)..(77): n is any nucleotide
nnnnnnnnnnnnnnnnnnnnnnnnnnnnnnnnnnnnnnnnnnnnnnnnnnnnnnnnnnnnnnnnnnnnnnnnnnnnncccccccccgcctcagtggggtggggaagagaatcagaagagtaaaagtgggaaaactggtgggctgagataaagacattttaatagataaatcaaaagcagcatgtgaaatcaaagcaaaataaggaattcatgyactacttccatcagcaggcaaatgtttgatcasttccaagaaaacagggctcatcacatctaccagtttattaggaaatcaaacacsattaatccaaacatttcctttcttcctcctctcctcagcttttagagctgagcatgacaccatgtggtagaggttatccctttggtcactttgggtcagcagtcctgtgtccccttgctgctccttgtgcacccccagccctttactgtcaggacagagtgaggagctgaacgtccttggctctgtgtaagcaccactttgcagcaattaaaccacccatgtgtcagcactacatcagttcctataaggaaaattaacagacagaactatggcgattgctcacgttccacaaacataaa

SEQ ID NO: 88052 - DNA, 483 bp, Chicken  19866894390557_1
gcagtgtccagatgagatcagcagggctcactttggagctgggtgcagcacctcagctctgcagcgggagcagttgtgctgctgctgccttcactcccttgcagatgcagaaaagcagctgctccagctcagcaaggagcccaggccccctgctcatctcccttgcctgctgtgagcagcaggacagaagctctttccccagttctccacattttctctgtaactgctgtcattaccaccggtccctgattactaaggcacagcccactactgaacaacacctgtgctctcatttatccktccccagttcttctctgaactcgtccttttctgagaaaagcgcccctcatcacaccatgcacagcacactcacctaactgccccatggggaacagtcccctgcagatgggaagcctcctcacattgcagcatctgcttgccatgtcttatcacaagctctgttccttgcagcacatttaatag

SEQ ID NO: 88053 - DNA, 599 bp, Chicken  19866894390559_1
  misc_feature (1)..(116): n is any nucleotide
nnnnnnnnnnnnnnnnnnnnnnnnnnnnnnnnnnnnnnnnnnnnnnnnnnnnnnnnnnnnnnnnnnnnnnnnnnnnnnnnnnnnnnnnnnnnnnnnnnnnnnnnnnnnnnnnnnnnagcagttagcaacagcaagcattcctggtacagaagttaatcccacctgacccacaaggagctggataaagcctgaaacacaactttcagacgtgcttagaatgagagctggtaatattccaacatatcatgatctagaaaagtaggtggccactcagagctcaagagttttgtaaggaaatgkctatggaagatgccagaaacatttttttacctttyataaaawggagttaatttttatgatgcagacttttgaggtattttcaggtaattttctgtcatggcacatagaatagcagtcctgaaataaatatattaactacagcaagtattactgagaagaaaaaaaactgcttctcaaaccagtttcaggtccagcttcattttctcttttagcaaagaccaagttctttctctacttcagacagacagttcaaagctggataattgctaataaaaatcccattacatctggcattatgt

SEQ ID NO: 88054 - DNA, 599 bp, Chicken  19866894390559_2
  misc_feature (1)..(81): n is any nucleotide
nnnnnnnnnnnnnnnnnnnnnnnnnnnnnnnnnnnnnnnnnnnnnnnnnnnnnnnnnnnnnnnnnnnnnnnnnnnnnnnnnagcagttagcaacagcaagcattcctggtacagaagttaatcccacctgacccacaaggagctggataaagcctgaaacacaactttcagacgtgcttagaatgagagctggtaatattccaacatatcatgatctagaaaagtaggtggccactcagagctcaagagttttgtaaggaaatgkctatggaagatgccagaaacatttttttacctttyataaaawggagttaatttttatgatgcagacttttgaggtattttcaggtaattttctgtcatggcacatagaatagcagtcctgaaataaatatattaactacagcaagtattactgagaagaaaaaaaactgcttctcaaaccagtttcaggtccagcttcattttctcttttagcaaagaccaagttctttctctacttcagacagacagttcaaagctggataattgctaataaaaatcccattacatctggcattatgttctctgtgactggtttagtcaactttagaaataca

SEQ ID NO: 88055 - DNA, 599 bp, Chicken  19866894390559_3
  misc_feature (1)..(74): n is any nucleotide
nnnnnnnnnnnnnnnnnnnnnnnnnnnnnnnnnnnnnnnnnnnnnnnnnnnnnnnnnnnnnnnnnnnnnnnnnnagcagttagcaacagcaagcattcctggtacagaagttaatcccacctgacccacaaggagctggataaagcctgaaacacaactttcagacgtgcttagaatgagagctggtaatattccaacatatcatgatctagaaaagtaggtggccactcagagctcaagagttttgtaaggaaatgkctatggaagatgccagaaacatttttttacctttyataaaawggagttaatttttatgatgcagacttttgaggtattttcaggtaattttctgtcatggcacatagaatagcagtcctgaaataaatatattaactacagcaagtattactgagaagaaaaaaaactgcttctcaaaccagtttcaggtccagcttcattttctcttttagcaaagaccaagttctttctctacttcagacagacagttcaaagctggataattgctaataaaaatcccattacatctggcattatgttctctgtgactggtttagtcaactttagaaatacatgctgct

SEQ ID NO: 88056 - DNA, 600 bp, Chicken  19866894390561_1
aggaagtgagcctttttggtttgttgaagtcagctttttgttacaatgcctgtggggaggtaactgctactgcggcattgctttggttgcgttcagcagtactctgacaaagtcccgctgctcagatgcacccccaatttgctcctatcacattaagggtgttttaaaaatggctgtcacttacagattccacctaaaggagttttcagctggccttgtagcacgtcttttatggccatttcctccactgcttatttatcctcagagaattacgcaatgtaaagaccaagcagttgttcrggttcactgaaaatgcacaggaaggatttttactgataatttcaagtcccgtgtttagctgcatggaaaaaatacttaatatcattagtaatatagccatgtaattcccattgccactttatcacgttttcatgcgtttttaaaggaaaagccatactggaatctaacgttttatctaaaatttttggatatttcttctttaatattcttctgctatcttgggttcagagaatagttgttctacatttctaaagttatatcagtgcagattaatgcttttgcaatttgcttcagtaaagc

SEQ ID NO: 88057 - DNA, 599 bp, Chicken  19866894390574_1
  misc_feature (1)..(228): n is any nucleotide
nnnnnnnnnnnnnnnnnnnnnnnnnnnnnnnnnnnnnnnnnnnnnnnnnnnnnnnnnnnnnnnnnnnnnnnnnnnnnnnnnnnnnnnnnnnnnnnnnnnnnnnnnnnnnnnnnnnnnnnnnnnnnnnnnnnnnnnnnnnnnnnnnnnnnnnnnnnnnnnnnnnnnnnnnnnnnnnnnnnnnnnnnnnnnnnnnnnnnnnnnnnnnnnnnnnnnnnnnnnnnnnnnnnncgtgaacatcccagtatcagcattttgtagggctgcagctacaaggacagggacagcctttggagaaattcrtctagaactctctaccttgtggttaaagtgctgttaagtgctatgtgagagatatcagctcttctctgaaccttctgtttaggcggagaggaagatgcagaatcctgtgttgcataagtctgcttcctttcttaatatatacagaataaacattgtatacaaacgtttaggaaaaatgttgcctctttattcaactgctgcaattaaatattgttatattggtgcttgggcttaatgtgtatttcgcacaatgttgacaggttaattttggctgttatttttatgtgcacttctactgc

SEQ ID NO: 88058 - DNA, 492 bp, Chicken  19866894390574_2
atattgttatattggtgcttgggcttaatgtgtatttcgcacaatgttgacaggttaattttggctgttatttttatgtgcacttctactgcatgtaaatgcacgtggagcgtgctctgtgctatcttgaaaatggagcaacaattctgtaagttcgtatttctttctaccagtttaaattgtgctttaagatgagcttgaaagttcctactcagtgtggaatgtgcaatatattgatgtggttcctgttgatgaaagttcaatataggaacaggatgccagccatgctcacagctgcayacagcacattgtgtgctctcctgggcagatgccgaagaggtttattaaagcattcaagttstttcttcatattgggagtgaaagattccttcttaatcctcatatggctgctgtcgctgctgggagtgttaatagatagtctaatttgtgagctaaattactaattgtattatgagtctaaaccttattaag

SEQ ID NO: 88059 - DNA, 431 bp, Chicken  19866894390574_3
tggctgttatttttatgtgcacttctactgcatgtaaatgcacgtggagcgtgctctgtgctatcttgaaaatggagcaacaattctgtaagttcgtatttctttctaccagtttaaattgtgctttaagatgagcttgaaagttcctactcagtgtggaatgtgcaatatattgatgtggttcctgttgatgaaagttcaatataggaacaggatgccagccatgctcacagctgcayacagcacattgtgtgctctcctgggcagatgccgaagaggtttattaaagcattcaagttstttcttcatattgggagtgaaagattccttcttaatcctcatatggctgctgtcgctgctgggagtgttaatagatagtctaatttgtgagctaaattactaattgtattatgagtctaaaccttattaag

SEQ ID NO: 88060 - DNA, 599 bp, Chicken  19866894390575_1
  misc_feature (1)..(94): n is any nucleotide
nnnnnnnnnnnnnnnnnnnnnnnnnnnnnnnnnnnnnnnnnnnnnnnnnnnnnnnnnnnnnnnnnnnnnnnnnnnnnnnnnnnnnnnnnnnnnnacatcctcgtgcacttgggctgttgtgatctgttttccttctgtgcacctagatggcttttgcaggtgagatttctcccactcatctttattcaatacaaaaatgtcactggttattttaggcactgagagtgcataactgggatattattttctactgcaagctttgcttccctaactgaggctgcatgccttccacacacacaycctcagctgctgaatcatggctcagcagctcggtggttgcctcagtccttttgaaatttgcagcctgctgtggctgctcctggagacctcatggccctygaggatgctgacagagcccagacctctctccatctgaagcaatgtggccgtcaaacgacagcctctcttgactctcagctccggctcctcttcacgtaattcccagtaccgaaggatctgatgactgctatctcacatctgtgcattgaaacatgtggggtttggggacatgggaagcatggttctacatccatgtaagg

SEQ ID NO: 88061 - DNA, 600 bp, Chicken  19866894390575_2
ctcgtgcacttgggctgttgtgatctgttttccttctgtgcacctagatggcttttgcaggtgagatttctcccactcatctttattcaatacaaaaatgtcactggttattttaggcactgagagtgcataactgggatattattttctactgcaagctttgcttccctaactgaggctgcatgccttccacacacacaycctcagctgctgaatcatggctcagcagctcggtggttgcctcagtccttttgaaatttgcagcctgctgtggctgctcctggagacctcatggccctygaggatgctgacagagcccagacctctctccatctgaagcaatgtggccgtcaaacgacagcctctcttgactctcagctccggctcctcttcacgtaattcccagtaccgaaggatctgatgactgctatctcacatctgtgcattgaaacatgtggggtttggggacatgggaagcatggttctacatccatgtaaggctgaaactcagtggggagagtgtctgaggacagacagggtatctgctctagtggtgtccttgtgttccattaagtagttactgaaatgcatggtgcattt

SEQ ID NO: 88062 - DNA, 600 bp, Chicken  19866894390579_1
caattcatctgctatgggattgatctgtaagtaggtgaagaaacaaatacttaagcttaaactcagggggttttccttggatttaccctactgcaaaagccagccttcccagaattcctctgatgctcagcacagggctcatattgatagcaggagaacagtgatgtgcctttaattgcattaactgttcctcatttccacaaaatgatgtgatgcaatacatgcagcctcttgtatattccaaaagataccgtcctccaaaaagaattaatgtctttcttggctggactacaggtgcakggctgttccyagtgttcttttcccacaggctcttagctgccattaaaaatatatattttctgaaagtcaatacattttatgaacttgcacaaagagtttaaaacgtttatttgagcaattaaaaatgtgagattgttgatctgatgtttaatatggctggaagttataaaaagatggatttaatatttttaatgtttttcctggattttcttaggtaactccatgtgctgttgtttcttttttccccaagtccacgtgtagccacacagactgcaaacatatcctgaccttataaatgca

SEQ ID NO: 88063 - DNA, 600 bp, Chicken  19866894390579_2
gctatgggattgatctgtaagtaggtgaagaaacaaatacttaagcttaaactcagggggttttccttggatttaccctactgcaaaagccagccttcccagaattcctctgatgctcagcacagggctcatattgatagcaggagaacagtgatgtgcctttaattgcattaactgttcctcatttccacaaaatgatgtgatgcaatacatgcagcctcttgtatattccaaaagataccgtcctccaaaaagaattaatgtctttcttggctggactacaggtgcakggctgttccyagtgttcttttcccacaggctcttagctgccattaaaaatatatattttctgaaagtcaatacattttatgaacttgcacaaagagtttaaaacgtttatttgagcaattaaaaatgtgagattgttgatctgatgtttaatatggctggaagttataaaaagatggatttaatatttttaatgtttttcctggattttcttaggtaactccatgtgctgttgtttcttttttccccaagtccacgtgtagccacacagactgcaaacatatcctgaccttataaatgcagaaatttagc

SEQ ID NO: 88064 - DNA, 599 bp, Chicken  19866894390583_1
  misc_feature (1)..(111): n is any nucleotide
nnnnnnnnnnnnnnnnnnnnnnnnnnnnnnnnnnnnnnnnnnnnnnnnnnnnnnnnnnnnnnnnnnnnnnnnnnnnnnnnnnnnnnnnnnnnnnnnnnnnnnnnnnnnnnncttaaaaagcaatcatcaatggtttgttctgaagaaatacattccatgtatgcaaaaacgacaaagccattctgatctgcagagctaaagctgacttggcttaggattatatgtgtttactgggaaaagaaaaagacttgtaacttccatcttcccacctgcaaagaaactactgcatctccccagctragactgtttgtccaaaagagatatcagatatgtaatgcatgaaccaagaagtttattttgggagatatgctcactctctaagacctaaggcagtcaacacaaaacacagccatattgtaacagtgtttcttctcagcagcattccttaccttaggcctgtagaacacattctgaacagacagcatggagactattgtcaacatttcctcactgcatcccagrtgtacagacatgatcaacatcttacacaacatgggctccaacgggaattctgccatctgcaaaagaattgtttcaga

SEQ ID NO: 88065 - DNA, 600 bp, Chicken  19866894390583_2
tgtgtttactgggaaaagaaaaagacttgtaacttccatcttcccacctgcaaagaaactactgcatctccccagctragactgtttgtccaaaagagatatcagatatgtaatgcatgaaccaagaagtttattttgggagatatgctcactctctaagacctaaggcagtcaacacaaaacacagccatattgtaacagtgtttcttctcagcagcattccttaccttaggcctgtagaacacattctgaacagacagcatggagactattgtcaacatttcctcactgcatcccagrtgtacagacatgatcaacatcttacacaacatgggctccaacgggaattctgccatctgcaaaagaattgtttcagagtaccctgaaaagcctcaaaaaatcttgagttccctcagtggaatagaaaaaagctctttttctatgctttctcgtcaaaacagtgtgtattacccagaawaattatattcaacgttaaattatttgtctatatacacacactcacaaggatatctcaacatttacaggagattattttagatattcataaaaataaccttatgaataagcagaaataacagc

SEQ ID NO: 88066 - DNA, 600 bp, Chicken  19866894390583_3
aaaacacagccatattgtaacagtgtttcttctcagcagcattccttaccttaggcctgtagaacacattctgaacagacagcatggagactattgtcaacatttcctcactgcatcccagrtgtacagacatgatcaacatcttacacaacatgggctccaacgggaattctgccatctgcaaaagaattgtttcagagtaccctgaaaagcctcaaaaaatcttgagttccctcagtggaatagaaaaaagctctttttctatgctttctcgtcaaaacagtgtgtattacccagaawaattatattcaacgttaaattatttgtctatatacacacactcacaaggatatctcaacatttacaggagattattttagatattcataaaaataaccttatgaataagcagaaataacagctgctccttaaaaagcagaaaattcagaacaactgctccatgtcaccctctaaacactggcaaccccagacagcaccaagaagtgatttatttagcctaccctgcgtccaagtcgagtgagcagtccctcatcatccagggctcccagagtgtacagctgctccatggcagtgatgaga

SEQ ID NO: 88067 - DNA, 599 bp, Chicken  19866894390587_1
  misc_feature (1)..(136): n is any nucleotide
nnnnnnnnnnnnnnnnnnnnnnnnnnnnnnnnnnnnnnnnnnnnnnnnnnnnnnnnnnnnnnnnnnnnnnnnnnnnnnnnnnnnnnnnnnnnnnnnnnnnnnnnnnnnnnnnnnnnnnnnnnnnnnnnnnnnnnnnactgtgtaaaagacagagcaaaattcacatgatacctccccctcaaacagcaacatgaatcttcagttttcagagtaaaagaaacatggaaaccttttggattcagtcagagttttgtccttatggaaacaaacaaacaaaaaaaatatgctcacgtatcccartgcttcagatatgagtcctaatagagtaaagacacacaagattgctctttaaggaataaggggttccatgtatatgtagatcccacttgaaaaattctattatgtaaaaacattccctgatccaatataacaattctcactctctcatacatgtatacatacatgcatatatttccatgcttttcaacttgtgatgctgcagacagtttccatataacccattamacactatggacatgttgcaagactttctttttatgatacatttgtttcaagaccaatagttgattccctttcca

SEQ ID NO: 88068 - DNA, 600 bp, Chicken  19866894390587_2
aaaccttttggattcagtcagagttttgtccttatggaaacaaacaaacaaaaaaaatatgctcacgtatcccartgcttcagatatgagtcctaatagagtaaagacacacaagattgctctttaaggaataaggggttccatgtatatgtagatcccacttgaaaaattctattatgtaaaaacattccctgatccaatataacaattctcactctctcatacatgtatacatacatgcatatatttccatgcttttcaacttgtgatgctgcagacagtttccatataacccattamacactatggacatgttgcaagactttctttttatgatacatttgtttcaagaccaatagttgattccctttccagaccgaccagaactggaccaaaattaagatgatcaaacacgtatgagctttgtataagtgcagagctttcagattttttcttccaataagaaygatattaaaataaaatagtttactagaggagcatttcaaaacctaaattgtcaggcattgtaagtaaaatgaaaatgaaataatggacaaggggttcatagttgcagaaacaatgccatgtggatggaacaga

SEQ ID NO: 88069 - DNA, 476 bp, Chicken  19866894390587_3
aattctattatgtaaaaacattccctgatccaatataacaattctcactctctcatacatgtatacatacatgcatatatttccatgcttttcaacttgtgatgctgcagacagtttccatataacccattamacactatggacatgttgcaagactttctttttatgatacatttgtttcaagaccaatagttgattccctttccagaccgaccagaactggaccaaaattaagatgatcaaacacgtatgagctttgtataagtgcagagctttcagattttttcttccaataagaaygatattaaaataaaatagtttactagaggagcatttcaaaacctaaattgtcaggcattgtaagtaaaatgaaaatgaaataatggacaaggggttcatagttgcagaaacaatgccatgtggatggaacagatgtggtaaaggaatgggacatgctaagtaaaatatgccagtga

SEQ ID NO: 88070 - DNA, 600 bp, Chicken  19866894390594_1
ctttacatcctctgtctatgaaaggatttcccttttataatccagtgataaatccaactaaccactaattgagtgggagttagagcagcaaatttaagatcctttaaaatgaattttgtctgatcagtcattccaggaactggattttgccatgtgcccgtacatccactggtggctcctgttcctaccagcagcaccttggatcttagatgtggctttgcatcacaccatatcctgttataacgtggcccttctctccacccagtcctattgctgacctcggtgttactcattaccccyagtgttacagggcagttagatgagctacctgcatgcttccttcagaaaatactcattattcactttgatttgatctgtttcaaagggtgtttctctttgaagagatgaatgtgtgaaaaacatcactgctctggtcagaggccccttattgcrtgcaattaggagataacgctgtggatggggatcaaatcccatctctgccaggagctgctctgtgtgcaggtctctgccatgtcccactgtctgtagcttcaacgaggcccagcagaaccaggatgcgcaggacacaggtgcttctgt

SEQ ID NO: 88071 - DNA, 564 bp, Chicken  19866894390594_2
gtgcccgtacatccactggtggctcctgttcctaccagcagcaccttggatcttagatgtggctttgcatcacaccatatcctgttataacgtggcccttctctccacccagtcctattgctgacctcggtgttactcattaccccyagtgttacagggcagttagatgagctacctgcatgcttccttcagaaaatactcattattcactttgatttgatctgtttcaaagggtgtttctctttgaagagatgaatgtgtgaaaaacatcactgctctggtcagaggccccttattgcrtgcaattaggagataacgctgtggatggggatcaaatcccatctctgccaggagctgctctgtgtgcaggtctctgccatgtcccactgtctgtagcttcaacgaggcccagcagaaccaggatgcgcaggacacaggtgcttctgttggccagctggtacagcacttgagtaaacacttgttccttcctgtggttgaggagaatctctaatttacatgctggggctgcagaaaagatgctaatgaagcaagcctagcagcctc

SEQ ID NO: 88072 - DNA, 600 bp, Chicken  19866894390595_1
aagtggagcagcgcacagttgtgcaaagctggaaagcaaagcagttccgtcagtgaaagattttcaaccagaagggtgtcttgagtcaatggtgaccttttaatcctcggcacattcctctcgtgcttaaccccaatgtgattcctccataggttcagagccctgccaagcacagttaagccctgtcaaacggggacatgccataaggatactgtacatgcagcactgcctcggttccctcacactgtacagcagagcctcccgaggagccctgaagctgctcagaatgagccgctctgygtgtgatggggcrcagctgggaagcagaatgcagcctggcatcattgtggggcagtgtggggctccttccccctctgacgaaggcagttaagcacgtcgggagagcctccagcagcagcagttaataaaagcaacggggtgcacacttgaaggctgtttgggaaatggactcccagcgctccgaggacaggaatgggagaacagcaggagcagtcagagcgacgtgattctcaaaggtctggcatctcatagcctgccagaaatagaagcaaactctatctgccagcctcgctcatcatc

SEQ ID NO: 88073 - DNA, 600 bp, Chicken  19866894390595_2
cacagttgtgcaaagctggaaagcaaagcagttccgtcagtgaaagattttcaaccagaagggtgtcttgagtcaatggtgaccttttaatcctcggcacattcctctcgtgcttaaccccaatgtgattcctccataggttcagagccctgccaagcacagttaagccctgtcaaacggggacatgccataaggatactgtacatgcagcactgcctcggttccctcacactgtacagcagagcctcccgaggagccctgaagctgctcagaatgagccgctctgygtgtgatggggcrcagctgggaagcagaatgcagcctggcatcattgtggggcagtgtggggctccttccccctctgacgaaggcagttaagcacgtcgggagagcctccagcagcagcagttaataaaagcaacggggtgcacacttgaaggctgtttgggaaatggactcccagcgctccgaggacaggaatgggagaacagcaggagcagtcagagcgacgtgattctcaaaggtctggcatctcatagcctgccagaaatagaagcaaactctatctgccagcctcgctcatcatctatctgttatcac

SEQ ID NO: 88074 - DNA, 600 bp, Chicken  19866894390598_1
tgaagctcccattgggtaaaggggtaaactgcagaagtaagacttttgtgcatgtgtggagggtggagttaactgggtagttttctgtgattaggactccgcttctgcagtcatgctgctgtttcccacaaagttacttgctgtctgttctcagttttgcagacaagagaaaaaattacaacaaactgctacaagtttaaaataaaagacggttcttttattaccttgaggagtcgctggttcagtttcatgaacccttggaccaaagaagtagaatacattgtctcaacaaatactgtygtttcgtaagtattttcaatttcgcagatgcacgtacaagctaattgytctgcactgttgtcagatgaggtttggtattttctgtcattggaaaaaccagcacatccatctttgtaaggacttaaagatgcatttcttggctcctgtgggaactcccccgtttcaccttttttttttttcccttgagggttctgcagggctgcagtgcctttgcagtggagtaactacttcagaagaattagtcttgagagatgctgtttgcgttctgtattgcatactttgagtcgtaacagtgttttc

SEQ ID NO: 88075 - DNA, 600 bp, Chicken  19866894390598_2
tgcatgtgtggagggtggagttaactgggtagttttctgtgattaggactccgcttctgcagtcatgctgctgtttcccacaaagttacttgctgtctgttctcagttttgcagacaagagaaaaaattacaacaaactgctacaagtttaaaataaaagacggttcttttattaccttgaggagtcgctggttcagtttcatgaacccttggaccaaagaagtagaatacattgtctcaacaaatactgtygtttcgtaagtattttcaatttcgcagatgcacgtacaagctaattgytctgcactgttgtcagatgaggtttggtattttctgtcattggaaaaaccagcacatccatctttgtaaggacttaaagatgcatttcttggctcctgtgggaactcccccgtttcaccttttttttttttcccttgagggttctgcagggctgcagtgcctttgcagtggagtaactacttcagaagaattagtcttgagagatgctgtttgcgttctgtattgcatactttgagtcgtaacagtgttttctttctgctgtttatctagccttgtcagccccaatgtttctttgtgtga

SEQ ID NO: 88076 - DNA, 600 bp, Chicken  19866894390598_3
gcacagatttgttgctgtcttgcacagagaacttgttagtagtataaagaaatatgtggtttgaggcaaaaaaaagactgctaatgcagctcctgtccatgttgtctgtgctggcaagtagttcactcaaagtaaagaataaacaaggctggagaggagtctgttcagctgcagaacaaagcaggtgtgatgagctattctttactgagtctggacaagctctaccagatgctcaaagcaggcagatcaccttcagaatgtggcatacctagcagcacagagagatgtctaagaaacacrgcacagctgaatccaagtcagggcttcccataggtctgaaggtactcaagaagtggtagaatttaaataaagaaagttcatatagttctgaccagctgcaggattcatacctaaatatgaatgctttttggaaaatgtaagttttacttgaccttaagctaccttccttgtttcaggcggcccaaaaaggagccatcctactgtccctggaattccaggaggaacaagagctggggcaggaaaaataggaaggatgattgctgaagaaatcatggaaattcacaggtaagagaaaacagc

SEQ ID NO: 88077 - DNA, 599 bp, Chicken  19866894390602_1
  misc_feature (1)..(195): n is any nucleotide
nnnnnnnnnnnnnnnnnnnnnnnnnnnnnnnnnnnnnnnnnnnnnnnnnnnnnnnnnnnnnnnnnnnnnnnnnnnnnnnnnnnnnnnnnnnnnnnnnnnnnnnnnnnnnnnnnnnnnnnnnnnnnnnnnnnnnnnnnnnnnnnnnnnnnnnnnnnnnnnnnnnnnnnnnnnnnnnnnnnnnnnnnnnnnnnnnnntgctgcaccagtgccatggtgaggccacgcaggcaaggccctgcttcagcactgcctgccccggtgagtgggcatggggcttggatggggctgcatgtgggattyggggagtcccagtccaaggagtcccggtgttcccagggctgagttcctgggagatttagggatttctatggctgaggrtgcccagtggacgtggggattcctgttgctgggagttcctgggagagttggatattcccatcactggagaaatgagtggatttggggattcccatggccagagtttctgggtgcacaaaggggattcccaccaccaggtctgttttggggatttaggggtggttcccaaggctggggctgccctgggaactggagaaggtctcccaccaccaratctgcct

SEQ ID NO: 88078 - DNA, 599 bp, Chicken  19866894390602_2
  misc_feature (1)..(117): n is any nucleotide
nnnnnnnnnnnnnnnnnnnnnnnnnnnnnnnnnnnnnnnnnnnnnnnnnnnnnnnnnnnnnnnnnnnnnnnnnnnnnnnnnnnnnnnnnnnnnnnnnnnnnnnnnnnnnnnnnnnnntgctgcaccagtgccatggtgaggccacgcaggcaaggccctgcttcagcactgcctgccccggtgagtgggcatggggcttggatggggctgcatgtgggattyggggagtcccagtccaaggagtcccggtgttcccagggctgagttcctgggagatttagggatttctatggctgaggrtgcccagtggacgtggggattcctgttgctgggagttcctgggagagttggatattcccatcactggagaaatgagtggatttggggattcccatggccagagtttctgggtgcacaaaggggattcccaccaccaggtctgttttggggatttaggggtggttcccaaggctggggctgccctgggaactggagaaggtctcccaccaccaratctgcctggggagtttggggcttccagtggctggggctgctgggggaaactgatgagggttgcatgacttgggctgccagtggga

SEQ ID NO: 88079 - DNA, 600 bp, Chicken  19866894390602_3
gtgggattyggggagtcccagtccaaggagtcccggtgttcccagggctgagttcctgggagatttagggatttctatggctgaggrtgcccagtggacgtggggattcctgttgctgggagttcctgggagagttggatattcccatcactggagaaatgagtggatttggggattcccatggccagagtttctgggtgcacaaaggggattcccaccaccaggtctgttttggggatttaggggtggttcccaaggctggggctgccctgggaactggagaaggtctcccaccaccaratctgcctggggagtttggggcttccagtggctggggctgctgggggaaactgatgagggttgcatgacttgggctgccagtgggatctgtggactgcttggagtgtgcaaggggaaatcccatggccaaggctaccyggggttagcaggaggagttcccaaaactgggatttatgtgagaagtggggtcctctcatcagggcagggctggttgtgccctggggcagggggtatgtggtcaggacggtgccctccaccctcacttctccctctgcctgcagtggacggtgcctggagcga

SEQ ID NO: 88080 - DNA, 469 bp, Chicken  19866894390602_4
atattcccatcactggagaaatgagtggatttggggattcccatggccagagtttctgggtgcacaaaggggattcccaccaccaggtctgttttggggatttaggggtggttcccaaggctggggctgccctgggaactggagaaggtctcccaccaccaratctgcctggggagtttggggcttccagtggctggggctgctgggggaaactgatgagggttgcatgacttgggctgccagtgggatctgtggactgcttggagtgtgcaaggggaaatcccatggccaaggctaccyggggttagcaggaggagttcccaaaactgggatttatgtgagaagtggggtcctctcatcagggcagggctggttgtgccctggggcagggggtatgtggtcaggacggtgccctccaccctcacttctccctctgcctgcagtggacggtgcctggagcgagtggacg

SEQ ID NO: 88081 - DNA, 599 bp, Chicken  19866894390603_1
  misc_feature (1)..(164): n is any nucleotide
nnnnnnnnnnnnnnnnnnnnnnnnnnnnnnnnnnnnnnnnnnnnnnnnnnnnnnnnnnnnnnnnnnnnnnnnnnnnnnnnnnnnnnnnnnnnnnnnnnnnnnnnnnnnnnnnnnnnnnnnnnnnnnnnnnnnnnnnnnnnnnnnnnnnnnnnnnnnnnnnnnnntaatgaaggtggggatttttaggaaggaccaagtcagctcctgccagcctgtctgcaatgccaaagaaagggagcaaaaaagaagatgctgagagtgctggagggaccaagcaaagaggcaaacaaaggggaaggrgggcagagacctgactggagaaatggggaggaaaatggaaaaaaaacccagcggaaatgaagaagagacagctggaaaatagatgcatcagtcctattcaacatgatgtgttgtartctctgcagcattcattttttagagcctgtgtatttttaagtggtcctaaaaatggctttgaacactttcctggttggaattggcaaacacaagtgacttgtttctccttgtgactgtttcagggaggagcactgcagcttagaacattaacagctcttcacagttagggagaaccactgctt

SEQ ID NO: 88082 - DNA, 599 bp, Chicken  19866894390603_2
  misc_feature (1)..(48): n is any nucleotide
nnnnnnnnnnnnnnnnnnnnnnnnnnnnnnnnnnnnnnnnnnnnnnnntaatgaaggtggggatttttaggaaggaccaagtcagctcctgccagcctgtctgcaatgccaaagaaagggagcaaaaaagaagatgctgagagtgctggagggaccaagcaaagaggcaaacaaaggggaaggrgggcagagacctgactggagaaatggggaggaaaatggaaaaaaaacccagcggaaatgaagaagagacagctggaaaatagatgcatcagtcctattcaacatgatgtgttgtartctctgcagcattcattttttagagcctgtgtatttttaagtggtcctaaaaatggctttgaacactttcctggttggaattggcaaacacaagtgacttgtttctccttgtgactgtttcagggaggagcactgcagcttagaacattaacagctcttcacagttagggagaaccactgctttaaggaaagctcattcacatcagctctgaactgrggagaaggagaacaaaggaaactggggagaggagaagcagtgactattgaaataagaagatattaataggttagaaaaagct

SEQ ID NO: 88083 - DNA, 600 bp, Chicken  19866894390603_3
aatggaaaaaaaacccagcggaaatgaagaagagacagctggaaaatagatgcatcagtcctattcaacatgatgtgttgtartctctgcagcattcattttttagagcctgtgtatttttaagtggtcctaaaaatggctttgaacactttcctggttggaattggcaaacacaagtgacttgtttctccttgtgactgtttcagggaggagcactgcagcttagaacattaacagctcttcacagttagggagaaccactgctttaaggaaagctcattcacatcagctctgaactgrggagaaggagaacaaaggaaactggggagaggagaagcagtgactattgaaataagaagatattaataggttagaaaaagctgaagtaataaagactttctagaacatgccatcaaaaaccctgccagtacagaattattcatatacatttactgttgttacctggctcagtcagtaagatttttgcttctcctggggaccttttatgcaagagaataaatcttaagttgtgaaaacttctttgatattcatcttaaaggtagattttcctaattttctcttattactttgagttatgtc

SEQ ID NO: 88084 - DNA, 600 bp, Chicken  19866894390612_1
tctttccatctctcagccactcgctcccatgtctcgcactagcactggacgcctgtagctccacagccagtcacttcagctcacaaaccgaacagaaaatgacttttccagagctcagaatcgggagtagttggaaggacttaaagttgtttcccattggatgaaggtccagctcacactgctgtcacatgaaaaacagcagtagttcacatacaaaagagcacagccatccttgagaaggaggaagaggacaacaaaatatttaatgaggaggtactgagctgctctgtaagaacataycttcggcctcacctagagtacagtaagatcagtcgtatgggaattcagcttggtaggtaagttcacaacctgcatttttttccaggtattttgttttatagatgtttaaaaggaattatgttcctttttgctataaactttacacaggaaataacagcatagctgtagcacattagaaaggatggtatcaacaagaactcttgtaatgatccattaagcgtctcaggcactcaaagcccagaataagaacagatgctcttcatatttttccctgagaattacactgcattggcaacatgc

SEQ ID NO: 88085 - DNA, 599 bp, Chicken  19866894390614_1
  misc_feature (1)..(46): n is any nucleotide
nnnnnnnnnnnnnnnnnnnnnnnnnnnnnnnnnnnnnnnnnnnnnnttatccacatttagctaatatataaaatttatacatggtaccaccatagtacacatgcttacagacacacacagcatacgcctcgcaaacaattttcctctgtgcatgcttcccttttgtcacatttgggtgttaaaattcaagcaaaattccataggacaaacattactctccaattcagatctgcatgcttacaatcaacagaatgggcagtcaacgcccagtctcccaccttacctgtagaaaacacgctrtgcttatgggaaatacatctcagctttgcagtcagttgtacrcatacagaccaatgagcaatgcacgcaaatttgccctgcagtgattaatgcagatttctcccacgtgcactgcagaagcaaaaatctcagcttggcaggagaaagagacyccattttgaaccacycggcagaagcagtgcagggggaccacttgttctggtccagaccttcgctgtacgtagaaactaggataaaaatgctggtggagaattcgggacagtagggccatattttctgtattctgatcatgagtaggg

SEQ ID NO: 88086 - DNA, 599 bp, Chicken  19866894390614_2
  misc_feature (1)..(4): n is any nucleotide
nnnnttatccacatttagctaatatataaaatttatacatggtaccaccatagtacacatgcttacagacacacacagcatacgcctcgcaaacaattttcctctgtgcatgcttcccttttgtcacatttgggtgttaaaattcaagcaaaattccataggacaaacattactctccaattcagatctgcatgcttacaatcaacagaatgggcagtcaacgcccagtctcccaccttacctgtagaaaacacgctrtgcttatgggaaatacatctcagctttgcagtcagttgtacrcatacagaccaatgagcaatgcacgcaaatttgccctgcagtgattaatgcagatttctcccacgtgcactgcagaagcaaaaatctcagcttggcaggagaaagagacyccattttgaaccacycggcagaagcagtgcagggggaccacttgttctggtccagaccttcgctgtacgtagaaactaggataaaaatgctggtggagaattcgggacagtagggccatattttctgtattctgatcatgagtaggggkgatastcttctgttcacagcttaccaagaatcttccctga

SEQ ID NO: 88087 - DNA, 600 bp, Chicken  19866894390614_3
tgcttcccttttgtcacatttgggtgttaaaattcaagcaaaattccataggacaaacattactctccaattcagatctgcatgcttacaatcaacagaatgggcagtcaacgcccagtctcccaccttacctgtagaaaacacgctrtgcttatgggaaatacatctcagctttgcagtcagttgtacrcatacagaccaatgagcaatgcacgcaaatttgccctgcagtgattaatgcagatttctcccacgtgcactgcagaagcaaaaatctcagcttggcaggagaaagagacyccattttgaaccacycggcagaagcagtgcagggggaccacttgttctggtccagaccttcgctgtacgtagaaactaggataaaaatgctggtggagaattcgggacagtagggccatattttctgtattctgatcatgagtaggggkgatastcttctgttcacagcttaccaagaatcttccctgaaacatgacctgcttcaggcttctaaaaagaaaatagcatagatctcatttactgcagctggatcctgtttaaggaatctaggcaacaatgtgtaaagttcttaagatcaaa

SEQ ID NO: 88088 - DNA, 600 bp, Chicken  19866894390614_4
acatttgggtgttaaaattcaagcaaaattccataggacaaacattactctccaattcagatctgcatgcttacaatcaacagaatgggcagtcaacgcccagtctcccaccttacctgtagaaaacacgctrtgcttatgggaaatacatctcagctttgcagtcagttgtacrcatacagaccaatgagcaatgcacgcaaatttgccctgcagtgattaatgcagatttctcccacgtgcactgcagaagcaaaaatctcagcttggcaggagaaagagacyccattttgaaccacycggcagaagcagtgcagggggaccacttgttctggtccagaccttcgctgtacgtagaaactaggataaaaatgctggtggagaattcgggacagtagggccatattttctgtattctgatcatgagtaggggkgatastcttctgttcacagcttaccaagaatcttccctgaaacatgacctgcttcaggcttctaaaaagaaaatagcatagatctcatttactgcagctggatcctgtttaaggaatctaggcaacaatgtgtaaagttcttaagatcaaaggaagttcctcttgc

SEQ ID NO: 88089 - DNA, 600 bp, Chicken  19866894390614_5
gcttatgggaaatacatctcagctttgcagtcagttgtacrcatacagaccaatgagcaatgcacgcaaatttgccctgcagtgattaatgcagatttctcccacgtgcactgcagaagcaaaaatctcagcttggcaggagaaagagacyccattttgaaccacycggcagaagcagtgcagggggaccacttgttctggtccagaccttcgctgtacgtagaaactaggataaaaatgctggtggagaattcgggacagtagggccatattttctgtattctgatcatgagtaggggkgatastcttctgttcacagcttaccaagaatcttccctgaaacatgacctgcttcaggcttctaaaaagaaaatagcatagatctcatttactgcagctggatcctgtttaaggaatctaggcaacaatgtgtaaagttcttaagatcaaaggaagttcctcttgctaacatactaagcattttggaaaataaaaaaccttattgactaaaagcatattcctaccacagatctaaccactcacaaaaaccatatatgtatcacaatttttaggaacgtgattttcccaagactcttcagt

SEQ ID NO: 88090 - DNA, 600 bp, Chicken  19866894390614_6
tgggaaatacatctcagctttgcagtcagttgtacrcatacagaccaatgagcaatgcacgcaaatttgccctgcagtgattaatgcagatttctcccacgtgcactgcagaagcaaaaatctcagcttggcaggagaaagagacyccattttgaaccacycggcagaagcagtgcagggggaccacttgttctggtccagaccttcgctgtacgtagaaactaggataaaaatgctggtggagaattcgggacagtagggccatattttctgtattctgatcatgagtaggggkgatastcttctgttcacagcttaccaagaatcttccctgaaacatgacctgcttcaggcttctaaaaagaaaatagcatagatctcatttactgcagctggatcctgtttaaggaatctaggcaacaatgtgtaaagttcttaagatcaaaggaagttcctcttgctaacatactaagcattttggaaaataaaaaaccttattgactaaaagcatattcctaccacagatctaaccactcacaaaaaccatatatgtatcacaatttttaggaacgtgattttcccaagactcttcagtgagcc

SEQ ID NO: 88091 - DNA, 599 bp, Chicken  19866894390621_1
  misc_feature (1)..(54): n is any nucleotide
nnnnnnnnnnnnnnnnnnnnnnnnnnnnnnnnnnnnnnnnnnnnnnnnnnnnnnatccacctaccaacaacagcaggagaatggacccgagttctgcagccccatgtaaagtgtttcagggtcattgtgttaaaggtgccagaaattttattctggctgaagaaacaccgggaagcctggagcaaggctgacaccttactgggaaatgtggcttagatacacttcttgttacttaagcccttatttcacctgtacaagaaatgatgtagaaatcatagaatcacagaatcatggaatggrtttgggttggaagggacctttaagatcatttcgttccaaccycctgttataggcagggacacctccctccagaccaggttgctcaaagccccatccagcctggccttggatgcttccagggagggggcaaataacgaataaataatgtaataacaaatttgcagatagaatgacctttaaaaacacattttttggactgctttggggcgtttaacttgctttcatctttaragggttttttacatttcttggaaactgcacttcctgaatgcccagcactatgactgctgtctccgcgt

SEQ ID NO: 88092 - DNA, 599 bp, Chicken  19866894390621_2
  misc_feature (1)..(12): n is any nucleotide
nnnnnnnnnnnnatccacctaccaacaacagcaggagaatggacccgagttctgcagccccatgtaaagtgtttcagggtcattgtgttaaaggtgccagaaattttattctggctgaagaaacaccgggaagcctggagcaaggctgacaccttactgggaaatgtggcttagatacacttcttgttacttaagcccttatttcacctgtacaagaaatgatgtagaaatcatagaatcacagaatcatggaatggrtttgggttggaagggacctttaagatcatttcgttccaaccycctgttataggcagggacacctccctccagaccaggttgctcaaagccccatccagcctggccttggatgcttccagggagggggcaaataacgaataaataatgtaataacaaatttgcagatagaatgacctttaaaaacacattttttggactgctttggggcgtttaacttgctttcatctttaragggttttttacatttcttggaaactgcacttcctgaatgcccagcactatgactgctgtctccgcgtgggctgctcgctgccataagcacttctgctgcctcttccaca

SEQ ID NO: 88093 - DNA, 600 bp, Chicken  19866894390621_3
cttaagcccttatttcacctgtacaagaaatgatgtagaaatcatagaatcacagaatcatggaatggrtttgggttggaagggacctttaagatcatttcgttccaaccycctgttataggcagggacacctccctccagaccaggttgctcaaagccccatccagcctggccttggatgcttccagggagggggcaaataacgaataaataatgtaataacaaatttgcagatagaatgacctttaaaaacacattttttggactgctttggggcgtttaacttgctttcatctttaragggttttttacatttcttggaaactgcacttcctgaatgcccagcactatgactgctgtctccgcgtgggctgctcgctgccataagcacttctgctgcctcttccacaaagaaagcactcctgggagcttctgccatttcagaatggccagaagtcagagcgctcctctctgcactaagggagaggcttccatctgtcaccagaagcgcaggctgcacctccctctgacctgagctgtgctgagctccccagcagcagagccccaggctgcagcctctgcccattggcaaagaacccc

SEQ ID NO: 88094 - DNA, 600 bp, Chicken  19866894390637_1
tgattgaactgcagtgtgagtgaaatccttcagctggctgtgaccgccacacagaggcagtgagctggaggcagtgtgcacagcccccacaggtacagctcagagcaatttccaaaacgctcctgctgcttttataccacttggcagttttgttatggatcccaggagagagatgggagcttggtgagcggcaggtttgcctcctttccttgagggtatttcttaccatggggacaaacgctgacttgctgctgactccgccccatctccacatgactgagacctcagtggccacacttytgagccctgtggctttcatgtgtgtacagatacatcctgtgcacacaagcggctgatctgtgagcagagcctggttccccacgggtcactgcacacatcctgcccccacgatagccactgttccttcctctcgacctctgtacctgctggaactcagcgctggatggctctcccccttttccctcattccctcctcccattccttcagcctcatgtcacgccatcaccagttcctcactgcagtgctccatcttcctctgtcattcggctgctcaggagcagcatatgtgccactgcata

SEQ ID NO: 88095 - DNA, 600 bp, Chicken  19866894390644_1
actgtaaatgggttgatagtgtaggtaggacaaggggggaatgatcttaaactaagacaggggagatttaggttagatattaggaggaggtttctctcagagagggtggtgacgcactggaacaggttgcccaacgagactgtggatgccccatccctggaggcattcatggccaggctggatgtggctctgcgcagcctggtctggtggttggcaactctacccacagcaggggggttgaaactagatgatctttcaggtccttttcaacccaggccattctatcattccagaaggcayaaaaggttgccaactttaatccacatttcactgtttattatattattgcctgtctctattttctgttccatttctttttttcttttttttcttttttttttcttttgcctgaggatgtctttggaatgatgagtaggatgggaaagggaatcatagtaaccaaggcatgtggttacagtaggcacctacaaaccattgactcagtgcatttaatggcccagtttacataactgttcttgcatggagccaggagttggttgcagtggtccttgtggatcccttccaactcagaatattctg

SEQ ID NO: 88096 - DNA, 600 bp, Chicken  19866894390666_1
ttataagggcaggtagcaacaggatgaggggaaatggctttaaactggaagagggtagatttagactagatatgaggatgacgttctttactgtgagagtggtgaggcattggcgcaggttgcccagagaggttgtggatgccccaccctagaggcattcaaggccaggttggatggggccgcgagcaacctggtctaaagggaggtgtccctgcctatagcaggggggctggaactagatgatcttcaaggccccatccaacccagactatcctatgattctatgattttctttgtgtyttgattaataagacagaaataaattacctagcctaaacggatagtttggcagagctgcttttggttatcaagagaatgatgagtgtaagtcagagaaagattttataagtaaattgtggcatacattttgcagaagtattttccttagtgagcaaggtttttttccttaaatcaatatccgaggtggttaaaagatcacagaagatgaaaaacagataaagtagtgtaaaaaaaagtcccatttactggatagctttcagaaattttcctcaaaagaactttttttttcccccaaggtaa

SEQ ID NO: 88097 - DNA, 600 bp, Chicken  19866894390670_1
ttctcaacaggggttgtcatgatagaggggagtaggctgtcttgccctaagtggcccctccaaatatttttattatgtttcatactgactttgtaacagctataatcctttgaaatcagttagttttaaaagttcttcaccgatctgtgaagtacttactagcttcacatacttaatagccatttacattttccatttggattgggaaataaacacattaaaacttcagatttttgttttcattgtagtccattatgtttgctcttgcaaatgttcatttcaacaatgcttccctttttyyccccccctcagaattcacactaaatgaggtctgcactatgaagaggcattaattgtggttataaaaaaaatatcgtccagaagtcatatttcttcctatattagccactttataatggaatcttattatctagggatagataaaccaccaattctaactgacttgaatgtaagaactgttttgatagcactagtgttaatatagctacctgttttttttttgcccagatctacatgaagctcttcaagaagtccacaccatatgcaggatacccaagacaaggtgggcattttcttacc

SEQ ID NO: 88098 - DNA, 600 bp, Chicken  19866894390670_2
tctcaacaggggttgtcatgatagaggggagtaggctgtcttgccctaagtggcccctccaaatatttttattatgtttcatactgactttgtaacagctataatcctttgaaatcagttagttttaaaagttcttcaccgatctgtgaagtacttactagcttcacatacttaatagccatttacattttccatttggattgggaaataaacacattaaaacttcagatttttgttttcattgtagtccattatgtttgctcttgcaaatgttcatttcaacaatgcttccctttttyyccccccctcagaattcacactaaatgaggtctgcactatgaagaggcattaattgtggttataaaaaaaatatcgtccagaagtcatatttcttcctatattagccactttataatggaatcttattatctagggatagataaaccaccaattctaactgacttgaatgtaagaactgttttgatagcactagtgttaatatagctacctgttttttttttgcccagatctacatgaagctcttcaagaagtccacaccatatgcaggatacccaagacaaggtgggcattttcttacca

SEQ ID NO: 88099 - DNA, 600 bp, Chicken  19866894390674_1
gttctggatgatccatattaaacatttcccaacaacagtgctggcaatacttcacttgccaaccacagtgtcttcctcatatcataccctccctatttccagctcttgctttaccaaaggccagcagaatttcactttacacatgctcacaggttaatgcctgctgctagcccaactatgatgtattaagagcacccaggcctcaaatcttttggaagctacaaagttgcatctataattctggcattagtgaaggaaggcactttttggaaggaaaaaatttttcccctgcttctaccragcacttcaactgaccatttctagaaaagaagaayggaagggaatgtaaggraacctactaccattaggaagcttgtacatatacattcagaaaaagcacctactagtctctgctaaagatgaagcacaacttcagcataatgcatgtcagagaacaaatgttaagtacgacaacccctactacttcttccatactgacatttatttcttcagacttcttcctctttcttccagatgaagtgtgacaagcgcccaaagaaaagaggcttaggaactatgcgttgcttgtttcacttcaaa

SEQ ID NO: 88100 - DNA, 600 bp, Chicken  19866894390674_2
cagtgctggcaatacttcacttgccaaccacagtgtcttcctcatatcataccctccctatttccagctcttgctttaccaaaggccagcagaatttcactttacacatgctcacaggttaatgcctgctgctagcccaactatgatgtattaagagcacccaggcctcaaatcttttggaagctacaaagttgcatctataattctggcattagtgaaggaaggcactttttggaaggaaaaaatttttcccctgcttctaccragcacttcaactgaccatttctagaaaagaagaayggaagggaatgtaaggraacctactaccattaggaagcttgtacatatacattcagaaaaagcacctactagtctctgctaaagatgaagcacaacttcagcataatgcatgtcagagaacaaatgttaagtacgacaacccctactacttcttccatactgacatttatttcttcagacttcttcctctttcttccagatgaagtgtgacaagcgcccaaagaaaagaggcttaggaactatgcgttgcttgtttcacttcaaaagccttcagtttgtaatggactcttcacttacaga

SEQ ID NO: 88101 - DNA, 600 bp, Chicken  19866894390674_3
cacttgccaaccacagtgtcttcctcatatcataccctccctatttccagctcttgctttaccaaaggccagcagaatttcactttacacatgctcacaggttaatgcctgctgctagcccaactatgatgtattaagagcacccaggcctcaaatcttttggaagctacaaagttgcatctataattctggcattagtgaaggaaggcactttttggaaggaaaaaatttttcccctgcttctaccragcacttcaactgaccatttctagaaaagaagaayggaagggaatgtaaggraacctactaccattaggaagcttgtacatatacattcagaaaaagcacctactagtctctgctaaagatgaagcacaacttcagcataatgcatgtcagagaacaaatgttaagtacgacaacccctactacttcttccatactgacatttatttcttcagacttcttcctctttcttccagatgaagtgtgacaagcgcccaaagaaaagaggcttaggaactatgcgttgcttgtttcacttcaaaagccttcagtttgtaatggactcttcacttacagaatgttttaaggaatgtt

SEQ ID NO: 88102 - DNA, 599 bp, Chicken  19866894390675_1
  misc_feature (1)..(31): n is any nucleotide
nnnnnnnnnnnnnnnnnnnnnnnnnnnnnnnctgagcccctaatgccctcttgatgcttcagtttgagctgaaactgttccgttgtgccttcctctcataggatcacagaaacattaagcttggaaaaggaaggttggaaaagacctctacaattatcagatccaaccccaaaccaccccaccatgcccaaccaccccaccatgcccatagccatgtctctcagagaacatctctgtggttctggggcacccccagggatggtgaccccagcactccctgcacaacctgtgccactgccygactgttctttcagaaaagaaattttccctaatattcacccttccctttccttcttgctgcattcccaggtatcacctgtggccatacgggtcttctgacctctgcctaccactggacaaataatcccatccacagcaaatctgccctcaaaccagattggaaataaaatgccaggagttaatggtgggctggaaacagtgttttcatgtgttttgcccctgcaatttccccctttgttttaaagggaatgactttaccaaaaatagtcaaaggaagaaaataaagtttaagacttctg

SEQ ID NO: 88103 - DNA, 600 bp, Chicken  19866894390675_2
gcctaatattttaaagtcaagatccctgtgctctggcggcaggccaacccatggctggtcacctactttgttctttgcctttaaaacctcctttatttgccgcagagctccaggttccaggagagcactggttgctgtggtcggtgctgctgcgaggaaggtgactccttccagcagtgtgtgtgcatcgcggggttaccgataacaaataaaatcattacacgagataaaatgattgctttgggaaggaattgcaaggtggcataattagacatcgggcatttttaaggttactttacractttggagctgcaaaagatggaagtaatttatttcatttcagtaatgctcctctctggtctagcaatttatcagaagtgttaatccaacaggcagggagcgtgcgtggtgggagggggcacggggaacacaggcagtagagagagaaggcattgagaatgagcttggaaatattgtacatctcattaaaaatgtaatcatgcataaaatgagatcaatgaaaatttatctaaaagtgcaaggaaaaggcgttttctggtatgatactgggtataatagactggattttaatttagtcag

SEQ ID NO: 88104 - DNA, 600 bp, Chicken  19866894390686_1
gactgtggttttctctggagcccactctctgtggctttgtgtgtttttcaccagagaaggaactatggacaaatgcagtgaagtgcactgctgccaaggtcacgctgaggtgacaggcaattgctcagccatccccttcatctcctatcactgacgtctagctgccgaactatgtggctatgctattgcctccttgccctgggaaactaagaaacttcaaggaaagtgaaggcagaaatcccagcaagttactcctttctgaaaagagcggaacagtttgcagagtgctcatagggagcygttttccattccctgccatgccagtctattgctcrcaacatgcagattcttttgttctctgtgtcaaatcttcagcatactcactctccctcttgctttaggaatagaaatattctcagttccctggtattcctggggatttccgtttttttagctgctgacctcaagtctcctttttcagagaatataccttagagctttccaattacttgaagcacctacagggttggactgaagaactggtattttaacatcttcctcctagccttttttttttccctagaactttgtcttaatccc

SEQ ID NO: 88105 - DNA, 600 bp, Chicken  19866894390686_2
tttgtgtgtttttcaccagagaaggaactatggacaaatgcagtgaagtgcactgctgccaaggtcacgctgaggtgacaggcaattgctcagccatccccttcatctcctatcactgacgtctagctgccgaactatgtggctatgctattgcctccttgccctgggaaactaagaaacttcaaggaaagtgaaggcagaaatcccagcaagttactcctttctgaaaagagcggaacagtttgcagagtgctcatagggagcygttttccattccctgccatgccagtctattgctcrcaacatgcagattcttttgttctctgtgtcaaatcttcagcatactcactctccctcttgctttaggaatagaaatattctcagttccctggtattcctggggatttccgtttttttagctgctgacctcaagtctcctttttcagagaatataccttagagctttccaattacttgaagcacctacagggttggactgaagaactggtattttaacatcttcctcctagccttttttttttccctagaactttgtcttaatcccagctggcagacaaagaacagcttaccggggtaaag

SEQ ID NO: 88106 - DNA, 600 bp, Chicken  19866894390687_1
gtaattacacacagatcacatctgcagactgttcaaaaaggaccagctggacagtcacaagttttgctggtgaaagctaaaaattaggacaaatattaacaaaaacaagcactagaaacaaggggaaatcagtatggcatcaagagaagaaaacaatcttttaaaaagctccctgtcatctgattctatgctggaaaactgaattatcttcttagtaacagtgcgtgcccttctgtgggtttgtttccttttgaggaaaggtgcacgtccaaactggcaaatactcagtatcaaatgtgwagctgttgtggaaagcaattgggaaatccatcccctgttgttgttctgtacatgtgagtgcctgacgggtttgcgtgtgctgtcccaagcaaacatccacgcagattgtaggagttagtgggtgctattctagtaacagttaaaagtgagtattaacagttcattcttgtttagacctcagcaatgcgtgttttgtttaaataggtgcaaatgccatccagatgcttataaaagcatttattggtaataacctggccaatcaaagggcatggttaggcagtgatgtcatggtgatattta

SEQ ID NO: 88107 - DNA, 556 bp, Chicken  19866894390687_2
ggctcggggagggggttggacagaggtgtatgtgagcagagagctgtgggggttggcctctggtcactggtaaataagtgaaggcaggtgccagagagtctagacacagtgatttcagtcctggtctgtggtatctgatactcaatatgggacttgtctgattgaacactactgcctcttcattgcacatgctgcagtctttttactgccttcctgttaaatcagtaaaagatgacaatggacatagtaaaagcagaacaaatttaattttaatatttcctatttggcagcaattactcytccttttgaagtggcacaagaagcaatcaaattaaatgaagacataatgggaaacatggagctcgtactaaactattattttaaaatttgaacgactttaattgaaactggatatatttttcctctttatggagaagtagctcagtaattaacagtataattccttcttgttaaacatctaatttccacagattttgtattgtgtgcgtaatgagaatgtttcccttcaaattactcgaagggttttaaaaaatct

SEQ ID NO: 88108 - DNA, 600 bp, Chicken  19866894390689_1
caggccaacaagcactttggcatggccctgggtgctctctttgtcgaggagtacttctcctctgccagcaaggccaaggtaggtgccctcctgtccccctgccaaggtgccactctgcaggtgggcggttggaacatagtcccaccactcgtggtgactcactgtaggtgcagcagctggtggaggacatcaaatacatcctggaccagcgcctggatgagctggattggatggatgaggagacacggagagctgccagggccaaggtggcagcccccagcatgttcccctgtctttgtycccatgaggagatgtgggacaggagtcctgaccccgccacctgctttgcccacagctccagtacatgatggtgatgattgggtaccccgacttcttgctgaagccagaggccatcgacaaggagtatgaggcaaggggcacacaggggcacacagtgtgggagatggaccctacatctgtctagttagaggtgcaggcagaccagcttgggaagatactacctcaatataagccacctcctggtagatcacaagcttcatcacttgcatgaccacagccacataggcggagcctttcccc

SEQ ID NO: 88109 - DNA, 599 bp, Chicken  19866894390690_1
  misc_feature (1)..(70): n is any nucleotide
nnnnnnnnnnnnnnnnnnnnnnnnnnnnnnnnnnnnnnnnnnnnnnnnnnnnnnnnnnnnnnnnnnnnnncaccgcctccgcgcctgcttcaattccgaggtgggaaggcatgacccagagggatcagttacacgttaatgacgcatattagagactattgtattcttcggcactgtctgctaatgtactctaattggcgctgatgaagaaatgttaatgccacagtattaattcatgctaaattaaatttgaatttgaattatctgcaccatcgtgtgtcgagaaatctgcatccttcrgctgcgccgcacagcccgagcgcatcaccctgggatgggcacggagatgggcacagcagcactgacagcccctgctcatctcagtggcactaagcgaggagagaggactcacctgctgctaaggtaagtgctggccrtgctatgatgcctggatgctgcagccccgcmgtgccccgtgcaccccctgtgaacgtacctcagcacagaygctcccacggtgctttgccgtcctgctgctgcaggagggggagagagcggggcagggaaaggggaggcaaggcagggctttatgtgaaagt

SEQ ID NO: 88110 - DNA, 600 bp, Chicken  19866894390690_2
aatgacgcatattagagactattgtattcttcggcactgtctgctaatgtactctaattggcgctgatgaagaaatgttaatgccacagtattaattcatgctaaattaaatttgaatttgaattatctgcaccatcgtgtgtcgagaaatctgcatccttcrgctgcgccgcacagcccgagcgcatcaccctgggatgggcacggagatgggcacagcagcactgacagcccctgctcatctcagtggcactaagcgaggagagaggactcacctgctgctaaggtaagtgctggccrtgctatgatgcctggatgctgcagccccgcmgtgccccgtgcaccccctgtgaacgtacctcagcacagaygctcccacggtgctttgccgtcctgctgctgcaggagggggagagagcggggcagggaaaggggaggcaaggcagggctttatgtgaaagtgagaagggatgctcagaaaggggagagacaaagggaagaggaagaaaaaggggttgcagtgtgggaccgtgggacctggagcaccctgaggtgagctctgcccggagcatccatcctggggaatgcgtctgcacgatc

SEQ ID NO: 88111 - DNA, 600 bp, Chicken  19866894390690_3
cggcactgtctgctaatgtactctaattggcgctgatgaagaaatgttaatgccacagtattaattcatgctaaattaaatttgaatttgaattatctgcaccatcgtgtgtcgagaaatctgcatccttcrgctgcgccgcacagcccgagcgcatcaccctgggatgggcacggagatgggcacagcagcactgacagcccctgctcatctcagtggcactaagcgaggagagaggactcacctgctgctaaggtaagtgctggccrtgctatgatgcctggatgctgcagccccgcmgtgccccgtgcaccccctgtgaacgtacctcagcacagaygctcccacggtgctttgccgtcctgctgctgcaggagggggagagagcggggcagggaaaggggaggcaaggcagggctttatgtgaaagtgagaagggatgctcagaaaggggagagacaaagggaagaggaagaaaaaggggttgcagtgtgggaccgtgggacctggagcaccctgaggtgagctctgcccggagcatccatcctggggaatgcgtctgcacgatcacagcagtgctgcaaggractgrggtagctc

SEQ ID NO: 88112 - DNA, 600 bp, Chicken  19866894390690_4
gaaatgttaatgccacagtattaattcatgctaaattaaatttgaatttgaattatctgcaccatcgtgtgtcgagaaatctgcatccttcrgctgcgccgcacagcccgagcgcatcaccctgggatgggcacggagatgggcacagcagcactgacagcccctgctcatctcagtggcactaagcgaggagagaggactcacctgctgctaaggtaagtgctggccrtgctatgatgcctggatgctgcagccccgcmgtgccccgtgcaccccctgtgaacgtacctcagcacagaygctcccacggtgctttgccgtcctgctgctgcaggagggggagagagcggggcagggaaaggggaggcaaggcagggctttatgtgaaagtgagaagggatgctcagaaaggggagagacaaagggaagaggaagaaaaaggggttgcagtgtgggaccgtgggacctggagcaccctgaggtgagctctgcccggagcatccatcctggggaatgcgtctgcacgatcacagcagtgctgcaaggractgrggtagctctgggttcctacctgtgtcctgtgtgtgctgcatggccgct

SEQ ID NO: 88113 - DNA, 513 bp, Chicken  19866894390690_5
ctgcagccccgcmgtgccccgtgcaccccctgtgaacgtacctcagcacagaygctcccacggtgctttgccgtcctgctgctgcaggagggggagagagcggggcagggaaaggggaggcaaggcagggctttatgtgaaagtgagaagggatgctcagaaaggggagagacaaagggaagaggaagaaaaaggggttgcagtgtgggaccgtgggacctggagcaccctgaggtgagctctgcccggagcatccatcctggggaatgcgtctgcacgatcacagcagtgctgcaaggractgrggtagctctgggttcctacctgtgtcctgtgtgtgctgcatggccgctccttctctgccccttttctgctcaggtttttggtgcctttaggacagccccaggtgcgtctgtgcaccacagctccaggttacagccctggatgcaccggcatgggggaatggagagcagccccgggtgcgcagcaggtgacagagcacagcacggccat

SEQ ID NO: 88114 - DNA, 508 bp, Chicken  19866894390690_6
gccccgcmgtgccccgtgcaccccctgtgaacgtacctcagcacagaygctcccacggtgctttgccgtcctgctgctgcaggagggggagagagcggggcagggaaaggggaggcaaggcagggctttatgtgaaagtgagaagggatgctcagaaaggggagagacaaagggaagaggaagaaaaaggggttgcagtgtgggaccgtgggacctggagcaccctgaggtgagctctgcccggagcatccatcctggggaatgcgtctgcacgatcacagcagtgctgcaaggractgrggtagctctgggttcctacctgtgtcctgtgtgtgctgcatggccgctccttctctgccccttttctgctcaggtttttggtgcctttaggacagccccaggtgcgtctgtgcaccacagctccaggttacagccctggatgcaccggcatgggggaatggagagcagccccgggtgcgcagcaggtgacagagcacagcacggccat

SEQ ID NO: 88115 - DNA, 600 bp, Chicken  19866894390692_1
tggcatcagcatcgccccgagccccaggatagcgatgctgcgaaaccgccgggggatgagtggggcacctgcagcgagcgtgtgagtcttgaaataaagcaataaagcaacgagtgaagtgcgagatgctcccagcacggcagctcggggatgttttgaaacaaactgagtcacactccctcgagcagcagcgatgcccagcatcaaggtgcgtgcgggtaaagagaagggaaccccaaatccatgcaccccgtccctacctgctgcgcgccccgtcccgctgtgctgtgctgtgctctygggtcaggctgagctgggcatgggccacgctgggtgcacaccgtactcaccgcccgccgcccgcccgcccgcttttatggccaccgagtctcctcctgcggcggggccccactccgctcagcgctgcggagccaatcggggcgaggaaagctgtgaataatcacgccccgcagcatccccgccacagcccgggtgggctccctcgctgcacgcccctggggctgggtgtgagcgcaccaggatgccccctggtcgctgctaccccattggggtcctcggcgtgggcagtgggcaggggtc

SEQ ID NO: 88116 - DNA, 600 bp, Chicken  19866894390715_1
ggtaggagtcaggcttgctgcctcggtgcgacctctggtgccatggttgcagcccagtgtcaggccccaccttggggcacggggactctcagcgtcctcaaggacgtacccacaactggtggctgcgtggggccaggcgggtgatggggacacgagcacagggacacagacccctgctgctcctgaccacacctgtctggtgtgctctgctctgccctgcactgcagactgtgcaaaatcagccagaaggagcaaggagaggccctggctgcagcgctggcggacagcctgtgggcagcrggggacggccggagagccaccgtctgcctcctcactgcagccacccactgctcccctcctgcgggctacaaagccgacagcttcactgagcgggtgggtatggaaatgcttcctgtaaatatggcttcttaaaagacatttggtctgaactgtctacagaccagaaacatctcattagcctgctcctaacttacagcgcaccgcatagcctaagaacatcgcagacacatccaggtggagctcagcaggtgttcctgcctccttgtgaaggcacggcttctttgtagagctcatttgtta

SEQ ID NO: 88117 - DNA, 600 bp, Chicken  19866894390725_1
gattctttgagtcattgcttcttatgtgtaaacagagggaggcagcttacatagcaaactcagcctggaatagcttgaggtgattaacagttgtttgattccttgaagatttccacatgcttatgccaatccaactgggaaaggcagaataaatattttgaaatatgccccttcttttgtaaattaggcatgatgagtgctgcttaaccagttagctcagagttacagaattggttttattcagcaaacagtagcagaagggcagagctggcgccgggcgtgccgggagctgctgcactkcgagcccttcgggcacaggggatgcaggagtgggagaggcagaggggctcagacagcagcggccctgggctgccccctccccctgccctgcccttgggggtgcttggcagtgctgggcagcgccggatgttcagagccgtcccgcagcaggaacgtgccagcagtgcgagtgataaaagacaagttttgtctttgggatgagtggcggcatccaagggtggtgttccctttgtttgttcacatgtgatgaggcagtaaaacgtaacgaaatacggaatcactcgaagcacggagggtctg

SEQ ID NO: 88118 - DNA, 564 bp, Chicken  19866894390727_1
tccttttctttctaatgctgataaatgcaaggtagtcttgtctctttgttcattgggatttataacaatatttttcaaaataatcatcacttcaatcaaaacaagaaaaaaactcaacattttttcactaattttacctataggagtagtgcttctgttgatcttttgtttgttttcctccagtttttgcactgcatttcagttctgctccatccacaaatgcactgaaaaccaatttataagtggaatgcaatcactctgcctgttactgaacttcagtgtgctaaagtgcaacatatrctgagtaacacaaattaatagataagtgaagaaaggaaaaataaagaaaattcacttgggcaggacatgtgatgtttgtctatttagatcagtgaagcctctaaattgactggacattctattaagtatctaaacaaacaacattaaccagaagtgctaagtgtatatggatgcattaaatagcttggtcttgaaaagaacaaagattcctactaacaaactagaaaaaccattttcccaagcattggaagaaacgcaattccc

SEQ ID NO: 88119 - DNA, 599 bp, Chicken  19866894390735_1
  misc_feature (1)..(16): n is any nucleotide
nnnnnnnnnnnnnnnngtggcggttgggtggctgaattcctcagccccgagagggccaccatttttgctaaggggtccttcagttttgttgatgaatttaaatattctgatattttcctcttaggttcattaaagtgcgccagtcatcttaaatataattactggtcaagttctgtacttgttcgctttcactggtctgaattctgccataaagatacttttgcacaggcagtcgaagcctccttctgcagccagcccccatcctggagcatctctccagaagaaataacccagcacagycctctccagaggaaactgtaagacgatttctttcaatggaatttttctggcaaggggaaaagctcagggaagactttcctgataaatccaaarctgtttaaacttctgaaatggccttttcagttccaaaagggagcaataactattttagctacatgcttcattatcctagttatggttatgaaccacgctaaggctaacagcttcagctaataaaatgcacagcttgagccttgggaacatttctggtagtgaagaaaatattcatatttattgaagaccagatttagccyttttaa

SEQ ID NO: 88120 - DNA, 600 bp, Chicken  19866894390735_2
gaatttaaatattctgatattttcctcttaggttcattaaagtgcgccagtcatcttaaatataattactggtcaagttctgtacttgttcgctttcactggtctgaattctgccataaagatacttttgcacaggcagtcgaagcctccttctgcagccagcccccatcctggagcatctctccagaagaaataacccagcacagycctctccagaggaaactgtaagacgatttctttcaatggaatttttctggcaaggggaaaagctcagggaagactttcctgataaatccaaarctgtttaaacttctgaaatggccttttcagttccaaaagggagcaataactattttagctacatgcttcattatcctagttatggttatgaaccacgctaaggctaacagcttcagctaataaaatgcacagcttgagccttgggaacatttctggtagtgaagaaaatattcatatttattgaagaccagatttagccyttttaaataggaaaataaaaaggtccaactgcgcacccaatgtaaaatactgacctaaatggccagctttatgctcaaactttcttgcctccttctcttt

SEQ ID NO: 88121 - DNA, 600 bp, Chicken  19866894390735_3
gcacagycctctccagaggaaactgtaagacgatttctttcaatggaatttttctggcaaggggaaaagctcagggaagactttcctgataaatccaaarctgtttaaacttctgaaatggccttttcagttccaaaagggagcaataactattttagctacatgcttcattatcctagttatggttatgaaccacgctaaggctaacagcttcagctaataaaatgcacagcttgagccttgggaacatttctggtagtgaagaaaatattcatatttattgaagaccagatttagccyttttaaataggaaaataaaaaggtccaactgcgcacccaatgtaaaatactgacctaaatggccagctttatgctcaaactttcttgcctccttctctttttttcctgattcccaaaaattgataaggggtcttgtgtgctaaacaggggcctgtgcacacatggtgccctgtgctgtaaggacggcgccaggctctgccacccccctgggtcacccgcagtgagcagcacagcctcatcagccacttcagaggccagaaaaaaggcttcaccattgcatctcctccctaccctttgagg

SEQ ID NO: 88122 - DNA, 469 bp, Chicken  19866894390739_1
  misc_feature (1)..(130): n is any nucleotide
nnnnnnnnnnnnnnnnnnnnnnnnnnnnnnnnnnnnnnnnnnnnnnnnnnnnnnnnnnnnnnnnnnnnnnnnnnnnnnnnnnnnnnnnnnnnnnnnnnnnnnnnnnnnnnnnnnnnnnnnnnnnnnnnnnctgtgtaaggatgtggcatttccaagctgtggtcagcgagggcacaatgaaacctgttggagaggcactgagaggagagcagacccagccagagggtctctgctcacccctcagctctgttgtccccttcctgcccccaccctgccttgcagctaaatttgctatgctcycagtgctgtttctgtactgaagaaaccagcatggtacaaattaagaggacaagatgttcagaagtggcaaattcacacgttggatttttttgtttgtttgttttcctggcacacgagagcaaatttagattggttgggggcggggggattggtggggtgaggggaactg

SEQ ID NO: 88123 - DNA, 600 bp, Chicken  19866894390742_1
tttcacctcctctgatgaattctgtttcatcactaaccaagaagctcagaaataagccctgagctgtcagcccaacatgggaagaagtgattttgtcagaagggcactgcccttctccttgacaacaattcatatctgcatagcttttaagaagaagacgcacagaccaccgacttgctttattctgtgagctgcttgctgtggaatgctcctcctgctgcttgctatgaactagaaacctctccagcttcactttattgtgatacacacttcactcaactcccatcactcagaagctgyccaggaagagrcacaacacccgggcctttctgctgaccagaacgttcttcacatgtgaaatgcacagactgaagcgttcaccaytccaaaacaagttcaatagcatttagtggtatctggaaatgtaatgattaattaaaaatcaaataaaatcaatctccagtgtctagacttaggcaatatgggggtgaatgttatgctgcagtttgctaaatttccatgttgacaagtaggcctttattttcttaacatttatttgagatatattgcttcatgtgagatttggggcattcttaggac

SEQ ID NO: 88124 - DNA, 600 bp, Chicken  19866894390742_2
ctgatgaattctgtttcatcactaaccaagaagctcagaaataagccctgagctgtcagcccaacatgggaagaagtgattttgtcagaagggcactgcccttctccttgacaacaattcatatctgcatagcttttaagaagaagacgcacagaccaccgacttgctttattctgtgagctgcttgctgtggaatgctcctcctgctgcttgctatgaactagaaacctctccagcttcactttattgtgatacacacttcactcaactcccatcactcagaagctgyccaggaagagrcacaacacccgggcctttctgctgaccagaacgttcttcacatgtgaaatgcacagactgaagcgttcaccaytccaaaacaagttcaatagcatttagtggtatctggaaatgtaatgattaattaaaaatcaaataaaatcaatctccagtgtctagacttaggcaatatgggggtgaatgttatgctgcagtttgctaaatttccatgttgacaagtaggcctttattttcttaacatttatttgagatatattgcttcatgtgagatttggggcattcttaggacacttattatat

SEQ ID NO: 88125 - DNA, 600 bp, Chicken  19866894390742_3
aagtgattttgtcagaagggcactgcccttctccttgacaacaattcatatctgcatagcttttaagaagaagacgcacagaccaccgacttgctttattctgtgagctgcttgctgtggaatgctcctcctgctgcttgctatgaactagaaacctctccagcttcactttattgtgatacacacttcactcaactcccatcactcagaagctgyccaggaagagrcacaacacccgggcctttctgctgaccagaacgttcttcacatgtgaaatgcacagactgaagcgttcaccaytccaaaacaagttcaatagcatttagtggtatctggaaatgtaatgattaattaaaaatcaaataaaatcaatctccagtgtctagacttaggcaatatgggggtgaatgttatgctgcagtttgctaaatttccatgttgacaagtaggcctttattttcttaacatttatttgagatatattgcttcatgtgagatttggggcattcttaggacacttattatatcatactgattacaccaaatccaacagatgggaaataaacaaaataatctacactgctagtttcagagtaagca

SEQ ID NO: 88126 - DNA, 600 bp, Chicken  19866894390745_1
tgaggcaggaggaatttagtaatatctgattaataaatggtgaaatgcactgatgaaattctatggaggtggttgatatataaatgcactgctaggactcatgattgtctatcatgcttttaaaataacaaagtatttaccaaaaaaaaaaaattatgagaaataattataaaaaatgaaacctcaccctaggagcattgtaattgcagtaattagagtttcacaattattatccagaattagaaaacagccagtgctaatagtgttaataagcacacaaaagactaattttttttgaayggaggcaaagttgacaaccacagaacagatgtgagacaaacaggggaacagaggtcaccatagggtggcaaatagcccctactcctgcatgtgtgccttcacactaccaaaacagcttctcaccaacatctttgaggagtgttgagctttcctgatagccatctcaccctcctctggatgactttctcaccctggagctatcagggatgtacctgcacagggaaaatgaaagaacaccaaaagttggcagcttagctgatcctctgcttgtttgactggacctgcagttgacctacaagg

SEQ ID NO: 88127 - DNA, 600 bp, Chicken  19866894390745_2
actggacctgcagttgacctacaaggcactgtcatctgctttgctgcaaaaatgttgatggctttgattcttcatgcttaaaaaatgtggggtctacatggcagtgagaaaacccatacagtggtaaaatgtagcaactgacagggaaggaacatctccttcggtctgactggttaaaaaactctctttgttgtaagataaaaatctgtcagaaaaagcgttcttcacaagaaagaatctatatggtcccagtcctaagcaatcatatgtgcttggtccttgagagctcaggatgtgcarccttgttcaatgctcaagagacaattctaaagaagatacaaatgtgtttcctgaaaaaaaaaacaaaatccagaattcttaattactttcagattctccttacggtatgtttctgttatggatagacatcagacatccaagaaaaattgtcaagtaaagtcctgtccaaaagctcctcactaaaaacatattgctagaaccaaacaaaaacttcataggcaattccagcagcacgaaaactaaccctgtgtgtaattcccaacagacttaccacctgttcttagaataaaacagcattct

SEQ ID NO: 88128 - DNA, 600 bp, Chicken  19866894390747_1
ggaggaaaggaagaatgctctccccagaatcacaaaaaactttgtacagaggatttacttggagtgcctcccttgtaccagcagaagacttaaccaaaaggactgaagtgtttatgaattttttaatccagctaaaccacagtagtttaattacatataaaaaaggcttgcataacctctgtaaggtgttgaatatttcatctcagcctacagatgctagaatgctctattagttgaaaaagcccaagaggacgtgtggaagtggtgtgtgagactgtttctctctatgatcaggaattyatttatacacatatgcatgtatatgtgaatacacaagggaagagagaaaaaagctacaggcaccgtagcattgggagaagtaggttgtatcttactaaaggaagctggtacttacagagaaagatataatcacatttcattataaaagcctattttaataatacaattattttgacttggagcattgttttggcctgaatcttgcctttaatttcctttacagagaaaaaaaaatgcttatataaagtctgaatagtgttcataaattcctatctgagtatcaggatgttaaacaatact

SEQ ID NO: 88129 - DNA, 600 bp, Chicken  19866894390749_1
gctctaggttcagaagtgttccggaatttgtaggtgatgcatattttaaaggatccgatgtcaccttcaagtgacaagctccttccagaaaccacatctattattaatggcacaaaacagatacccaaaagtcaaaacattcattttctgtttggacagccccacgtgttgttcctagcaggcctcctacagctgcgttcttcatgctgcttagttcacaggttttggaaagttgttcatcatgtcaggttaatgaaaatatggaacaaatgctccaaagagagctggaaagcaacaccragctcakattggtaagtcaaagaaatagacttgacaagatgtgtccttctgtgtcgctttggagactttatccttaaaataccttagagaagatggggtagaaactatttaacaaatagtctgctgtcatttgaaaaacaaaaccagatggtggtgttaatgcatccagtgacataaacacaatgccatgtgtctgcgggaaaaacaataacccccacacagcacagtcctgcaaacctgaaggcaaatactcccaggagttgtcttatgaagaggaggaaagcaagaataccctgtggc

SEQ ID NO: 88130 - DNA, 600 bp, Chicken  19866894390749_2
gttcagaagtgttccggaatttgtaggtgatgcatattttaaaggatccgatgtcaccttcaagtgacaagctccttccagaaaccacatctattattaatggcacaaaacagatacccaaaagtcaaaacattcattttctgtttggacagccccacgtgttgttcctagcaggcctcctacagctgcgttcttcatgctgcttagttcacaggttttggaaagttgttcatcatgtcaggttaatgaaaatatggaacaaatgctccaaagagagctggaaagcaacaccragctcakattggtaagtcaaagaaatagacttgacaagatgtgtccttctgtgtcgctttggagactttatccttaaaataccttagagaagatggggtagaaactatttaacaaatagtctgctgtcatttgaaaaacaaaaccagatggtggtgttaatgcatccagtgacataaacacaatgccatgtgtctgcgggaaaaacaataacccccacacagcacagtcctgcaaacctgaaggcaaatactcccaggagttgtcttatgaagaggaggaaagcaagaataccctgtggcctcaact

SEQ ID NO: 88131 - DNA, 585 bp, Chicken  19866894390752_1
ttcccttctctaatcgttttgtcctttgacaggaaaatagtacttgcaggtggctgcatttgacttatcacctggctacaagcctgttcatttggcttttttgttgttgttttgagatcaggactgtttttcttttgtatagtactgctgtgcatggacatgtttgcaacgttcttcacatgtcagtatgtggctttcacatgggctttccaattctgtacagttacttagcttgatcttatttaaaaaaaaaaaccaaaacatagaattatatttaagtacatgagcagaagtaaaatygtgaggaacaagcacgtactaattctgcttcaacatgactcgcagtatttgtaactcacaactaaagttaagggtgttatgtaaggttcctgtgactcctcattttttttttttttataagaggtagaagaccccttttcatccttcaaaggtagcaatcatcagtacttacattggtcactgattatctcatgttcatcaacagtcctaatcctagaagatgtgctgttagtatagaaaccatctaacagtaacttaaatgatctcctatatgtatggattcca

SEQ ID NO: 88132 - DNA, 599 bp, Chicken  19866894390758_1
  misc_feature (1)..(40): n is any nucleotide
nnnnnnnnnnnnnnnnnnnnnnnnnnnnnnnnnnnnnnnncctaggctttctgtgtgtatatatggatatatactaggacaggttgcccaagaaggctgtggatgccccatccctggaggcattcaaggccaggctggatgtggctctgggcagcctggtctggtgatgtgtgctccagctgagttttggcctcagaagcagactccaagccacaaaagcctcggtggttggagcaaagcagggagaacaggagcacttttggcttttggaaggagctttctccatgttcaaaggggaaygcattatggtgtttgcataggccacgatgagctgaatggcacagaaaggctcattaggtccttgctgtrgggaatcccagagcacagctgttggggatgactagtgatggtgactgggtataaggaagcatsatttttgtgcacctggacctcggtggcttgccaaatccctgccaaacttagacatcctgaagctgcatgcacccattttttaaagcagtgctgctgagcaactgatgaatctctcctcgcatccatcccattctgcatcgagtgtccaccataagccttccatcttg

SEQ ID NO: 88133 - DNA, 600 bp, Chicken  19866894390758_2
tatactaggacaggttgcccaagaaggctgtggatgccccatccctggaggcattcaaggccaggctggatgtggctctgggcagcctggtctggtgatgtgtgctccagctgagttttggcctcagaagcagactccaagccacaaaagcctcggtggttggagcaaagcagggagaacaggagcacttttggcttttggaaggagctttctccatgttcaaaggggaaygcattatggtgtttgcataggccacgatgagctgaatggcacagaaaggctcattaggtccttgctgtrgggaatcccagagcacagctgttggggatgactagtgatggtgactgggtataaggaagcatsatttttgtgcacctggacctcggtggcttgccaaatccctgccaaacttagacatcctgaagctgcatgcacccattttttaaagcagtgctgctgagcaactgatgaatctctcctcgcatccatcccattctgcatcgagtgtccaccataagccttccatcttggggtctggagaagtgagcagggctggtggggygccacgatggatggatggatggatggatggatggatgg

SEQ ID NO: 88134 - DNA, 600 bp, Chicken  19866894390758_3
ggctggatgtggctctgggcagcctggtctggtgatgtgtgctccagctgagttttggcctcagaagcagactccaagccacaaaagcctcggtggttggagcaaagcagggagaacaggagcacttttggcttttggaaggagctttctccatgttcaaaggggaaygcattatggtgtttgcataggccacgatgagctgaatggcacagaaaggctcattaggtccttgctgtrgggaatcccagagcacagctgttggggatgactagtgatggtgactgggtataaggaagcatsatttttgtgcacctggacctcggtggcttgccaaatccctgccaaacttagacatcctgaagctgcatgcacccattttttaaagcagtgctgctgagcaactgatgaatctctcctcgcatccatcccattctgcatcgagtgtccaccataagccttccatcttggggtctggagaagtgagcagggctggtggggygccacgatggatggatggatggatggatggatggatggatggatggatggatggatggatggatggatggatggatggatggatggatggatggatggatg

SEQ ID NO: 88135 - DNA, 600 bp, Chicken  19866894390758_4
ctgaatggcacagaaaggctcattaggtccttgctgtrgggaatcccagagcacagctgttggggatgactagtgatggtgactgggtataaggaagcatsatttttgtgcacctggacctcggtggcttgccaaatccctgccaaacttagacatcctgaagctgcatgcacccattttttaaagcagtgctgctgagcaactgatgaatctctcctcgcatccatcccattctgcatcgagtgtccaccataagccttccatcttggggtctggagaagtgagcagggctggtggggygccacgatggatggatggatggatggatggatggatggatggatggatggatggatggatggatggatggatggatggatggatggatggatggatggatggatggagggcttctgagccctcaccagtcacagacatctagctgaaaggatactaaatgcatgcgtggccacccactgaaactcatttgggccagctgcaatgaatcagctggttgaaatagtgatgattaataggaatccacttgtgctggggaggaaggtgctctccagtgaaatgctgccctgttgctgagggaaa

SEQ ID NO: 88136 - DNA, 599 bp, Chicken  19866894390759_1
  misc_feature (1)..(41): n is any nucleotide
nnnnnnnnnnnnnnnnnnnnnnnnnnnnnnnnnnnnnnnnnctttcaccatgggatcccaagactctgttttgtcatagaaaatacccttgtccataaatctaatggtgaggaattcctccacgaggcgattcttcctctggctgtgttgtattcccatgacgctgggagacaagatggtgaccatgactccaaacagtgatgatcatagaatcacagaatcatagaataccttggtttggagcgtacattaaagatcacccagtatcaaccgcctgctgtgagctggttgccacccacmagctcaggctgcccagggccccatccaacctgtccttgaatgcctccagggatggggcatccacaggtctctgggcaacctgatggagtgagataaactggaacaatccccccttatcacactgctccaatccctctygcttggctctttttatttaagtaagagcaatctcaactaaagaaccaacactggagaattttggagacggatttcaaacctttgcaaccagctgataaaggaattcaactacaaaatactgatgcagttgtattctcactgcatttgctgagacacagaag

SEQ ID NO: 88137 - DNA, 600 bp, Chicken  19866894390759_2
ctggctgtgttgtattcccatgacgctgggagacaagatggtgaccatgactccaaacagtgatgatcatagaatcacagaatcatagaataccttggtttggagcgtacattaaagatcacccagtatcaaccgcctgctgtgagctggttgccacccacmagctcaggctgcccagggccccatccaacctgtccttgaatgcctccagggatggggcatccacaggtctctgggcaacctgatggagtgagataaactggaacaatccccccttatcacactgctccaatccctctygcttggctctttttatttaagtaagagcaatctcaactaaagaaccaacactggagaattttggagacggatttcaaacctttgcaaccagctgataaaggaattcaactacaaaatactgatgcagttgtattctcactgcatttgctgagacacagaaggcttggatatttgtggaattcattctcgtctcacccaaaccttgagtagtccatcctgatggagagggaaccctctgcggtggacacacactttgcatgcagatgccaccagtcgtggcagagttgctgtcacatgata

SEQ ID NO: 88138 - DNA, 600 bp, Chicken  19866894390761_1
actagaaaaccaaagtactcagagaagcaaacaaaaaataccatttgacataggaaccctcaattctgagttaatctcctataagcatataagtgtgttcaagtgggttcccaactttatatactacttcagtctaatgactactcttctgattgtacatttgtgtgtgcacttggttgtattttccatacttggttgtatggaaagccaactttgagagtctggagttagcaatgtctacttgatgtgacttggtataaaagatggagataacacagggtgcatccacattagtaattytgtgygcatgaggagtttatgaaggtctgccttctgttaataactggagtcttgtagtatgcaaagaagggcactgctgatgtgtttgtatttgatgcttttgtgaggagactaagcttgatgttttaccctggaatatgatcacttagtacagaccgttcttcacgaagcctgaagatcctccagcaggtagttctcagtatgtacagtggaggagtagggaactgacaactggtttgttctttacaggttgagatggaccataggcactgaaccattgtcaattcttygttatttgtg

SEQ ID NO: 88139 - DNA, 600 bp, Chicken  19866894390761_2
aaaaccaaagtactcagagaagcaaacaaaaaataccatttgacataggaaccctcaattctgagttaatctcctataagcatataagtgtgttcaagtgggttcccaactttatatactacttcagtctaatgactactcttctgattgtacatttgtgtgtgcacttggttgtattttccatacttggttgtatggaaagccaactttgagagtctggagttagcaatgtctacttgatgtgacttggtataaaagatggagataacacagggtgcatccacattagtaattytgtgygcatgaggagtttatgaaggtctgccttctgttaataactggagtcttgtagtatgcaaagaagggcactgctgatgtgtttgtatttgatgcttttgtgaggagactaagcttgatgttttaccctggaatatgatcacttagtacagaccgttcttcacgaagcctgaagatcctccagcaggtagttctcagtatgtacagtggaggagtagggaactgacaactggtttgttctttacaggttgagatggaccataggcactgaaccattgtcaattcttygttatttgtgatagt

SEQ ID NO: 88140 - DNA, 600 bp, Chicken  19866894390761_3
ttagtaattytgtgygcatgaggagtttatgaaggtctgccttctgttaataactggagtcttgtagtatgcaaagaagggcactgctgatgtgtttgtatttgatgcttttgtgaggagactaagcttgatgttttaccctggaatatgatcacttagtacagaccgttcttcacgaagcctgaagatcctccagcaggtagttctcagtatgtacagtggaggagtagggaactgacaactggtttgttctttacaggttgagatggaccataggcactgaaccattgtcaattcttygttatttgtgatagttactaagtagatatttctttgcaagaaacttgaaactttcttgttttaaaaacaacaattgaatattgccaaatagagcagcttctgctttttctggtttattaaaataatgaaatttctatatctagtttggatttctctatcttaaaggtgagaaagtaagtcagaagtctgatcaagagatgaaaaatgaaactttgacattttctttatgcaacttccatcatttgtgcaaacactttcatgcatatttcttgtatgcagcaaatggaaggtgatgaatta

SEQ ID NO: 88141 - DNA, 600 bp, Chicken  19866894390766_1
tggcattacaccattctggtcttggaaaaggacctggaaaaaactgcagagaaaagcggagtatgcgtatagagcagtttttgcacaagaaatgattgaacagcttttttactccatagccaggagaggatttactctggcttgatatgttaaatatatctaagactttgaatgatacttttatgccttgtctcttctaatacacatcttagaagactatagatgaagctggcaagtgacaggtccagcacaaatgataaaaacaccttttcactcgggattttgaaaagctgtgaaacyctttcctgcaggatgtaaaaatatgaaatgttttcattgatttatagatcagtggatcagctggagagctaaacagaagcaataccttttttttttttctaaaggaataaagacagcatcttcacataagtgttagctataccacaagaagctaaaagtcagagaaagagagagcattctgggaaattatcactgcagactttatgtgattttaagttttttgcttgttttatcttactgactactagtacagataagatcctcgactagatatacttttggcacaacataattcaggtg

SEQ ID NO: 88142 - DNA, 599 bp, Chicken  19866894390771_1
  misc_feature (1)..(131): n is any nucleotide
nnnnnnnnnnnnnnnnnnnnnnnnnnnnnnnnnnnnnnnnnnnnnnnnnnnnnnnnnnnnnnnnnnnnnnnnnnnnnnnnnnnnnnnnnnnnnnnnnnnnnnnnnnnnnnnnnnnnnnnnnnnnnnnnnnntcaccaggtttcggaattcagctgacaagtaagtgatgggcagggcacagcctgggtgacctgcagggcttccccaggccctcagtgcttcaagggtaccttgaatctcatgtgggaatggaggtgctgctccactggtcttttggccttcctgctgtttgtcactttstagtggaagaaaactccttacttaataaatttaatccttcacaaatggttctattgtatgcttgtcgaaaagaactcattaatactggagacttttttccattgccctcttggctgtaaaaggaagagtttaagaaatgtcagagtttcagctatgagttttatccccaaaataaaattgtcggctcaggggagaggaaatgatggggattccacagtgtgcacaggggacccttactttcctttcttagattaaaaaaaagtaaatggttgtgtcacttgtttttttttatctgcctc

SEQ ID NO: 88143 - DNA, 575 bp, Chicken  19866894390771_2
agaactcattaatactggagacttttttccattgccctcttggctgtaaaaggaagagtttaagaaatgtcagagtttcagctatgagttttatccccaaaataaaattgtcggctcaggggagaggaaatgatggggattccacagtgtgcacaggggacccttactttcctttcttagattaaaaaaaagtaaatggttgtgtcacttgtttttttttatctgcctcttctctgcccgtgtgtgtctgcaaggtaactctggtaagctctctcttgtgaacaactctactgaaattartgagattagttcccagaaaaagaaattacaaaccagcttacgtcttttagatggtatctattgtgtagttatataaaacacacaagtacaaaagctcaagcaatattgacttttytagagcaaggacaaaaagaaagactcrtcttcatttcctaagaaaaataaagtaatgataggaaatatcaaatgaatggcaactgtgaactatatgctgcttgcaaataattaaaaaaaaaaaacatgagagggaagaatgggatcctctttgccttcat

SEQ ID NO: 88144 - DNA, 460 bp, Chicken  19866894390771_3
tcaggggagaggaaatgatggggattccacagtgtgcacaggggacccttactttcctttcttagattaaaaaaaagtaaatggttgtgtcacttgtttttttttatctgcctcttctctgcccgtgtgtgtctgcaaggtaactctggtaagctctctcttgtgaacaactctactgaaattartgagattagttcccagaaaaagaaattacaaaccagcttacgtcttttagatggtatctattgtgtagttatataaaacacacaagtacaaaagctcaagcaatattgacttttytagagcaaggacaaaaagaaagactcrtcttcatttcctaagaaaaataaagtaatgataggaaatatcaaatgaatggcaactgtgaactatatgctgcttgcaaataattaaaaaaaaaaaacatgagagggaagaatgggatcctctttgccttcat

SEQ ID NO: 88145 - DNA, 433 bp, Chicken  19866894390771_4
cacagtgtgcacaggggacccttactttcctttcttagattaaaaaaaagtaaatggttgtgtcacttgtttttttttatctgcctcttctctgcccgtgtgtgtctgcaaggtaactctggtaagctctctcttgtgaacaactctactgaaattartgagattagttcccagaaaaagaaattacaaaccagcttacgtcttttagatggtatctattgtgtagttatataaaacacacaagtacaaaagctcaagcaatattgacttttytagagcaaggacaaaaagaaagactcrtcttcatttcctaagaaaaataaagtaatgataggaaatatcaaatgaatggcaactgtgaactatatgctgcttgcaaataattaaaaaaaaaaaacatgagagggaagaatgggatcctctttgccttcat

SEQ ID NO: 88146 - DNA, 600 bp, Chicken  19866894390776_1
gagggaataagggaaaatcaggcacctgaataactttacagtacttgtttctcctgttatgtacttagatgacccacttgataagggtttctcctgagtgcttgagtagcacttcatttttgaagcaagcagaatgagaagggaaagctgaggagtaattgcagtgcttgtgtttctctcagcaggagcattttctgtcacagtacgtgctctccagcaggacagggtctaatgttctgcagtatattgtgccatgtcttcatctagagcagcatgggagaatggtgccccactcggacrtgttcctgtgcatacactgctctgaaattctgtgctctttgggaaaagagtcactgttcccagttttggaattcatatcatttgtagagcttcatggctgggcaagtgagcttgcaatgtataacaaacataaggattatcagtgctgagcttcttatttttaatggtgagtttgttttttaaagggaggggaagaggtagttaaaatgaaaaattaatagttgaaaagaagaaaaaaaaaaggagtaataaagtaatacttgaaattgcagagaactgggatgaaagcgtagggaaaag

SEQ ID NO: 88147 - DNA, 600 bp, Chicken  19866894390777_1
tacatagagtgctttttttaaaaaaagtagatattgttaaaaaacagctactactaagctctccaagatcttgaagtactcaagcattttcccatgagatgctgcagatgcatgcacccaccacccagaaaaactttttttgttgttaaaatgtggtcttaacaaaactcattcatgcacgatctctcttctgccagcccacgtccttctctccttgctttgagtgaaggcaatggagatgcataggaatttggtttccagctttccttcctttttattcaaaactcactgctgacaagrgaacacagaaaaaccagcaaaataaaaaagcagccccagtgcacatatggagggggcaatatagtcaaaactgagatctcttgtttcaagaaatgttgctggtgacatggtttgcctttcagctttgttgtcagatgtggccatgagaatcgccccattatggaaacaacactgaattggaaatgctaagagaactgaaccagaggttcattacctgtgagtatcagaaggtaataaaaaaaggatgttgcttgaaactaatctatttactaatttcttaagctatagacgttttctgtg

SEQ ID NO: 88148 - DNA, 600 bp, Chicken  19866894390777_2
gatgcttgtgaaattcatgttactcatgatgatgggcgattacttgtatttattatgaaagacactgctccaaaaggtaagcttcacagggaccacatctcaatgtgtttgatgccaaggggaaggacagatagatgtacaacccttctgcaactttttgctttgaagcatagctacccaaataagtagcgatgtgatactgcaaccatatttaactatttccttattctgatgcagtagtgattacaatcatctagcgtggtatggagtgtaatgtttggatctagagtattgcttcarcctttgtgttcaatagagattctgttaaaatgggaacttttgacactgcacggcaattcttgcaaaattgcatagagtaaaagagcaaaattgtgataaagcctgaagtgtaactaaattcaagcaataaataggcatataactttaaaattgtctcccttgtgctttggtgtcaaaacaaatctagcacctgtagaaaatggcatcacgaggaaatggcagatacaaagcttctagcttgaaaaaatgcttctagcactaggttcacattacctggaatatgtattatctatggctaat

SEQ ID NO: 88149 - DNA, 600 bp, Chicken  19866894390779_1
atcaagccatgattactgtcatgaattggatgagttatacaagagatggagagttgttgggctttgttacaaataagatagctgacagtgaagtgaaaggcatgctacgtccaaaaagataatgcatgacatgctttgtgttttactgggagaagtggaagaacaatctacttgtttcaaatgactcatcttccctcagaatttgcctaagcactttcttttccatggttttccgcgagttgttccgttcagcaaatacactgtattttagtctatctatgaaacagaatgtgttatctkttgtgtagctctcacttctgaaaaatacagataaataaaaactgacacaaattaatgtgactctagttgttaatggaatctacagtggaacccaagcctccaggtgagtactatgtgtctgcatgaggagccaggaaccaccactggaaccagaaaaatctctgttttctggcaggaaagctgagttgtttcaagtgccacacctgttgaccacttcttcacaaatgcatgaggagcatccttcttagcatacattcctttctttgtttatgctgctattattattctaggtaaagcaat

SEQ ID NO: 88150 - DNA, 600 bp, Chicken  19866894390782_1
gtcagagtttcttctccatccttgacagtgtccattctgtatgctcatgtgagcacaggttgtcagctcactatgaccttgggagcgctattcagcaccattgtattagcatcttctgggtggatatggtgttgggatttgtcacctgatattcgtacatcacccccggtagttgctgcattttgaaatctttcagctaggtactgttttagctgcttaatgcaggcccttctagctcagtaacaggcaaatttccactcaagtatagtgagctgctaagttgatagacagccagcagaytgtagggcctttcaaccattagtgcttgtcctaagcctgttccaaagcagctgggaatattgtaccatggagatgtggacaacagccaataattattaacatgctgttaattttgtttcctttaattcatctgatttgtgagcaagacccttagccttcagaaattcagggatctgcaagggaattctgtgcattacaaaaaaaatctgtgttggctggaacgtatgtagaagcgtggtgtgcaactgctgcaaattacccttagttttatgaggaaatgccaacagccaaataccaaca

SEQ ID NO: 88151 - DNA, 600 bp, Chicken  19866894390791_1
ccctatttttcccaggttctgttctcagtttctaacccctccagcattacccccactcccatctcaagttcctgcttcatcctacttcatcctcccttcagaattcatctctgtcattgagcggatgacaattcaggagaaaggcaagaaggccattctgggctgtggtgacgaatgcttggtcaattttcacaggttggctaaaaacaggtaccaaacatcaaatttccattctaaagcctataagaattagactttccaagtaaatgagtgtaaaaaatggtttaaagatgggtaaartcacagttttcttctttaagtgcctgggaaatgggaaaccgctgaatggttttacctgagacttttaaaatagctttttacttgggtatgttttcactctatgtggtcaccaaaagctggaggagtaacaacaggaagcattttttattctacctggaataaatgcacctttctatattttgatgaacacagttttgtaattaatgaatattgaaacaatccatcagctaggtctgaatactatccaaactgagaaaattcagggcattcagaactagattagaatgctacaagaattct

SEQ ID NO: 88152 - DNA, 600 bp, Chicken  19866894390795_1
aatgacttatgttaaaaaaaaaaaaacttgtaaagaagctgtatttgacatatgcataatgctgaaatccttctacattaatctaaataaagcataaaaaaataaaggggagtcttgaatggagtagaaaactgaaatacacaagtgaatcactgtaaaatattgaataacaaagctagaaaatatcactggtcaataaaggaaacctgatattttgtgacagttcagaatcatagaaacttagaataattaatgttgtaaaagaactctgaaatcattaactccaaccgtcagctcatyctcaccatgctttgggaacagtctggttggtctggttagcagagctttaaattagttatgatgggtgtagaacaaatgaaggcaatgacagagcctttatttgagaaataggcactcgaggaaargatatcaaaaaggaattgactcacccctcccggtaacagtgtgtagagagagacgagctgaggaaccgtcgcgtcaccggagagaagggcaggggcaaagagggggacccgtgcagactcagactgcacaggaagaattgcagagacagaaggggtggctccagaccaccctccc

SEQ ID NO: 88153 - DNA, 600 bp, Chicken  19866894390795_2
agaaaactgaaatacacaagtgaatcactgtaaaatattgaataacaaagctagaaaatatcactggtcaataaaggaaacctgatattttgtgacagttcagaatcatagaaacttagaataattaatgttgtaaaagaactctgaaatcattaactccaaccgtcagctcatyctcaccatgctttgggaacagtctggttggtctggttagcagagctttaaattagttatgatgggtgtagaacaaatgaaggcaatgacagagcctttatttgagaaataggcactcgaggaaargatatcaaaaaggaattgactcacccctcccggtaacagtgtgtagagagagacgagctgaggaaccgtcgcgtcaccggagagaagggcaggggcaaagagggggacccgtgcagactcagactgcacaggaagaattgcagagacagaaggggtggctccagaccaccctccccccccrttccaggcacccacacactcacatagcccactcattggttcaggctgtgaccctggaattccactacaatgggggagggggtgtactaggagacagagaagtgcatgagaatggtgtca

SEQ ID NO: 88154 - DNA, 600 bp, Chicken  19866894390795_3
atgctttgggaacagtctggttggtctggttagcagagctttaaattagttatgatgggtgtagaacaaatgaaggcaatgacagagcctttatttgagaaataggcactcgaggaaargatatcaaaaaggaattgactcacccctcccggtaacagtgtgtagagagagacgagctgaggaaccgtcgcgtcaccggagagaagggcaggggcaaagagggggacccgtgcagactcagactgcacaggaagaattgcagagacagaaggggtggctccagaccaccctccccccccrttccaggcacccacacactcacatagcccactcattggttcaggctgtgaccctggaattccactacaatgggggagggggtgtactaggagacagagaagtgcatgagaatggtgtcaccttgggagacggtgagggaaaacccgagacttgtcctggaggtattaggaagcgctcctcctagaaggcaatgaggccaatagctgagctgcagtgcctctacaccactgaacgcagcatgggaaataagtaggaggagctagaaaccgtggtgcaattgggaaagtatgacctaattgc

SEQ ID NO: 88155 - DNA, 600 bp, Chicken  19866894390797_1
ttgtgagtgacagcttttataactttaggagaaaaatacacctttgtgtgaacagcttcattgttcagcagttccatgcgtagcagaatgaaagcagaagctcagcctgagactcattgtaagaagtgtgctggtagagctgctggaagaagtcctcattcacatctgttgttggccgtgtattttcttcttttccattctgctcctttctgttttgcccattgggaacccctgggatctgatctaagccaaaaagcctggcttcaaaaccatccaaaaagtaggggctgggggctgtgrgagcacaagcactgctgccagcaccaggcacagcrtaaggggaccgggatcttagctggaggaaagagctgctttttagcggcagctcacttctaaatttacttaatggggtcataaaacctcaggctaaagctcttcatgtagattaacgtgtcttaattgtaggatgtctcatgtttgcagttggtggagaagcactttaccgtggcagtgaattccagcgatggaagtactgcgtaatgggcagaagtctctggtggaagttctgtcctgtatgaaacggggcagaaattagatgca

SEQ ID NO: 88156 - DNA, 600 bp, Chicken  19866894390797_2
atacacctttgtgtgaacagcttcattgttcagcagttccatgcgtagcagaatgaaagcagaagctcagcctgagactcattgtaagaagtgtgctggtagagctgctggaagaagtcctcattcacatctgttgttggccgtgtattttcttcttttccattctgctcctttctgttttgcccattgggaacccctgggatctgatctaagccaaaaagcctggcttcaaaaccatccaaaaagtaggggctgggggctgtgrgagcacaagcactgctgccagcaccaggcacagcrtaaggggaccgggatcttagctggaggaaagagctgctttttagcggcagctcacttctaaatttacttaatggggtcataaaacctcaggctaaagctcttcatgtagattaacgtgtcttaattgtaggatgtctcatgtttgcagttggtggagaagcactttaccgtggcagtgaattccagcgatggaagtactgcgtaatgggcagaagtctctggtggaagttctgtcctgtatgaaacggggcagaaattagatgcagtgggaatggagctgtgctacccatcgctggtctt

SEQ ID NO: 88157 - DNA, 600 bp, Chicken  19866894390809_1
ctacttcgttgcctggaactctcacatatggggaacccaatatcaaacccaaagtggaaatgtgtctcttctacatctgatgcaacctgaagtccaaatagcagtcattcttcatacatttgcagtttaccaaatcagcaacttatttgtagactctgttcatgacttctgaagagcaaatcacagctggcatgtcaaatcaattacagaactggtcttcttttacagcccaacaggtgtggcatattattactttaagctacagacaacaattttcctagtgacttttctttccttcastaaagtctcatattgaaggcctacgtagttatctttcgtaattttctatttttgccttggttcttagtatgtttgctgcatattttcagggaacagcaatatggcacagattaacatatgggataaaaggggaaaaaggatcttgagatagggacagagctgaagacaacaacagatttggacaccaaggtcccagttttggccaagagtaagaaagctcacagagagagctcaaaacttcaacagatctactgcaatatctgtaagaactataaattcaggtaagaataaatacacata

SEQ ID NO: 88158 - DNA, 600 bp, Chicken  19866894390815_1
attttataccttgttaggtatcagggaatccacccaagagccgaggctgctctcccttgtggattctctaatgtctgataagggtggaattcacaccgcagcaacagtataattcacttaaaatgtcagtcagccatgaataactgactccattggaaactaggcttctggaatcactctggtgttcatggaaatcttggtcctcatacactgcacagctccaggaggcattatgggtatttctccatcccttccagtctccagatgaactctgtcagagctacctctgcccagtgctaygctgggtctgcctgctgcatttagaggttcagagaggaaacttctttcctcagagccgggctcatcaggtataacttgtctaaagaacagatttgcaacagtgctccccattcccttctaggttctaggaaaaaaaaaaaagaagaccagatttctcaatggcttcctggccagaaagaactgctggctgctgagcacttatggaaaaatgctctattgagaagtgtaaatgagaacgcaatctttctgaaaaactggatccaactggggactatcaacacttgaaaatttggcccacat

SEQ ID NO: 88159 - DNA, 600 bp, Chicken  19866894390817_1
cacagaccttatgaggagtggctgagggaactggggttgttcagcctgtagaagagcaggctcaggggagacctcatcactctctataactacctgaagggaggttgtagtgagctggaggtcggcctcttctcttgtgtaattattgatagaactagagggaacagcctccaagttgcaccaggggaggttcaggctggatgttaggaaatactgcttttctgaaagagtggtcaggtgctggaatgggctgcccagggaggtggtggagtcaccaaccctggaggtgttcaaggaackttccagatgtggtactgagggatgtggtttagtgagaactattggtgatgggtggatggtaggactggatgatcttgtgggtctttaccaaccttggtgattctacaattctatgctcaatttgccttttttttttttttttttaatggattgtacttgaactttagcttcctattgaatagggagcatgcccaaaaatgtactcccattacgccagacaaagcaaagagcagagataccctacctccatgaaagggaaaaaaaaataaagaggagaaatcttactaatctccatgagtt

SEQ ID NO: 88160 - DNA, 600 bp, Chicken  19866894390820_1
aagagacacctgggagtgcaggacaagtcacaacgataaagtcaccttccaaatttcagatcagcccttcatcagctcttccgacttctcactgcccacatgaacaacaaacgccactgacgtggaaatacactgcaggaaatactgaatttacaacacgctccccccttcccactccattctcttcaaaacatcacacgaacactcatgtaataaaatcagcaggtcttttctctgttccttgtcttagaggggaaaggttctctttgtccaatgccatgctctggttcagttgagagygtatgaagaagtctcatcctcacaaactacatgaattacactatctgacttgagaagaaaaaagttatctggactaaaatagacatataatttgagctgagtttctcgtaagtacatgctttagggaacataagtaagtcagctcttccccaaactacatgccttggaaaagggctgccttttttgtaagaaaacaaaacatatttgaaagtttcagtgctttctaatacagccctgaaatccacatagtatgagtatgactgagtatattcaacagtaattaatctgaaatgattgttt

SEQ ID NO: 88161 - DNA, 600 bp, Chicken  19866894390829_1
gtctgggcacaatttttccctgcaggaagtagggggatttaaagcagatatttaattaagcagctgaggagggacagagactgggtcaaactaaataagttcaactggtaactcctgaccactggtgtccaggatttcccagtgtccataaaagccattgggggcttccttcagatgaacatgggcttttctgggtgggccaaggaggtccctcttgtttaatgtaagttcctcctcccccctgatgctggagcatgttatctcatagtgttccaccacctgggctgagagcagaaatarggaataaacttttaacttygctcacatacctccaactacaaagttgctgtaggtacwtgcagtgactatagtgtacttttaatatcaaattcatttcacaatgtcattagcagagaaagaaactaaaaggaaagtctccattattaaattattctgcttttcttaggatggccacttcttagtggtacttaaagaaatcttgttatctatacattaatcagctgcatttttagaatgagctgcagaagatttatagtgaaaaagtgaccattacagtgaaaatgcttagtgtttggtcat

SEQ ID NO: 88162 - DNA, 600 bp, Chicken  19866894390829_2
ctgcaggaagtagggggatttaaagcagatatttaattaagcagctgaggagggacagagactgggtcaaactaaataagttcaactggtaactcctgaccactggtgtccaggatttcccagtgtccataaaagccattgggggcttccttcagatgaacatgggcttttctgggtgggccaaggaggtccctcttgtttaatgtaagttcctcctcccccctgatgctggagcatgttatctcatagtgttccaccacctgggctgagagcagaaatarggaataaacttttaacttygctcacatacctccaactacaaagttgctgtaggtacwtgcagtgactatagtgtacttttaatatcaaattcatttcacaatgtcattagcagagaaagaaactaaaaggaaagtctccattattaaattattctgcttttcttaggatggccacttcttagtggtacttaaagaaatcttgttatctatacattaatcagctgcatttttagaatgagctgcagaagatttatagtgaaaaagtgaccattacagtgaaaatgcttagtgtttggtcattctagattaatttgtaaat

SEQ ID NO: 88163 - DNA, 600 bp, Chicken  19866894390829_3
aagcagctgaggagggacagagactgggtcaaactaaataagttcaactggtaactcctgaccactggtgtccaggatttcccagtgtccataaaagccattgggggcttccttcagatgaacatgggcttttctgggtgggccaaggaggtccctcttgtttaatgtaagttcctcctcccccctgatgctggagcatgttatctcatagtgttccaccacctgggctgagagcagaaatarggaataaacttttaacttygctcacatacctccaactacaaagttgctgtaggtacwtgcagtgactatagtgtacttttaatatcaaattcatttcacaatgtcattagcagagaaagaaactaaaaggaaagtctccattattaaattattctgcttttcttaggatggccacttcttagtggtacttaaagaaatcttgttatctatacattaatcagctgcatttttagaatgagctgcagaagatttatagtgaaaaagtgaccattacagtgaaaatgcttagtgtttggtcattctagattaatttgtaaatatttgtgggtatttctgatatgataacttggtgaaatg

SEQ ID NO: 88164 - DNA, 600 bp, Chicken  19866894390830_1
cctctgaagtagcttgttatcagaaagtcatctggatatcattgctaatttcatatccttctgtcctgaagggtaaatcagctgaggattctctcctcaactcactcctcttccttctgttgaacatgaccgctctatttggctacgctgatcttgagatataggaaaactgttgtttacacctcatctcataagctgttaagcaacagcccccctcaaagagatacagaacttggcagtgggaggaagattcaccgatagccgttactggagcacaccatgcaaaaagccaggtaagcrtcttaggacaggtttactgcacttttggaaatgtggataaccacatgtgttaattatttcttttaatgagtgaaatatttttctttcattaggaggtaattctctgaaatgagaataaatcatcacagcacaaagagaacctgctatgataagagagagggtaaaaakcatgagcagaaaacctgaacgcttcagaatgctggaaaccatgatttatattacaattcatcttcagaatctttattgaagtatcaacatctgcatcacaatgaatgtatttaaaagatggaaagaacgtgg

SEQ ID NO: 88165 - DNA, 600 bp, Chicken  19866894390830_2
actgttgtttacacctcatctcataagctgttaagcaacagcccccctcaaagagatacagaacttggcagtgggaggaagattcaccgatagccgttactggagcacaccatgcaaaaagccaggtaagcrtcttaggacaggtttactgcacttttggaaatgtggataaccacatgtgttaattatttcttttaatgagtgaaatatttttctttcattaggaggtaattctctgaaatgagaataaatcatcacagcacaaagagaacctgctatgataagagagagggtaaaaakcatgagcagaaaacctgaacgcttcagaatgctggaaaccatgatttatattacaattcatcttcagaatctttattgaagtatcaacatctgcatcacaatgaatgtatttaaaagatggaaagaacgtggtctatctaatatgcacaagcttaattatactgcagatgtgacataatacatttttatattttaatcagtaaaatactggcattgcgacctcaaatttacttcaaagtgacagtataaagttctccttttatgttctgatcttaaaggcttccttgggtatctgaccas

SEQ ID NO: 88166 - DNA, 502 bp, Chicken  19866894390830_3
catgagcagaaaacctgaacgcttcagaatgctggaaaccatgatttatattacaattcatcttcagaatctttattgaagtatcaacatctgcatcacaatgaatgtatttaaaagatggaaagaacgtggtctatctaatatgcacaagcttaattatactgcagatgtgacataatacatttttatattttaatcagtaaaatactggcattgcgacctcaaatttacttcaaagtgacagtataaagttctccttttatgttctgatcttaaaggcttccttgggtatctgaccasttttgcattaaaaaagaaaaaaggttgagagaagctaaaccagagctgaccttccgatcagttcagaactcagatacctttcccaggtcacagcgagcaccttgctgaagctgcagctgtccccacaaaacatttcctaacttggtggtggatagcgatcctcttcctacaagttccttgtcatcaagcagtacaggagcta

SEQ ID NO: 88167 - DNA, 600 bp, Chicken  19866894390839_1
aaatggaaaaagctaattcttattagagcctccagtgcttcatttagaggggggaaaaacagttaaaagtgttattaaatactgtaaggatgtgttgatgaaggaaaaaatattcctcaaagtttaggttaactatttcaattgtgctttaattttaatattcaacatactctaaataatgtgagtgaactatgtcttgggcataatgtcactcacaaatctacataaaattcatgttcctgttgctaatgaggtgccatggttttattatctttgtagtactgtagttgagttgttttkttttttttttaagggaaacctcataagcctgttgtaacaacttctcagcacwtaattaggcttggctgctctgatgagattgcagctataattatatctgcatatccttttacatatgaaatatttacttattagccattgccagctacgttggccttctgagaacacagagtcagctagtgattctagcagctatttcaaatatctaattacctaatgtatatttaattcacacataaatgtggacattggtaagcatccttagcctttttgagaaaatacttctgaaataattgagtg

SEQ ID NO: 88168 - DNA, 600 bp, Chicken  19866894390839_2
ggaaaaacagttaaaagtgttattaaatactgtaaggatgtgttgatgaaggaaaaaatattcctcaaagtttaggttaactatttcaattgtgctttaattttaatattcaacatactctaaataatgtgagtgaactatgtcttgggcataatgtcactcacaaatctacataaaattcatgttcctgttgctaatgaggtgccatggttttattatctttgtagtactgtagttgagttgttttkttttttttttaagggaaacctcataagcctgttgtaacaacttctcagcacwtaattaggcttggctgctctgatgagattgcagctataattatatctgcatatccttttacatatgaaatatttacttattagccattgccagctacgttggccttctgagaacacagagtcagctagtgattctagcagctatttcaaatatctaattacctaatgtatatttaattcacacataaatgtggacattggtaagcatccttagcctttttgagaaaatacttctgaaataattgagtggtctcttcaattttagacgtctgtcattgctattgtacaagtgtatcattga

SEQ ID NO: 88169 - DNA, 600 bp, Chicken  19866894390842_1
agtttgggttgcacttggcagctgcgggagggctgggcttcactcttgaggtgggctagggagcacaccctgtgccaacaacaaaccaccagcccatctctgcagtgctgaggactcacactatagccatcctcacccaaaaaggaaaggagaaatgtatttttttcctcttatctcttggatgcagtatttccagggaaaaatcaatgcgtgtatctctccaagatgcagtaatcatctcaaatagtctcatatagtttctgtgtctaggagaagcattaaggaatgctaagctaagckaaaatataagmtaatgataaaacccttttgcttggctgcagggttttgagccacgagataccgacattggcagaaagctcatcgtatggaggaatgtagagagccatacgggctacaagaagaccttttccctttctccatacgctgagaagaaaaggtatttgcacttggtgtgggggctttgaggaaaacgttgggtataaaggtaccgatgcactgttccaagatacctatgcaaattacagtgtatgttctgtgctaaaaagcagccgaaccctggagggtttaaagtctgttgcc

SEQ ID NO: 88170 - DNA, 600 bp, Chicken  19866894390842_2
cacttggcagctgcgggagggctgggcttcactcttgaggtgggctagggagcacaccctgtgccaacaacaaaccaccagcccatctctgcagtgctgaggactcacactatagccatcctcacccaaaaaggaaaggagaaatgtatttttttcctcttatctcttggatgcagtatttccagggaaaaatcaatgcgtgtatctctccaagatgcagtaatcatctcaaatagtctcatatagtttctgtgtctaggagaagcattaaggaatgctaagctaagckaaaatataagmtaatgataaaacccttttgcttggctgcagggttttgagccacgagataccgacattggcagaaagctcatcgtatggaggaatgtagagagccatacgggctacaagaagaccttttccctttctccatacgctgagaagaaaaggtatttgcacttggtgtgggggctttgaggaaaacgttgggtataaaggtaccgatgcactgttccaagatacctatgcaaattacagtgtatgttctgtgctaaaaagcagccgaaccctggagggtttaaagtctgttgccttgcgatgggc

SEQ ID NO: 88171 - DNA, 600 bp, Chicken  19866894390846_1
agaatgtaaatctgtggtacataattttggtagatgcctctctttctgagatttggatatagtgaaaaagtcttgaatttggttacttctctctggctttatctgtgccatttcctaaatcaaagggagatcgtttgtttaaaaatagaattagactgacatgaaaccaggttgtggaccttaaaagtttccttgaagagtatttttttttttaataataattaaccaactgtgtgcttatagaacctcccatggagttcaattatatccaagtaagttggggataaggggtacaataamacaacacattttcactgatttcagttgacgtaatgtagcaataacttggaggaaccagccttccacttttagagcatgttaccatttcaaagatctctcatacactcttatttgtttaccccaatttaaattttcggggatgaagggaagatgaatrtatctattatttaagatrytataggtaggaacagagaagcaaaaaaggacttcactggaatgaagtgtacttacagttccagagrttttttacattttaccagtattttttggctaattgattcaaaatgaatgagaaaatcc

SEQ ID NO: 88172 - DNA, 600 bp, Chicken  19866894390846_2
gacatgaaaccaggttgtggaccttaaaagtttccttgaagagtatttttttttttaataataattaaccaactgtgtgcttatagaacctcccatggagttcaattatatccaagtaagttggggataaggggtacaataamacaacacattttcactgatttcagttgacgtaatgtagcaataacttggaggaaccagccttccacttttagagcatgttaccatttcaaagatctctcatacactcttatttgtttaccccaatttaaattttcggggatgaagggaagatgaatrtatctattatttaagatrytataggtaggaacagagaagcaaaaaaggacttcactggaatgaagtgtacttacagttccagagrttttttacattttaccagtattttttggctaattgattcaaaatgaatgagaaaatcctcacaagatggtgttgatagtgtgtgttttaggcagagcagatgaatgctttaaatttttacttaacaagtgaggaatcctgaactctgaaggtgccagaaattatgctgcattagacttgacaaggtggccaactcacataacacttgattgctct

SEQ ID NO: 88173 - DNA, 600 bp, Chicken  19866894390846_3
ggaccttaaaagtttccttgaagagtatttttttttttaataataattaaccaactgtgtgcttatagaacctcccatggagttcaattatatccaagtaagttggggataaggggtacaataamacaacacattttcactgatttcagttgacgtaatgtagcaataacttggaggaaccagccttccacttttagagcatgttaccatttcaaagatctctcatacactcttatttgtttaccccaatttaaattttcggggatgaagggaagatgaatrtatctattatttaagatrytataggtaggaacagagaagcaaaaaaggacttcactggaatgaagtgtacttacagttccagagrttttttacattttaccagtattttttggctaattgattcaaaatgaatgagaaaatcctcacaagatggtgttgatagtgtgtgttttaggcagagcagatgaatgctttaaatttttacttaacaagtgaggaatcctgaactctgaaggtgccagaaattatgctgcattagacttgacaaggtggccaactcacataacacttgattgctcttgaattcacttattgata

SEQ ID NO: 88174 - DNA, 600 bp, Chicken  19866894390846_4
gaccttaaaagtttccttgaagagtatttttttttttaataataattaaccaactgtgtgcttatagaacctcccatggagttcaattatatccaagtaagttggggataaggggtacaataamacaacacattttcactgatttcagttgacgtaatgtagcaataacttggaggaaccagccttccacttttagagcatgttaccatttcaaagatctctcatacactcttatttgtttaccccaatttaaattttcggggatgaagggaagatgaatrtatctattatttaagatrytataggtaggaacagagaagcaaaaaaggacttcactggaatgaagtgtacttacagttccagagrttttttacattttaccagtattttttggctaattgattcaaaatgaatgagaaaatcctcacaagatggtgttgatagtgtgtgttttaggcagagcagatgaatgctttaaatttttacttaacaagtgaggaatcctgaactctgaaggtgccagaaattatgctgcattagacttgacaaggtggccaactcacataacacttgattgctcttgaattcacttattgatag

SEQ ID NO: 88175 - DNA, 600 bp, Chicken  19866894390846_5
gaacctcccatggagttcaattatatccaagtaagttggggataaggggtacaataamacaacacattttcactgatttcagttgacgtaatgtagcaataacttggaggaaccagccttccacttttagagcatgttaccatttcaaagatctctcatacactcttatttgtttaccccaatttaaattttcggggatgaagggaagatgaatrtatctattatttaagatrytataggtaggaacagagaagcaaaaaaggacttcactggaatgaagtgtacttacagttccagagrttttttacattttaccagtattttttggctaattgattcaaaatgaatgagaaaatcctcacaagatggtgttgatagtgtgtgttttaggcagagcagatgaatgctttaaatttttacttaacaagtgaggaatcctgaactctgaaggtgccagaaattatgctgcattagacttgacaaggtggccaactcacataacacttgattgctcttgaattcacttattgatagaacactaagatatggcattacatcacgttctgttctttatggccaaagagaggtttaaaaaataag

SEQ ID NO: 88176 - DNA, 600 bp, Chicken  19866894390847_1
gaagcaaaccctgctgtactgctgcatgtagtgctcccatcctgccctccaactgagccacatcttctggtgattacctcaattcccttatctgaacaactcgacttcactgtgttttgctaagaagacgtcccaggatacacagttggaagcctctctgattctccctctgcacaaatgatggctttggagattcaggttggtcgttaggaaagccgtggggagggcgcagaagtatgggaccgggtgacccacagacagtggaatcacagaatcattaaagacctctcagatccccamgaccaacccaaggccaccccaccatgcccactgatggtgcccctcagtgtcacatccccgtggttctagaacacccccagggatggcatttctcacatccccctctccctccatagtcttaaacttctcaatctctgatataatcccagaatcacagactggtttgggttgggaagggtccccaaagccccctagccccaacccctccatggcagggacacctcccatagtccactacccacagcccaatctgtggccttggatgggcgcttggccttgtggaatctcattaggttctca

SEQ ID NO: 88177 - DNA, 600 bp, Chicken  19866894390848_1
cagctctttgtatgataaggatatctgactcaaattgatgtaattaactattgtttggaaagaaatagcacaataatatcggaaccaataatcctaccctgttcaattaccatgccctgtggtgatgatgttgcagtgaaagcttgtcttgtattataaaggggaaagtaaatgtgaaaatagcacataaatgcttataatgaaatattttggtatcagaagcaattttttaaactatgtagaaaggcacatttgtatatgtgtatatatatagttatatatatatatctaactatatarttattgtgagattaatctgggaaatcctctgattttgttcatgataaatatcccaaggttcagcttgtggagaggctgaacacatgttcccaatggccagatgcccatattgtgcagtatgcacatgtggccatccaacacgccagcacagacagaaagcagtgtctttacccgcagcagtggaagcacactgaacattaacagcatgaatagtctggtcctgttcccccttctacagctggtaagaggtttgctagtgctcacatccaaagctacacacaacatggttcttgaatggct

SEQ ID NO: 88178 - DNA, 599 bp, Chicken  19866894390859_1
  misc_feature (1)..(86): n is any nucleotide
nnnnnnnnnnnnnnnnnnnnnnnnnnnnnnnnnnnnnnnnnnnnnnnnnnnnnnnnnnnnnnnnnnnnnnnnnnnnnnnnnnnnnnttgtgctgaaagaagtgatagaggagcgtcatgcatattaatgggcctgcagaagcattcaataaccacttactatcatccttctgacaggaggcaaatgcattataaacatccaaccactgctggagagagatgaaactgtccaggctatagattcaccctctcaacatataaagcaccagaaacgacagctttattgtaacagaagggaggraaatattagtttgtctaaactgtagcaactgggctgagaaaagatcaagaaaacaatgcctttattgctgagccatacgtaactcttcagggcaatggcttcagtgggagataaagggttgctgcctatcagtcttgatgcatgaaaactggaaaccaatttcctcagacacagtccaaaactaagcctctgttgtgtcaggaggatcttcaacaattagtgttgcttatgtttaggaggagaatgttttggacttttgtgcagccttgaacctcaatgattatggtaatttctctcac

SEQ ID NO: 88179 - DNA, 600 bp, Chicken  19866894390864_1
gcaatctttatttttcccttgggcttaataagaagcaaattaacatggtattgtttctaatgccaaaaacagaatccatgcagaaggactcctgctgcatgggttttaaggaagtttgatccatggcttttacagtttcttatgtctcaggagctgcgtggtatcttggagcactttcctgggcatttctggaacccctgtgtttcccctgaaccactgcaagcactgcaaactctcctttacttcagagtctgtacttggacttttggagagaattacagaacccactttccatatatscacatctacataatcacggtcacagagttagtcagtaaatgaaagaaggtgactccccaaaccaaagctttccaatgaaaatgtcatgaactctaaattaaattggatttacttccaaaacacttgttcagcataggtcaggggctctcagtcccgtcacttcatagtaccactttccgaagcaaggagtcctgtgaaacagaaatgaattcaccgctgccaccagtaacagatgcaggaatcatgaataacagattgctaacttactacaggcaatggtgattctaatggattgagatc

SEQ ID NO: 88180 - DNA, 600 bp, Chicken  19866894390877_1
gggaaggttttttttgtttgtttctgtgttgggactgttgttcatatacagcaaaatgctgttcctgggataaatcttttttttttgtacgaaatatcaagttaggactattctggtcttaaatcacatgaataatagcttcattattagaattctgtggaacatttgtcaacattaagtcactgcacagaaggttgttttgttttgatcacgtattcttttattttgtcttccttccttaaatgaaaataaggaaatccattcatcatgaaatatgaatttttggagctcctgatactrtgaattcagattgttgtctgaaaattaagatatatttgttctgctttcattaatcttcaccatccggagtttgtatatcagtatatccctctcagacatgagaggaatttatgggggatctactgagaaaagatggtaatttgatttgcagcaacaaggctagtttatcagaataggaaagggaaattgtagctttattttaatcagatatggtaatatagtaatacctgcagatgcacaaatactatctacaaatatagtacaagaatacttacggatgtctctctgctcttcacctgt

SEQ ID NO: 88181 - DNA, 600 bp, Chicken  19866894390877_2
ccctctcagacatgagaggaatttatgggggatctactgagaaaagatggtaatttgatttgcagcaacaaggctagtttatcagaataggaaagggaaattgtagctttattttaatcagatatggtaatatagtaatacctgcagatgcacaaatactatctacaaatatagtacaagaatacttacggatgtctctctgctcttcacctgttgacaggcatgtttattggtatttttatggcactgtatagatttgctagaaaatcttacccttcctatttacttcagtaaacttckttacccacctttggatatatactgagccaaaattctgcccaaatcccagtgctttgcacttctcatctgctggctttagcactatagagacccaaatcaggtgtagattcartgatgcaggtgaagtttggatagcatagatagaagccccagttcttaaatgcaggaaatactaccaacacatatattttctttctgttattagatattttaagtatcttcatatgctagaatttcaaataagcacattcgcccaggctgattctgcactgaaaagaactaattacgtagagtctgttt

SEQ ID NO: 88182 - DNA, 600 bp, Chicken  19866894390877_3
tttaatcagatatggtaatatagtaatacctgcagatgcacaaatactatctacaaatatagtacaagaatacttacggatgtctctctgctcttcacctgttgacaggcatgtttattggtatttttatggcactgtatagatttgctagaaaatcttacccttcctatttacttcagtaaacttckttacccacctttggatatatactgagccaaaattctgcccaaatcccagtgctttgcacttctcatctgctggctttagcactatagagacccaaatcaggtgtagattcartgatgcaggtgaagtttggatagcatagatagaagccccagttcttaaatgcaggaaatactaccaacacatatattttctttctgttattagatattttaagtatcttcatatgctagaatttcaaataagcacattcgcccaggctgattctgcactgaaaagaactaattacgtagagtctgttttcatgactaggtgattctagtgctaatttgtatggctgctttttwaattatttattaaatttgtaagttcatttcaagcaaacttagacctcattctgtatgttaaaatttt

SEQ ID NO: 88183 - DNA, 600 bp, Chicken  19866894390877_4
ccagtgctttgcacttctcatctgctggctttagcactatagagacccaaatcaggtgtagattcartgatgcaggtgaagtttggatagcatagatagaagccccagttcttaaatgcaggaaatactaccaacacatatattttctttctgttattagatattttaagtatcttcatatgctagaatttcaaataagcacattcgcccaggctgattctgcactgaaaagaactaattacgtagagtctgttttcatgactaggtgattctagtgctaatttgtatggctgctttttwaattatttattaaatttgtaagttcatttcaagcaaacttagacctcattctgtatgttaaaattttagattgcatactgaaaatgaaattatttcattcttaactgagcaatagcaaattattaaattggtaggaataatgtagtaatctaaataagtgataattgatataaattgtaaaaaaaatatataaaattgaatctttattaatacgctgcatttggcaagtatttctaccataaactgctgtaagtatcacaatcctaagtttcttcatattcctagcatagtaaattatca

SEQ ID NO: 88184 - DNA, 600 bp, Chicken  19866894390883_1
acttcataagatttttagacacacacaaaaacagatcttgtcatctacttcctaattgcacggctcttagacattagtatattggtggaaatgaatacctctcatagctgaacaaaattgtagtaatgcagacctgctctcaaaaggataactggtgattagcattaatattacttgaaaccagtgctttaatgaattgctcagtaagcaccatgttgtgattcaatgagaagttcaggaatctacacagcttctaatttttgcttccatttaatctgtggattatgctcaactattttmtacaagtgataactgcatcttcatttttactttctaataccaaatggtaaaattatctagcttaggaaattccagatkcttatcgccatatcaccagaataatgatgagatgggtttggtttggttggctgaagattgaagattgaagatcttcaaaagattgaagaaggatgcgtatttgatcacagtattcaaatacataattgtttccagttggagcacactgtaattttggcgtgaggaagtggagaggcagtagctccagtaaaagaggagatgctttcaggtgtaatgtgagca

SEQ ID NO: 88185 - DNA, 600 bp, Chicken  19866894390883_2
atattggtggaaatgaatacctctcatagctgaacaaaattgtagtaatgcagacctgctctcaaaaggataactggtgattagcattaatattacttgaaaccagtgctttaatgaattgctcagtaagcaccatgttgtgattcaatgagaagttcaggaatctacacagcttctaatttttgcttccatttaatctgtggattatgctcaactattttmtacaagtgataactgcatcttcatttttactttctaataccaaatggtaaaattatctagcttaggaaattccagatkcttatcgccatatcaccagaataatgatgagatgggtttggtttggttggctgaagattgaagattgaagatcttcaaaagattgaagaaggatgcgtatttgatcacagtattcaaatacataattgtttccagttggagcacactgtaattttggcgtgaggaagtggagaggcagtagctccagtaaaagaggagatgctttcaggtgtaatgtgagcaccatcccaggcacttctcgagcttctctaattcactttgttagtcataaaatatgctcacatctgcactttattttgg

SEQ ID NO: 88186 - DNA, 600 bp, Chicken  19866894390883_3
catttggaagcaaatctcttcatcatctctgtttacttctgaacacaatgagtgagctttagcagtcaatgcatatttcatccacgggatcagacagagctggtccaaagtaaactcctggaattggacattatgatggatgagagattcctaatactgacagggtttttctgcagttctgttcctttcatgccacagggttcagaaatgtgaattgcattgctgtggtctcttccaggatatttttgtgtttacgtagctaggcttagattcatatgttctagcacttccacaggactygattagtagaattctgatgtgcttgtttattgcataatatcccctctttataaataatgcattttcctaatctctgaaaggaggaaasgaagcttgtttgggtttcagtttatgtctgtgtcagcaagaggtagagggcaggcttgccagagttcaagaagcctttggacaacactcagaaatagtttgaatcttgagtggtcctgtgtggagccaggagttgaacacagtgatcctcgtgggttccttccaactcgggatattctgtgagataaaccacgagtaagcatgggtgacaca

SEQ ID NO: 88187 - DNA, 600 bp, Chicken  19866894390883_4
atcagacagagctggtccaaagtaaactcctggaattggacattatgatggatgagagattcctaatactgacagggtttttctgcagttctgttcctttcatgccacagggttcagaaatgtgaattgcattgctgtggtctcttccaggatatttttgtgtttacgtagctaggcttagattcatatgttctagcacttccacaggactygattagtagaattctgatgtgcttgtttattgcataatatcccctctttataaataatgcattttcctaatctctgaaaggaggaaasgaagcttgtttgggtttcagtttatgtctgtgtcagcaagaggtagagggcaggcttgccagagttcaagaagcctttggacaacactcagaaatagtttgaatcttgagtggtcctgtgtggagccaggagttgaacacagtgatcctcgtgggttccttccaactcgggatattctgtgagataaaccacgagtaagcatgggtgacacatcttctgctttgagatgtttattatgtagtggatgtcggctttgcttacttggtgctgttcggctttgcggagggaaaaagcatttca

SEQ ID NO: 88188 - DNA, 600 bp, Chicken  19866894390884_1
tttatgaattagggatggatctaacacactttctttttctagaccgtgttccagcacactctgctctgtgccaaccctaaccctagagctaacatctgacgtccacatggtggtatcacaggggaaagtccccggagttgggacagccatgaagcaacacaggctcagaaagaaagtgcatatggtgacatcttccactgaccaccattctttcagtaccagctaaggggtgtgtggggtgtgcaggctgacagcagttcgagatgctgtggggcaatttgaaggcaggcggcttctaaygcataccacttctccacayatggaaagtagggccaagagccactcagaaggaatagctgcttttcaaagtattgctaacagtcctctagatctgctttgggaattttcccttctgygagcttcttgagcaattagrcaaaaaaattagcatgagaatgttgaaaaccacatctgttggagcgctgttctttggaggaggacacgtkgaatttcacagatacctgatggagctgtacaacagctttggccataacagtgtgcccagtgccccggtgcaatacccccgtgccccctcagcag

SEQ ID NO: 88189 - DNA, 600 bp, Chicken  19866894390884_2
tctaacacactttctttttctagaccgtgttccagcacactctgctctgtgccaaccctaaccctagagctaacatctgacgtccacatggtggtatcacaggggaaagtccccggagttgggacagccatgaagcaacacaggctcagaaagaaagtgcatatggtgacatcttccactgaccaccattctttcagtaccagctaaggggtgtgtggggtgtgcaggctgacagcagttcgagatgctgtggggcaatttgaaggcaggcggcttctaaygcataccacttctccacayatggaaagtagggccaagagccactcagaaggaatagctgcttttcaaagtattgctaacagtcctctagatctgctttgggaattttcccttctgygagcttcttgagcaattagrcaaaaaaattagcatgagaatgttgaaaaccacatctgttggagcgctgttctttggaggaggacacgtkgaatttcacagatacctgatggagctgtacaacagctttggccataacagtgtgcccagtgccccggtgcaatacccccgtgccccctcagcagggtaggcagggtgcyggga

SEQ ID NO: 88190 - DNA, 600 bp, Chicken  19866894390884_3
cacaggggaaagtccccggagttgggacagccatgaagcaacacaggctcagaaagaaagtgcatatggtgacatcttccactgaccaccattctttcagtaccagctaaggggtgtgtggggtgtgcaggctgacagcagttcgagatgctgtggggcaatttgaaggcaggcggcttctaaygcataccacttctccacayatggaaagtagggccaagagccactcagaaggaatagctgcttttcaaagtattgctaacagtcctctagatctgctttgggaattttcccttctgygagcttcttgagcaattagrcaaaaaaattagcatgagaatgttgaaaaccacatctgttggagcgctgttctttggaggaggacacgtkgaatttcacagatacctgatggagctgtacaacagctttggccataacagtgtgcccagtgccccggtgcaatacccccgtgccccctcagcagggtaggcagggtgcygggaccatgcaaacccaaagagctcctggcttcccgtcagcccaccagctgaaagctccttccagaatcactgaggctatttcattctccctcccctcrga

SEQ ID NO: 88191 - DNA, 600 bp, Chicken  19866894390884_4
gttgggacagccatgaagcaacacaggctcagaaagaaagtgcatatggtgacatcttccactgaccaccattctttcagtaccagctaaggggtgtgtggggtgtgcaggctgacagcagttcgagatgctgtggggcaatttgaaggcaggcggcttctaaygcataccacttctccacayatggaaagtagggccaagagccactcagaaggaatagctgcttttcaaagtattgctaacagtcctctagatctgctttgggaattttcccttctgygagcttcttgagcaattagrcaaaaaaattagcatgagaatgttgaaaaccacatctgttggagcgctgttctttggaggaggacacgtkgaatttcacagatacctgatggagctgtacaacagctttggccataacagtgtgcccagtgccccggtgcaatacccccgtgccccctcagcagggtaggcagggtgcygggaccatgcaaacccaaagagctcctggcttcccgtcagcccaccagctgaaagctccttccagaatcactgaggctatttcattctccctcccctcrgaaaacccacagcttctgttca

SEQ ID NO: 88192 - DNA, 600 bp, Chicken  19866894390884_5
attctttcagtaccagctaaggggtgtgtggggtgtgcaggctgacagcagttcgagatgctgtggggcaatttgaaggcaggcggcttctaaygcataccacttctccacayatggaaagtagggccaagagccactcagaaggaatagctgcttttcaaagtattgctaacagtcctctagatctgctttgggaattttcccttctgygagcttcttgagcaattagrcaaaaaaattagcatgagaatgttgaaaaccacatctgttggagcgctgttctttggaggaggacacgtkgaatttcacagatacctgatggagctgtacaacagctttggccataacagtgtgcccagtgccccggtgcaatacccccgtgccccctcagcagggtaggcagggtgcygggaccatgcaaacccaaagagctcctggcttcccgtcagcccaccagctgaaagctccttccagaatcactgaggctatttcattctccctcccctcrgaaaacccacagcttctgttcaataaagctgtgggtattttaaaatgtgcttttcagtctttgggmgatttagagcaaaatcttgcaattct

SEQ ID NO: 88193 - DNA, 600 bp, Chicken  19866894390884_6
acayatggaaagtagggccaagagccactcagaaggaatagctgcttttcaaagtattgctaacagtcctctagatctgctttgggaattttcccttctgygagcttcttgagcaattagrcaaaaaaattagcatgagaatgttgaaaaccacatctgttggagcgctgttctttggaggaggacacgtkgaatttcacagatacctgatggagctgtacaacagctttggccataacagtgtgcccagtgccccggtgcaatacccccgtgccccctcagcagggtaggcagggtgcygggaccatgcaaacccaaagagctcctggcttcccgtcagcccaccagctgaaagctccttccagaatcactgaggctatttcattctccctcccctcrgaaaacccacagcttctgttcaataaagctgtgggtattttaaaatgtgcttttcagtctttgggmgatttagagcaaaatcttgcaattcttcaaaaaccygaattgccattctggccacagctctggccagcagatcatgcacagtctctgtgcacgtggacaaagtgggctggatatatacatgcccagagcaaaata

SEQ ID NO: 88194 - DNA, 599 bp, Chicken  19866894390884_7
gygagcttcttgagcaattagrcaaaaaaattagcatgagaatgttgaaaaccacatctgttggagcgctgttctttggaggaggacacgtkgaatttcacagatacctgatggagctgtacaacagctttggccataacagtgtgcccagtgccccggtgcaatacccccgtgccccctcagcagggtaggcagggtgcygggaccatgcaaacccaaagagctcctggcttcccgtcagcccaccagctgaaagctccttccagaatcactgaggctatttcattctccctcccctcrgaaaacccacagcttctgttcaataaagctgtgggtattttaaaatgtgcttttcagtctttgggmgatttagagcaaaatcttgcaattcttcaaaaaccygaattgccattctggccacagctctggccagcagatcatgcacagtctctgtgcacgtggacaaagtgggctggatatatacatgcccagagcaaaataaaataaaatacaaatcatcctttaacacttcttcttgagctgttccaacacagtgaaacttcccctgaatcttctcgccaggggaaggttcaggctgg

SEQ ID NO: 88195 - DNA, 533 bp, Chicken  19866894390884_8
cgctgttctttggaggaggacacgtkgaatttcacagatacctgatggagctgtacaacagctttggccataacagtgtgcccagtgccccggtgcaatacccccgtgccccctcagcagggtaggcagggtgcygggaccatgcaaacccaaagagctcctggcttcccgtcagcccaccagctgaaagctccttccagaatcactgaggctatttcattctccctcccctcrgaaaacccacagcttctgttcaataaagctgtgggtattttaaaatgtgcttttcagtctttgggmgatttagagcaaaatcttgcaattcttcaaaaaccygaattgccattctggccacagctctggccagcagatcatgcacagtctctgtgcacgtggacaaagtgggctggatatatacatgcccagagcaaaataaaataaaatacaaatcatcctttaacacttcttcttgagctgttccaacacagtgaaacttcccctgaatcttctcgccaggggaaggttcaggctgg

SEQ ID NO: 88196 - DNA, 497 bp, Chicken  19866894390884_9
gatacctgatggagctgtacaacagctttggccataacagtgtgcccagtgccccggtgcaatacccccgtgccccctcagcagggtaggcagggtgcygggaccatgcaaacccaaagagctcctggcttcccgtcagcccaccagctgaaagctccttccagaatcactgaggctatttcattctccctcccctcrgaaaacccacagcttctgttcaataaagctgtgggtattttaaaatgtgcttttcagtctttgggmgatttagagcaaaatcttgcaattcttcaaaaaccygaattgccattctggccacagctctggccagcagatcatgcacagtctctgtgcacgtggacaaagtgggctggatatatacatgcccagagcaaaataaaataaaatacaaatcatcctttaacacttcttcttgagctgttccaacacagtgaaacttcccctgaatcttctcgccaggggaaggttcaggctgg

SEQ ID NO: 88197 - DNA, 600 bp, Chicken  19866894390885_1
ctctataagctgctgctacgaatgtatccatttcatattcctgtggctttttgttgtctgtacttaccattttctccttatagttcctcagtgtggattaaaagcaatttttcagttaaaacattccttccataaggaaatttgactatattgttttacttactggtataagatacttaaagatatttttttcagttttacatgagtagccaaaggagaccaaagaataaatttccttgtactgtatagagttaaggatagaagacaaatgactcttctatacatagctaactgttcttyaaaaaaaaaaaaaaaaaaaaaatctatcttttaggtcaactgaagaaatgtttagtatggctgatgagagctgcagctccaatcctgcaatggtccggaggaaaaaaattgccatcagcataatcttctctctgcctgaaaaagaagatgcacagagaaacttccaagatttctttttctctcacttccctctctttgaatcccacatgaacaaactgaagtatgcaatagaaaaggtacagaacactggtttctcttaatgtgaaaacrtaagtgtcaaacagaatgaagtattctaga

SEQ ID NO: 88198 - DNA, 600 bp, Chicken  19866894390885_2
gactcttctatacatagctaactgttcttaaaaaaaaaaaaaaaaaaaaaaatctatcttttaggtcaactgaagaaatgtttagtatggctgatgagagctgcagctccaatcctgcaatggtccggaggaaaaaaattgccatcagcataatcttctctctgcctgaaaaagaagatgcacagagaaacttccaagatttctttttctctcacttccctctctttgaatcccacatgaacaaactgaagtatgcaatagaaaaggtacagaacactggtttctcttaatgtgaaaacrtaagtgtcaaacagaatgaagtattctagagactgataggtgaagagtgggagatgtgtggtttgaagcttccctccctctttatatatgtagtcttgagcctgagcccagtgttggaatttagcatttgctgaaaaggaggtgtagtttcctttctagtcagaatgaaaatggagagttttctgctatggatggcttttcttttgttctagtcatatttcagtgaggttgtcctgactccctagagactgtggaaatgatgttctatccttttcctgcggttactaaaagtgacaacaa

SEQ ID NO: 88199 - DNA, 600 bp, Chicken  19866894390886_1
gcaggttgggtagataggatcttggaaagcttgccaggctttcagtattccctctgtggtaaactctattagaacgtcacccagtttgtaccttttataatttatacgtctagcttaagtctgtctggccttttgaggataaatttccccccaaaactcattccaccttctccttatcatcctggagatggtgttgttttgttttgtttttttgtgcctaataatgtcttctgcaagtaattatttaatatgctcgcctaccaaatagagagagacatttcttttctgcctttcccttcycaaaacatactggcaagtttatgtaaaatatcttactctaggcttagaggtatcaactcttacyctgaagtaactttgatgccacagcaaacatgcatgctgtaaattcagatggttcattattgactctctagttaaaccagatgcaacagtatttcagtacttctggagatgactaacccctagtgcctttcctaagtatactataacaaagatttttgaactaaaaattatttttaactctgaaagaagagcacaatttctgtatcccagatgcttcttttttctcctctctcatct

SEQ ID NO: 88200 - DNA, 600 bp, Chicken  19866894390886_2
tctattagaacgtcacccagtttgtaccttttataatttatacgtctagcttaagtctgtctggccttttgaggataaatttccccccaaaactcattccaccttctccttatcatcctggagatggtgttgttttgttttgtttttttgtgcctaataatgtcttctgcaagtaattatttaatatgctcgcctaccaaatagagagagacatttcttttctgcctttcccttcycaaaacatactggcaagtttatgtaaaatatcttactctaggcttagaggtatcaactcttacyctgaagtaactttgatgccacagcaaacatgcatgctgtaaattcagatggttcattattgactctctagttaaaccagatgcaacagtatttcagtacttctggagatgactaacccctagtgcctttcctaagtatactataacaaagatttttgaactaaaaattatttttaactctgaaagaagagcacaatttctgtatcccagatgcttcttttttctcctctctcatctgccattactttaaaaaatatatatcattaaaaagaacaacttagtcattcattggaagtagagg

SEQ ID NO: 88201 - DNA, 600 bp, Chicken  19866894390889_1
ggtactgcataaattatgtttgtgttcacaagtacatttttcatttgctctatattctgtgcattatattcatctttcatatgtacattctttatttggcattagttagatttgaagtcagttattacagaaccagaactttttaaactgtgtactggaatggtatagtgactggattatctcactcctccataataagggaactatttttaaatgatcttttcaaatgttttttttttatagagatagcacgtcttaaacactcaaagcatattgctttcctgcatttgccacagcgtyttctatatctggcagccaagtatgcatgtgtgaatcaatctaaaaatatacagatctgttttatgaggtcacaatgagattcatttttaaaatgaatcatagaatcactcaggttggaaaagaccttaaagatcattgagtccaaccgcaacctaactatactaccctaactctaacaaccctccactaaatcatgtccctgagcactacatccaaacagttttaaacacatccagggatggtgactcaaccacttccctggagagcttattccagtgcttaacaaccctttctgtaaat

SEQ ID NO: 88202 - DNA, 600 bp, Chicken  19866894390890_1
gctttaactggggggcggccgagctccaattttggggcgatttggagaggttttggggaaaggaagaaaacgtgatcatcacctgctgcctccgccgcgggtccggccgcgccgccacctcctggaaggcaatcgcgacacccccgcgccccaaaaccgcccccaaaaacgcccatttccgccaacgccaaaaaccggcctttccctacgccggcgtcgggggctgagccgccccaaagttaccgaaatgtccgtgaaactgacccaaaaaagccacccggcggcatcggggctctccgygcggctccgaggcgatgcgttttttggggcgctttggggagtttttggtaaaacggcgcttttcgggacctgcggacgcacggggagaaggcgcgcgccccgcccccaccccgcgtagtttggggcgctttgggggttttttagtagtttctatccggcgccgcgcatccccggcgcaaaaacgggctcaggaagcgcgattttgggtcatgctcctgtccccagcacgaaacgggcacgagaaatggcgttttggggtcagagcgcaaaatgggctcagaaagagggatttkgggtcca

SEQ ID NO: 88203 - DNA, 481 bp, Chicken  19866894390890_2
tctccgygcggctccgaggcgatgcgttttttggggcgctttggggagtttttggtaaaacggcgcttttcgggacctgcggacgcacggggagaaggcgcgcgccccgcccccaccccgcgtagtttggggcgctttgggggttttttagtagtttctatccggcgccgcgcatccccggcgcaaaaacgggctcaggaagcgcgattttgggtcatgctcctgtccccagcacgaaacgggcacgagaaatggcgttttggggtcagagcgcaaaatgggctcagaaagagggatttkgggtccagcgcgcttccccgtcgctaaatgggctcaaagagggattttgggtcagccacgcgtccaaaatgggctcagaaagggggatttggggtcagtcacacatccccagcgcaaaatgggctcagaaagggggattttgggtcagccacgcgtccaaaatgggctcagaaagggggat

SEQ ID NO: 88204 - DNA, 588 bp, Chicken  19866894390897_1
attgtaaaagtctgaaaggcacatgaactggacccataaaacgtactggcacattcactaatacgttttatgttacattcctaaagagaaactgtggaatcctaaccaagagaaagactgaaggtaccagcaagttcttttgtgaagcattaagagaggcagagagtttcttttggctcttgataaaagtattaataccccaaagttacaaggtctgaaaaggtgcatcattcagttgtatttggacgagtcgctacataaacaaacacaacaatcagcagtactacgacggccagcgtrggaagcacgaccgtggtgatctgttggcgggcctcttgcattgcctgtttcctctcctttttatctttggaggtctcttttttgggctttcctcttagctgcctcatcctccaattaggatctgttgttcaccaaaatgrgggagcagagggagctgagctgcagagaacaggctgaggtcacttgagaccagggcttgaaaaattccgtctccttccaatggttggctgcacaagaaactgcaagagaagagaggaaaaagtattttaaacaaaatcaacatatatt

SEQ ID NO: 88205 - DNA, 448 bp, Chicken  19866894390897_2
tgtgaagcattaagagaggcagagagtttcttttggctcttgataaaagtattaataccccaaagttacaaggtctgaaaaggtgcatcattcagttgtatttggacgagtcgctacataaacaaacacaacaatcagcagtactacgacggccagcgtrggaagcacgaccgtggtgatctgttggcgggcctcttgcattgcctgtttcctctcctttttatctttggaggtctcttttttgggctttcctcttagctgcctcatcctccaattaggatctgttgttcaccaaaatgrgggagcagagggagctgagctgcagagaacaggctgaggtcacttgagaccagggcttgaaaaattccgtctccttccaatggttggctgcacaagaaactgcaagagaagagaggaaaaagtattttaaacaaaatcaacatatatt

SEQ ID NO: 88206 - DNA, 599 bp, Chicken  19866894390902_1
  misc_feature (1)..(156): n is any nucleotide
nnnnnnnnnnnnnnnnnnnnnnnnnnnnnnnnnnnnnnnnnnnnnnnnnnnnnnnnnnnnnnnnnnnnnnnnnnnnnnnnnnnnnnnnnnnnnnnnnnnnnnnnnnnnnnnnnnnnnnnnnnnnnnnnnnnnnnnnnnnnnnnnnnnnnnnnnnnnttaacaacggttatggaaagagaaagtaagataaagatgtctatggggccttacttggtgcagcagaatgaatgagaaggggtaaaatggataaaacagagtacatttgtgtaaaaattgcttacaggaaggataataagagaytctattgagtagtcctggaagtttgttatagatgtcacccctcttttttcagctttggatatgaatagcaatttctgtaatgtgattagaggaaatctagagagtgttgagtcattaaggtagactggctcccagatatatactgaaaaataaatgtgaccaataatcctaaagctcagatactccttcaggcgacaggaacagattaamcctctaagcagtgaggatagggtagagatgaaagatggtctcagtgtggacctgtgtactttgcctcagctttcaataagggcagtggt

SEQ ID NO: 88207 - DNA, 600 bp, Chicken  19866894390902_2
ttggtgcagcagaatgaatgagaaggggtaaaatggataaaacagagtacatttgtgtaaaaattgcttacaggaaggataataagagaytctattgagtagtcctggaagtttgttatagatgtcacccctcttttttcagctttggatatgaatagcaatttctgtaatgtgattagaggaaatctagagagtgttgagtcattaaggtagactggctcccagatatatactgaaaaataaatgtgaccaataatcctaaagctcagatactccttcaggcgacaggaacagattaamcctctaagcagtgaggatagggtagagatgaaagatggtctcagtgtggacctgtgtactttgcctcagctttcaataagggcagtggtatcagtcctggggacaaaaacagactggggacaagagcgtagaaaaaacgtggccacatctgacaaagaaagaaaatttggaattgaacaagctaaaactgaggaaatcagactgtcttaacccacctcctgaaaactggagataaaaggacttttaataaacctgtcaacttcatatgaatgggagtacatgcttgagcaataacagatg

SEQ ID NO: 88208 - DNA, 600 bp, Chicken  19866894390907_1
gcaagattattctgaattagcttcacaagacgcttcaggacatgttaattttttttttcagtctatgctcaacagaccttctagtgagaacagtaaaagaaaactgtgtaaggggaacatgaagaaatttggagagaaaatggaaaatcttgaagttcccttataaaatgtcagtatgtagttcactgccttgtcaatgccaatgctttactatttacaaatacactgaacacaactgtagtattctgctgtaagttatgtgcatactgaaaagattcagtgatggaatagatatccaaytcttgatttaaaatcaacctgcagaaatgctgtccttgaattcagtgagagatggagtggtgcctgcctagcgataacgaatggttgctggtctatcagctgtttacaggtttcayactgatgaaatattcgtagatgatcatgctgtgagaaatagggaacatttctattttatatgatttcttttttctttttacaaaatktttcattaattgtccttgatttccccttctgaagttcagacaaatgatgtcacaagtggatttccatctgtccagcacttggaagatggtatgaaag

SEQ ID NO: 88209 - DNA, 600 bp, Chicken  19866894390907_2
acatgaagaaatttggagagaaaatggaaaatcttgaagttcccttataaaatgtcagtatgtagttcactgccttgtcaatgccaatgctttactatttacaaatacactgaacacaactgtagtattctgctgtaagttatgtgcatactgaaaagattcagtgatggaatagatatccaaytcttgatttaaaatcaacctgcagaaatgctgtccttgaattcagtgagagatggagtggtgcctgcctagcgataacgaatggttgctggtctatcagctgtttacaggtttcayactgatgaaatattcgtagatgatcatgctgtgagaaatagggaacatttctattttatatgatttcttttttctttttacaaaatktttcattaattgtccttgatttccccttctgaagttcagacaaatgatgtcacaagtggatttccatctgtccagcacttggaagatggtatgaaagaagactgaataactatagaaacttcagtgagctgtgtctgcaaggttggatattcatgcatcttgtttacaattactgctgctcaatccttttattttacttttaagcaaaatgca

SEQ ID NO: 88210 - DNA, 600 bp, Chicken  19866894390907_3
tgctttactatttacaaatacactgaacacaactgtagtattctgctgtaagttatgtgcatactgaaaagattcagtgatggaatagatatccaaytcttgatttaaaatcaacctgcagaaatgctgtccttgaattcagtgagagatggagtggtgcctgcctagcgataacgaatggttgctggtctatcagctgtttacaggtttcayactgatgaaatattcgtagatgatcatgctgtgagaaatagggaacatttctattttatatgatttcttttttctttttacaaaatktttcattaattgtccttgatttccccttctgaagttcagacaaatgatgtcacaagtggatttccatctgtccagcacttggaagatggtatgaaagaagactgaataactatagaaacttcagtgagctgtgtctgcaaggttggatattcatgcatcttgtttacaattactgctgctcaatccttttattttacttttaagcaaaatgcaactcccctgtaacagcataaattgtagcaaaatagtataatttggctcttgcactgcagaactctaacacatattatgaaagttggc

SEQ ID NO: 88211 - DNA, 600 bp, Chicken  19866894390907_4
tgtccagcacttggaagatggtatgaaagaagactgaataactatagaaacttcagtgagctgtgtctgcaaggttggatattcatgcatcttgtttacaattactgctgctcaatccttttattttacttttaagcaaaatgcaactcccctgtaacagcataaattgtagcaaaatagtataatttggctcttgcactgcagaactctaacacatattatgaaagttggccaaaagaagtcaaccatatgatgtaaatcatccacaagtctatgagtcttgatgagatgcatcccagygtcctgagggaattggctgatgtggaccatgggtccatcatatgtctcccaaggcatgggtttgtgggtccccccaccacatttgtcatggaaccaggctgaactggcccataagccattgtcagaagatcagcacaactgcttccattttaaaactcagactgactcggttgttggtgaacagacagccttcattctattagtagaaaaaaataacaggactgaaaatcacggaaaccatcacacttactggtctaataaacagtgtaagacttgaatgtagttattggcatcctgttc

SEQ ID NO: 88212 - DNA, 600 bp, Chicken  19866894390911_1
tatttacatttatcaagaagttggcttcaatattggaatattgtaaaaaacagaaaagctgcctgacactttcaagcgtaagtaagcatcatgaaagcagccataccctttcccccagaaataagggaacgtatactttgtggaacatgccttcattaggagggatggaaattccaggactcttataaaacttcactttttaaaccaagaggaatacattctctgaagtgtttctgtatcccttcctgcacaagcacagccttctttcttcagaagatcatcagaggaactacctgccawgctaaggctgtaacaacctcaggtgtgaagctgcaccacagccatcccacggctcccagtgccgaggcttcctgcatcccacagctgcacaggaagagcagtggaggggcgctgtgtctgatctgggcaccatgcctgggttcatctgaggtgggagaagggggcagtgctatttaggctcagaagggtgcaggtgcatcagcttcaattctgtcgatgaggagtacctgtgagaccggtgatgtcccagggacacattatttcttttaatgggcagatctaaatacttgaatcgagcct

SEQ ID NO: 88213 - DNA, 600 bp, Chicken  19866894390913_1
caatgcataatcagactcttcatttgattccagcagtgatgccttgctcatctgtaactactgtcaaagcagtggaagatcatgtccactttcacgtacagtttcatgcttcatttaagccttgagttgtcaacttctaaccgccatttttttacatgctagattttgaacttatataataacacaacagacatttgcaaagtgcttgagacagtagttttggtttagcagtatttaattaaatagctaggtagctgtagtgccatttgcttgtgggagagagaggtgctagatttcccygttactcagtttatctataacacaagttattwtttttttgccagagaaaaagtgatcaactgaaggcagagattttgtgcataataacatataaaatatcagtggcacaacaaaactgaaggttagatcattttctcttgagagcaagtgagagaatgaaggcactttaggagctgcagaaattaaagaaataattgagtgtactttcttattgtttatgctgaatttctcaagtgtactgggccactattgctccaacacattacacgacagaataaattcagactccatccatctttg

SEQ ID NO: 88214 - DNA, 600 bp, Chicken  19866894390913_2
gcagtgatgccttgctcatctgtaactactgtcaaagcagtggaagatcatgtccactttcacgtacagtttcatgcttcatttaagccttgagttgtcaacttctaaccgccatttttttacatgctagattttgaacttatataataacacaacagacatttgcaaagtgcttgagacagtagttttggtttagcagtatttaattaaatagctaggtagctgtagtgccatttgcttgtgggagagagaggtgctagatttcccygttactcagtttatctataacacaagttattwtttttttgccagagaaaaagtgatcaactgaaggcagagattttgtgcataataacatataaaatatcagtggcacaacaaaactgaaggttagatcattttctcttgagagcaagtgagagaatgaaggcactttaggagctgcagaaattaaagaaataattgagtgtactttcttattgtttatgctgaatttctcaagtgtactgggccactattgctccaacacattacacgacagaataaattcagactccatccatctttgccctttgcccccyatcttcattatttgattta

SEQ ID NO: 88215 - DNA, 600 bp, Chicken  19866894390913_3
tctataacacaagttattwtttttttgccagagaaaaagtgatcaactgaaggcagagattttgtgcataataacatataaaatatcagtggcacaacaaaactgaaggttagatcattttctcttgagagcaagtgagagaatgaaggcactttaggagctgcagaaattaaagaaataattgagtgtactttcttattgtttatgctgaatttctcaagtgtactgggccactattgctccaacacattacacgacagaataaattcagactccatccatctttgccctttgcccccyatcttcattatttgatttagatacagatctctaccttatggatgaaagcttacctctaagaattacatccaaagcttaaagaaattcttcacatgaggtgctattgcaataaatcacactatccaaataaaatcttccaaacattcctgacttttaaagaaatacttctctggagtttccatgacagcattatgctgctgtcattctgctatcataataattttcaaatcactgagaagaaggaaggataagggaactgttgtctgagcaaaggaagcctgcggcactcactgccgttcc

SEQ ID NO: 88216 - DNA, 600 bp, Chicken  19866894390915_1
gtcggaagggacttctggagatcatccagcccaacctgcctgcacaagcaggtttttgatttgtgatagatggagtcatcttggaaggggtggggtttgtcttcatttgtgcttttgactttgtaaaaagtcgaagtgagtgtatatagaggggaagaggagaggatgaacaaacagatagctgtgtttgagatcaagacggtggctggctattgtggccttccccagtggcacttgcaaccccattaactcctcatggctaataacaaccctgtcccttcttctcgccttgtgcagagrctgtggccatgtcctcactgcgctaggcctgtcccccaccaccttgaggatgcgtgcctggaaggcagtggccagcacgctggcgctgagcggggccgatgtggtggtcaccacgctgctctatgcccacggccggcgtggtcaggacattcttcaggacctgaggcacttcaacatcttcaactcactgctggacatctggggggagcttgtctgtaccgcagctgtgtgctgctgggggccaccatcggggtggccacaaacacagcctatggcccccggcgcctcagggccttcgcg

SEQ ID NO: 88217 - DNA, 599 bp, Chicken  19866894390923_1
  misc_feature (1)..(66): n is any nucleotide
nnnnnnnnnnnnnnnnnnnnnnnnnnnnnnnnnnnnnnnnnnnnnnnnnnnnnnnnnnnnnnnnnntaatcatctcccctctgtaattttgtccactaaatctcgttttagaaatgcatcattttaacaacatgttattcatcatggaaatatctgcttatgttatgccttgtagtggaacatatcatgacatggttttaccttggggcttttcattctcattacttctacacttcaccagtttttacattgtggatgccaccgtggtctgaaagcctgtcaacagcaatggaacataayaccaccagaggctggatgggctgcaacaagacctgtatcgtgtccccagttaaatgaagtatcttgaaactttgactttttttttttttgtaaggtttcaacaagaagtagcatatccttttctctgtcttctcatgtagtaagagacactatgatgatttcttcacatctctatattaagataacaatttttgcactgtgaaggactgttaactacatttcataataatcttttcctaagcatcattaacataattaacagcctgttaatgaaggcattagacctttagcatcaaata

SEQ ID NO: 88218 - DNA, 600 bp, Chicken  19866894390924_1
atataaacctcagtgaaaaatacacaatagtctgtaaaataaggattaaaaagaactaacaaggtctgtagagttcattattaactcacgagatacatatattacttattttatataatatgaaatactttcaagagatctattagcagctgagatgcttatttgtattcaaaactaaacatttacctagaagcagcttgagtttggtgtctcttggttccatttttattttttagtgtccaccatgtaaaatcctttggtcctgatacaacaaatggaggaaaatatttcaaagcaggrcacaaaaatagaatcttaaaattcagagttctgatttttgcttctcagttctgtatgaagtggcagttcagcagaattgtttaatcaaaataagwatgtagtccagcaatggctttctaaccccaaatgcaaaaatgttcagttattttatatgttaggtatacaaataaaagagttagtcaagcactttcatcattagtttcccttgtgttgcagtttccyttgtgttgccttcctttccctaaggatggataacatcactaaaacaagagggtttggattgtttatattcatttcctt

SEQ ID NO: 88219 - DNA, 600 bp, Chicken  19866894390924_2
catatattacttattttatataatatgaaatactttcaagagatctattagcagctgagatgcttatttgtattcaaaactaaacatttacctagaagcagcttgagtttggtgtctcttggttccatttttattttttagtgtccaccatgtaaaatcctttggtcctgatacaacaaatggaggaaaatatttcaaagcaggrcacaaaaatagaatcttaaaattcagagttctgatttttgcttctcagttctgtatgaagtggcagttcagcagaattgtttaatcaaaataagwatgtagtccagcaatggctttctaaccccaaatgcaaaaatgttcagttattttatatgttaggtatacaaataaaagagttagtcaagcactttcatcattagtttcccttgtgttgcagtttccyttgtgttgccttcctttccctaaggatggataacatcactaaaacaagagggtttggattgtttatattcatttcctttattaagtgtaaatttccctcttgcttaagagaacatagcaataccaatagttttctacaaacataccatcaacaaatctgttgagtactgcaaa

SEQ ID NO: 88220 - DNA, 528 bp, Chicken  19866894390924_3
tttttattttttagtgtccaccatgtaaaatcctttggtcctgatacaacaaatggaggaaaatatttcaaagcaggrcacaaaaatagaatcttaaaattcagagttctgatttttgcttctcagttctgtatgaagtggcagttcagcagaattgtttaatcaaaataagwatgtagtccagcaatggctttctaaccccaaatgcaaaaatgttcagttattttatatgttaggtatacaaataaaagagttagtcaagcactttcatcattagtttcccttgtgttgcagtttccyttgtgttgccttcctttccctaaggatggataacatcactaaaacaagagggtttggattgtttatattcatttcctttattaagtgtaaatttccctcttgcttaagagaacatagcaataccaatagttttctacaaacataccatcaacaaatctgttgagtactgcaaacatctgttgcaatcatgaaaaagaaaacaagatacttagacaccacagaactcga

SEQ ID NO: 88221 - DNA, 600 bp, Chicken  19866894390935_1
atcacttgctttgtcctggctcagtgttaacaacctactttatcatcatcagtaacccaagtagaaaagctctcactggatatggtaatcaagaagtgatttacagccggagctgagccgggctgccattatgggaatctctgttgcctggagatgagaagcgacttccaagatgttcactctttctcttttaaaagttggttaggcacagaccagcaccacctctcctgaatatgcttaactgaatctctcttactgtaaaataagcctgggtaatgcttccaacatgaagctttacaraagtccagtcrrtgagttttgctgccagactgcacacagctgatgcaggcagtgattcccaactgctacaaagagctgggaaaacatcctccgggaagcaaaaagaatgcatcactgccccaggtctaaacaccacagaggctgattgctggcccctcacacaactcaggtcacttggccatcacgtgctcactgtgcagaggatggcaaactgcatctgcttggtgaagatacagccaaagtttggagcccaacctttcatattgtatttgtgcactccctgtttctattagagccwta

SEQ ID NO: 88222 - DNA, 600 bp, Chicken  19866894390935_2
tgtcctggctcagtgttaacaacctactttatcatcatcagtaacccaagtagaaaagctctcactggatatggtaatcaagaagtgatttacagccggagctgagccgggctgccattatgggaatctctgttgcctggagatgagaagcgacttccaagatgttcactctttctcttttaaaagttggttaggcacagaccagcaccacctctcctgaatatgcttaactgaatctctcttactgtaaaataagcctgggtaatgcttccaacatgaagctttacaraagtccagtcrrtgagttttgctgccagactgcacacagctgatgcaggcagtgattcccaactgctacaaagagctgggaaaacatcctccgggaagcaaaaagaatgcatcactgccccaggtctaaacaccacagaggctgattgctggcccctcacacaactcaggtcacttggccatcacgtgctcactgtgcagaggatggcaaactgcatctgcttggtgaagatacagccaaagtttggagcccaacctttcatattgtatttgtgcactccctgtttctattagagccwtactggggaagtg

SEQ ID NO: 88223 - DNA, 600 bp, Chicken  19866894390935_3
gtcctggctcagtgttaacaacctactttatcatcatcagtaacccaagtagaaaagctctcactggatatggtaatcaagaagtgatttacagccggagctgagccgggctgccattatgggaatctctgttgcctggagatgagaagcgacttccaagatgttcactctttctcttttaaaagttggttaggcacagaccagcaccacctctcctgaatatgcttaactgaatctctcttactgtaaaataagcctgggtaatgcttccaacatgaagctttacaraagtccagtcrrtgagttttgctgccagactgcacacagctgatgcaggcagtgattcccaactgctacaaagagctgggaaaacatcctccgggaagcaaaaagaatgcatcactgccccaggtctaaacaccacagaggctgattgctggcccctcacacaactcaggtcacttggccatcacgtgctcactgtgcagaggatggcaaactgcatctgcttggtgaagatacagccaaagtttggagcccaacctttcatattgtatttgtgcactccctgtttctattagagccwtactggggaagtgg

SEQ ID NO: 88224 - DNA, 600 bp, Chicken  19866894390935_4
araagtccagtcrrtgagttttgctgccagactgcacacagctgatgcaggcagtgattcccaactgctacaaagagctgggaaaacatcctccgggaagcaaaaagaatgcatcactgccccaggtctaaacaccacagaggctgattgctggcccctcacacaactcaggtcacttggccatcacgtgctcactgtgcagaggatggcaaactgcatctgcttggtgaagatacagccaaagtttggagcccaacctttcatattgtatttgtgcactccctgtttctattagagccwtactggggaagtggacttcaggggaaataaaaaaggctggtgaaagcatccttccaaatacgtgttttgtagtcaaaagacatttggtctcttgaccacagcatgtgctttattaatctgtaccaarcaaatgtgaactgcggtagtgaattagactgaacagaagaaaacaagttttcatacacgtttgcaagagagctctgaagacttcaattgaaatgaaaagaagcatccaggagagatagttctacttcctggattttgccaggcataatatctacaggtgctcatcctctagca

SEQ ID NO: 88225 - DNA, 600 bp, Chicken  19866894390935_5
ctaaacaccacagaggctgattgctggcccctcacacaactcaggtcacttggccatcacgtgctcactgtgcagaggatggcaaactgcatctgcttggtgaagatacagccaaagtttggagcccaacctttcatattgtatttgtgcactccctgtttctattagagccwtactggggaagtggacttcaggggaaataaaaaaggctggtgaaagcatccttccaaatacgtgttttgtagtcaaaagacatttggtctcttgaccacagcatgtgctttattaatctgtaccaarcaaatgtgaactgcggtagtgaattagactgaacagaagaaaacaagttttcatacacgtttgcaagagagctctgaagacttcaattgaaatgaaaagaagcatccaggagagatagttctacttcctggattttgccaggcataatatctacaggtgctcatcctctagcagaaacacttccctggacagtaggtgttagcagtgtcaggaaggagtaaatctatccacgtggctgttgtgtcagccacacctcatctacattgcagccctcggccagccccagaatggtgcccttcc

SEQ ID NO: 88226 - DNA, 599 bp, Chicken  19866894390947_1
  misc_feature (1)..(36): n is any nucleotide
nnnnnnnnnnnnnnnnnnnnnnnnnnnnnnnnnnnntctattgcaactgactcccttagtatgttgtttcttgtaattatctggattttggaaaacagtttgttcttacatataagtttcaattgtactgttctgagtttttgtttatttaacatgaattacggtaatcctgcaaattagatgctttgtaatttaggcttgcagatctcaaaacatagagctccagtagggaaattactgtgctataagatgagatggtgtgtggctgtggatgagatttgctgtgtgtgtggtggtttktttttttttttttttttttttttagggtttgttagtaggatggtgcttcatttcctgtacagacttatgtatactgctgttctgaaatcctagagtaaaaatctagaatgtgatttggtaaagtaactcttttacagataaagaaccaggatgcaagaaaagaggtgttgaaagaacagcataaggatcttttattctgtgaattcccatcccttcccagtaagtgtacaaagtctgtggtctgcacggtttaactgagcatgaattaaaaaatgcccagtacttcatcctggtagatg

SEQ ID NO: 88227 - DNA, 443 bp, Chicken  19866894390954_1
agggctggctgggcagctgagaagtgctccatttcatcaaaaacaacagctgttttaaaagccgtaccatccaactggtaatactactaattactgatactgctgtatgacactataccattcacatgatgatgtgcattaaaataattcctgacatactggttttatgtggtgatatcataagagtcattaagcaacttactctaattttcccctttgtctcggacaggactgctttgtttcctcctctcctacctcctgttttagctctccatgcacacatccacttttcaatcccastggtgctcatcttcatctcctgcagtctctcctttgccctccaagctccagcagttgtattcaatagtgtgactggagtggtacgtttgttgtgccttcacatctaaagctcttttcctactcctccgtatttctcagtgctg

SEQ ID NO: 88228 - DNA, 600 bp, Chicken  19866894390957_1
aaaaaaaaaagtttaatttgcatggattgataccagtggccatttccttctgaagtgtagagacgtggccctactagactgaacagtgctaatcttttttctgccagttgtataacatgatctccacaatttttcaatacctctccacaaatgaagtttcctttcatgctatagatccctgtgtgatgaaatatgtaaatgaatatatttatctttatttgtcaactcttcgcttgtataataatatcaatacaatatacaataatgttgtataataatatcatagcaccataaatgccrttgtgctcactttataaaaatagagaagtatttcctagcaaaaatgtttctgacccacaattagtgcagtcataactagaacagtttctatgtccaaatgaatgtcaatagtaacaaccttacagcaggcttgaccttcctctgtctcaaaaatatattctgcacctttcagactagaattttgctccaggaaaaaaaaaaaagtaaaaagaaaaaaaagtcaaatgctaaagatcacctgagtggtaaaacctctctttcctcacaggacttggatgcttcttcatagaacaagtcatt

SEQ ID NO: 88229 - DNA, 440 bp, Chicken  19866894390975_1
ggacaaacagaatgttaataccacggtatctgtggagttataaaatctgtactgtgcaagacgttttctaattattgccacttctttattagcgcctttagctctcatttttttttttgcaaaaagtctcaggacacaaaaacaccactgaaaaatcaggtcttcaaaaaactggggacaatttctgtagcctcagatggctccaggcaataagagctaaaaaggcttttataaaagtggagctgcaaaaatcagggcttatgtgcaattaaagaagttcatgatggggagctgtgcctytgtaaaaccagatacgctccttaagatcggcaacagagatgccaactttgattatgagtctaaaactgccacattaaatctcgatgatacttctgcccgtatccatctcactgagccccagcgagcagggtcacagcaag

SEQ ID NO: 88230 - DNA, 600 bp, Chicken  19866894390980_1
gtttctaagaccaaagagatactgattcttctttttcatgttttcagctctaaagaaaacaatatgttccattaaggctttaatttaaaatctccgggactcaataaaaaaatctcctatttacaatttggatctaagaaaactatttgaaaagtcaggctgaataaattgaattgtttcagtccaaaaactaacattttctatgttttcctaacaagaatttttttaaggtttcaaaatatcttttgtgcttatcaaaattatatctacatttcattgtaggtttatttcctactaatrttttttctatatttcaatcattttgcaagccaaaataacacttgcttatatagctcagtttacatctagtcctactcaaaccctaggaggcaatatttacttacagaaccataactaataacacgtggctgcctgtgtgattactaagtctaacacaacctgatggttgtctctgcactcattaatgtgagaattaacaatccattagctcagcactgaagagagctatctgagaaattcagccacacaaggaaatggggggactcaatgccctgatagattttcccatgattaaaccct

SEQ ID NO: 88231 - DNA, 600 bp, Chicken  19866894390989_1
gtgtggtcttattgtgtatatataagatatatatacacaatatatatatatataaatatatgtatatacaaaatacatatatatatatgtacagactccagaagtctgtactgacacaatcacactatgcaacacaaaacatgtatgttatgctgaactgtataaataaaaattagtcttgataatttctctgtttccttgggaaatctatatttcttagaatccctctcatggtatggatgtccatcttcacctcatacattcagtttcacaatctagctcttgtaagtccaagacagygttaaatcctgcagggatagcattcagaaatacaagctgatatacaacgtaccgctctggagatgcagacgtaggcttaaagctgtattggttgttaacatcatgtaaatctcctgatgtgaaattcattattactcctcttcatacagccagagaactgcactgtcttctcaaaattgtttgaagaaaacagcttgatatttataacgggcctgagtggactttccttcacagcacgttaayccctgttgcactttatgccaatatggttaggttgcatctgatactgagtaagccagt

SEQ ID NO: 88232 - DNA, 563 bp, Chicken  19866894390989_2
ccatcttcacctcatacattcagtttcacaatctagctcttgtaagtccaagacagygttaaatcctgcagggatagcattcagaaatacaagctgatatacaacgtaccgctctggagatgcagacgtaggcttaaagctgtattggttgttaacatcatgtaaatctcctgatgtgaaattcattattactcctcttcatacagccagagaactgcactgtcttctcaaaattgtttgaagaaaacagcttgatatttataacgggcctgagtggactttccttcacagcacgttaayccctgttgcactttatgccaatatggttaggttgcatctgatactgagtaagccagtttaaatccatgagaaatattttttagcttacactatatttctcaatatcattagagattaagtagctttttcaggaaaaaaaaaatctttttcagatggttatttgtatttgtaaatagataatatattttgtgaaagttttattagcaatttttttccaatgaggaactaatttgttggtcctaaggatccaaaacataccaaaa

SEQ ID NO: 88233 - DNA, 599 bp, Chicken  19866894390994_1
  misc_feature (1)..(272): n is any nucleotide
nnnnnnnnnnnnnnnnnnnnnnnnnnnnnnnnnnnnnnnnnnnnnnnnnnnnnnnnnnnnnnnnnnnnnnnnnnnnnnnnnnnnnnnnnnnnnnnnnnnnnnnnnnnnnnnnnnnnnnnnnnnnnnnnnnnnnnnnnnnnnnnnnnnnnnnnnnnnnnnnnnnnnnnnnnnnnnnnnnnnnnnnnnnnnnnnnnnnnnnnnnnnnnnnnnnnnnnnnnnnnnnnnnnnnnnnnnnnnnnnnnnnnnnnnnnnnnnnnnnnnnnnnnnnnnnngttttcacttaattttgaaaaaggaaaraaagtcagggggcttcgatgttaaggcgaaaatttccattattaactcattttgtaggtgggagcccaattcttaactcatccacagcagcaccaccccccctggctttacagagagatctgcgctcgcgtgaagtaagaatcaggcttctatgcctttgtgctcagaggactctggttgacctcagcagcctttggagcagagccatagctggaatttcagcttgcagtctaaggcttcttaactgcaggccaaattagcgcaaaatgaggctttgcaactggcattctacccttcac

SEQ ID NO: 88234 - DNA, 401 bp, Chicken  19866894390995_1
gattctatgattctatgacaagcattgtttcgtcttcagaggctttccacacagatgtggagaaagtaaagcctggtatgactaactgacctttcagctgaccacagcagatccaaccgtgctgctctattccccaaaccactaagttacctcatatttttgtatcagacttccaatcttgtcttagacactaaatagtaaaccgtcacaggtcccattttcttcccaaggaaatcggattactcatcaccacttgctgcttcactgttatcacttgtgtgtatacacgtgcacacacasagasgaaggaggagagaatatacaaaaaactgtactttaacgtgcattaaaccaaggtgaataccataagtaatgtcaccatggtcatattttatatatgt

SEQ ID NO: 88235 - DNA, 397 bp, Chicken  19866894390995_2
ctatgattctatgacaagcattgtttcgtcttcagaggctttccacacagatgtggagaaagtaaagcctggtatgactaactgacctttcagctgaccacagcagatccaaccgtgctgctctattccccaaaccactaagttacctcatatttttgtatcagacttccaatcttgtcttagacactaaatagtaaaccgtcacaggtcccattttcttcccaaggaaatcggattactcatcaccacttgctgcttcactgttatcacttgtgtgtatacacgtgcacacacasagasgaaggaggagagaatatacaaaaaactgtactttaacgtgcattaaaccaaggtgaataccataagtaatgtcaccatggtcatattttatatatgt

SEQ ID NO: 88236 - DNA, 600 bp, Chicken  19866894390996_1
tgtgcctccagcaggagtaatggaaaacatttctcagaaccaggtcgttttatttctaagaaagcatttgacctaatgatctactttggcaaattggtatgatttatggagaactgatgagcacagtaaaaaacagacacgtagcttcttgccatgagtcaaactttttacgcaaaattcaaaaatatacacaaacagatcagcaatagagtttaacagcaaacaaaaaaatatctgcagtttagtcagcaaagatgagcaaaagtgctcgtagagtggtgagaaataacagcttgacartatgcaacttaactgccagtgtatataaaatctcaccctacataatgtttagtgatcttcaaaatttgccaccggattaatgcagcatggcaaaggatgaccaaccagctaagtttttgaggaagaacttctttactgtgacggtgacagagcattggaacagtctactcagagaggctgtggagtatccttctctagagatattcagaacccatgtggatgctttcctgtgtgacctactgtagggaacctgctttagcagaggattgggtaagatgacctccagaggtcctttccagc

SEQ ID NO: 88237 - DNA, 600 bp, Chicken  19866894390999_1
ttcagcctgctcccttcaagtgcgtacttcctgaggccatttgccaaaccagcaagtcctgctgaacttcaaacccttgtgccaatttccattgtattaactgtagctttgagtttgcctgacccaggcctgaatggatcaaagccccgtggtagctgtcaaacacaaataagcataactcaaagggtgaccgctcaccccagcaatggaaaagcagcaaaatactgctctgaaacctgcaaaagccaagcaggtagagaggcttcctggaaaactatcagcactgtctgagctgaaacygggacatggggagggtgcagtgcagtgcttgctcaagtgatggcaaataattgggtgcattctgatacaytggctaaacatggtcctgtgaamagcaaacaaaaatactcagctgtgttttctgttttgataaaggaacttgagaataagcttcaggactgaagaaaacatccattttttttggtatatttgtggctcccttttcagtcaacataaatacattaaaactgaaggttctcaaatggaatgtatagagttgcaatcacacattcagctcaaacaaaaacccaatcacgtctc

SEQ ID NO: 88238 - DNA, 600 bp, Chicken  19866894390999_2
aaacccttgtgccaatttccattgtattaactgtagctttgagtttgcctgacccaggcctgaatggatcaaagccccgtggtagctgtcaaacacaaataagcataactcaaagggtgaccgctcaccccagcaatggaaaagcagcaaaatactgctctgaaacctgcaaaagccaagcaggtagagaggcttcctggaaaactatcagcactgtctgagctgaaacygggacatggggagggtgcagtgcagtgcttgctcaagtgatggcaaataattgggtgcattctgatacaytggctaaacatggtcctgtgaamagcaaacaaaaatactcagctgtgttttctgttttgataaaggaacttgagaataagcttcaggactgaagaaaacatccattttttttggtatatttgtggctcccttttcagtcaacataaatacattaaaactgaaggttctcaaatggaatgtatagagttgcaatcacacattcagctcaaacaaaaacccaatcacgtctctttaccagacttctataagccctctcttaccagagaaatagccctcgcttcacaaccacaccttattcac

SEQ ID NO: 88239 - DNA, 600 bp, Chicken  19866894390999_3
gtattaactgtagctttgagtttgcctgacccaggcctgaatggatcaaagccccgtggtagctgtcaaacacaaataagcataactcaaagggtgaccgctcaccccagcaatggaaaagcagcaaaatactgctctgaaacctgcaaaagccaagcaggtagagaggcttcctggaaaactatcagcactgtctgagctgaaacygggacatggggagggtgcagtgcagtgcttgctcaagtgatggcaaataattgggtgcattctgatacaytggctaaacatggtcctgtgaamagcaaacaaaaatactcagctgtgttttctgttttgataaaggaacttgagaataagcttcaggactgaagaaaacatccattttttttggtatatttgtggctcccttttcagtcaacataaatacattaaaactgaaggttctcaaatggaatgtatagagttgcaatcacacattcagctcaaacaaaaacccaatcacgtctctttaccagacttctataagccctctcttaccagagaaatagccctcgcttcacaaccacaccttattcacgtcattgctctttggcactacgt

SEQ ID NO: 88240 - DNA, 599 bp, Chicken  19866894391000_1
  misc_feature (1)..(50): n is any nucleotide
nnnnnnnnnnnnnnnnnnnnnnnnnnnnnnnnnnnnnnnnnnnnnnnnnnatcttgaacttgcagattattttgatacaaattaaaaactaaattattttaattatgaaggggatcgttttctttcagtcacagcttttattcagtcatcagttactgccagtttccttgtacaggtcaatgaactgattgtagtttatttcatgaaagtattttctgccatttctgaagaagcagcagttccaactcgctaagttttggtaaaagctggaggtctccttaccaagcatgacagcaacaygcattgctttttttgttcattctaggratttatgtttttcttgtaaataggtcaatatatattcttggtaaataataattacaatgaaaaacagttytagggtctgatcttgtaaagcagacacactgatgtttctattttctgcatatatatttactattttctgcatttatcctactgtaaaaactagtaatggagcattgtatttaaaaatctggtttcagtgggcagttgggagcaaggaatgaaaggrataagggacaaaatcagagaagtgtgtagttcagaacractggttt

SEQ ID NO: 88241 - DNA, 599 bp, Chicken  19866894391000_2
  misc_feature (1)..(23): n is any nucleotide
nnnnnnnnnnnnnnnnnnnnnnnatcttgaacttgcagattattttgatacaaattaaaaactaaattattttaattatgaaggggatcgttttctttcagtcacagcttttattcagtcatcagttactgccagtttccttgtacaggtcaatgaactgattgtagtttatttcatgaaagtattttctgccatttctgaagaagcagcagttccaactcgctaagttttggtaaaagctggaggtctccttaccaagcatgacagcaacaygcattgctttttttgttcattctaggratttatgtttttcttgtaaataggtcaatatatattcttggtaaataataattacaatgaaaaacagttytagggtctgatcttgtaaagcagacacactgatgtttctattttctgcatatatatttactattttctgcatttatcctactgtaaaaactagtaatggagcattgtatttaaaaatctggtttcagtgggcagttgggagcaaggaatgaaaggrataagggacaaaatcagagaagtgtgtagttcagaacractggttttgtttttgatcctacaaagtttgtgtg

SEQ ID NO: 88242 - DNA, 600 bp, Chicken  19866894391000_3
tttaattatgaaggggatcgttttctttcagtcacagcttttattcagtcatcagttactgccagtttccttgtacaggtcaatgaactgattgtagtttatttcatgaaagtattttctgccatttctgaagaagcagcagttccaactcgctaagttttggtaaaagctggaggtctccttaccaagcatgacagcaacaygcattgctttttttgttcattctaggratttatgtttttcttgtaaataggtcaatatatattcttggtaaataataattacaatgaaaaacagttytagggtctgatcttgtaaagcagacacactgatgtttctattttctgcatatatatttactattttctgcatttatcctactgtaaaaactagtaatggagcattgtatttaaaaatctggtttcagtgggcagttgggagcaaggaatgaaaggrataagggacaaaatcagagaagtgtgtagttcagaacractggttttgtttttgatcctacaaagtttgtgtgccttgtttkagaggaagatccatggaagatccgtggaaaatattttaagcaacaggtagaacagacaagca

SEQ ID NO: 88243 - DNA, 600 bp, Chicken  19866894391000_4
gttttggtaaaagctggaggtctccttaccaagcatgacagcaacaygcattgctttttttgttcattctaggratttatgtttttcttgtaaataggtcaatatatattcttggtaaataataattacaatgaaaaacagttytagggtctgatcttgtaaagcagacacactgatgtttctattttctgcatatatatttactattttctgcatttatcctactgtaaaaactagtaatggagcattgtatttaaaaatctggtttcagtgggcagttgggagcaaggaatgaaaggrataagggacaaaatcagagaagtgtgtagttcagaacractggttttgtttttgatcctacaaagtttgtgtgccttgtttkagaggaagatccatggaagatccgtggaaaatattttaagcaacaggtagaacagacaagcacttccagtcatcgggagggggtggacagtaccctccaagcccagcaaccaaaagttaatgcaattactaagtatcaaatgtagagcagagagactaatttgatcagtgaggctgaagggataattcttggagacaaagcaatgcaatgcggaaatg

SEQ ID NO: 88244 - DNA, 600 bp, Chicken  19866894391000_5
cagcaacaygcattgctttttttgttcattctaggratttatgtttttcttgtaaataggtcaatatatattcttggtaaataataattacaatgaaaaacagttytagggtctgatcttgtaaagcagacacactgatgtttctattttctgcatatatatttactattttctgcatttatcctactgtaaaaactagtaatggagcattgtatttaaaaatctggtttcagtgggcagttgggagcaaggaatgaaaggrataagggacaaaatcagagaagtgtgtagttcagaacractggttttgtttttgatcctacaaagtttgtgtgccttgtttkagaggaagatccatggaagatccgtggaaaatattttaagcaacaggtagaacagacaagcacttccagtcatcgggagggggtggacagtaccctccaagcccagcaaccaaaagttaatgcaattactaagtatcaaatgtagagcagagagactaatttgatcagtgaggctgaagggataattcttggagacaaagcaatgcaatgcggaaatgcagcctaatcaactgcttcatcaaaagaaagaggaaac

SEQ ID NO: 88245 - DNA, 600 bp, Chicken  19866894391000_6
ttttcttgtaaataggtcaatatatattcttggtaaataataattacaatgaaaaacagttytagggtctgatcttgtaaagcagacacactgatgtttctattttctgcatatatatttactattttctgcatttatcctactgtaaaaactagtaatggagcattgtatttaaaaatctggtttcagtgggcagttgggagcaaggaatgaaaggrataagggacaaaatcagagaagtgtgtagttcagaacractggttttgtttttgatcctacaaagtttgtgtgccttgtttkagaggaagatccatggaagatccgtggaaaatattttaagcaacaggtagaacagacaagcacttccagtcatcgggagggggtggacagtaccctccaagcccagcaaccaaaagttaatgcaattactaagtatcaaatgtagagcagagagactaatttgatcagtgaggctgaagggataattcttggagacaaagcaatgcaatgcggaaatgcagcctaatcaactgcttcatcaaaagaaagaggaaacaatttccaagccttaactaaaatccccagttggttcttcatctt

SEQ ID NO: 88246 - DNA, 600 bp, Chicken  19866894391004_1
tttttctgattctcccatacatgttatagatgcacttcaggaagaagagaattgagtacattgcaatgtttcaagacataatggagcggagcagatacaccaggcccaagaggtgtccaaaggacaaaaatccacagtcctggctgctcataaccagctgctccctgaaaaacaggtacctgtatactggtatctggcaaagctatcttcagtcactgctcaacaaatctctagtgcacacgtctggtagtgttgaaatgaattgacttctcatttttacttctgtccaatattatgcartctttttgctactgcagtaatgagagcagctccctttccgctcccatcttcggagagcatgaaagtcacatcacaacgaggtgccagttccttcactgtctcctgcaggaccctagaaaaactgaaagaaaagggagagaagagaagaatattctaggagtgcttttctgatctgagaccttagcatttatctactggtgaggaaccataaccttaaccaacatcttccagttgttctcctgagyattcctttcaatttgtttttccttctatacaaaacaagttcctatactctatcag

SEQ ID NO: 88247 - DNA, 600 bp, Chicken  19866894391004_2
ggtagtgttgaaatgaattgacttctcatttttacttctgtccaatattatgcartctttttgctactgcagtaatgagagcagctccctttccgctcccatcttcggagagcatgaaagtcacatcacaacgaggtgccagttccttcactgtctcctgcaggaccctagaaaaactgaaagaaaagggagagaagagaagaatattctaggagtgcttttctgatctgagaccttagcatttatctactggtgaggaaccataaccttaaccaacatcttccagttgttctcctgagyattcctttcaatttgtttttccttctatacaaaacaagttcctatactctatcagattttcatttctgtatttctactttaattttgttcagcaatatatcatacagggctcttgcttttagagactgtggaggaagtacttctcatgcaatggcttaggttggaaggaaccttaaagcccacccagccccaacccctgccgtgggctggctgccccccagcagctcaggctgcccagggccccatccatggcactgagcacctccagggatgcggcacccacagctctgggcagcagtg

SEQ ID NO: 88248 - DNA, 600 bp, Chicken  19866894391013_1
acagacgctggtatgccctgcagcattatggaaatatttctcctctcttgaatattaagggagcttttgcagccagcatttctcccacgggctccttgcctcttcctctttaaagagaatgttcctcggactgctcgggaggtctccttccaccttaattgtgttgtgaagccaagacaaatgttagctctgatggtttctgtcagagaagctaatgagattatttggattgaaactgcaaggggtgttagcgacctgtcaggtagcattgctggaagtgaggggtgctcacccagctgwtcctttggagcacagctttcatctgggcttcatcaccgtattctctataggtcggtctccaggcttttcagataccaggtaattaactgtgtatatcggatgtgttttatccacacactgcaaataagctatatcacagcaaagagtttgtagaaaatcatctccagtgagttcatgatgtctggcattggttttgtgtttgctatacagaaggcctgaacgaatcagtgatcaatactgttttctataattctgtcaggtttatcacacatgggctataaatactcagtgtgagttccc

SEQ ID NO: 88249 - DNA, 600 bp, Chicken  19866894391019_1
atattaaataaagttgagtagtaatgttaggatgacatttagagatccccactagactaggcaccgtacaaactggtgaggaaaggacaattcttgcaccaaagcagtgttgggatcataagtatagaacactacatgcttgagaagtttgatagaaaataagcaggaagattcattcaggaagatgcagtgaacatgaatgtctttcattccctatttataactgcacgaatccttttttaaagttatattactaaaagaaaataggataacatctgagtaagtagttgaagtttaagycagatttagtaatcctttataagccttagatgatttctgaagctattttggtctgcctttgttttttgtggcttttttttttttttttgcatattcctgacatttttcacttgagtattatttgtgatgtgtggcatctggtagagtctcctgactaaaccagctccttgcagatttggctgttgtaatataatgcattgttttggatggaagaactgtaagtcactacagaaaaaaattatttaattttgaactcatacacataatttttatggcatctattgaaggatggtaatttgt

SEQ ID NO: 88250 - DNA, 600 bp, Chicken  19866894391019_2
ggcttttttttttttttttgcatattcctgacatttttcacttgagtattatttgtgatgtgtggcatctggtagagtctcctgactaaaccagctccttgcagatttggctgttgtaatataatgcattgttttggatggaagaactgtaagtcactacagaaaaaaattatttaattttgaactcatacacataatttttatggcatctattgaaggatggtaatttgtttctaactaaatgaaagaagaagtattagtttagctgtttaaactccagggccacttttatagacttayttacatttaatttgttaataattgactttgagagatgcagagaacagtgaatattgtcaagattctcttattgctaaactgatctttcattcgttggagagcagtcaagtatgttatggttaggggagcatatgctatgctgaacttcctggaactttaactgtcatgactgggaaaatatgttgcaatggataagtcaaaacaaagtcacaaatgctgaaaagatcatagaatcacagaatggaagaagttggacaggacatcagaaaagcatctagtccaatgtccctacacaaagca

SEQ ID NO: 88251 - DNA, 599 bp, Chicken  19866894391026_1
  misc_feature (1)..(6): n is any nucleotide
nnnnnnctctctgcagcagtcagaggaggtgagagcttggtactgcagtggtttatttcatgaaaggggggaagatgtgccagaattagaaccttgctggagagaagctgggcagctggcagtgtaagatgtctccgtgccctgtgggggcagggggatagctagagagacaacccagggcaagcagattgtcagacttgtagaaagaagaaaagctgctggtgtttgaacagggaggtgaatgagtaagaagatgtctttcaagaagttgaagctgtctggaggaggaaagtggggggraaaaaagaatgtaaatcctgccaggctaaaggtaaaagccccgtaaggcaggaccaaaaagagagcttgaagaacaacttgtaaaagcgtaaaatcctgcttgctcgttttctgagcacatcagagagaaagcctttaagggtctgtagcagatggaggtatataataagcacttggagaagataaactctaagagaagaaagaagtgactgcctttgtgttcacattcactggggaggaatttaggttagtttccagcttagaaacctgctttctgggggatctgtcagtgaacgttt

SEQ ID NO: 88252 - DNA, 570 bp, Chicken  19866894391035_1
tttgcagccacataaacggattactcctagtccagtgagtatcagtgacctcatggttaactacagcaagtgaagacttctccacctctgcactgtccgaaaatctgaatgctgacagcttccctagctagcatccagcagtccctgcaagtcacctacaggaagtccaagctgaacaagtgtcttcttcatcacactctctgcagtttccacattggacacactgactgtggtggtctagaaaggaaaacagagaaaaaaaatgtaggcagccactaagaatgtacggagatcagttayattgtagcctgaaaatttagcaaaaaagcatcacttatctgtctattgcttgcctttactaaatattcatagaagagtcatgctaatttgaactagaattgaatcactgttgaagatgatatattatgaaaactgttcttagctacttacttatcactgatttattataacagccaaaggcttcaacgagtaaaacaaccaccaccaccaccagaggaactgggtggtgttcagatactgtagtcgatcatattggcacttaactgtaag

SEQ ID NO: 88253 - DNA, 600 bp, Chicken  19866894391037_1
cagaagtgatttcatgtgagtggcatgaatggagagattagtagtcttgaaataattttttttttttttctgtgacagacctttagcattgttttccagggtgatgggaaatgagtggccagtccaaaagcaacaggagcagttataaatatacttctccttccaagccccacagaaaagatggcaagattaacacaaatgcagctgcatgatctttttctcctgtcagtcacccttaatctcctcctatctttggcaggcaggcaaacacaaggatttgaagggccaattcaaagagcrgggtggcgatccattttgcttaactgtaagacagaagctgtgaatgggaagaacactccaaactcttcatgtcacaactgttatgtgatgaaaacagcaaccacctccttgcccagtgaagccttgaattggtgttttcttaagaaagatgttatcagccttgcaaatagaaatgttcatctgttcttgccccagtaacatagcttaacatagttacttcctttgaggctmtcctaatttacagcaaagtcttcaccccaaacatctaagacttttccttgtctaggtttagccatcagc

SEQ ID NO: 88254 - DNA, 499 bp, Chicken  19866894391037_2
acccttaatctcctcctatctttggcaggcaggcaaacacaaggatttgaagggccaattcaaagagcrgggtggcgatccattttgcttaactgtaagacagaagctgtgaatgggaagaacactccaaactcttcatgtcacaactgttatgtgatgaaaacagcaaccacctccttgcccagtgaagccttgaattggtgttttcttaagaaagatgttatcagccttgcaaatagaaatgttcatctgttcttgccccagtaacatagcttaacatagttacttcctttgaggctmtcctaatttacagcaaagtcttcaccccaaacatctaagacttttccttgtctaggtttagccatcagccattccttctctagtcagcagagaaagagagacacctccagaaggcaattcagagagctccttcagatacatttggcctgtcttgctccactaactatatacagagccatggctattactgcggccagta

SEQ ID NO: 88255 - DNA, 591 bp, Chicken  19866894391039_1
aaatccagtagatatatacaaccccaaaaactgaatactgccaactctaagattttgtccttaaataactgcgtactatccttacattgatactgctgtctagcatttgtcatatctacggaagctcagtaattttcaatgctctgttaaaaatacccacagtattattttatgttatactgtgccatgaaaaaaaaaaatcagatgcaaattttccacattataattgctacagcactaaaattccccttgaataaaactcaaaaactgagataaatgaatttcaagcacaagctgatyggtctcagtatggtaactgataaatgaaatttcaaagttggtgtcacgcacaagatcagactatggataactgccctttgtagatttaaaatctatttcctcctacatctgaggaattattaatcctgcacattttgtccaatatttgtattagaatcatttcagaaaacattgtttcagatgcattaaggctttctaattatataagtatacacttaccagagtatcatcactcctagcaacactcatattacttctggacaaaaaggatcttgataatctttggcacaa

SEQ ID NO: 88256 - DNA, 599 bp, Chicken  19866894391040_1
  misc_feature (1)..(84): n is any nucleotide
nnnnnnnnnnnnnnnnnnnnnnnnnnnnnnnnnnnnnnnnnnnnnnnnnnnnnnnnnnnnnnnnnnnnnnnnnnnnnnnnnnnnctgctggttggtggcccttgtaggcagtcactctgccggggttacaaaaacaaaagcaaatcctatatataacagtccaaaaccctaaaagggcttggggaacccattttagggacaaaagatcattatttgttacatgtttatgtaaaatccatgctcatacagttcatattcatccatatacaatggaatgtaattgcagggagcaaaggcctyatttgtcatgaggcatatttatgtgcaggtgggtaacaggaatagcaatgggttggcggggctcagtaacacartgcttcgcaggtatggcaaaaaaacaaacaaaaccacagcaattatcaaggtcagcctgttgttccttggaaaaaagtctttgttagccacmcagagaattaagacagtaccatgtttggcacttgcatgaatacgtactggaaggactactgaaggaagggaatttgttcagtaccaaccaggacagcgatccggggggatgtctgaatgctaccgcagcctga

SEQ ID NO: 88257 - DNA, 599 bp, Chicken  19866894391040_2
  misc_feature (1)..(10): n is any nucleotide
nnnnnnnnnnctgctggttggtggcccttgtaggcagtcactctgccggggttacaaaaacaaaagcaaatcctatatataacagtccaaaaccctaaaagggcttggggaacccattttagggacaaaagatcattatttgttacatgtttatgtaaaatccatgctcatacagttcatattcatccatatacaatggaatgtaattgcagggagcaaaggcctyatttgtcatgaggcatatttatgtgcaggtgggtaacaggaatagcaatgggttggcggggctcagtaacacartgcttcgcaggtatggcaaaaaaacaaacaaaaccacagcaattatcaaggtcagcctgttgttccttggaaaaaagtctttgttagccacmcagagaattaagacagtaccatgtttggcacttgcatgaatacgtactggaaggactactgaaggaagggaatttgttcagtaccaaccaggacagcgatccggggggatgtctgaatgctaccgcagcctgactggctggaaaagctgcaaactgcctaaatgttcacggcctaaatgtgagcaggaaygctgattttcaccgcaw

SEQ ID NO: 88258 - DNA, 600 bp, Chicken  19866894391040_3
ccctaaaagggcttggggaacccattttagggacaaaagatcattatttgttacatgtttatgtaaaatccatgctcatacagttcatattcatccatatacaatggaatgtaattgcagggagcaaaggcctyatttgtcatgaggcatatttatgtgcaggtgggtaacaggaatagcaatgggttggcggggctcagtaacacartgcttcgcaggtatggcaaaaaaacaaacaaaaccacagcaattatcaaggtcagcctgttgttccttggaaaaaagtctttgttagccacmcagagaattaagacagtaccatgtttggcacttgcatgaatacgtactggaaggactactgaaggaagggaatttgttcagtaccaaccaggacagcgatccggggggatgtctgaatgctaccgcagcctgactggctggaaaagctgcaaactgcctaaatgttcacggcctaaatgtgagcaggaaygctgattttcaccgcawataatttacagtaagttattcactcagtgacacgtccaggcrcgcctgttcaaacctttggatattggtaacatcttgcaatctttgccgaat

SEQ ID NO: 88259 - DNA, 600 bp, Chicken  19866894391040_4
cggggctcagtaacacartgcttcgcaggtatggcaaaaaaacaaacaaaaccacagcaattatcaaggtcagcctgttgttccttggaaaaaagtctttgttagccacmcagagaattaagacagtaccatgtttggcacttgcatgaatacgtactggaaggactactgaaggaagggaatttgttcagtaccaaccaggacagcgatccggggggatgtctgaatgctaccgcagcctgactggctggaaaagctgcaaactgcctaaatgttcacggcctaaatgtgagcaggaaygctgattttcaccgcawataatttacagtaagttattcactcagtgacacgtccaggcrcgcctgttcaaacctttggatattggtaacatcttgcaatctttgccgaattttcaaattcacaagcacaagttattcatttattaggggggtyttttccccttccagaatcaaccattttcactgaaggtaagacacagctaacaggtttgaaggagagagttttcacattctttttagaaagaccatttatgaggaaggaaaatctacttttcaaacctatacctaaacttgaaaaagg

SEQ ID NO: 88260 - DNA, 600 bp, Chicken  19866894391040_5
rtgcttcgcaggtatggcaaaaaaacaaacaaaaccacagcaattatcaaggtcagcctgttgttccttggaaaaaagtctttgttagccacmcagagaattaagacagtaccatgtttggcacttgcatgaatacgtactggaaggactactgaaggaagggaatttgttcagtaccaaccaggacagcgatccggggggatgtctgaatgctaccgcagcctgactggctggaaaagctgcaaactgcctaaatgttcacggcctaaatgtgagcaggaaygctgattttcaccgcawataatttacagtaagttattcactcagtgacacgtccaggcrcgcctgttcaaacctttggatattggtaacatcttgcaatctttgccgaattttcaaattcacaagcacaagttattcatttattaggggggtyttttccccttccagaatcaaccattttcactgaaggtaagacacagctaacaggtttgaaggagagagttttcacattctttttagaaagaccatttatgaggaaggaaaatctacttttcaaacctatacctaaacttgaaaaaggacagttgcctaaaacta

SEQ ID NO: 88261 - DNA, 600 bp, Chicken  19866894391040_6
attatcaaggtcagcctgttgttccttggaaaaaagtctttgttagccacmcagagaattaagacagtaccatgtttggcacttgcatgaatacgtactggaaggactactgaaggaagggaatttgttcagtaccaaccaggacagcgatccggggggatgtctgaatgctaccgcagcctgactggctggaaaagctgcaaactgcctaaatgttcacggcctaaatgtgagcaggaaygctgattttcaccgcawataatttacagtaagttattcactcagtgacacgtccaggcrcgcctgttcaaacctttggatattggtaacatcttgcaatctttgccgaattttcaaattcacaagcacaagttattcatttattaggggggtyttttccccttccagaatcaaccattttcactgaaggtaagacacagctaacaggtttgaaggagagagttttcacattctttttagaaagaccatttatgaggaaggaaaatctacttttcaaacctatacctaaacttgaaaaaggacagttgcctaaaactagtcatttgcctactttctcatgctaatgtcctgtttataatt

SEQ ID NO: 88262 - DNA, 566 bp, Chicken  19866894391040_7
gtactggaaggactactgaaggaagggaatttgttcagtaccaaccaggacagcgatccggggggatgtctgaatgctaccgcagcctgactggctggaaaagctgcaaactgcctaaatgttcacggcctaaatgtgagcaggaaygctgattttcaccgcawataatttacagtaagttattcactcagtgacacgtccaggcrcgcctgttcaaacctttggatattggtaacatcttgcaatctttgccgaattttcaaattcacaagcacaagttattcatttattaggggggtyttttccccttccagaatcaaccattttcactgaaggtaagacacagctaacaggtttgaaggagagagttttcacattctttttagaaagaccatttatgaggaaggaaaatctacttttcaaacctatacctaaacttgaaaaaggacagttgcctaaaactagtcatttgcctactttctcatgctaatgtcctgtttataattgacacctttactgcctaccagaatatcaatttcacttccccagagaaagaaaaaccagat

SEQ ID NO: 88263 - DNA, 600 bp, Chicken  19866894391045_1
atgtaatctaagtagagaggattgaagagaataataactacgttttcatctgttgctgagtgtctgatggcctgtgataaatccaaattcacttaacagatctttttttgagcagttgaaactgttaaattatacacccttcaagttaaccatgctccattctgaaaggtcagcagacttgggattcaaggtataagaaaaatgttcttttccttttcagacaggaaactacaggaaagcctgattaggcagtttcttagtggaaaaagaagagaaaagcacttaaaaccaaaacacttragtgctgtcagtgctatttcattgtacaggcattttactgattgtctgaccagatttttctcattcgrtgagctcattgagtttacctggcttgatcaaatagaattacttattctgaacccaaagaaaactgtagtaaggcaggagccaacactgaaaaggacacagcagctttaacatcaggtaacttgacattgtcaagtgttgtaggagtactttatttggaatttgcagttatgagatttctttgaaaagatattgagaagtactacaccagttgtgaatcctattttcccaacg

SEQ ID NO: 88264 - DNA, 600 bp, Chicken  19866894391045_2
ggcctgtgataaatccaaattcacttaacagatctttttttgagcagttgaaactgttaaattatacacccttcaagttaaccatgctccattctgaaaggtcagcagacttgggattcaaggtataagaaaaatgttcttttccttttcagacaggaaactacaggaaagcctgattaggcagtttcttagtggaaaaagaagagaaaagcacttaaaaccaaaacacttragtgctgtcagtgctatttcattgtacaggcattttactgattgtctgaccagatttttctcattcgrtgagctcattgagtttacctggcttgatcaaatagaattacttattctgaacccaaagaaaactgtagtaaggcaggagccaacactgaaaaggacacagcagctttaacatcaggtaacttgacattgtcaagtgttgtaggagtactttatttggaatttgcagttatgagatttctttgaaaagatattgagaagtactacaccagttgtgaatcctattttcccaacgtgctgctgcagttgaaatttccaaatacttgtcagaatgcatttaaaggggagacaggtatgtgctaa

SEQ ID NO: 88265 - DNA, 600 bp, Chicken  19866894391049_1
aaacaacacacagttggcttagctaacataaaagctagttcagtggctgaacagcacattttcaaagatttgcacattgcaaatgcatggtttcattagtacacacacaccatccaaatacataaacaaggcatcccacctcttttctttgctctggctgagtcctagattacaatggtgaagtagtaacatccagagagtgctttgtgtctgtaaataaacccgtgggtgtggtgtgacagcaacagcagagcactggggatggcacaaccaccaaacttggaggccacctggaagccyggcacagctgttgtttactatggatgtcagcaggaaaaatcagctcaatggggaggagggagctcggggcatggggggcaagaggaggcaagctgggggcagagggaggacaccaaggctggccaacactggggcagcactgctggctgctttccatctgaaccaatacctgcatttacagattacccttgaatactttggtttgcaaaaataatcatgtggttcatctccttctttcaattatacctccctttcaagtgcatttcttggtctcatctctttgcagactgttcccatgtt

SEQ ID NO: 88266 - DNA, 599 bp, Chicken  19866894391054_1
  misc_feature (1)..(195): n is any nucleotide
nnnnnnnnnnnnnnnnnnnnnnnnnnnnnnnnnnnnnnnnnnnnnnnnnnnnnnnnnnnnnnnnnnnnnnnnnnnnnnnnnnnnnnnnnnnnnnnnnnnnnnnnnnnnnnnnnnnnnnnnnnnnnnnnnnnnnnnnnnnnnnnnnnnnnnnnnnnnnnnnnnnnnnnnnnnnnnnnnnnnnnnnnnnnnnnnnnncttgtggagtgcaacatcttcggggaggggtctaccttcctccagcttctgtggccaccatgacacaggcctgtactcacctgggtacacagcctgtggccttcwccaacactgggaacagcagcagctgggagaagacagggtcatgaagtcagagtctgagacaacatttttctgccctgcttgcaggctttctcagcagacaaaataaaaagtcagtgaccccacagactgtatccctgcttgcgggatgcccctttccctccatattcaccmagcaggcatgggtttatcatcccttggatggaataaggtactgcttgtgttgctycctgaggagtctggagccatagcacaccctgcaaggacagacgtgcaagcactgaggcaagaagcaggaggct

SEQ ID NO: 88267 - DNA, 599 bp, Chicken  19866894391054_2
  misc_feature (1)..(24): n is any nucleotide
nnnnnnnnnnnnnnnnnnnnnnnncttgtggagtgcaacatcttcggggaggggtctaccttcctccagcttctgtggccaccatgacacaggcctgtactcacctgggtacacagcctgtggccttcwccaacactgggaacagcagcagctgggagaagacagggtcatgaagtcagagtctgagacaacatttttctgccctgcttgcaggctttctcagcagacaaaataaaaagtcagtgaccccacagactgtatccctgcttgcgggatgcccctttccctccatattcaccmagcaggcatgggtttatcatcccttggatggaataaggtactgcttgtgttgctycctgaggagtctggagccatagcacaccctgcaaggacagacgtgcaagcactgaggcaagaagcaggaggctacatcagacagcaagatttgatctctgcagacaccaaggarcactgtctcagagcacagcccaagagcatgatatgcatgcgtacctcagctgctgcctttcctggcagtgaaccagcagaatcagggggtcagagcagctcctggcaaggcccagggagacagaagatgc

SEQ ID NO: 88268 - DNA, 600 bp, Chicken  19866894391054_3
ctaccttcctccagcttctgtggccaccatgacacaggcctgtactcacctgggtacacagcctgtggccttcwccaacactgggaacagcagcagctgggagaagacagggtcatgaagtcagagtctgagacaacatttttctgccctgcttgcaggctttctcagcagacaaaataaaaagtcagtgaccccacagactgtatccctgcttgcgggatgcccctttccctccatattcaccmagcaggcatgggtttatcatcccttggatggaataaggtactgcttgtgttgctycctgaggagtctggagccatagcacaccctgcaaggacagacgtgcaagcactgaggcaagaagcaggaggctacatcagacagcaagatttgatctctgcagacaccaaggarcactgtctcagagcacagcccaagagcatgatatgcatgcgtacctcagctgctgcctttcctggcagtgaaccagcagaatcagggggtcagagcagctcctggcaaggcccagggagacagaagatgctgctggtacatagcccagatataggtaccagaagcattgtctataatactatacta

SEQ ID NO: 88269 - DNA, 600 bp, Chicken  19866894391054_4
atgaagtcagagtctgagacaacatttttctgccctgcttgcaggctttctcagcagacaaaataaaaagtcagtgaccccacagactgtatccctgcttgcgggatgcccctttccctccatattcaccmagcaggcatgggtttatcatcccttggatggaataaggtactgcttgtgttgctycctgaggagtctggagccatagcacaccctgcaaggacagacgtgcaagcactgaggcaagaagcaggaggctacatcagacagcaagatttgatctctgcagacaccaaggarcactgtctcagagcacagcccaagagcatgatatgcatgcgtacctcagctgctgcctttcctggcagtgaaccagcagaatcagggggtcagagcagctcctggcaaggcccagggagacagaagatgctgctggtacatagcccagatataggtaccagaagcattgtctataatactatactacttttattggcctaaacacagcattctagttaagacactgtgtttcacttacatctggtgtttacacaagccagtattctatgccagacaaatcctgcatatttcttcagtaaa

SEQ ID NO: 88270 - DNA, 600 bp, Chicken  19866894391060_1
ttttaaatttcagtggactgctctggcttaacgcattatgttatttttggtgaggatcataaggatgaaaacatttgcctttgtggggctttttttttacatgtcacactttaattcttaatgcccatgagaaaaaaaatggaattaaatcaaaggcacaagatgccaaattcattttaataagagttcactgaaagcctgaaggtgacaaacttcaggaagtgttagggaatatgtgcaagcaaaaggaaacttgtgacttcaataaagaaatctcagcgacatgccctccgaggactytgtaacagcttctccaaagatttataccgtcacrtggcttgagcagaggcatgccgtacagtgagctgcgcgacagtcacatgtaagcactcaaaacagraggatcattctacctgtgatatttccccatgccccagatgtgcagtgtgttggattcccaaccagctctctatacagactttttttagtgaccgctgtatgtttgttagcctttcactgcagctggctcaagctgtgcatgagggagaaaaaattctgtcctgcagttctgctggtgttagattgcatggaaagagagat

SEQ ID NO: 88271 - DNA, 600 bp, Chicken  19866894391060_2
attatgttatttttggtgaggatcataaggatgaaaacatttgcctttgtggggctttttttttacatgtcacactttaattcttaatgcccatgagaaaaaaaatggaattaaatcaaaggcacaagatgccaaattcattttaataagagttcactgaaagcctgaaggtgacaaacttcaggaagtgttagggaatatgtgcaagcaaaaggaaacttgtgacttcaataaagaaatctcagcgacatgccctccgaggactytgtaacagcttctccaaagatttataccgtcacrtggcttgagcagaggcatgccgtacagtgagctgcgcgacagtcacatgtaagcactcaaaacagraggatcattctacctgtgatatttccccatgccccagatgtgcagtgtgttggattcccaaccagctctctatacagactttttttagtgaccgctgtatgtttgttagcctttcactgcagctggctcaagctgtgcatgagggagaaaaaattctgtcctgcagttctgctggtgttagattgcatggaaagagagatttttggcatgtgtagctgtcaactctccacatgg

SEQ ID NO: 88272 - DNA, 548 bp, Chicken  19866894391060_3
atgtcacactttaattcttaatgcccatgagaaaaaaaatggaattaaatcaaaggcacaagatgccaaattcattttaataagagttcactgaaagcctgaaggtgacaaacttcaggaagtgttagggaatatgtgcaagcaaaaggaaacttgtgacttcaataaagaaatctcagcgacatgccctccgaggactytgtaacagcttctccaaagatttataccgtcacrtggcttgagcagaggcatgccgtacagtgagctgcgcgacagtcacatgtaagcactcaaaacagraggatcattctacctgtgatatttccccatgccccagatgtgcagtgtgttggattcccaaccagctctctatacagactttttttagtgaccgctgtatgtttgttagcctttcactgcagctggctcaagctgtgcatgagggagaaaaaattctgtcctgcagttctgctggtgttagattgcatggaaagagagatttttggcatgtgtagctgtcaactctccacatgggaaacattcatgca

SEQ ID NO: 88273 - DNA, 599 bp, Chicken  19866894391062_1
  misc_feature (1)..(15): n is any nucleotide
nnnnnnnnnnnnnnntatatttttgtttcttccaaaatattataaaatgtgaatattctgtatctctcatttcaagctaagagtgaaatgtatatgcggtgcgtgtaagaagtgttaaatatcctcaccttgcaactggatcaacagtcataataattttatccttgaaaatactcaggaaataggaaaaaaaaagcaagcaagcagcaagaataccagacattaaaagtggagaacaataaatgtacattcaatacaacaagatttcagttagcgtatattttcccaaattggtttcaygcacagtaatactcacagatgttatttacaggaatctaagtaatattgtttctttgctgcgtttagttgtcactgaggtgctgtataagagaaattacactgctggttattaagagtgacaagattttctgtgtaatctatttttggacaaataaagctgtattccctgatttgtatttcgttgtataatttattgctttttatttaccagaagaattagtcttgaagagcttctgataaaatatacggtgactttgagaaatcttacatacagaaagttaaagaacacagttttaaaa

SEQ ID NO: 88274 - DNA, 599 bp, Chicken  19866894391070_1
  misc_feature (1)..(126): n is any nucleotide
nnnnnnnnnnnnnnnnnnnnnnnnnnnnnnnnnnnnnnnnnnnnnnnnnnnnnnnnnnnnnnnnnnnnnnnnnnnnnnnnnnnnnnnnnnnnnnnnnnnnnnnnnnnnnnnnnnnnnnnnnnnnnnttagggttttttgaagtagttcaattgtccaaattgaagactagcctgaaggatgcttgaaggaagaagactcaagtttgcctttgaaatttttattccagttgtcattccttttctccatatattaaaccaccacccaccaaaaaacacagaaatgatcagtcatatttcttmtgtggaaaacaaatgatattaaaagtgtagttatttgagaaggaaaagaagtttcagctttgatgccatttgggatgaatgatgtcactaaatgcatgagcatccctcagtcctggtactagactcatggtttgtctttgtcttaacttgatctgtcacrtaagcagaagaaacattcagttttatggtatgatatttttttggttttrttcctctctgcagattttgcagtagccacttgtgtttccttttctgtagctatgtccttagaggaaaagccaaacacaccagtgctttat

SEQ ID NO: 88275 - DNA, 600 bp, Chicken  19866894391070_2
tgaagactagcctgaaggatgcttgaaggaagaagactcaagtttgcctttgaaatttttattccagttgtcattccttttctccatatattaaaccaccacccaccaaaaaacacagaaatgatcagtcatatttcttmtgtggaaaacaaatgatattaaaagtgtagttatttgagaaggaaaagaagtttcagctttgatgccatttgggatgaatgatgtcactaaatgcatgagcatccctcagtcctggtactagactcatggtttgtctttgtcttaacttgatctgtcacrtaagcagaagaaacattcagttttatggtatgatatttttttggttttrttcctctctgcagattttgcagtagccacttgtgtttccttttctgtagctatgtccttagaggaaaagccaaacacaccagtgctttatgatatatctactgaattaaattagctatgaccagaattaagttttgctctgcctagcttcatgctcattaggtagaaatactcttctagcttctttaggtctggtgcaggatctttggatgcctttttcttccactgttgctatagaagttcatgcctttt

SEQ ID NO: 88276 - DNA, 600 bp, Chicken  19866894391070_3
ttgaaatttttattccagttgtcattccttttctccatatattaaaccaccacccaccaaaaaacacagaaatgatcagtcatatttcttmtgtggaaaacaaatgatattaaaagtgtagttatttgagaaggaaaagaagtttcagctttgatgccatttgggatgaatgatgtcactaaatgcatgagcatccctcagtcctggtactagactcatggtttgtctttgtcttaacttgatctgtcacrtaagcagaagaaacattcagttttatggtatgatatttttttggttttrttcctctctgcagattttgcagtagccacttgtgtttccttttctgtagctatgtccttagaggaaaagccaaacacaccagtgctttatgatatatctactgaattaaattagctatgaccagaattaagttttgctctgcctagcttcatgctcattaggtagaaatactcttctagcttctttaggtctggtgcaggatctttggatgcctttttcttccactgttgctatagaagttcatgccttttccttttgttgggcttcagtgaaagtacaaatgatgaaaaatacaaaatc

SEQ ID NO: 88277 - DNA, 600 bp, Chicken  19866894391071_1
tgtgattgcaacttggttttagcttcaggtgcatctttaactatgttttagatgcagaactgtattattccttcaggagatatctgaagttaggagtgcagtccttgattttaaaaggtttaagtgaaggttgaaacaggaatttccattactaaacttgttaaatattgatataaatatctgttatccatcacgtccatattttatgcagtcagactgacaggcatcgcacaggtatctgcctacagccagcagtgacaaaacctctacccatcccagtgtagagtgcattaccagtgrgtcacacctgatctctcattgctcctgagaggaaaaggatgatcctcaagrtgatgactttttgtcattcaagccrttccatgtgttccatggctgcggagaacattcagagcactgtgtgctgtgggttccctcattcccaggactgctcacactggggcaggttgacaccactggggagaggacagagccgaggggaaggaggataagggggccttgtgcctaagctgttttcattggacaggttttatagcaaattttatttttcaaggagtttgctgaattttgcttggatgttct

SEQ ID NO: 88278 - DNA, 600 bp, Chicken  19866894391071_2
atgcagaactgtattattccttcaggagatatctgaagttaggagtgcagtccttgattttaaaaggtttaagtgaaggttgaaacaggaatttccattactaaacttgttaaatattgatataaatatctgttatccatcacgtccatattttatgcagtcagactgacaggcatcgcacaggtatctgcctacagccagcagtgacaaaacctctacccatcccagtgtagagtgcattaccagtgrgtcacacctgatctctcattgctcctgagaggaaaaggatgatcctcaagrtgatgactttttgtcattcaagccrttccatgtgttccatggctgcggagaacattcagagcactgtgtgctgtgggttccctcattcccaggactgctcacactggggcaggttgacaccactggggagaggacagagccgaggggaaggaggataagggggccttgtgcctaagctgttttcattggacaggttttatagcaaattttatttttcaaggagtttgctgaattttgcttggatgttcttcagctyttcagctctgtttttctcctctcccatgttgccctcttttttaa

SEQ ID NO: 88279 - DNA, 600 bp, Chicken  19866894391071_3
gagatatctgaagttaggagtgcagtccttgattttaaaaggtttaagtgaaggttgaaacaggaatttccattactaaacttgttaaatattgatataaatatctgttatccatcacgtccatattttatgcagtcagactgacaggcatcgcacaggtatctgcctacagccagcagtgacaaaacctctacccatcccagtgtagagtgcattaccagtgrgtcacacctgatctctcattgctcctgagaggaaaaggatgatcctcaagrtgatgactttttgtcattcaagccrttccatgtgttccatggctgcggagaacattcagagcactgtgtgctgtgggttccctcattcccaggactgctcacactggggcaggttgacaccactggggagaggacagagccgaggggaaggaggataagggggccttgtgcctaagctgttttcattggacaggttttatagcaaattttatttttcaaggagtttgctgaattttgcttggatgttcttcagctyttcagctctgtttttctcctctcccatgttgccctcttttttaacccttcacattaaaakcttaaaagg

SEQ ID NO: 88280 - DNA, 600 bp, Chicken  19866894391071_4
ctgatctctcattgctcctgagaggaaaaggatgatcctcaagrtgatgactttttgtcattcaagccrttccatgtgttccatggctgcggagaacattcagagcactgtgtgctgtgggttccctcattcccaggactgctcacactggggcaggttgacaccactggggagaggacagagccgaggggaaggaggataagggggccttgtgcctaagctgttttcattggacaggttttatagcaaattttatttttcaaggagtttgctgaattttgcttggatgttcttcagctyttcagctctgtttttctcctctcccatgttgccctcttttttaacccttcacattaaaakcttaaaaggctcttcttcctttatctgccttcatttatcttttatttcagtctttccttctccattttgctaccaaraaaatggaaacccccatacaactgcatttccagtcccacaaaaataaaccacccaatttgtcttaagatttgtagggctcagttctatcagtggttctccccaggaattatttgctagcagtagttatacagagtacatcaaagcgcctttcagagagtagta

SEQ ID NO: 88281 - DNA, 600 bp, Chicken  19866894391071_5
ttcaagccrttccatgtgttccatggctgcggagaacattcagagcactgtgtgctgtgggttccctcattcccaggactgctcacactggggcaggttgacaccactggggagaggacagagccgaggggaaggaggataagggggccttgtgcctaagctgttttcattggacaggttttatagcaaattttatttttcaaggagtttgctgaattttgcttggatgttcttcagctyttcagctctgtttttctcctctcccatgttgccctcttttttaacccttcacattaaaakcttaaaaggctcttcttcctttatctgccttcatttatcttttatttcagtctttccttctccattttgctaccaaraaaatggaaacccccatacaactgcatttccagtcccacaaaaataaaccacccaatttgtcttaagatttgtagggctcagttctatcagtggttctccccaggaattatttgctagcagtagttatacagagtacatcaaagcgcctttcagagagtagtaatactcagcatctgcttgaagaacattcatctgttggcaaaatgaatgcagaacaggaga

SEQ ID NO: 88282 - DNA, 600 bp, Chicken  19866894391071_6
actgctcacactggggcaggttgacaccactggggagaggacagagccgaggggaaggaggataagggggccttgtgcctaagctgttttcattggacaggttttatagcaaattttatttttcaaggagtttgctgaattttgcttggatgttcttcagctyttcagctctgtttttctcctctcccatgttgccctcttttttaacccttcacattaaaakcttaaaaggctcttcttcctttatctgccttcatttatcttttatttcagtctttccttctccattttgctaccaaraaaatggaaacccccatacaactgcatttccagtcccacaaaaataaaccacccaatttgtcttaagatttgtagggctcagttctatcagtggttctccccaggaattatttgctagcagtagttatacagagtacatcaaagcgcctttcagagagtagtaatactcagcatctgcttgaagaacattcatctgttggcaaaatgaatgcagaacaggagattaaagctaataagggaaaatctgcagcaaaatgcagggggacacacagttgggtgttggtgttcagatggcgcggg

SEQ ID NO: 88283 - DNA, 600 bp, Chicken  19866894391072_1
atcaggttcaagaaagcaaagtgcaaggttttgcacttggatcaaggtaatcccagatatgtatataaacctggagaagaaatccttgagagtagcccaactgagaaggactttaggggtcctggttgatgaaaaacttaacacgagccaacagtgtgggcatgcagccaggaaggccagtggtatcctaggttccataggagtggtcagcagggcaatggaggtgattgtttctcctctattctgcccttgtgttgccccagctggagtactgtgcccaagtctggggcctctaacacrggaaagaagtggagcttttggagggggtcctgtggaggaccacaaagatgatcaaaggcctggagcacttcttctatgaggacaggaactggggttgttcagcttggaaaagagaaatctgtgaggagaactctagtttcctatatttaaagggaatttataaatgtaagggaaatcaattttttacaaggctagatagtgataggacaaggaggaatggttttaaactaaaggaggggagatttagattaaatgtcaggggcaagttttttactgagggtgatcaggtgctggtacagg

SEQ ID NO: 88284 - DNA, 600 bp, Chicken  19866894391072_2
tgagggtgatcaggtgctggtacaggttgtccagagaggctgtgaaatccttgccccaggaggttttcaaggccaggttggatggagccctggggaatccaatctagtacttgatctagtgggtggcaacatgcctgtggcagaggagttggaacttgatgatccttccaacccaagattttctgtgattcttgcttgaaaagtttgttttctattgtttctgtgttaatgtaaaaggaattagacttgaaattgtgtgacaataaaaacctgtaggtgatcaacattatcttgataaamaaccttgattcacaagaatttgaccatctgtgcactgctgtatgagttatgcaagattgatcttgttagtctattccatctgtattgcttttaggagatgctccttttccagtgaggtaaatatagcatatctctaatcctaaactggacaattcagccaggtggtgaagctacctggggcaattcagggcacgtggaaatagtgtgcagaattgcaaagaacctgaaattttcagtcagcattttctatgaagtattttggtattttgccaaatattttttatcataaatcttgttctt

SEQ ID NO: 88285 - DNA, 600 bp, Chicken  19866894391073_1
gtccaacagaagtggtggtgccccacccctggaggcacccaagctcaggctggaggggctctgagcacctgatggagcgggggagatctctgttcattgcagggagtgggaccagatggcccttccaactcaaaccattctgtggtgactgcagtgcaaatgaaggtaggactgtgtgtgctgtctgattttgctgcagaagtagccctgagctcttgacaagcacagagctggtgcagagagcagcctgacctcgtggccacagccctatgaatgagcagatcatcagcccacaccacraagggagctgtgcttcaagcacaaaggaaaaasaaatcaaaaaatcccacatctattggcaaggctgttgagaaatcccctctgttgcaatggttttgaaacctcatgtcaggatgcaaacaaaggcagtgtggcagctgtcatcaaccagattgctgcctggggattcccaaatgcagttcctgctgatttgctctgatgctccaagtgctgccccagggatggagctttcctacagtgcatccccctctgcttcagcccttcagctgaaggaaaacagccttccatagcagcagaagg

SEQ ID NO: 88286 - DNA, 600 bp, Chicken  19866894391073_2
ggcacccaagctcaggctggaggggctctgagcacctgatggagcgggggagatctctgttcattgcagggagtgggaccagatggcccttccaactcaaaccattctgtggtgactgcagtgcaaatgaaggtaggactgtgtgtgctgtctgattttgctgcagaagtagccctgagctcttgacaagcacagagctggtgcagagagcagcctgacctcgtggccacagccctatgaatgagcagatcatcagcccacaccacraagggagctgtgcttcaagcacaaaggaaaaasaaatcaaaaaatcccacatctattggcaaggctgttgagaaatcccctctgttgcaatggttttgaaacctcatgtcaggatgcaaacaaaggcagtgtggcagctgtcatcaaccagattgctgcctggggattcccaaatgcagttcctgctgatttgctctgatgctccaagtgctgccccagggatggagctttcctacagtgcatccccctctgcttcagcccttcagctgaaggaaaacagccttccatagcagcagaaggggttcctctccccaaggtgccaaactgtgctga

SEQ ID NO: 88287 - DNA, 600 bp, Chicken  19866894391077_1
ttgcaaggctgttgatttaatcttatcaaggatcaggacatgcattccaggagtggaatattttttcagttttacatttgacagcagcaaatctccttcaccaaaccagctggcaaattttaaaaagttacagaagttcgcattcagagattttgaacccgtttgtttagggaactaatcccatgtgagattttctgccacagataaggagcttttatgaaccaaaggtaacgtgaaggggtaaagaactcaagcgtctcttctagaccaaagatccaaatgacaaaccctttgcccagytttcagcaggtgacctgtatgctacaactctactcaattcatgctgttatgtacaaaattagacaagagcagctgattcttcagttcaggttcctttactactgagatgttaccacccataacacaaaagtgtgatatttaaaatagatacaggctccagaataagttatacatctcagaatgcttcctcttaaatcccacacagcgccggagagaacatgcctaatgcagccctttgcacactgcttttggctcaatttgacaaggaaactttaacgtaactgttatagcaataggtat

SEQ ID NO: 88288 - DNA, 600 bp, Chicken  19866894391082_1
gcatctctaaccttaatctaaaggggacctgagcagttccacatctgtcatgagatttgctccctgtgggcactgcaatgagcaagatccataacctatggatgaaaaagtgaagcttagcttggcttcttcagttccccagacatcatcctaggaagatgcagcccagttggctgcacataaggctgggactctatccatatgcctctcctggctacagaccttatcagctgctctctgcagtggtttcttctcacctacttgactgcctcactcttgacagttacagttctgttacarttcagcaaacaaccacatcaacatcttgacttcaaagrcaagctagatctttactgcataacatacagtctcttttcaatgaggaaacragtgagaaaaccacattttgccctatctttcacaccactatgtttcctttttcaaataaggccacaacaaaacaagttattgaacagccgtcaccttgactatggtctccctcacaaaaacaggcaacctctgtaatgcagcagacatgccacaagccttgagtacatcaaggtttctgtgcttctagctaggagaagaagcgcaacattg

SEQ ID NO: 88289 - DNA, 600 bp, Chicken  19866894391082_2
ccacatctgtcatgagatttgctccctgtgggcactgcaatgagcaagatccataacctatggatgaaaaagtgaagcttagcttggcttcttcagttccccagacatcatcctaggaagatgcagcccagttggctgcacataaggctgggactctatccatatgcctctcctggctacagaccttatcagctgctctctgcagtggtttcttctcacctacttgactgcctcactcttgacagttacagttctgttacarttcagcaaacaaccacatcaacatcttgacttcaaagrcaagctagatctttactgcataacatacagtctcttttcaatgaggaaacragtgagaaaaccacattttgccctatctttcacaccactatgtttcctttttcaaataaggccacaacaaaacaagttattgaacagccgtcaccttgactatggtctccctcacaaaaacaggcaacctctgtaatgcagcagacatgccacaagccttgagtacatcaaggtttctgtgcttctagctaggagaagaagcgcaacattgtttcagccttgcccttatacaatacattcactgagcat

SEQ ID NO: 88290 - DNA, 600 bp, Chicken  19866894391082_3
cataacctatggatgaaaaagtgaagcttagcttggcttcttcagttccccagacatcatcctaggaagatgcagcccagttggctgcacataaggctgggactctatccatatgcctctcctggctacagaccttatcagctgctctctgcagtggtttcttctcacctacttgactgcctcactcttgacagttacagttctgttacarttcagcaaacaaccacatcaacatcttgacttcaaagrcaagctagatctttactgcataacatacagtctcttttcaatgaggaaacragtgagaaaaccacattttgccctatctttcacaccactatgtttcctttttcaaataaggccacaacaaaacaagttattgaacagccgtcaccttgactatggtctccctcacaaaaacaggcaacctctgtaatgcagcagacatgccacaagccttgagtacatcaaggtttctgtgcttctagctaggagaagaagcgcaacattgtttcagccttgcccttatacaatacattcactgagcatccataggattaaggctttttgttttgttaagagataaggagcacctgggta

SEQ ID NO: 88291 - DNA, 600 bp, Chicken  19866894391096_1
aatcctgttactgtttatacaaaagagccttttcaagcctatggttactatctttcatacataacttagcagatcaactttgatagggacccctgacaattttcacatatacagtgatgcaatttggagttacttaatatagaccaacagttgcaaaactgagtagaaagtctacctataaagcaaatgagccaatggtcctgaccaatggtcaggtctacacccacagtcctccgctttgctgctacttctcttatgtctccccattaagcccaaaaaatgttgagaacagaattctgraagtcacagcaattccatgcatcttcccgcagatgtaaaacctgtagtatgttataggtatctgaaactccgtaacagaagatttaagaaacgatgctatattctayggggctttcaaaggcctctttccaatgccccaacttgttgtactaaatatgctacgtacttccatttccataagcacagaattaccagatgacaagtgatatgctgtgcacttaatctatacatagagtcaactctaagctcccttctgttagcatgaaaagttttaagagattttacccaacatccaaatgt

SEQ ID NO: 88292 - DNA, 600 bp, Chicken  19866894391096_2
tatacagtgatgcaatttggagttacttaatatagaccaacagttgcaaaactgagtagaaagtctacctataaagcaaatgagccaatggtcctgaccaatggtcaggtctacacccacagtcctccgctttgctgctacttctcttatgtctccccattaagcccaaaaaatgttgagaacagaattctgraagtcacagcaattccatgcatcttcccgcagatgtaaaacctgtagtatgttataggtatctgaaactccgtaacagaagatttaagaaacgatgctatattctayggggctttcaaaggcctctttccaatgccccaacttgttgtactaaatatgctacgtacttccatttccataagcacagaattaccagatgacaagtgatatgctgtgcacttaatctatacatagagtcaactctaagctcccttctgttagcatgaaaagttttaagagattttacccaacatccaaatgtacttcttattagaccttattttttgaagttgctgatgcctgacaatcctttttataaaaactgatgtttatgaaacattccatgcatcacttcaagctaactgtatt

SEQ ID NO: 88293 - DNA, 600 bp, Chicken  19866894391108_1
cactcaaagcaggacatactctgtgttcgtagataccatagcagtaaatcctttagcatgttaaagattctggcatcaaagagcaagtctgtgtcacatggcagtactggcaggcttacaggccataccacttcagcataaacatgctgtccaaataaatagctgcaaagaagtcagttgatttctattctctgtcagtcattttctcatgacagctgaaacagcaccactgatagctctgtagaaggtccaaagcagaattatacccatccaatgccagctgctcacatgcaatagctrctctgtttcttatgacaacaataacctgtgcgtactgtagctaaggcactggaatgccattcgtttgggatccctgccaagcactatgggaaaacagagcacctgatacccttatagaggaaaagctttggaggattccaccagctgtattaacccattaggagctttctgkacacwctgtctcgatattctccaaaggagagtgaaagctacagcaacacatgtgactttcagaattaaacagtattgaagaggtgtaaagggtggaagtctcagagaacgttatttagtcagtcacag

SEQ ID NO: 88294 - DNA, 600 bp, Chicken  19866894391108_2
gtcagttgatttctattctctgtcagtcattttctcatgacagctgaaacagcaccactgatagctctgtagaaggtccaaagcagaattatacccatccaatgccagctgctcacatgcaatagctrctctgtttcttatgacaacaataacctgtgcgtactgtagctaaggcactggaatgccattcgtttgggatccctgccaagcactatgggaaaacagagcacctgatacccttatagaggaaaagctttggaggattccaccagctgtattaacccattaggagctttctgkacacwctgtctcgatattctccaaaggagagtgaaagctacagcaacacatgtgactttcagaattaaacagtattgaagaggtgtaaagggtggaagtctcagagaacgttatttagtcagtcacagcagatagtcagatcctgggtttcctgaactatacaactgcaccagaaaaatgcaggataaattctgctgtgttcccatgctcctcccataagaactgccaagcaaggtatccaattttagcagcctgtgttacatgctaccttgactcaaaggaagatgtgaaactctcact

SEQ ID NO: 88295 - DNA, 600 bp, Chicken  19866894391108_3
ttgatttctattctctgtcagtcattttctcatgacagctgaaacagcaccactgatagctctgtagaaggtccaaagcagaattatacccatccaatgccagctgctcacatgcaatagctrctctgtttcttatgacaacaataacctgtgcgtactgtagctaaggcactggaatgccattcgtttgggatccctgccaagcactatgggaaaacagagcacctgatacccttatagaggaaaagctttggaggattccaccagctgtattaacccattaggagctttctgkacacwctgtctcgatattctccaaaggagagtgaaagctacagcaacacatgtgactttcagaattaaacagtattgaagaggtgtaaagggtggaagtctcagagaacgttatttagtcagtcacagcagatagtcagatcctgggtttcctgaactatacaactgcaccagaaaaatgcaggataaattctgctgtgttcccatgctcctcccataagaactgccaagcaaggtatccaattttagcagcctgtgttacatgctaccttgactcaaaggaagatgtgaaactctcactaaaga

SEQ ID NO: 88296 - DNA, 599 bp, Chicken  19866894391115_1
  misc_feature (1)..(252): n is any nucleotide
nnnnnnnnnnnnnnnnnnnnnnnnnnnnnnnnnnnnnnnnnnnnnnnnnnnnnnnnnnnnnnnnnnnnnnnnnnnnnnnnnnnnnnnnnnnnnnnnnnnnnnnnnnnnnnnnnnnnnnnnnnnnnnnnnnnnnnnnnnnnnnnnnnnnnnnnnnnnnnnnnnnnnnnnnnnnnnnnnnnnnnnnnnnnnnnnnnnnnnnnnnnnnnnnnnnnnnnnnnnnnnnnnnnnnnnnnnnnnnnnnnnnnnnnnnnntaagtgctgaatctagttttgtttccttatgttttatagagcaccttkccggataaatcaggcatccaaatagtcatcttctggaaggaaggaaggaagggggaggggttgttctgtttctaacctccattctgttatgagatttgtgcacttattgaatttgtttctctgtgctgttttgtttttgcctccctgccttcctggtgggctgcgggcaccaggcagtctgtaaatagcacaagtcaatactggctcaccactgtaacaatctgggcttgtaaggcagagactgggtcagcaagggcttcttattaaatgtgtggagaagtagatcagctggtgtgaag

SEQ ID NO: 88297 - DNA, 553 bp, Chicken  19866894391115_2
atttgtttctctgtgctgttttgtttttgcctccctgccttcctggtgggctgcgggcaccaggcagtctgtaaatagcacaagtcaatactggctcaccactgtaacaatctgggcttgtaaggcagagactgggtcagcaagggcttcttattaaatgtgtggagaagtagatcagctggtgtgaagaagcactagtgcaagccatgtttaaacagtgttgatctagtggccgtctgagacttgagtgcaattcttagctttgatctttgtctgtggtgctatgtagcttgttcatgyaatgtgctcagctgccagcagcagcctttgctgcagccgtggggctgatagctactggcactagctgggtgcagcctattgtcatggtgagatatgtttgctgagttgattctgcttttataggcgagtcctgaagtaagtaagatgtgggaggtgtcttctattattttgtgaaaactcagttgaagttgatttttgttccttttctttctggaactacctattattgaaataaagatggtctttaaagtgg

SEQ ID NO: 88298 - DNA, 600 bp, Chicken  19866894391118_1
gtacctgaaggggacctacaggaaagctggggagggacttcttataaagacatgtagcaaccatatgaggggaaatggcttcaaactgtaagagagtagatttagactagatattaggaagaaattctttactgtgagggtggtgaacactggaacaggttgcccagagaggctgtggatgctccaaccatagaggtattccaggccaggctggatggggcgttgagcagtctggtctagagggaggtgaccctgcctatggcagcagggttggaactacatgatcttaaaggacccttycaacccaaatcattctatgattctgtgatcagtgggtctgtttctatcaaagggaaaaggtacatggcttcacctctccctaagtgccctccttttctcctatcttccaaargcagtaagatggtctagctcaaacaagttctataaaaagcatcaaaagagaggacctcgtgcagtttgaacatcacagggacaggtaagtttcaacagcagaagattscagtaacttccagaaaactgaactatttccaaaarctcttcaacaagcagatgagtggcagcctctggctcagaactgct

SEQ ID NO: 88299 - DNA, 600 bp, Chicken  19866894391118_2
attaggaagaaattctttactgtgagggtggtgaacactggaacaggttgcccagagaggctgtggatgctccaaccatagaggtattccaggccaggctggatggggcgttgagcagtctggtctagagggaggtgaccctgcctatggcagcagggttggaactacatgatcttaaaggacccttycaacccaaatcattctatgattctgtgatcagtgggtctgtttctatcaaagggaaaaggtacatggcttcacctctccctaagtgccctccttttctcctatcttccaaargcagtaagatggtctagctcaaacaagttctataaaaagcatcaaaagagaggacctcgtgcagtttgaacatcacagggacaggtaagtttcaacagcagaagattscagtaacttccagaaaactgaactatttccaaaarctcttcaacaagcagatgagtggcagcctctggctcagaactgctccttaatgcatatccctcacccctttaaaattcagtgttatctagtacaccaggagagttcagccccataagctctcaggagcatggctgagtctggtttcaagctcatctg

SEQ ID NO: 88300 - DNA, 600 bp, Chicken  19866894391118_3
cgttgagcagtctggtctagagggaggtgaccctgcctatggcagcagggttggaactacatgatcttaaaggacccttycaacccaaatcattctatgattctgtgatcagtgggtctgtttctatcaaagggaaaaggtacatggcttcacctctccctaagtgccctccttttctcctatcttccaaargcagtaagatggtctagctcaaacaagttctataaaaagcatcaaaagagaggacctcgtgcagtttgaacatcacagggacaggtaagtttcaacagcagaagattscagtaacttccagaaaactgaactatttccaaaarctcttcaacaagcagatgagtggcagcctctggctcagaactgctccttaatgcatatccctcacccctttaaaattcagtgttatctagtacaccaggagagttcagccccataagctctcaggagcatggctgagtctggtttcaagctcatctgactgccactgatgttacaggatggtccatgcactaagactgtgtacgataaccacaaaataccacagaattcagacttcttagagccacgcaattcacagaattaatt

SEQ ID NO: 88301 - DNA, 600 bp, Chicken  19866894391118_4
cctatggcagcagggttggaactacatgatcttaaaggacccttycaacccaaatcattctatgattctgtgatcagtgggtctgtttctatcaaagggaaaaggtacatggcttcacctctccctaagtgccctccttttctcctatcttccaaargcagtaagatggtctagctcaaacaagttctataaaaagcatcaaaagagaggacctcgtgcagtttgaacatcacagggacaggtaagtttcaacagcagaagattscagtaacttccagaaaactgaactatttccaaaarctcttcaacaagcagatgagtggcagcctctggctcagaactgctccttaatgcatatccctcacccctttaaaattcagtgttatctagtacaccaggagagttcagccccataagctctcaggagcatggctgagtctggtttcaagctcatctgactgccactgatgttacaggatggtccatgcactaagactgtgtacgataaccacaaaataccacagaattcagacttcttagagccacgcaattcacagaattaattcactaataggcaaataacttaccaggggaatttta

SEQ ID NO: 88302 - DNA, 599 bp, Chicken  19866894391121_1
  misc_feature (1)..(34): n is any nucleotide
nnnnnnnnnnnnnnnnnnnnnnnnnnnnnnnnnnattatatttaaagtaggaggttaaaaaaccccaaaactaaactaaatggcatgaactgactgatgttaaaattgagtagctacctagagttgtctcttcctcctgtgatatgtctagcaggctttgttttaaaggatggggaaagcctatattatcaaagattactgaaatgcttttgtggtttgtttcttttgttgaaatggcttttatgtttatgttgaaagtaagcaaaaactgacttaaaaactaagatacctgacttgcgrggtttagcatttattagatattgcatacaatactattgattaatgacactttatagcattgttggtactcttgtagagcatttcagcagaacagcattttaacaggccaatattctgtgagataacgtaagttagctcagcaactagtgtaagttgctgggggaaaaagaaaggaacctatataacttactcatctgtctttccaacgaatctttacttggaagcagtattaaaaatactgtaactttaagtagctacactattcaggctattttccaaacattgcactaggcttctgg

SEQ ID NO: 88303 - DNA, 599 bp, Chicken  19866894391124_1
  misc_feature (1)..(78): n is any nucleotide
nnnnnnnnnnnnnnnnnnnnnnnnnnnnnnnnnnnnnnnnnnnnnnnnnnnnnnnnnnnnnnnnnnnnnnnnnnnnnnttctgccgtacggaaaacgaaacgtgaaaagatggagacctgttacggaatgattcactcagctcagaccagtctgaatctgtcagacctccaccaccaaagccccataaaacaaaaaaaggaggtaaaatgcgccaggtttcattaagtagctcagaagaagaattggcatctactccagagtacacaagttgtgatgacgtggagattgaaagtgaaagygttagtgaaaaaggtaagatttctaattttttactagttctacatatatggaatgaggttcaagttccagaccattatgtttattttacattagaattggttgtaaacacacatttacagccctttgtatatgacttaagtttgttgtgatggagttgagtttttcttattttttatttacatggaaaagaacatctcagctactagaagtatttggatatatttaaggaaaatacttgcccactgaaaaatctgttagttacatcaatacagtatcaaaagctgagctgtcatatagg

SEQ ID NO: 88304 - DNA, 600 bp, Chicken  19866894391127_1
gtagtccactgaaaggaatcacctgctggggaaagtaggaaactcgaaaaaatgaaatatgatccagtagaaaaggctgaatgtctgcataaataaaaataatttacaaacatgactaacatctgagttttaatgagcaatggaaaatattttttagcgatgcttattaggcttacctagattttggttttttcaacaaaaataacttatattttgagtctgtctgaatgatacctgctggtgtaactgtggttcatactgataagtgatgagaaaagacctggctttgtgttcacctgyctataatttggaggaggctattttcagtcactctayaggggaaaaaaactcctattcataacatctgcagagctcatcctgctgcttcagaggaacagaaacttgaatttcagaagtaactgcctgttttcctaacagaaaatgaaacacaagtcaaaaagcaaggcatgacaaaaatgttttcatttaaaaaagaaaatggaatacacacaaacacacgcaacatttgcacatcccgttgttttacctaccatagattcactaataagtagcaacagtaaggcttcttctgtgttttct

SEQ ID NO: 88305 - DNA, 600 bp, Chicken  19866894391127_2
aggaaactcgaaaaaatgaaatatgatccagtagaaaaggctgaatgtctgcataaataaaaataatttacaaacatgactaacatctgagttttaatgagcaatggaaaatattttttagcgatgcttattaggcttacctagattttggttttttcaacaaaaataacttatattttgagtctgtctgaatgatacctgctggtgtaactgtggttcatactgataagtgatgagaaaagacctggctttgtgttcacctgyctataatttggaggaggctattttcagtcactctayaggggaaaaaaactcctattcataacatctgcagagctcatcctgctgcttcagaggaacagaaacttgaatttcagaagtaactgcctgttttcctaacagaaaatgaaacacaagtcaaaaagcaaggcatgacaaaaatgttttcatttaaaaaagaaaatggaatacacacaaacacacgcaacatttgcacatcccgttgttttacctaccatagattcactaataagtagcaacagtaaggcttcttctgtgttttcttgaggacaaaagatgctgttcaaaacaaaaatttaa

SEQ ID NO: 88306 - DNA, 600 bp, Chicken  19866894391127_3
catagaatcacaaggttggaaaggacctacaaagatcatctagaccaaccatcctcctatcgctattactacccacatacaataagaaaacaaaacaaccatggctgtcaagtgttaaacacatccaaatatccccaaatttagtataacttgacaactatgaaagtacagcctgtggtttaactagctgttggcatctagctatctgaactgaacctgcatcactgattcaaaggtcagcaacaagaaactctcagaggagaaaactgaaggaaagtgtaatagatctataaaatcatraatgatattcttcaaacatcattcactgtcctcaaaagaactgaatgcatttaaataaytaattagggactgtatttaaaacaaaccaggacatttctgactcaaaagctggaggtcaggggaacacrtagaaagaagtctcctttaagtatgtcttgctatttgttgtcttaggtacttgcttttcatcactgttggagatgaggtactaagctagacacactgtctgatctggtattaatcactttgatgtgaccaaagaaaagcacttaattacacgctctgctgaaattgtggaac

SEQ ID NO: 88307 - DNA, 600 bp, Chicken  19866894391127_4
tcgctattactacccacatacaataagaaaacaaaacaaccatggctgtcaagtgttaaacacatccaaatatccccaaatttagtataacttgacaactatgaaagtacagcctgtggtttaactagctgttggcatctagctatctgaactgaacctgcatcactgattcaaaggtcagcaacaagaaactctcagaggagaaaactgaaggaaagtgtaatagatctataaaatcatraatgatattcttcaaacatcattcactgtcctcaaaagaactgaatgcatttaaataaytaattagggactgtatttaaaacaaaccaggacatttctgactcaaaagctggaggtcaggggaacacrtagaaagaagtctcctttaagtatgtcttgctatttgttgtcttaggtacttgcttttcatcactgttggagatgaggtactaagctagacacactgtctgatctggtattaatcactttgatgtgaccaaagaaaagcacttaattacacgctctgctgaaattgtggaactccttgcttacatttccaaagaacaaaaaaaaaaaaaacgtactagacaaagccacact

SEQ ID NO: 88308 - DNA, 600 bp, Chicken  19866894391127_5
atatccccaaatttagtataacttgacaactatgaaagtacagcctgtggtttaactagctgttggcatctagctatctgaactgaacctgcatcactgattcaaaggtcagcaacaagaaactctcagaggagaaaactgaaggaaagtgtaatagatctataaaatcatraatgatattcttcaaacatcattcactgtcctcaaaagaactgaatgcatttaaataaytaattagggactgtatttaaaacaaaccaggacatttctgactcaaaagctggaggtcaggggaacacrtagaaagaagtctcctttaagtatgtcttgctatttgttgtcttaggtacttgcttttcatcactgttggagatgaggtactaagctagacacactgtctgatctggtattaatcactttgatgtgaccaaagaaaagcacttaattacacgctctgctgaaattgtggaactccttgcttacatttccaaagaacaaaaaaaaaaaaaacgtactagacaaagccacacttttgaaaggagctgtgcttctccagaagaataagttgataatgaagaatataaataagtttgaaaggtt

SEQ ID NO: 88309 - DNA, 600 bp, Chicken  19866894391129_1
ttttctgttcatgcccatctcctgttgatgttaatattgagaagatgtgtgatagtaacgttaatattgaaaagatactgagaagatattcctgcagatgtggcaaatgggagacaatagcaactttgtgtgtaatgttccccactcaaagacgctacgaatgagtaggcagaagtggtcttttgatagagataactttataaaaatgttgatctagactgtctgcagattctttcaagctatgtaagaattttcagtgagcattgtcattgttttgataaatgatagcagtatattgtswratgaaatggtggtcagtaaggtgtgattgaaatatttaagtccctcagaattaatctttaaaaaaaaaaatcccaaagtgtttaaggaagaaaggagatctgtcaaaggatacccattaataatagtaacgtttatgatatactgaaaaatattttgatatatttgtagtgcttgcatgtcttaggtacgtaccagtacattgcttctgaaatatgtaatagatggactgctttaatgtggtacacrtgtgatttggcagtaggtgtgattatcatcttctttctgaagcaagttaat

SEQ ID NO: 88310 - DNA, 600 bp, Chicken  19866894391129_2
tttctgttcatgcccatctcctgttgatgttaatattgagaagatgtgtgatagtaacgttaatattgaaaagatactgagaagatattcctgcagatgtggcaaatgggagacaatagcaactttgtgtgtaatgttccccactcaaagacgctacgaatgagtaggcagaagtggtcttttgatagagataactttataaaaatgttgatctagactgtctgcagattctttcaagctatgtaagaattttcagtgagcattgtcattgttttgataaatgatagcagtatattgtswratgaaatggtggtcagtaaggtgtgattgaaatatttaagtccctcagaattaatctttaaaaaaaaaaatcccaaagtgtttaaggaagaaaggagatctgtcaaaggatacccattaataatagtaacgtttatgatatactgaaaaatattttgatatatttgtagtgcttgcatgtcttaggtacgtaccagtacattgcttctgaaatatgtaatagatggactgctttaatgtggtacacrtgtgatttggcagtaggtgtgattatcatcttctttctgaagcaagttaatt

SEQ ID NO: 88311 - DNA, 600 bp, Chicken  19866894391129_3
ttctgttcatgcccatctcctgttgatgttaatattgagaagatgtgtgatagtaacgttaatattgaaaagatactgagaagatattcctgcagatgtggcaaatgggagacaatagcaactttgtgtgtaatgttccccactcaaagacgctacgaatgagtaggcagaagtggtcttttgatagagataactttataaaaatgttgatctagactgtctgcagattctttcaagctatgtaagaattttcagtgagcattgtcattgttttgataaatgatagcagtatattgtswratgaaatggtggtcagtaaggtgtgattgaaatatttaagtccctcagaattaatctttaaaaaaaaaaatcccaaagtgtttaaggaagaaaggagatctgtcaaaggatacccattaataatagtaacgtttatgatatactgaaaaatattttgatatatttgtagtgcttgcatgtcttaggtacgtaccagtacattgcttctgaaatatgtaatagatggactgctttaatgtggtacacrtgtgatttggcagtaggtgtgattatcatcttctttctgaagcaagttaattg

SEQ ID NO: 88312 - DNA, 600 bp, Chicken  19866894391129_4
ctgttcatgcccatctcctgttgatgttaatattgagaagatgtgtgatagtaacgttaatattgaaaagatactgagaagatattcctgcagatgtggcaaatgggagacaatagcaactttgtgtgtaatgttccccactcaaagacgctacgaatgagtaggcagaagtggtcttttgatagagataactttataaaaatgttgatctagactgtctgcagattctttcaagctatgtaagaattttcagtgagcattgtcattgttttgataaatgatagcagtatattgtswrargaaatggtggtcagtaaggtgtgattgaaatatttaagtccctcagaattaatctttaaaaaaaaaaatcccaaagtgtttaaggaagaaaggagatctgtcaaaggatacccattaataatagtaacgtttatgatatactgaaaaatattttgatatatttgtagtgcttgcatgtcttaggtacgtaccagtacattgcttctgaaatatgtaatagatggactgctttaatgtggtacacrtgtgatttggcagtaggtgtgattatcatcttctttctgaagcaagttaattgtc

SEQ ID NO: 88313 - DNA, 600 bp, Chicken  19866894391129_5
tgttcatgcccatctcctgttgatgttaatattgagaagatgtgtgatagtaacgttaatattgaaaagatactgagaagatattcctgcagatgtggcaaatgggagacaatagcaactttgtgtgtaatgttccccactcaaagacgctacgaatgagtaggcagaagtggtcttttgatagagataactttataaaaatgttgatctagactgtctgcagattctttcaagctatgtaagaattttcagtgagcattgtcattgttttgataaatgatagcagtatattgtswratraaatggtggtcagtaaggtgtgattgaaatatttaagtccctcagaattaatctttaaaaaaaaaaatcccaaagtgtttaaggaagaaaggagatctgtcaaaggatacccattaataatagtaacgtttatgatatactgaaaaatattttgatatatttgtagtgcttgcatgtcttaggtacgtaccagtacattgcttctgaaatatgtaatagatggactgctttaatgtggtacacrtgtgatttggcagtaggtgtgattatcatcttctttctgaagcaagttaattgtca

SEQ ID NO: 88314 - DNA, 579 bp, Chicken  19866894391129_6
attttcagtgagcattgtcattgttttgataaatgatagcagtatattgtswratgaaatggtggtcagtaaggtgtgattgaaatatttaagtccctcagaattaatctttaaaaaaaaaaatcccaaagtgtttaaggaagaaaggagatctgtcaaaggatacccattaataatagtaacgtttatgatatactgaaaaatattttgatatatttgtagtgcttgcatgtcttaggtacgtaccagtacattgcttctgaaatatgtaatagatggactgctttaatgtggtacacrtgtgatttggcagtaggtgtgattatcatcttctttctgaagcaagttaattgtcagtcattcagtttaacgtgtaagtattttcactgaaggtgaaatacaagtgtgctactgtcttgatgaagatgtttagattccatgactcttttagtaaaggtggaattttacttgtcatttcagatttcagcagattacagttctaattgttaaaaatgttctctagctgtcagctcttgctctattactgaagttggagtttttcatttgcactgtatgtaa

SEQ ID NO: 88315 - DNA, 600 bp, Chicken  19866894391133_1
attctgagtgattggagtatgttaatgaaagttgcggttcccagctggtgcagtatctgctggaggtcactgctgctgttttgtttgagctgctctactcaggagcaccacaggagaagaggaccacacttcatcttctgagtctgaacttccactgtgctctgtgtggaaggatttgggataggaaacatgatgtgtctgaatgcttcctcagggggatgagcgtgtcatttgttgggatagaggaatgtggttcaggtacaaacatgaaggaggaagaagtgtttgacattatatatwttttttttacactggctgaactgaacttcagtaaggcctttgacacagtaccctgcaatatccttctgtccaaattggaaaggtgtggatttgatgggtgcaccttttgatggatgaggaactggttgcaagatggaaccagatagtaccattccatggctccttgtctggatggagatcagtgatgagtggtgtccctcaggggtcattgctgggaccagtgttgtttagtgtcttcactaattaaactgacaatcaaactatgtacaycctcagtagattgcaaatgaccaccaaggg

SEQ ID NO: 88316 - DNA, 600 bp, Chicken  19866894391133_2
aggaggaagaagtgtttgacattatatatwttttttttacactggctgaactgaacttcagtaaggcctttgacacagtaccctgcaatatccttctgtccaaattggaaaggtgtggatttgatgggtgcaccttttgatggatgaggaactggttgcaagatggaaccagatagtaccattccatggctccttgtctggatggagatcagtgatgagtggtgtccctcaggggtcattgctgggaccagtgttgtttagtgtcttcactaattaaactgacaatcaaactatgtacaycctcagtagattgcaaatgaccaccaaggggagattgatacaccagaaggatgggataccacccagagaaactcagacagtctgagtgggcccatgagaacctcatgaggttcaacagttccaagtgtaaagacaattgggttgtagtaactgccactaccagtacaagctggatgatgacaggatggagcacagccctgctgaaaaggactggtattactgatggatagcagctggacatgagccagcacaatgccctagcagcacagaaagccatctgtacccgggactgcatcaaaa

SEQ ID NO: 88317 - DNA, 600 bp, Chicken  19866894391135_1
atactgccatgtgttgcaacacaggaatttgaaaattataatcttactgttcccttaaagcaagaccattagtgaaattagtaattatcagaacatttattctctaaattacttacagtgtatctgaagccggttatttagcagctgcaatatcattactgtattgaacagaataaatgttaggaagaatagcatatcaaaagttagaaagaattgtaggtataagatataggaaacaatataatccacccttttctccttttgctttcaccttccatagaactgtaatatgaacctgcygacactragccattgtgyattgcacaggaagaatttgtctcttggaataaaacaagcctggtgaggcaggatcttaccagagccttttgttctwggtgcctccttagcgtgaacatgcagtcaacttacgaaaagctcatggctcactaaaattatgtgatctggtttatgggacatgaaatggcttatagtctaaattattgcactagagagagaacaagctgaggacagctttggaccaagagttatagtttggggaaatggggaagagatgtattggttgagttcagtgtatacagg

SEQ ID NO: 88318 - DNA, 600 bp, Chicken  19866894391135_2
catgtgttgcaacacaggaatttgaaaattataatcttactgttcccttaaagcaagaccattagtgaaattagtaattatcagaacatttattctctaaattacttacagtgtatctgaagccggttatttagcagctgcaatatcattactgtattgaacagaataaatgttaggaagaatagcatatcaaaagttagaaagaattgtaggtataagatataggaaacaatataatccacccttttctccttttgctttcaccttccatagaactgtaatatgaacctgcygacactragccattgtgyattgcacaggaagaatttgtctcttggaataaaacaagcctggtgaggcaggatcttaccagagccttttgttctwggtgcctccttagcgtgaacatgcagtcaacttacgaaaagctcatggctcactaaaattatgtgatctggtttatgggacatgaaatggcttatagtctaaattattgcactagagagagaacaagctgaggacagctttggaccaagagttatagtttggggaaatggggaagagatgtattggttgagttcagtgtatacagggagaatc

SEQ ID NO: 88319 - DNA, 600 bp, Chicken  19866894391135_3
acacaggaatttgaaaattataatcttactgttcccttaaagcaagaccattagtgaaattagtaattatcagaacatttattctctaaattacttacagtgtatctgaagccggttatttagcagctgcaatatcattactgtattgaacagaataaatgttaggaagaatagcatatcaaaagttagaaagaattgtaggtataagatataggaaacaatataatccacccttttctccttttgctttcaccttccatagaactgtaatatgaacctgcygacactragccattgtgyattgcacaggaagaatttgtctcttggaataaaacaagcctggtgaggcaggatcttaccagagccttttgttctwggtgcctccttagcgtgaacatgcagtcaacttacgaaaagctcatggctcactaaaattatgtgatctggtttatgggacatgaaatggcttatagtctaaattattgcactagagagagaacaagctgaggacagctttggaccaagagttatagtttggggaaatggggaagagatgtattggttgagttcagtgtatacagggagaatcaaaataaccaa

SEQ ID NO: 88320 - DNA, 600 bp, Chicken  19866894391135_4
atttattctctaaattacttacagtgtatctgaagccggttatttagcagctgcaatatcattactgtattgaacagaataaatgttaggaagaatagcatatcaaaagttagaaagaattgtaggtataagatataggaaacaatataatccacccttttctccttttgctttcaccttccatagaactgtaatatgaacctgcygacactragccattgtgyattgcacaggaagaatttgtctcttggaataaaacaagcctggtgaggcaggatcttaccagagccttttgttctwggtgcctccttagcgtgaacatgcagtcaacttacgaaaagctcatggctcactaaaattatgtgatctggtttatgggacatgaaatggcttatagtctaaattattgcactagagagagaacaagctgaggacagctttggaccaagagttatagtttggggaaatggggaagagatgtattggttgagttcagtgtatacagggagaatcaaaataaccaacgttcattacgaaatggaagacgactttctacaaatttacttattttagaaattaagaggcagagggtgaagttag

SEQ ID NO: 88321 - DNA, 600 bp, Chicken  19866894391139_1
gcccagcagcacacagaggcctcgacctattgaacttatctgttcaccacccactggaaaagggggggaaaaaaaaagtaagacaaaatcatagaatcgcaaccagatcaggtgctcagagccctgtccagcctgaccttgaatgtctccaaggacggggcatccaccacctctctgggcaacctgtgccaacgcctcaccactcttactagaaaacttcttccttatactgaacctaaatctcctctcttttagtctgaaaccatttcccctcatcctatcacaacagatcctactaargagtctgttcccttctttcttatggccctcctcgggattctgaaaggccacactcaggtctccccagagccttctcttctccaggctgaacagccccagctctcagcctgtccttgtagaagaggtgttccattccttgggtcatttctgtggccctcctcaggatgtgctccaaaaggtccacatctctcctgtactgagcactccacatctggacggagtactccaggtgaggtctcaccagcgcagagaagaggggtggaaccacctcccttgccctgctggccacgcttcttttga

SEQ ID NO: 88322 - DNA, 600 bp, Chicken  19866894391139_2
tatggttggttttctaggttgtgagggcacattgctggctcatatccagcttgccattcacctgtgcccccaggtccttttcagcagggctgtgctccatccatacaccccccacttgtactgatagagggagttaccatgacccaggtacaagaccttgcacttgaatttgttgaacctcatgaggttcacccgggcccactgctggagcctaggtccctctggatggcatctcgatcctcaggcatgtcaaccacaccacagtttggtgtcatccacaaacttgctgaaggggcactygaacccactgctgatgtctgataatgatatttcagagcaccggtcccagcagtgtcccctgagggacaccacttgtcactgatctccactctccgttgaccaccactctgcatatgatacgaagattactgcctacaattgaaccagcagtgccaaccacagcagcagcacaacactctccaatcttaggaatactgagctgactgaattcagtgagcataccccatttccctgccgcaccaccccccagcagctgcgagagtcacgtcatttcgggcctcctacaccttatctgaaata

SEQ ID NO: 88323 - DNA, 600 bp, Chicken  19866894391146_1
aggttgtaagagaccactaaaagcacttagttcaaccatcagcccatcctcaccatgcccattaccccatatccctcatgccacatttaggtgtttcttggacacctccagggtcagtgatgccaccacttccctgagtggcacattatgttatgttgcatttcatatttactcacatattatccaatgcaaatcccacctctagctcctcttttctctgaaaaataaagaaaggaaaaaaatatctcacactagcctactggtggttttcataatgcaagctctcattcttataacatrtgtacacacattgtgcatgactggcattacacttaaaacacatgcacctgccaccttttgcctgactgcctgagtatcaagatcttttatggataggacaattctggatgctcgctagagcattttttgacaaagaaagtggtgagtttgcctttcttctgggatatccacagcacaacagatcctgatagagatgctgcctcatactgagtctgccagtaaagagaacaaggggctgctaagaggagcagccaaacccttctgatgcaaagagggaaaatagtggtatgccaagcagct

SEQ ID NO: 88324 - DNA, 597 bp, Chicken  19866894391148_1
gccagtcccgttgccaacaggaaaaaggaagggaaaagagaactccccagcacctatctccttctctctgataatagagcaggctgtaaaattctctccctctgcaatgcaattaaacttcctttagtttcacaatctacaatctgattgcagaaagggaaaggttgtggtgacccataggacagcatcaggaccattgcgacacctgactaatgtatcaagaacagggcagaggttacaaagaaaaggctttgtgaaacgaggaaactgtagccaggtaagaggaaaggattgacacgrtatcagcagagggaagaatgttgggtcatgggtaccaaacgtaatgcttgtgaagtctttaagtttggcaatattcytctgcgagtttgaacagagattaaggaaaaaccaaagctgaagtctttgagcagtgtaaaagctgtattacttgggaggaaacaaacaaaaagaggcaaaagaagatgttcagtgattgaactgtaaagctgactctacgacagaataaacaatcatcagtttcaggccaaactgcacgagtttactataaggccgaatctctacagcagcgacaagcat

SEQ ID NO: 88325 - DNA, 520 bp, Chicken  19866894391148_2
agcaggctgtaaaattctctccctctgcaatgcaattaaacttcctttagtttcacaatctacaatctgattgcagaaagggaaaggttgtggtgacccataggacagcatcaggaccattgcgacacctgactaatgtatcaagaacagggcagaggttacaaagaaaaggctttgtgaaacgaggaaactgtagccaggtaagaggaaaggattgacacgrtatcagcagagggaagaatgttgggtcatgggtaccaaacgtaatgcttgtgaagtctttaagtttggcaatattcytctgcgagtttgaacagagattaaggaaaaaccaaagctgaagtctttgagcagtgtaaaagctgtattacttgggaggaaacaaacaaaaagaggcaaaagaagatgttcagtgattgaactgtaaagctgactctacgacagaataaacaatcatcagtttcaggccaaactgcacgagtttactataaggccgaatctctacagcagcgacaagcat

SEQ ID NO: 88326 - DNA, 600 bp, Chicken  19866894391149_1
aaggacagctcatggtgacgttgatgctctccacattctgctgcaggtccaccaccatctgcggctctgacctcctacacacagggggaagaggttcccataactgggacaggtgaagggcaggatggggccgagtcctgctctccaggaagcagcacagtgatgctcaccgcttgacaaagacgttcccgatgcagccggtgaggttgctgagggcaccgggctctggcaagcctccaagctggaagagtgcccggccatcctgctgccgccgctgcctccgactggccctggccccarctgcagtgtcctgcagctcatcrtccacatagagccgcaccctgtggggcatgagtggtgcaggatgagcagggccccagggctgccggcccctcagcacccatgcgtcmccaagacacatacccctgggcatcactgtagaaggccacgtagtgggtcctgtcatccgcataggtattttcagtggtgactttkgtttccagcaggttcaaggccagctggcccctctggagggatacctggcacrtcccctcctgcaggaagcattgtgccattgctgggcagccaagccccaaggta

SEQ ID NO: 88327 - DNA, 600 bp, Chicken  19866894391149_2
atgctctccacattctgctgcaggtccaccaccatctgcggctctgacctcctacacacagggggaagaggttcccataactgggacaggtgaagggcaggatggggccgagtcctgctctccaggaagcagcacagtgatgctcaccgcttgacaaagacgttcccgatgcagccggtgaggttgctgagggcaccgggctctggcaagcctccaagctggaagagtgcccggccatcctgctgccgccgctgcctccgactggccctggccccarctgcagtgtcctgcagctcatcrtccacatagagccgcaccctgtggggcatgagtggtgcaggatgagcagggccccagggctgccggcccctcagcacccatgcgtcmccaagacacatacccctgggcatcactgtagaaggccacgtagtgggtcctgtcatccgcataggtattttcagtggtgactttkgtttccagcaggttcaaggccagctggcccctctggagggatacctggcacrtcccctcctgcaggaagcattgtgccattgctgggcagccaagccccaaggtagggcccatttacccacgttagcc

SEQ ID NO: 88328 - DNA, 600 bp, Chicken  19866894391149_3
aggtgaagggcaggatggggccgagtcctgctctccaggaagcagcacagtgatgctcaccgcttgacaaagacgttcccgatgcagccggtgaggttgctgagggcaccgggctctggcaagcctccaagctggaagagtgcccggccatcctgctgccgccgctgcctccgactggccctggccccarctgcagtgtcctgcagctcatcrtccacatagagccgcaccctgtggggcatgagtggtgcaggatgagcagggccccagggctgccggcccctcagcacccatgcgtcmccaagacacatacccctgggcatcactgtagaaggccacgtagtgggtcctgtcatccgcataggtattttcagtggtgactttkgtttccagcaggttcaaggccagctggcccctctggagggatacctggcacrtcccctcctgcaggaagcattgtgccattgctgggcagccaagccccaaggtagggcccatttacccacgttagccagatttcactggatttaaccttttatccccgctcacttttcgacaaaatccctcactttcccaagcaggagtctcacttgatgctcc

SEQ ID NO: 88329 - DNA, 600 bp, Chicken  19866894391149_4
agccggtgaggttgctgagggcaccgggctctggcaagcctccaagctggaagagtgcccggccatcctgctgccgccgctgcctccgactggccctggccccarctgcagtgtcctgcagctcatcrtccacatagagccgcaccctgtggggcatgagtggtgcaggatgagcagggccccagggctgccggcccctcagcacccatgcgtcmccaagacacatacccctgggcatcactgtagaaggccacgtagtgggtcctgtcatccgcataggtattttcagtggtgactttkgtttccagcaggttcaaggccagctggcccctctggagggatacctggcacrtcccctcctgcaggaagcattgtgccattgctgggcagccaagccccaaggtagggcccatttacccacgttagccagatttcactggatttaaccttttatccccgctcacttttcgacaaaatccctcactttcccaagcaggagtctcacttgatgctcccgcacaaactgatggttgtcccactaccaggacaactggggtggactgtgagtgcccacctgtgtactgtggtggtacagcagcc

SEQ ID NO: 88330 - DNA, 600 bp, Chicken  19866894391149_5
gagtgcccggccatcctgctgccgccgctgcctccgactggccctggccccarctgcagtgtcctgcagctcatcrtccacatagagccgcaccctgtggggcatgagtggtgcaggatgagcagggccccagggctgccggcccctcagcacccatgcgtcmccaagacacatacccctgggcatcactgtagaaggccacgtagtgggtcctgtcatccgcataggtattttcagtggtgactttkgtttccagcaggttcaaggccagctggcccctctggagggatacctggcacrtcccctcctgcaggaagcattgtgccattgctgggcagccaagccccaaggtagggcccatttacccacgttagccagatttcactggatttaaccttttatccccgctcacttttcgacaaaatccctcactttcccaagcaggagtctcacttgatgctcccgcacaaactgatggttgtcccactaccaggacaactggggtggactgtgagtgcccacctgtgtactgtggtggtacagcagcccctcacgctggcttgtctggaagctgaagccactgtagaagtcccgcagccc

SEQ ID NO: 88331 - DNA, 599 bp, Chicken  19866894391151_1
  misc_feature (1)..(8): n is any nucleotide
nnnnnnnnaaattattgtaagttactgttttcaacaaaattgttaaggaaatgttttaaaacatacattaaaaaaaaaaaaaaaaaagaaggcaagtttccttacgtgtctttttttcatgttccgatacacaattttggatctctcaaatgtcatatattatattttactgcctctgcacagatggtttaattgatcttgttttaattagtgactgatccattaggagctgtccttgtaagcaaataccttatttagatttccctccttctcaagatcttcgtaggttcataattaaartgaagaataacaaaccaatattttacacggagaaagttcaccattacagttgccttaagggcatcacctctggtgaatttgttcatgaactcagaattttatttcctgttcagatcactggccaactctgtttacattctaatgttgcattataaaggagagtaagtgttcctgttcactgagaacatatttgtagtaatatttgaagtaggatggctgttccaaaagtaaatcctcctgttctattatgttggcgcatgctgtcggaggcagatgttggtggtacggcagtaggggct

SEQ ID NO: 88332 - DNA, 600 bp, Chicken  19866894391153_1
aaagtgagttgttctatgagcagctgagataacattactcagtgtccaagggattgctgctatgcccctcatactgcaactgaccttaacctgcatttttcccagtatcttttcccttcagcctcaggatgactgcacacccctcagccctcgccacaacattcccagtttttctggtgtttgctgctccttcaaacaactgcgtcccagaaaaactgagtgtagtaccttctagatccttcctttgctgtcaccatcaccacagtgctctcacttacttctatttcctatctgacaccmcacagtatttcacatcccttgcaagaccccagtcgcatcgcccataaaacctttgctttcccactgctttggggtgagcaagaggcagcacatgctgtagctggtttaaaagccactcacatgtcagtggggcagatggttgctgtagtcgggacaaacagaaagggcaatggctgagtgatcacagctttgccttgaggggacattaatcaagtctttgtcaaatttccagcagtcctcatgaaattcatcagcatcgtaaggtctgagatgcctcttcatctttccagattggctgaa

SEQ ID NO: 88333 - DNA, 600 bp, Chicken  19866894391153_2
catcgcccataaaacctttgctttcccactgctttggggtgagcaagaggcagcacatgctgtagctggtttaaaagccactcacatgtcagtggggcagatggttgctgtagtcgggacaaacagaaagggcaatggctgagtgatcacagctttgccttgaggggacattaatcaagtctttgtcaaatttccagcagtcctcatgaaattcatcagcatcgtaaggtctgagatgcctcttcatctttccagattggctgaaatttgctgacagtttgaaagttatggggaggagcrgggggaaccaacagatggacagacagccactgtgactgtataagcctcagttccctagaaaaccagactaaaaatagatggaaaatagaggggctgacagatttaattaacgtaagcaggcaaggtttctgacagcgcaggagaagtccgttaaccttctccctggtccaagtgttgcacgcaaggctcaggttcctctttgggcagaagctaacacattgatgtggtgttctggctgcaggagacctgtggactcccatttccaagacaaaagacaccctttcccgctgtttcttggcg

SEQ ID NO: 88334 - DNA, 600 bp, Chicken  19866894391154_1
ctgaacaaaccccagttccctcagttgcccctcataagacttctggctccagccccttcaccagctccactgctcttcacattcaccttcatggatccttccacctcttatgtgaacttctcccaaacccacaacagactttacaggagctgagaggaaggatattcttgtgaatctttcttctgttctgtctgccataggcctcttatgtcaccttgagcaagccaagagcaggaatttaggcactttaataccaatagaaattgacctcaaggtgaacaggtgcttgaactgaagtgrggcactgatgcattttcaaagttgttaatatatttgccacttggttgatgggataaaaaaaaaaaggctcatgaagatcttgaatactctggctrtaagtctccgtgaatgcaagaagttacatgtyagtggtgctgtgtatgagcatatgagggtttctcctttctgcattcagccatctgtaggtggaaactgctgtgaactggtttctttagtttcctctgaggtagaggaagaagagcaggagccccaggaaagtgcaaaacctttctgtggtaggcagagtgcccatgctttccc

SEQ ID NO: 88335 - DNA, 600 bp, Chicken  19866894391154_2
cttcaccagctccactgctcttcacattcaccttcatggatccttccacctcttatgtgaacttctcccaaacccacaacagactttacaggagctgagaggaaggatattcttgtgaatctttcttctgttctgtctgccataggcctcttatgtcaccttgagcaagccaagagcaggaatttaggcactttaataccaatagaaattgacctcaaggtgaacaggtgcttgaactgaagtgrggcactgatgcattttcaaagttgttaatatatttgccacttggttgatgggatraaaaaaaaaaggctcatgaagatcttgaatactctggctrtaagtctccgtgaatgcaagaagttacatgtyagtggtgctgtgtatgagcatatgagggtttctcctttctgcattcagccatctgtaggtggaaactgctgtgaactggtttctttagtttcctctgaggtagaggaagaagagcaggagccccaggaaagtgcaaaacctttctgtggtaggcagagtgcccatgctttcccttagtgaggctacaaggaaaatactagctcaaacactgacaataaattgcgtgaa

SEQ ID NO: 88336 - DNA, 600 bp, Chicken  19866894391154_3
tccttccacctcttatgtgaacttctcccaaacccacaacagactttacaggagctgagaggaaggatattcttgtgaatctttcttctgttctgtctgccataggcctcttatgtcaccttgagcaagccaagagcaggaatttaggcactttaataccaatagaaattgacctcaaggtgaacaggtgcttgaactgaagtgrggcactgatgcattttcaaagttgttaatatatttgccacttggttgatgggataaaaaaaaaaaggctcatgaagatcttgaatactctggctrtaagtctccgtgaatgcaagaagttacatgtyagtggtgctgtgtatgagcatatgagggtttctcctttctgcattcagccatctgtaggtggaaactgctgtgaactggtttctttagtttcctctgaggtagaggaagaagagcaggagccccaggaaagtgcaaaacctttctgtggtaggcagagtgcccatgctttcccttagtgaggctacaaggaaaatactagctcaaacactgacaataaattgcgtgaattcagatttctgtgttcatacttagtgaaaccatttcccc

SEQ ID NO: 88337 - DNA, 600 bp, Chicken  19866894391154_4
cccacaacagactttacaggagctgagaggaaggatattcttgtgaatctttcttctgttctgtctgccataggcctcttatgtcaccttgagcaagccaagagcaggaatttaggcactttaataccaatagaaattgacctcaaggtgaacaggtgcttgaactgaagtgrggcactgatgcattttcaaagttgttaatatatttgccacttggttgatgggataaaaaaaaaaaggctcatgaagatcttgaatactctggctrtaagtctccgtgaatgcaagaagttacatgtyagtggtgctgtgtatgagcatatgagggtttctcctttctgcattcagccatctgtaggtggaaactgctgtgaactggtttctttagtttcctctgaggtagaggaagaagagcaggagccccaggaaagtgcaaaacctttctgtggtaggcagagtgcccatgctttcccttagtgaggctacaaggaaaatactagctcaaacactgacaataaattgcgtgaattcagatttctgtgttcatacttagtgaaaccatttccccctcattaaaacatatgcagctttggaaggaga

SEQ ID NO: 88338 - DNA, 600 bp, Chicken  19866894391154_5
tgatagctccgactgtgaattgctcaggtctgctcaagcatgcaaacccttcatgagccactctgtgacagtgccacaaaacacattggcttcacatcacagcttctccagctagaccagtcactggccagtgtgcaccatgcagtagcatttcccacacaggagactcaggtgcccaccattaactgaggccttagaatcatagaatcattaaggttgaaaaagacctccaagattatgtagcccaaccatctgcaacaaacactactaaaccatgtccctaagtacatttactctttmcttaaacacctcccaggacagtgactctaccatctctctgggcagcctgctccagtgcctcatcactgtttcagagaagaaattcttcctaatctccaacttgaaccttccctggagcaacttgaggccattccttcttgtcctattgctcatgttcctctgcttttcctgtgaatgtcccagtcatgcagtaaacatagagtcctggttcatggtcacccatctctgatgacaacttgtcttcctccatcccagtcaactacggagcttaaagactaatttatgccaacttatttgaga

SEQ ID NO: 88339 - DNA, 600 bp, Chicken  19866894391155_1
ccttttcttccccattcttcaaagatcagggattatgccaagaaaccatagaaattgtgattacaaaaaactggtaagctgaagttctcagaacaaattaagtgcatgtaaaaacatacacttgtctatgtctggagaacatatgcacccaaatattctcagagctatactaattgtggtacatgcgacacacgaacatttctctgcctgtgtgcagaacatgcacagggctggaagctcattaaaaaagcaccaaacaggatctgcaaagagtctccaagaaccacagagggcaatggyacggaatgggttacaccagagctgctctcattcagcagctttgcttgttttaccaatatgtggtggataaaggaatggaaagaagtgatcttgatgtcattatttgaggaaatgttactttcagatcacaggttgcccrgagaaaaacaagatgcaacaaatacgcatgatcaaaacaccgttctttcaaaacacaaaacaatagccacagttcgctrtgtatcccattcactaggatgagagcttgaaaatccaaaccagttaagtcagtttctctatgtaatattaaccatcctctag

SEQ ID NO: 88340 - DNA, 600 bp, Chicken  19866894391155_2
catatgcacccaaatattctcagagctatactaattgtggtacatgcgacacacgaacatttctctgcctgtgtgcagaacatgcacagggctggaagctcattaaaaaagcaccaaacaggatctgcaaagagtctccaagaaccacagagggcaatggyacggaatgggttacaccagagctgctctcattcagcagctttgcttgttttaccaatatgtggtggataaaggaatggaaagaagtgatcttgatgtcattatttgaggaaatgttactttcagatcacaggttgcccrgagaaaaacaagatgcaacaaatacgcatgatcaaaacaccgttctttcaaaacacaaaacaatagccacagttcgctrtgtatcccattcactaggatgagagcttgaaaatccaaaccagttaagtcagtttctctatgtaatattaaccatcctctagaaaacaaatcactgttaaacagcttaaaatccaaatgcaccttacagaatgtgctaatcactggccactctgctataattaagtgaagcaagagcttcccctgagttttggaatcagctccctgctcagctgctatgct

SEQ ID NO: 88341 - DNA, 600 bp, Chicken  19866894391155_3
acatgcacagggctggaagctcattaaaaaagcaccaaacaggatctgcaaagagtctccaagaaccacagagggcaatggyacggaatgggttacaccagagctgctctcattcagcagctttgcttgttttaccaatatgtggtggataaaggaatggaaagaagtgatcttgatgtcattatttgaggaaatgttactttcagatcacaggttgcccrgagaaaaacaagatgcaacaaatacgcatgatcaaaacaccgttctttcaaaacacaaaacaatagccacagttcgctrtgtatcccattcactaggatgagagcttgaaaatccaaaccagttaagtcagtttctctatgtaatattaaccatcctctagaaaacaaatcactgttaaacagcttaaaatccaaatgcaccttacagaatgtgctaatcactggccactctgctataattaagtgaagcaagagcttcccctgagttttggaatcagctccctgctcagctgctatgctgtcaacagctggcacgaattacagggaacatttggctaactggataataaggagaacagcctgtggttggtccaaattc

SEQ ID NO: 88342 - DNA, 600 bp, Chicken  19866894391157_1
acactaccattaacatgctttaacttttgtttagccctgtaatggtcaggcagttggacctgatgatctttgaaggtcccttccaactgtaccactctgttctgttctatgttatgttgtgttgtgctatgctatgctatgagctccttgtagagatcaatcccatctctgaagggataagatgagaaacaccacccagcagctgacctgctaatcaccaagcacaagcagtcttatgtgctcataacagatggccactgtcaaaacacagtgtttttcacaaagctttgcaaatctccraggaattaacagaattacacagaaagtcatgccagctttgaccccrtgtgctgagttcagcacattgcygactgtgagcaactggtgggatcttttcagcacctgtactttcctggggtcagtcccatgagcaggactcagagtgacatgtggatgacacagtggcagagctgtggcccacagtctgccagtttccaggctctgagggcaggtcccaacccacaatattggatcaaacaccgtgctgtatccagaagcactcttcatccatcctaggtaggtaccttaggcatctggact

SEQ ID NO: 88343 - DNA, 600 bp, Chicken  19866894391157_2
caggcagttggacctgatgatctttgaaggtcccttccaactgtaccactctgttctgttctatgttatgttgtgttgtgctatgctatgctatgagctccttgtagagatcaatcccatctctgaagggataagatgagaaacaccacccagcagctgacctgctaatcaccaagcacaagcagtcttatgtgctcataacagatggccactgtcaaaacacagtgtttttcacaaagctttgcaaatctccraggaattaacagaattacacagaaagtcatgccagctttgaccccrtgtgctgagttcagcacattgcygactgtgagcaactggtgggatcttttcagcacctgtactttcctggggtcagtcccatgagcaggactcagagtgacatgtggatgacacagtggcagagctgtggcccacagtctgccagtttccaggctctgagggcaggtcccaacccacaatattggatcaaacaccgtgctgtatccagaagcactcttcatccatcctaggtaggtaccttaggcatctggacttccagctgagatactgtttggagatgatgttgagaaaaactggtca

SEQ ID NO: 88344 - DNA, 600 bp, Chicken  19866894391157_3
ttgaaggtcccttccaactgtaccactctgttctgttctatgttatgttgtgttgtgctatgctatgctatgagctccttgtagagatcaatcccatctctgaagggataagatgagaaacaccacccagcagctgacctgctaatcaccaagcacaagcagtcttatgtgctcataacagatggccactgtcaaaacacagtgtttttcacaaagctttgcaaatctccraggaattaacagaattacacagaaagtcatgccagctttgaccccrtgtgctgagttcagcacattgcygactgtgagcaactggtgggatcttttcagcacctgtactttcctggggtcagtcccatgagcaggactcagagtgacatgtggatgacacagtggcagagctgtggcccacagtctgccagtttccaggctctgagggcaggtcccaacccacaatattggatcaaacaccgtgctgtatccagaagcactcttcatccatcctaggtaggtaccttaggcatctggacttccagctgagatactgtttggagatgatgttgagaaaaactggtcataagaccaataactttctggaag

SEQ ID NO: 88345 - DNA, 600 bp, Chicken  19866894391157_4
tttcaaacccttcatcattttgacccatttaatcctataattatcattgtcttaaactggagaaaaatgtatgaaaaatatgaaaagtgcattctgtcttcatgatccaggggctcatttgctgcttcactatgctaattctgtgtttctaatagtctggttattgatgtggattatgatagcgtgtatgagtgcatagcaatcagaattagaacaaatttgaaataagtccttaactgcagcgtccaagtgttcattaatcaatatgcttatcaagttgtttttttttttaatgtactsttattcttctggcagcaaatgcggtgttcttacattcagagtgaaagatttatccctcctatccagtacaaaagctggagaatgacctccatcgccataacaagtgaacagcccattagtcacacagtccttgtgcaggactgtgttgggacaacacatgctgtagccatgaaggacgtacctaaatgcacgatgtggaacagagagcactgggawtggcacatagagccattcttctgtgaaacagcagtgcttggctttgcattttctggattgagggatgcccatgaacaggccagt

SEQ ID NO: 88346 - DNA, 600 bp, Chicken  19866894391157_5
aatttgaaataagtccttaactgcagcgtccaagtgttcattaatcaatatgcttatcaagttgtttttttttttaatgtactsttattcttctggcagcaaatgcggtgttcttacattcagagtgaaagatttatccctcctatccagtacaaaagctggagaatgacctccatcgccataacaagtgaacagcccattagtcacacagtccttgtgcaggactgtgttgggacaacacatgctgtagccatgaaggacgtacctaaatgcacgatgtggaacagagagcactgggawtggcacatagagccattcttctgtgaaacagcagtgcttggctttgcattttctggattgagggatgcccatgaacaggccagtccttcatcacaaatgccaggtagttctaaggctgctgtaacttctcatctgcattgaaaaggtggaggaaaacctgtacaacttgtgactttctggggtttctgatccaggctaggtttccccagaggaaacaacagaagaatttggaatcgagtcccctgacaaatctcatgccctgctgccaagctggaggctagctgcaagtattttatacta

SEQ ID NO: 88347 - DNA, 599 bp, Chicken  19866894391162_1
  misc_feature (1)..(122): n is any nucleotide
nnnnnnnnnnnnnnnnnnnnnnnnnnnnnnnnnnnnnnnnnnnnnnnnnnnnnnnnnnnnnnnnnnnnnnnnnnnnnnnnnnnnnnnnnnnnnnnnnnnnnnnnnnnnnnnnnnnnnnnnnnctctggagtagcacattttatgagcctgcatcagattgctgctgtgtggctctcctagagctgtacgccccaccttaatcctagatgcaacaatatatgcatcccaaatgctgtactttacccaattaaaaagagagattcaagaattctgatgtttatctggcagtcctgtccagtrgacataggttaatttcccacaggttgcagctttatgcagaattcccatgagctgggaatgtcaaatgcatgactaaggacacacatgaaccataagtattagcagaggttgaacagtgacctacaaaaatctaataccaagccattgatagcaccgctgtcaggaagcaattgctgtatgcaatttatcaagcataaataaatatcaggctgctgtctttgctttgagccatgtgtaactattatccacaacctttagtgcaggagaggctctcttcaagaagatacgtttcccaactg

SEQ ID NO: 88348 - DNA, 599 bp, Chicken  19866894391172_1
  misc_feature (1)..(70): n is any nucleotide
nnnnnnnnnnnnnnnnnnnnnnnnnnnnnnnnnnnnnnnnnnnnnnnnnnnnnnnnnnnnnnnnnnnnnnaagggaggggaaatcaagcaaatcaggacaggaaaggattctcatataacctgtgtctgcttgagagtgacacttctgcatcagcacagatggttcaatacaaacctctttgcactctgtaatcgcagtcaaggaagccaacaaaacaccaggttttataaatagtgggacgctgactaatgctgatagggccctcatataaaaatcaacgtgtattcttaaagaaaaartaatgccaaagtcattcagacagtcttggctgagatccggggcagagggagacttgagtcaaagggagaggctagaaaacattaaataatatacctgggaaattcwacccaaaggagtgacttgggcttakttgtgctgttcatgccccattaggtcttcagcagatccttcagtgccatgactgctcagtgggacccaagacccagatcccagcactgcccacttctgacctcatcacacctcttggttgccccccaccagattaggctgcccagggccccatccagcctgtcctcra

SEQ ID NO: 88349 - DNA, 600 bp, Chicken  19866894391172_2
gattctcatataacctgtgtctgcttgagagtgacacttctgcatcagcacagatggttcaatacaaacctctttgcactctgtaatcgcagtcaaggaagccaacaaaacaccaggttttataaatagtgggacgctgactaatgctgatagggccctcatataaaaatcaacgtgtattcttaaagaaaaartaatgccaaagtcattcagacagtcttggctgagatccggggcagagggagacttgagtcaaagggagaggctagaaaacattaaataatatacctgggaaattcwacccaaaggagtgacttgggcttakttgtgctgttcatgccccattaggtcttcagcagatccttcagtgccatgactgctcagtgggacccaagacccagatcccagcactgcccacttctgacctcatcacacctcttggttgccccccaccagattaggctgcccagggccccatccagcctgtcctcraacacttccaacctgaccacagatagatagatagagatactgatgggattcgtaacacttcttgttcagaaagagatcagggatgtccagaaccaagagaggcaaagc

SEQ ID NO: 88350 - DNA, 600 bp, Chicken  19866894391172_3
tgagagtgacacttctgcatcagcacagatggttcaatacaaacctctttgcactctgtaatcgcagtcaaggaagccaacaaaacaccaggttttataaatagtgggacgctgactaatgctgatagggccctcatataaaaatcaacgtgtattcttaaagaaaaartaatgccaaagtcattcagacagtcttggctgagatccggggcagagggagacttgagtcaaagggagaggctagaaaacattaaataatatacctgggaaattcwacccaaaggagtgacttgggcttakttgtgctgttcatgccccattaggtcttcagcagatccttcagtgccatgactgctcagtgggacccaagacccagatcccagcactgcccacttctgacctcatcacacctcttggttgccccccaccagattaggctgcccagggccccatccagcctgtcctcraacacttccaacctgaccacagatagatagatagagatactgatgggattcgtaacacttcttgttcagaaagagatcagggatgtccagaaccaagagaggcaaagcagaagggggagcatcagctgcagga

SEQ ID NO: 88351 - DNA, 553 bp, Chicken  19866894391172_4
artaatgccaaagtcattcagacagtcttggctgagatccggggcagagggagacttgagtcaaagggagaggctagaaaacattaaataatatacctgggaaattcwacccaaaggagtgacttgggcttakttgtgctgttcatgccccattaggtcttcagcagatccttcagtgccatgactgctcagtgggacccaagacccagatcccagcactgcccacttctgacctcatcacacctcttggttgccccccaccagattaggctgcccagggccccatccagcctgtcctcraacacttccaacctgaccacagatagatagatagagatactgatgggattcgtaacacttcttgttcagaaagagatcagggatgtccagaaccaagagaggcaaagcagaagggggagcatcagctgcaggatcagcggactttaatattgccagtgcttattgacaacccttccggactgtcagaataattgtaagatttatatttctttcctgtgggaggttgattttactatcttagatagggcatttt

SEQ ID NO: 88352 - DNA, 600 bp, Chicken  19866894391173_1
ccgatgtgcctgcaaaacaggacgtgcccccacacaccgcctttcctcccattcagcagcagaaaggcacagccgtacaccagccctgctgctgggcagtgagcacagacacagcttgcttttggaggggaaaattttcacccgatgggggaggccccagaagctgcccagggtgctgttaaggtgctgctgaggcacatgctgtgccctttggcacaatccaagcactccatgccacgtggctgctgtcagaacagagcagaggctcctgagcatatttcactggcatttttgttcacyctcaaaaccatacaaggaccgtttggaccaaaacctattgtgttttcatgtgctgctccctcaaccgtggctcctggctgtctcactttgaccgagagaaataggatttatgcttcaagaatagcatgggcacacgactgcacctttcaattacttcacgcatgacagcctaccagcacagggaaggcacaagtacagccttctcaaaccctgcacgtttctgaaaaaggcagacactctgctgtgagagacatattttctttggacaggccctggagacctctgagcacagtgagcaga

SEQ ID NO: 88353 - DNA, 600 bp, Chicken  19866894391185_1
ttcaaactcttgagaatattatataaagagttggaatggttttgatgaaacccatgaaaatctgttgcactctgttcactgatgagagtcaagcagactcagaagcattagctttctattctgtctctggaagactttgaattcaacccacttattgtttaaaagttccagtttgcttgatttagaatatatatatatatacctagccctccacacacatatatacactctttcataacagttgaggggaacaacaacgtcctttcaatctgaggctttgaacgcagtttcacaagtgaraagttcttacctgaagaatgaacaagtattaacataaaagaaaggaagagtacaaaggagagaaaaagaaaagaaaaactaaccttgtcatgataactgagaggggaattcaatccattccatcctaattgtcatcatgaaacaaattctgattttggattactaagtacagaagacagaagtaattagatttggaaaaactgtcatattaatactaatctgttatagacttcacagtgaactggcacgtggccccgtgtattttgtcactttgtaacagaacttaaaggcttcacttaa

SEQ ID NO: 88354 - DNA, 600 bp, Chicken  19866894391193_1
aagaatgtggagtcagcaggaatcaggaatgaagaaccaaggaggtttctggggtagtagcatgggaaagagtgtgcaggtactagaggtgatatgacatattgcttagatattctatgtcctattagcgttgccaccttatagaggaactaccagaacggcctccctctccggcactcttccatctctgtggcactggctctagtttcaatgcctccagcatgggaaaccaggcttcctgcctccctttactcaaaaatattaccagccgtctcttaatgtcttgctcagctgctgcaraaaaaagcataacctctgttactgctcatcagctgcttcataggaaccattcatgtacatgctttgaatctcacttgtcattgcagtgagtgcaaattatgtcaagtaaaattacttacctttagagagcagacagagctctagacagacagtggggcaagaaatagaaggatggtatcacctttgagagcactgtaattacatgcattcaacaagcatggccttttcccagagctgtctctggtaatgtctgtgctctgttcagggagtcagtaaggagtggacaagatctcttgctcc

SEQ ID NO: 88355 - DNA, 600 bp, Chicken  19866894391196_1
tgagagtccataagatgcttggcttttcacctgccactccatctcatttttactgatctcaaagaccaggttgacatcttcgtagtatctgtctgtcagcacctgcaggctcctcaggttccccgtgaccagggcttggtagtacttctctgcaggagatgtcagtggatgctcagaatccagtttgagagaaatctgcagcctttctgtcactggtcctggtaagttgtccatgccagtgcttcccctgcagccgggagggcagaggggcttttataggtcattgtttccattgtcccrtcctcattgtctaattataatccagttaaggctctattgttgttgtatttataactccagaggggttggatgataatggatacccgatacaaagagggtcaggtggtcactgggctgtgcgtgttagcacctctctgattcaatggctgttctaattgcaggcrgcagattgattggaacacccttgttttaggctgggaaacgtaaccagctcccatctgtccaaccccctacaagcrttygtgrgctctgtataagggagtacccaaatgagaaagcatttttctctacagccctttt

SEQ ID NO: 88356 - DNA, 600 bp, Chicken  19866894391196_2
gtggatgctcagaatccagtttgagagaaatctgcagcctttctgtcactggtcctggtaagttgtccatgccagtgcttcccctgcagccgggagggcagaggggcttttataggtcattgtttccattgtcccrtcctcattgtctaattataatccagttaaggctctattgttgttgtatttataactccagaggggttggatgataatggatacccgatacaaagagggtcaggtggtcactgggctgtgcgtgttagcacctctctgattcaatggctgttctaattgcaggcrgcagattgattggaacacccttgttttaggctgggaaacgtaaccagctcccatctgtccaaccccctacaagcrttygtgrgctctgtataagggagtacccaaatgagaaagcatttttctctacagcccttttccatacctgttggcaacctcaccacaaccgcacgggagagatccatgcattccatcaggggacagcactgtgaagctggcgtgtcagcaagtcttctcaaggatgcaaaagcacttggcaaagcccagtgaggtaaaaaccttccagagcctttggcaggggga

SEQ ID NO: 88357 - DNA, 543 bp, Chicken  19866894391196_3
tgcttcccctgcagccgggagggcagaggggcttttataggtcattgtttccattgtcccrtcctcattgtctaattataatccagttaaggctctattgttgttgtatttataactccagaggggttggatgataatggatacccgatacaaagagggtcaggtggtcactgggctgtgcgtgttagcacctctctgattcaatggctgttctaattgcaggcrgcagattgattggaacacccttgttttaggctgggaaacgtaaccagctcccatctgtccaaccccctacaagcrttygtgrgctctgtataagggagtacccaaatgagaaagcatttttctctacagcccttttccatacctgttggcaacctcaccacaaccgcacgggagagatccatgcattccatcaggggacagcactgtgaagctggcgtgtcagcaagtcttctcaaggatgcaaaagcacttggcaaagcccagtgaggtaaaaaccttccagagcctttggcagggggaactgcttctcctgcaatg

SEQ ID NO: 88358 - DNA, 540 bp, Chicken  19866894391196_4
ttcccctgcagccgggagggcagaggggcttttataggtcattgtttccattgtcccrtcctcattgtctaattataatccagttaaggctctattgttgttgtatttataactccagaggggttggatgataatggatacccgatacaaagagggtcaggtggtcactgggctgtgcgtgttagcacctctctgattcaatggctgttctaattgcaggcrgcagattgattggaacacccttgttttaggctgggaaacgtaaccagctcccatctgtccaaccccctacaagcrttygtgrgctctgtataagggagtacccaaatgagaaagcatttttctctacagcccttttccatacctgttggcaacctcaccacaaccgcacgggagagatccatgcattccatcaggggacagcactgtgaagctggcgtgtcagcaagtcttctcaaggatgcaaaagcacttggcaaagcccagtgaggtaaaaaccttccagagcctttggcagggggaactgcttctcctgcaatg

SEQ ID NO: 88359 - DNA, 536 bp, Chicken  19866894391196_5
cctgcagccgggagggcagaggggcttttataggtcattgtttccattgtcccrtcctcattgtctaattataatccagttaaggctctattgttgttgtatttataactccagaggggttggatgataatggatacccgatacaaagagggtcaggtggtcactgggctgtgcgtgttagcacctctctgattcaatggctgttctaattgcaggcrgcagattgattggaacacccttgttttaggctgggaaacgtaaccagctcccatctgtccaaccccctacaagcrttygtgrgctctgtataagggagtacccaaatgagaaagcatttttctctacagcccttttccatacctgttggcaacctcaccacaaccgcacgggagagatccatgcattccatcaggggacagcactgtgaagctggcgtgtcagcaagtcttctcaaggatgcaaaagcacttggcaaagcccagtgaggtaaaaaccttccagagcctttggcagggggaactgcttctcctgcaatg

SEQ ID NO: 88360 - DNA, 600 bp, Chicken  19866894391201_1
ctccatgccgttccctcgggccctgtcgctgtcacacagagcaaagcagtgctgggcctggtgcctcctggggtacagttggcccttttggctccagggcacactgcgggctcaggtagaacttgcctgagatgagttcttctatctctgccccccagtctgtacatagatctggggttacaccttcccacatgcagaatactgcacttgttgctattaaactccacgcaataaacttcatacacccccgctcttcaccccattactctgcaaggtgggagcgcacctccagcaagctcrtttgctcatcctactaagaggtcagcaagataaacatctcctcagccctgcccagcaccttttgtgctgcagaggcttccccgcctccctcatcgtgtctcacactgcagacacataaatagagggccagygtgccgccggccgctagggcacttcttggggtcccacaacacctcacactccagcagccatctcgtccagccatactgcaggtaccagggggttgggcagggggccggggggcctcaccttccagacctgcaagggtctggggagagtggcactggggtgaatgggagg

SEQ ID NO: 88361 - DNA, 600 bp, Chicken  19866894391201_2
atgagttcttctatctctgccccccagtctgtacatagatctggggttacaccttcccacatgcagaatactgcacttgttgctattaaactccacgcaataaacttcatacacccccgctcttcaccccattactctgcaaggtgggagcgcacctccagcaagctcrtttgctcatcctactaagaggtcagcaagataaacatctcctcagccctgcccagcaccttttgtgctgcagaggcttccccgcctccctcatcgtgtctcacactgcagacacataaatagagggccagygtgccgccggccgctagggcacttcttggggtcccacaacacctcacactccagcagccatctcgtccagccatactgcaggtaccagggggttgggcagggggccggggggcctcaccttccagacctgcaagggtctggggagagtggcactggggtgaatgggaggctgtttcctctgcagctgggaaatgggaaacgtggtgttttgggttggctggtgtgggttctgttgagcaaattgagtctagtagaatcagaagtcatagaatcacagaatttctcaagttggaagggccc

SEQ ID NO: 88362 - DNA, 600 bp, Chicken  19866894391203_1
ccctgtcagcagtgataaaaggtaatcatttatgcctcacagtgcagaggagggcagaaactggtaggaccagttttatagcatcagttctctgaaggaacgtaggaaaatgcacaacccatttgatgtagcattctggaaagggatacttccactcataactataccgactgatggtgaaagtagatctgctgtatttacaggcttccatttgactttgctcaaatctccaggctaaaaaaactaagggtaaatgaagaatgaaaaaaaaaaaatgcaagattatcactttgctgaagrataaattcaacgggggtaaaagacagatgtaacagtcgcacaaatgcaaaacagacattaccatttcaaatcataaggcaacttagattattgtactatagcgcaatacatctcatcaagccagcaagaatacaattagtacagctgcaaactgaagaagctgccactttgcaagctttgtcatcgtggtctcttacagcagacagaaccaccaaccagcaaactgtattctctttgttaatgtaagaaccactttcagttactaagagatgtctttaacactactcccctcctttcccc

SEQ ID NO: 88363 - DNA, 599 bp, Chicken  19866894393188_1
  misc_feature (1)..(36): n is any nucleotide
nnnnnnnnnnnnnnnnnnnnnnnnnnnnnnnnnnnntttgctgttgccgtggcttgctcttctgtgctttaggcactgtccagcagcctttcctgatggattcccaggaacgctgtggatctggggggccccaggcactcacgccccatccagaagccaggcgtagccatgttgaagaggctggttagcctacgagacccgagtgactcaccacccaccagaactgtgctgcaccttacttccctggtgtcggttgtgctcctgcccaggttcctgatccagagaagctctggcatcccrtattactgtgaggaactgctggcgctccctgcgttgcaacaacatgctcttgttgcacaccgggaggccgaaggaaggagaggacagctggcagagcctgattggtaagcacccttgttgccratcagctgttggctgtggtgcatcctctcccgcacagccgcaccttgctgctcccttggcaaaacacyrgctcagctccttgttcatgctccccgtgctcttcctgtcttctgcagccaaggcatcacccgctgtcacagctgcctcaagcccgggtaccgggagtgacggcgaaa

SEQ ID NO: 88364 - DNA, 600 bp, Chicken  19866894393188_2
gggggccccaggcactcacgccccatccagaagccaggcgtagccatgttgaagaggctggttagcctacgagacccgagtgactcaccacccaccagaactgtgctgcaccttacttccctggtgtcggttgtgctcctgcccaggttcctgatccagagaagctctggcatcccrtattactgtgaggaactgctggcgctccctgcgttgcaacaacatgctcttgttgcacaccgggaggccgaaggaaggagaggacagctggcagagcctgattggtaagcacccttgttgccratcagctgttggctgtggtgcatcctctcccgcacagccgcaccttgctgctcccttggcaaaacacyrgctcagctccttgttcatgctccccgtgctcttcctgtcttctgcagccaaggcatcacccgctgtcacagctgcctcaagcccgggtaccgggagtgacggcgaaaggatgtgtgccatcagaccagacgtgagcctggagacctccatgctgccgtttgccttgaaaggtgaggagctgagcagcgctcgtccagtttgtggctgtgccccagcttcgtttcctggggt

SEQ ID NO: 88365 - DNA, 600 bp, Chicken  19866894393188_3
acgagacccgagtgactcaccacccaccagaactgtgctgcaccttacttccctggtgtcggttgtgctcctgcccaggttcctgatccagagaagctctggcatcccrtattactgtgaggaactgctggcgctccctgcgttgcaacaacatgctcttgttgcacaccgggaggccgaaggaaggagaggacagctggcagagcctgattggtaagcacccttgttgccratcagctgttggctgtggtgcatcctctcccgcacagccgcaccttgctgctcccttggcaaaacacyrgctcagctccttgttcatgctccccgtgctcttcctgtcttctgcagccaaggcatcacccgctgtcacagctgcctcaagcccgggtaccgggagtgacggcgaaaggatgtgtgccatcagaccagacgtgagcctggagacctccatgctgccgtttgccttgaaaggtgaggagctgagcagcgctcgtccagtttgtggctgtgccccagcttcgtttcctggggtgcaggtgagagagaggctgagcacctgcgtgctgcagagtcaccccctcagcctcggggctcagccag

SEQ ID NO: 88366 - DNA, 600 bp, Chicken  19866894393188_4
cgagacccgagtgactcaccacccaccagaactgtgctgcaccttacttccctggtgtcggttgtgctcctgcccaggttcctgatccagagaagctctggcatcccrtattactgtgaggaactgctggcgctccctgcgttgcaacaacatgctcttgttgcacaccgggaggccgaaggaaggagaggacagctggcagagcctgattggtaagcacccttgttgccratcagctgttggctgtggtgcatcctctcccgcacagccgcaccttgctgctcccttggcaaaacacyrgctcagctccttgttcatgctccccgtgctcttcctgtcttctgcagccaaggcatcacccgctgtcacagctgcctcaagcccgggtaccgggagtgacggcgaaaggatgtgtgccatcagaccagacgtgagcctggagacctccatgctgccgtttgccttgaaaggtgaggagctgagcagcgctcgtccagtttgtggctgtgccccagcttcgtttcctggggtgcaggtgagagagaggctgagcacctgcgtgctgcagagtcaccccctcagcctcggggctcagccagg

SEQ ID NO: 88367 - DNA, 600 bp, Chicken  19866894393202_1
gggcttgtcttccctgtaaactgcactgtcccatcattttggtagaccattttccctctcccctcctctgtcacacctctctggatcctctgctgctgctctgtctgtgataaaccattttccaggctgcctgacagcacttgttgctctccatgtaggctcccctccctcccagctgtgaggtttccatttccccagcagtgtggctgcttgctctgcccaaggtcagcacgaggcccggctgccggcagctcttgctcgcccctttcacagcttgcttcaccctcagccacacactgytcctcagagtaatagctgccgacggtaaagccacacagcaaatgcaaggtacacatatatctcattcattcttttgactttccacacagggagcctcagctggagaatgggggagaagcgaggggctttccggcatcaatctgtatctagacctggcccaatgtcctgacccaaataaactgcttctgctaacggggtcctctccctgcactgagcaggtgggtgctcccattcctgctcctgctaccagcctttaccagtgcaggcttccrcaatagtaaaaagaagcagatgctcctc

SEQ ID NO: 88368 - DNA, 600 bp, Chicken  19866894393202_2
gcttgcttcaccctcagccacacactgytcctcagagtaatagctgccgacggtaaagccacacagcaaatgcaaggtacacatatatctcattcattcttttgactttccacacagggagcctcagctggagaatgggggagaagcgaggggctttccggcatcaatctgtatctagacctggcccaatgtcctgacccaaataaactgcttctgctaacggggtcctctccctgcactgagcaggtgggtgctcccattcctgctcctgctaccagcctttaccagtgcaggcttccrcaatagtaaaaagaagcagatgctcctccaaactgaaggaaaaaaaaacaggaagcaaaatgaagctgcccagagaagcaggcrgatacatcctccccaggcagcagccaccccccagagctccccatccacttctttgtgggagcaccgtgcaccggacagcctgtcrccccacagccttcccaagctgccctatttctgcctccagtgaagggccgcagctcaagccgtgtgcccctctgtgccccactcacctgggctgccaaggtgcaggatccgtgctgggtgctgcgggatgct

SEQ ID NO: 88369 - DNA, 600 bp, Chicken  19866894393202_3
tagctgccgacggtaaagccacacagcaaatgcaaggtacacatatatctcattcattcttttgactttccacacagggagcctcagctggagaatgggggagaagcgaggggctttccggcatcaatctgtatctagacctggcccaatgtcctgacccaaataaactgcttctgctaacggggtcctctccctgcactgagcaggtgggtgctcccattcctgctcctgctaccagcctttaccagtgcaggcttccrcaatagtaaaaagaagcagatgctcctccaaactgaaggraaaaaaaacaggaagcaaaatgaagctgcccagagaagcaggcrgatacatcctccccaggcagcagccaccccccagagctccccatccacttctttgtgggagcaccgtgcaccggacagcctgtcrccccacagccttcccaagctgccctatttctgcctccagtgaagggccgcagctcaagccgtgtgcccctctgtgccccactcacctgggctgccaaggtgcaggatccgtgctgggtgctgcgggatgctggagaagccacccggcaagtcctcctgctacgcccatgtc

SEQ ID NO: 88370 - DNA, 600 bp, Chicken  19866894393202_4
atatctcattcattcttttgactttccacacagggagcctcagctggagaatgggggagaagcgaggggctttccggcatcaatctgtatctagacctggcccaatgtcctgacccaaataaactgcttctgctaacggggtcctctccctgcactgagcaggtgggtgctcccattcctgctcctgctaccagcctttaccagtgcaggcttccrcaatagtaaaaagaagcagatgctcctccaaactgaaggaaaaaaaaacaggaagcaaaatgaagctgcccagagaagcaggcrgatacatcctccccaggcagcagccaccccccagagctccccatccacttctttgtgggagcaccgtgcaccggacagcctgtcrccccacagccttcccaagctgccctatttctgcctccagtgaagggccgcagctcaagccgtgtgcccctctgtgccccactcacctgggctgccaaggtgcaggatccgtgctgggtgctgcgggatgctggagaagccacccggcaagtcctcctgctacgcccatgtcctataaagagggagtggggtggctggaggcagccaaccggctgg

SEQ ID NO: 88371 - DNA, 521 bp, Chicken  19866894393202_5
tgtatctagacctggcccaatgtcctgacccaaataaactgcttctgctaacggggtcctctccctgcactgagcaggtgggtgctcccattcctgctcctgctaccagcctttaccagtgcaggcttccrcaatagtaaaaagaagcagatgctcctccaaactgaaggaaaaaaaaacaggaagcaaaatgaagctgcccagagaagcaggcrgatacatcctccccaggcagcagccaccccccagagctccccatccacttctttgtgggagcaccgtgcaccggacagcctgtcrccccacagccttcccaagctgccctatttctgcctccagtgaagggccgcagctcaagccgtgtgcccctctgtgccccactcacctgggctgccaaggtgcaggatccgtgctgggtgctgcgggatgctggagaagccacccggcaagtcctcctgctacgcccatgtcctataaagagggagtggggtggctggaggcagccaaccggctgggaacaa

SEQ ID NO: 88372 - DNA, 599 bp, Chicken  19866894393212_1
  misc_feature (1)..(25): n is any nucleotide
nnnnnnnnnnnnnnnnnnnnnnnnntccagactacaagtaaacagaggagctctccttggcagaggcaaatgcatctaggagttcacctaaattctgatcatgtggagagaaagcattgtcttttcctctctcctctccaccagctttttatatgaaaacaaatctggtaccaaaagcactttgaagctccagaactagcatatgcatcagaacctcctcaggaaagttttgctgtttgttgctaaaagttgggtgaagctctttgcaaaagcactatttaaactctaccaagctgtatygggactattaggtttcatggtcactaactcactcctgtgtctgagtaggcaccytagtactctgctgtttgtgtgcagagctgggcacwtaaacaaagctttaaactatgaaaaaaacatctgactgtggtcttactagaccacggtcttactagaccacagtcagcagaaagaccatcagtagagagatcctctgtcacaaaagattgggaactgggaatttgatctggtgaatgttggtgacattaggctataaaagcctttcccaccatggcatctccactgtccaggaagttctg

SEQ ID NO: 88373 - DNA, 536 bp, Chicken  19866894393212_10
ctcaacagcaatcaaactctaggagggctgagacatcttttgggtgcattggccctaatccaccaataccacaaagcattgccatggcaaattgacacctttggatgtgccttgttcctggtaaacagtaaggcacacagtatgttgcagactgcatgtgctctcagacagatcagtacagtcactgggaaaaaacacttgccaaatccctggatgcagcctgaatattagggtaacaatgaaaggaaagcattgcccacataaaccagtaartatgctttcctctgtgtgtccgctaamagagaggaaaagaaattactgtaaggacaaccacaggttaaaccccataggcacctcaggacatgactgcaccttctgctgttagatgctctctggacaaatacagcctttgccttgtaaagtctgctttactcttgctcacagcctggttagcttcagggtccgccttcgggccacaactccacaatcagcaatttccagtctaggtatcctagtaaacattagggtgcatggag

SEQ ID NO: 88374 - DNA, 600 bp, Chicken  19866894393212_2
ccttggcagaggcaaatgcatctaggagttcacctaaattctgatcatgtggagagaaagcattgtcttttcctctctcctctccaccagctttttatatgaaaacaaatctggtaccaaaagcactttgaagctccagaactagcatatgcatcagaacctcctcaggaaagttttgctgtttgttgctaaaagttgggtgaagctctttgcaaaagcactatttaaactctaccaagctgtatygggactattaggtttcatggtcactaactcactcctgtgtctgagtaggcaccytagtactctgctgtttgtgtgcagagctgggcacwtaaacaaagctttaaactatgaaaaaaacatctgactgtggtcttactagaccacggtcttactagaccacagtcagcagaaagaccatcagtagagagatcctctgtcacaaaagattgggaactgggaatttgatctggtgaatgttggtgacattaggctataaaagcctttcccaccatggcatctccactgtccaggaagttctggagctgacaygtgtgtcccacctttgataccttctgtccaccatgtgtggtagtt

SEQ ID NO: 88375 - DNA, 600 bp, Chicken  19866894393212_3
aaattctgatcatgtggagagaaagcattgtcttttcctctctcctctccaccagctttttatatgaaaacaaatctggtaccaaaagcactttgaagctccagaactagcatatgcatcagaacctcctcaggaaagttttgctgtttgttgctaaaagttgggtgaagctctttgcaaaagcactatttaaactctaccaagctgtatygggactattaggtttcatggtcactaactcactcctgtgtctgagtaggcaccytagtactctgctgtttgtgtgcagagctgggcacwtaaacaaagctttaaactatgaaaaaaacatctgactgtggtcttactagaccacggtcttactagaccacagtcagcagaaagaccatcagtagagagatcctctgtcacaaaagattgggaactgggaatttgatctggtgaatgttggtgacattaggctataaaagcctttcccaccatggcatctccactgtccaggaagttctggagctgacaygtgtgtcccacctttgataccttctgtccaccatgtgtggtagtttccacatttcaccctgcagaattcaggctctgcga
